United States Patent Application Publication US 2004/0214272 A1 - sequence listing, part 7

SEQ ID NO: 26387 - DNA, 880 bp, Zea mays
  Clone ID: MRT4577_124074C.1
gccggacttcacgggacttcctgcttagccggccatgtctagggcgttggagcctctagtcgtcggcaaggtgatcggcgaagtcatcgacaacttcaaccccacggtgaagatgacggtcacctacggctccgacaagcaggtgttcaacggccatgagttctttccgtcggcggttctgtccaagccgcgagtgcaggttcagggcgacgacatgaggtccttcttcacactggtcatgacggacccagatgtgccagggcctagtgatccatacctgagagagcacctccattggatggtcactgacattcctggaacaactgatgcttcttttggaagggagctggtgatgtacgagagccccaaaccctacatcggcttccacaggttcgtcttggtgctgttcaagcagagcagccgccagtcggtgtgcccgccctcgtccagggactacttcaacacccgccgctttgccgccgacaacaatcttggcctcccagtcgccgccgtctacttcaacgcgcagcgggagaccgccgcgcgccgccgctgagcgatcacctgcagcgaccacatgaattcccaaccctacgtactactcccatctcatcatcgcatgcatggcgcagcatgcaagatatgacctatcaatctggctacgtactatgcggcctttgctgtttcctaacaggccatggtcaaataagagcttatgactcgtctttggggctgatttggtaacacagatttgaggggattccgggagaaacaacctttatattcatttgaatagaaaggagtttctctcctatggatctcctccaatctctggtcaccaaacagtctcttagggagagctagctttcctatctatgct

SEQ ID NO: 26388 - DNA, 137 bp, Zea mays
  Clone ID: MRT4577_124075C.1
aagcgcgcacgcgcacattctcaaaacgtttgggcacaagcgccgatggaaccgggggtttctttgaatacccaagtggctctatcaaacctctaatcctacaatcagttgcaaccacaacctcgaacaaccaacca

SEQ ID NO: 26389 - DNA, 981 bp, Zea mays
  Clone ID: MRT4577_124076C.1
cattgggtacctcgaggccggccgggaaaccaagactgctacgacctctcgtatatattatcagaggcacacttcttcagtgttcggcgtgtactcgaagcttagccatgtctagagcgttggaacctctggtcgtcggcaaggtgatcggggaggtcatcgacaacttcaaccccacggtgaagatgacggttacctacggctccaacaagcaggtgttcaacggccatgagttctttccgtctgcggttctgtgcaaaccgcgcgtggaggttcagggcgacgacatgaggtccttcttcacgctggtcatgactgacccagatgtgccagggcctagtgatccatacctgagagagcacatccattggatcgtcaccgacattcctggaacaactgatgcttctttcggaagggagttggtgatgtacgagagcccgaagccgtacatcggcatccacaggttcgtcttcgtgctgttcaagcagagcagccggcagtcggcgcgcccgccctcgtccggcggcagcagggactacttcaacacccgccgctttgccgccgacaacaatcttggcctcccagttgccgcggtctacttcaacgcgcagcgggagactgccgcgcgccgccgctgatcgatcatcaccgtacctacagcctgcaggcggccggctagctgcagcaacgacaaccacatccatcagtcctcgacgctacctgctcccatgcatctccttcctcatcgcgtgcatggcgcatgcaaaacctatcgatctatagctactatatatgtggctttttattactatttcctacagtatgtggctatcgtcgtcgtcaaataagagcttatgacacctttcagcgagagctagagctagctgtcctgtctcgatcgatctgctagtagtctttctgttcttcgttttttcggtcaataatcaattagaagctagcctctctagctgtgcatgaatg

SEQ ID NO: 26390 - DNA, 774 bp, Zea mays
  Clone ID: MRT4577_124077C.1
cccgagctcgaattcgttgctgtcggcagaatatataaagagtgcaggggctccggtataaacatccacaagactcaaagtacaaccgcgagggacggcgggttgattcaaatgtttgtcaaggtctctttagcaatttctctgcggcgaagcgttaccgcacagatctagccgtccgatcccaaacgaagtgccaagattagactacaaaggcaacgaggctatacgtattctgggccctcggattgttaaccagtggtccacaacgatcgataacgcggagaaatcagagccgttcaaccgcagatcgacgccctgagccaattacgtcgaaccggtacgcctgctatgcgatcgtggccctacgattcacatctaacgaccaatgatcatcgtttccttggataaatctcacacactccttcaggatccaacgacggacgcgtcgtcgtcaacctccagtcgttccatggcggagcgagcaccccagacccgtacgctcggctcgccggcgatcctggcaaatgcgccagcccctccgcagccctaagcgcgacacgctaatctagaaaggactgagatgtgagcccgagctcgacaccgcacgacgccgaagtggcaacccgcgtcgttccaatttgtcgcgcccccaactcgaggctacgctgaggaggagcgaagattcgtaggggaaacttaccgagttacgccgcacaagttctaccgaagcgcgccgccgacttcctgggctcgagatgcgactccagtcttccg

SEQ ID NO: 26391 - DNA, 126 bp, Zea mays
  Clone ID: MRT4577_124078C.1
cggacgcgtgggtagacattccgcctagctgtcggcagcgagcacctccgtgacgtccaggcctcggcgtcaacatgcgcctcgacggagctactcagcaaatgcgagatgcgacgcgtctccggc

SEQ ID NO: 26392 - DNA, 394 bp, Zea mays
  unsure (1)..(394): unsure at all n locations
  Clone ID: MRT4577_124079C.1
cgtncgatggagaccaactagcaacatagaaagcacaatagtgtaccaaccaatggcagccaaaatatttgcctccttatgctccttggtctttctgcaagtgctgctacggcgaccattttcccgaaatgctcgcangctcctatagcttcccttcttcccccgtacctctcaccagcggtgtcttcggatgtgaaacccaattttaaccctcaggaccacaggaatacagtgcattaccttatacctgtctcacaatatagctatcatagtccttgtgctatgccaacataggcacactcacactggctcactgtctcttagacaggtctcatacactgtgtgattgttatgaacacacacatacagtctgtctccagatttcatacatgaa

SEQ ID NO: 26393 - DNA, 356 bp, Zea mays
  Clone ID: MRT4577_12407C.1
actggtgacgcgtgggccgccgcgtggtcggaggcatggtctgacgcgtgggcggactcgtggggcactagcagcacacgcattcattgtttgctctccgaactttgtgcaggtcctgaccgctggccgagcagacacttgtccgatgggctacgttccagccgaacgacattgacgcgctggagcagatgtgtcgaccccacgctgcgagggctgtacccgtgcaaatgcatctccggtccacccgattcgccgatgccatcgctctatgcgttcaggtgaagaagtatctgcattacatccagctcgatctcattgaccctattctatacggtagtggcatttatggcgctgct

SEQ ID NO: 26394 - DNA, 822 bp, Zea mays
  Clone ID: MRT4577_124080C.1
ttgggtacctcgaggccggccgggattgatttatcgcatacatttacactctatacattttgatctttaatcgggggggtttttttttctcaattagaattaagttgagagaaagaaaacgaattgcgtacatcaacatggcatcttcaagttcaacggccgaacccgttacaaaagtgcagttggaaggtaaagtcattgctattaccggtgcgaacagaggcatcggcctcggcatagcacacagctgcctcaccaacggcgcctccgcagtctactccctcgacatcggcaccccagacaccgacttcaccacgctcgcctccaaataccccaaccaactcttcgcactaggagccgacgtcacaaacgaagcctcgatccaggcggccatcgacaaggtgcttgcagaagcgggggcgctacacggcatggtatgtaatgcagggcgtacaaagcacaaacccgcactggagtttacaacggaagagattgaccagctgtggggggtgaatttgtatgggagtttttactctgcgaggtgtgcggcgagggcatttattaagcagggggttaaggggagtattgtttttacggcgagtatggcgtcgtatcggccgaataagcgtgttccctcggcaccgtacggtgcgtccaaggcgggcatcaggaatatgacgcatacgcttgctatggagtgggcgcagtataacatcagagtcaactctgtgtcgccgggtctggtcaagacggcgatgacgtactgggttgagcagcagccggattgggagcagcagctcaggtactatggtggtatgccgc

SEQ ID NO: 26395 - DNA, 255 bp, Zea mays
  unsure (1)..(255): unsure at all n locations
  Clone ID: MRT4577_124081C.1
ggaagnaacggcccgaccgcacgcgtccggctctttaaactattacctctatctacttcatattcacataaaaacccactctacaccagcgtggtgttgcacactgtccactgtctattggttctagactgcaaaacacacatacaaacatactactggctttatcaagcaaccactcaaagccacctacctattatagccccatctgtgtatacaaaatcaacccctaactttggagcatctattaataccaaa

SEQ ID NO: 26396 - DNA, 403 bp, Zea mays
  Clone ID: MRT4577_124082C.1
ggacaagtggtggcacgacacggaaagtagcatccccataaggatgaattgttggttcaaatcggataatcaatcaatagggaaaaaggaagggattactgtaagatggaatgctcgcgtcggaattcattcttctcgttacggtagcctaagagcattcaagagctcagttagagcctctcaattgatagaggcatgttcatatgaagcgctacgcatatcttattttaccaaaatagggtggggctggtaattgaagatctgggatctatcagtcaaagtggactactaaaaaaaacttctgttgcaaggtaatttttttttaagtctatttagcttcttcgtagaaaagaaaggatttgctgcttttctagtaacaatattcttatgctatctggctatc

SEQ ID NO: 26397 - DNA, 520 bp, Zea mays
  unsure (1)..(520): unsure at all n locations
  Clone ID: MRT4577_124083C.1
agataaagccacggccagcggcggagcccacgccgcttgtctgttccatgcttgatccatcctccttaatgcccctcactgaccgaccgcaaaccaccgtggcgctatcgccttctcgactgcaggggtgtgtgttacaggccaacaaccccatcaaggccatcaagaagagatccaccgacgatcggcttgaacaacacaggtcggtgaggacactctgctgtgctgaaaacgcctcacctacccactgctgtaaccaaggattgaggaaaaaatcatgggacttgatgagcacataggctggcccatgagcgggatcactgttgatgctcgaacactagacgagcatgctcgtgttaccaactcacactctatgttcccattcagggagccaatgaccgtaaaatctgcacacaagctactctggactaacctctgcgcttcgcgaaggggacgaaaagtcaatgtcacgngcatttgcagtctctgctctagtgctggacatgatgagaatggacct

SEQ ID NO: 26398 - DNA, 195 bp, Zea mays
  Clone ID: MRT4577_124084C.1
cgactcacgactgtcttgcctgccctgcgccatgcggagccgaagaccaaccgaccaacagcggaacgcttaatcaagcaaggatgcacggtccatacccgataataatgctcctcttgatgctctgcacggtcgcagccgtctacaacggcttctattcccaagtacgtcacgccagacggcaccgggtaatct

SEQ ID NO: 26399 - DNA, 1080 bp, Zea mays
  Clone ID: MRT4577_124086C.1
tataaacgctgttgtatattactctacatcggtgttccgtaatgcaggcattacatctgatgttgctgctagtgctcttgttggagcagccaatgtttttggcaccatggttgcatcttctctaatggacaagcaaggaaggaaaagccttctgatgacaagcttttctggaatggtaatgcccttgtgttcaacaaatcatgtgtttattttctctctcaatcagcaaatggagggttcatattcactttttttctcccttgaagggtgcttcaatgctactcctagcattgtccttcacctggaaagctctggcaccttattctggtattcttgctgttgttggcactgttctgtatgtgctgtcttttgctctaggagctggtcctgttcctgccctgcttcttcctgaaatatttgcctccagaataagggccaaggctgttgcattatctctaggcatgcactgggtatccaacttttttattggcctgtacttcttgagtgtcgtcaacaagttcgggatcagcaatgtatatttgggatttgcatcagtgtgcgtccttgcagttctctacatagctgggaatgtggtcgagaccaaggggcgatcacttgaagagattgaacgggaactaagtgtagcagaatgatgtgcttttgctagtcatgctgcggcgccgttttggtgattttgagaatgcaaccaagcacacaaccgagcatccttggacctggagactttctagtttcatgtagcagttaccaatcagattcagaaacaatgaactcgtcaatgtttctggagataagttttcattttttgttctaaaatttcttgtttctcttgtataggagactttgagatagtttcagctctaaagacgtgaatatggagcagctccgctaacgaatctaggattcactagtaaaatgtttagctatacactagctctagatttacgaaacagagatttcccttggaatgacttgttttgctcttgatgttggctgacatatccttcgaagcaatttggagtaaaaatacacaatgaaataaaaaaaaaaaaaaaagcggcc

SEQ ID NO: 26400 - DNA, 709 bp, Zea mays
  unsure (1)..(709): unsure at all n locations
  Clone ID: MRT4577_124087C.1
gccggccggngtccaaatagaggaaaagtaaggattacttttgataaatagatttcgagttttttttttcgttttctgttttttatcgtgtgaaattcgtacaccccatccgctgcttaactatcggatcttgcgaaggcatcgtcctcttcgtcgtcctatcttataatcgcatttcgaaatccccaaacggaggcctcgccactcttccgaacctgaacaatcaccaccgttattaagaagatgatgcgctgcgctgcaacgggcggcgggtgcgtcgcttcgtggagcggcgattggagattgccggcggtcaacccctgcagcgtgcggatgccgacgggcaacgatgggtggtgcgccggcctgaggtcgcgggcggcggatctcgccggcctcgagatggccaacctgcgcggcggcgtcggggggctcttccgcgcgagcccgcgctacgggcgcttgcaagccacggcggcagttgaccctgaagatattccattggagaaggttcaagttaaatcctcaggacatgttctgccatatgttggcgttgcttgtttgggggctattctgtttggttaccatcttggtgtggtcaatggcgcacttgaatatctcgcgaaggatcttgggattgctgaaaatgctgtcttgcaggggtgggtggcctacacatccttgcctggtgcaaccctaggtcctttta

SEQ ID NO: 26401 - DNA, 755 bp, Zea mays
  Clone ID: MRT4577_124088C.1
aagctctggcaccttattctggtactcttgctgttgttggcactgttctgtacgtgctgtcatttgctctaggagcgggccctgttccagcgctacttcttcctgaaatatttgcctcgagaataagggccaaggctgtcgcattatctctaggcatgcactgggtatctaactttttcattggcctgtacttcctgagtgtcgtcagcaagtttgggatcagcaacgtgtatctgggatttgcatcagtatgtgcccttgcagttctgtacatagctgggaatgtggtcgagaccaaggggagatcacttgaagagattgaaagggagttaagtgtagcagaatgatgtacttttgctagtcatgctgtggccgcgttttggttatcgagaatgcaaccaaacgctcaaccgagcatccttggacctggagactctttctagtttcatgtagttttaggaataagcgaacagcaagagtaccaatcttaggtgacttggtgtgtgcaatgagggtctgtgtcagaaataagtgaggcttgttcggttatttccaatccgtattgtttggttatttccaatccgtatggatcgaagtggattgagcgggattgatatgtattttgacttgttatggatttaaaccgactcaatctcatccaatgtacatggattaacatcaaaccgaataagccctgagttggactgtgaatttcagaaataagtgaattgagaaataagtgaattggattgtag

SEQ ID NO: 26402 - DNA, 322 bp, Zea mays
  unsure (1)..(322): unsure at all n locations
  Clone ID: MRT4577_124089C.1
tttatctttattatcacatttcctannacatttcgagaatcttttcaacatgaagagggtcatccttctcttcttttccctctctctgtcatctaccatctcctctccaatccatattcccttcccctactcagatcttcactccttatacctcacttactccttccttactactatgatgttccccttttatctttacccctactcttagttcctctatctaccactcttcctccctcttacatcctcttccctctcctccttttttaccctttctaccgccattttcccttctcttccactacttttactttctcctttc

SEQ ID NO: 26403 - DNA, 301 bp, Zea mays
  unsure (1)..(301): unsure at all n locations
  Clone ID: MRT4577_12408C.1
acccacgcgggcggtctcctactccagagctcttcnccaccggccaccttcaccctcgattattccatccatcgatgtaatgtcatcatggcgagttttaataaactcaacgatgcgctcaattccatgtacaactctgagaaaatctgcaagagacaatccatgatcaggcctacgtacaaagtcatcatcaaattactgactgttatacagagccacgattacattatatatttcgaatacatttatgaccaccgatcgaacaatatcctattcaaactcaaacctaggattaaacaat

SEQ ID NO: 26404 - DNA, 357 bp, Zea mays
  Clone ID: MRT4577_124090C.1
ccttaggggtctttgtaattgttaatggggtttccctctctcccccttttttttttatttttttcttttttttttaaaaacccaccccaataacctgttttttgatccacccatggaaaaacccccctcaacctttcatggtctgggccttacaaccccaaagggaaggcccgaaacttaaatttaccaacggggggatatatatttgcggccacaaaaaaagaggggaaaaaacctaacacccgaaaaaatattgccaggttttttttaaaaaaaaaataaacacccttcacatgtttttgccacccccttttttaaaaaaaaacaaaaccctttggattaaataaaaatcccggc

SEQ ID NO: 26405 - DNA, 1611 bp, Zea mays
  Clone ID: MRT4577_124091C.1
attgggtacctcgaggccggccggagctcttcgtcgtcctatcttataatcgcatttcgaaatccccaaacggaggcctcgccactcttccgaacctgtagtcgcttacccactgccaactcagcgccaaactgtggagattttttttattacctatttctatttatggtggtggtggtggtggtgtgcgatcgcaggaacaatcaccaccgttattaagaagatgatgcgctgcgctgcaacgggcggcgggtgcgtcgcttcgtggagcggcgatcggagattgccggcggtcaacccctgcagcgtgcggatgccgacgggcaacgatgggtggtgcgccggcctgaggtcgcgggcggcggatctcgccggcctcgagatggccaacctgcgcggcggcgtcggggggctcttccgcgcgagcccgcgctacgggcgcttgcaagccacggcggcagttgaccctgaagatattccattggagaaggttcaagttaaatcctcaggacatgttctgccatatgttggcgttgcttgtttgggggctattctgtttggttaccatcttggtgtggtcaatggcgcacttgaatatctcgcgaaggatcttgggattgctgaaaatgctgtcttgcaggggtgggtggttagcacatccttggctggtgcaacactaggttcttttactgggggttctttggcagataaatttgggcggacaagaacattcatcctggatgcagtcccacttgctctaggtgcattcttgagtgcaacagctcaagatatccgcacaatgattattggccgattgcttgctggaaattggtatcggggtctcatctgctcttgtacccctttacatatctgagatctcaccaactgaaattcgtggaacacttggtaccgttaatcaactttttatctgcattggaattcttgcagctgtgatctcagaatcttaggtgacttggtgtgtgcaatgaggggctgtgtcagaaataagtgaattggattgtagaatttcagaaataagtgaattggattgtagaaaaaaaaaaaaaaaaaactgttgggtttgtcaaagcaagttggtgggggggcgggaattgttgcagttgtaagagggtgccagcgttaggagctgggtgctggtcgaacggcacccactggggtagtttcaagaaggtagcaggcctcacaccagctagctggctgattggtagggtcagctcctaaataagcaggtgaatgcagtgcaggcagtgatgggctgtttgattgaagtttgcacacgcctcggaaggctcctcctccatcagaatccagagctccatcaccggccacctgccatggcaggaccctcccgtcgaaggagacatcccgtaatgtacagtcctgacgagaaacagcagcatcccttccgaaagcatcacatcgcccgccaccgcctcctcaaacgtcgttgcctcctcttcgatcgatcgccgcgcttgccgccgcctcctctctgggtcaccgctgccgcttgccgcctcgaccacaacaactgcacaggaaaaaaaacacggggagtacgtatggattgggccgcgacccacgcgtccg

SEQ ID NO: 26406 - DNA, 149 bp, Zea mays
  Clone ID: MRT4577_124092C.1
cggccgcccatcatacggtcacaactcacaacccgacccttcaaacccgaacatcagagctcccctgacctgctgggctcctatcaagggggggagatatctactaccgccagcatccccccttctgcgttccttctcatcaaggctac

SEQ ID NO: 26407 - DNA, 849 bp, Zea mays
  unsure (1)..(849): unsure at all n locations
  Clone ID: MRT4577_124093C.1
gccggccgggccgggacttccagcctctccgcctccgctcctcgcgccgccgccgcgtctcctcctctacagactgtccactgcgctgcgctgctaacgagggcgggagatggagctgtaaggagaggaagagggcgaaatggtgaagcacaacaacgtcatccccaacgggcacttcaagaagcactggcagaactatgtcaagacatggttcaaccagcccgcccgcaagcagaggcgccgcatcgctcgtcaaaagaaggctgtgaagatattcccccgcccgactgctggtcctctacgccccattgttcaatgccagactttaaagtacaacatgaagtcaagggctgggagaggctttacccttgaggagctgaaggctgctggcatcccaaagaagcttgctccaaccattggtatttctgttgatcaccgccgcaagaacaaatcccttgagggactgcaggccaatgtccagaggcttaagacatacaaggccaagctggttatcttcccaaggcgtgcacgcaaggtgaaggctggtgactctactccagaggagcttgccactgctacccaggtccagggtgactacatgccatttactcgtggtgagaaacgttcagttgaggttgtgaaggtcacagatgagatgaagtcatttgctgcctatggcaagctccgccttgagcggatgaacaagaaacatcttggtgcccgccagaagaggcagctgaggcagagaaggagataagaagtgaagcggntgaagatagtaccctggtttgntctattcagncattagtgaatgctactacttaaagngcttgntctatggttttttgc

SEQ ID NO: 26408 - DNA, 530 bp, Zea mays
  unsure (1)..(530): unsure at all n locations
  Clone ID: MRT4577_124094C.1
ttttttttttttttttnnnnnnnntagctgatgaagtttgcaaccacaagtaccaggtatcaaacagttgggcaccaaaactctggtctctattttcagcaccaaaacagaacttagagcacacacttgacagtaaaattccactagtggctgcatcggaataaagatagaaaacaaaaacagggtatacctgcttcacttcttttcatccttctctgcctcagccgccttcttctggcgggcaccaaggtgtttcttgttcatccgctcaagacggagtatagtcgccggcattggccttgcgagcacgccttgggaagataaccagcttggccttgtacgtcttaagcctctggacattggcctgcagtccctcaacagatttgttcttgcagcggtgatccacagaaatgccaatggttggggcaagcttcttcggaatgccggcagacttcagctcctcaagggtaaatcctctcccagccctcgacttcatgttgtacttgagagattggcattgcacaatgggg

SEQ ID NO: 26409 - DNA, 443 bp, Zea mays
  Clone ID: MRT4577_124095C.1
tatttttttttttttttttaaattttattttttttttttttttttttttttttttggggttaaagaattggtttttttttttttttttttttcattttggctttagtactgcggtattaaaaaaaaaaaatgaatatgttaaaggggtttgcgctaaaactttgcaataggggggagggggccgaacagggggacatagagaaaatccgtctcccgcgacgcttgcttatcatattgagaaagagtgtacccgcacgccagcatgaactttccggtgacaccaaacactttgcgtttgaaagagcacagtgaaaccgtgatggggcccccgctcggtcagggtgctcaagttgaactcctcgggggggaacaacagagggagggacaaaaaggagaatgtgcccttctggacgctagagccgaaaaaaactccctggtggggg

SEQ ID NO: 26410 - DNA, 877 bp, Zea mays
  Clone ID: MRT4577_124096C.1
acagcttctccgcctccgctcctcgcgccgccgctgcgtctcctcctctacagactgtccactgcgctgcgctgctaacgagggcgggagatggagctgtcggcagctcgtggattcttgttcccgtggtgtttgtttcgtctcggctgacgccgttgctgttgatgtggcgttgttgatgtgcaggtaaggagaggaagagggcgaaatggtgaagcacaacaacgtcatccccaacgggcacttcaagaagcactggcagaactatgtcaagacatggttcaaccagcccgcccgcaagcagaggcgccgcatcgctcgtcaaaagaaggctgtgaagatattcccccgcccgactgctggtcctctacgccccattgttcaatgccagactttaaagtacaacatgaagtcaagggctgggagaggctttacccttgaggagctgaaggctgctggcatcccaaagaagcttgctccaaccattggtatttctgttgatcaccgccgcaagaacaaatcccttgagggactgcaggccaatgtccagaggcttaagacatacaaggccaagctggttatcttcccaaggcgtgcacgcaaggtgaaggctggtgactctactccagaggagcttgccactgctacccaggtccagggtgactacatgccatttactcgtggtgagaaacgttcagttgaggttgtgaaggtcacagatgagatgaagtcatttgctgcctatggcaagctccgccttgagcggatgaacaagaaacatcttggtgcccgccagaagaaggcagctgaggcagagaaggaagatagaaagtgaagcggttgaagatagtaccctggttttgtctattcagtcatt

SEQ ID NO: 26411 - DNA, 1209 bp, Zea mays
  Clone ID: MRT4577_124097C.1
ccggccgggagggttcgcggatcccccacgacacctataagcaccaaccctagcccaaaaccccgcttccacttcacagcctctccgcctccgctcctcgcgccgccgccgcgtctcctcctgtacaggtaagaaggagaggaagagggcgaaatggtgaagcacaacaacgtcatccccaacgggcacttcaagaagcactggcagaactatgtcaagacatggttcaaccagcccgcccgcaagcagaggcgccgcatcgctcgtcaaaagaaggctgtgaagatattcccccgcccgactgctggtcctctacgccccattgttcaatgccagactttaaagtacaacatgaagtcaagggctgggagaggctttacccttgaggagctgaaggctgctggcatcccaaagaagcttgctccaaccattggtatttctgttgatcaccgccgcaagaacaaatcccttgagggactgcaggccaatgtccagaggcttaagacatacaaggccaagctggttatcttcccaaggcgtgcacacaaggttaaggctggtgactctactccagaggagcttgccaccgctacccaggtccagggtgactacatgccatttactcgtggtgagaaacgttcagttgaggttgtgaaggtcacagatgagatgaagtcatttgctgcctatggcaagctccgccttgagcggatgaacaagaaacatcttggtgcccgccagaagaaggcagctgaggcagagaaggaagataagaagtgaagcggttgaagatagtaccctgttttgttctattcagtcattagtgaatgctactacttaaagtgcttgttctatgttttttttgcggtaatggaaatagagcccagacaaacattttggtgtcctactgtttgatgccttgtacttgtttgcgaactcagctatctaatgggttattggattcttgctcaaaaaaaaaaaaaaaaaaaaaaaaaagtccaggccatcgtcaccgggaagggcccgctcgagaacctcgctgaccacattgccgaccccgtcaacaacaacgcttgggcctacgccaccaacttcgtccccggcaagtgagggaggcgccgccggtgacctttaggtgtccggatgcatgtgagcgcacgctggttttcagtttgtaccatgatgtaaactattgttcaatcgacaagg

SEQ ID NO: 26412 - DNA, 177 bp, Zea mays
  Clone ID: MRT4577_124098C.1
atataaaaagaaccaagcttacatacacatacatgcgggggcggccgctttaaagtatccaagcttacgtcccctttcttgcgacgtattagttcttctttagggccaccaaaacccaatccactgcccgctgtttaacacctgcgggactggaaaaaccctggggttacccaattt

SEQ ID NO: 26413 - DNA, 209 bp, Zea mays
  unsure (1)..(209): unsure at all n locations
  Clone ID: MRT4577_124099C.1
tctctctncttgnnnctcgcactcgcagtgagatcgaagcagaaggcgcagtgaggcgcccagcagcttagcagccgcgcaccgtccgtgcgcgatcagtacatgagccgcgtggcgcgctgcgcctggacctcgctgctggggggggcttcccgcgcctgctcttcgtggcgggccgcggcgcgggacccactctcgcggcgacgcgc

SEQ ID NO: 26414 - DNA, 1552 bp, Zea mays
  Clone ID: MRT4577_12409C.1
cgaccgaacaaacaacatgtatgatttcacaagccgcccgctgaaaccaaagccttttgccctgtcgtcaggggcgaggtttcatcaacctcagtacctcaccctcctctcccggagagcctctcgcctccgctccgctcctctgccctgccctgcccttccccgccacaccaaccaaggcgccaaaaataaacgccgcgccactgcgtggcgagggagcctgtcacattgcttgccgctgcgccctgccgcctcgtcttcgcggaggcctcgtcgcgcgacgatatggagctcgccgaggcgccggcgcccgtgcccgacgaggacgggctggacgaacgcggcgtcgcgctgcacctcccgaggctgctggccggcgtcgtctccggcgccctcactggcctcttcgctctcgctggagctctgaccggggcagtcaccggcgcggtggcgggcagggcttccgacagcggcggcgtcctgcggggagctggactgggggcggtcgccggagctgtcctctccattgaggtccttgaggcttctcgcgcttactggtgctcgtcggaccggctgggctcgcacggcggagcatcgtccatggctgatttcattgagcagcttcttcgtgcccggtttgtgcaagagcaatttactgcttcaggatatgcatcatatcgctggcagctcagcatatcatattttggtcaggatgacctatacgacatctttggggacatttcatctgaagggctctcgcaagagtcactgaagaaactaccacatcatgtggtcagtgaccagacgcgggacttactcggcgaaatcctgtgttgtcctatctgtctacaggtacggtctgagcaagcgcgatcctaccactacagagtaactgtcaaagaaaccttctgccacaattaatacagtatgcactttgttttggttaaaaagtgttacgtacgttcaaataagagagagaaaactatatgctaaaaagtaagtaatcagcaattttctaggctacaactggtttcttcaaaaatggtttccgagcgagatagtagatgagaccatgaatgcaagtccaggcgcacgcaatggttggacaacgagacaatgaatgcatggttggagtgcaatcagagatttccaggacatcgtagccggcgacacagcaaggaggctgcccagttgctcccacactttccaccacccttgcgtggacagatggctcgtggatcgcggatcgtgccccgtctgcaggcaggacgtgtgagatagccagataggtgatcgctgagtttagatggagcaatagctgggtgatgcgaaatgtttgctcctacactaagttcatatatatatatagctactagagagaagatacgtactgtggtgtaaattagcagagaatctgcctgttctgttccactaccagccagcgtaaacggccgtgcgcatcggacttcgtttcttgcacccggttccaacgtgtaatgaaataataacactgctgttgggaagcagtactaaaaatttctaaacaaaaacc

SEQ ID NO: 26415 - DNA, 514 bp, Zea mays
  unsure (1)..(514): unsure at all n locations
  Clone ID: MRT4577_1240C.1
gnctccgcggacgcgtgggccggccggaaagcatgcaggcccagccgtggatacatccaacgaggcgacgcgcttgagaggctttcctgtttggggtcgtgcatgtaattggcagtgtctgatgcctcaaccaccgtgggcagacgtctggataattggaggctagcacccggtctcctgctgctcagtggtgttcatggtgcctaggggctgagctgcaagacatgaagacgacggtgggaaaacgcaaggaaaagaaaaatcttgggcctcctgccggcgtgggcttgtggaatttcccgttctctatttaaggcacttgtgtgttcgacacccttgtgcctcgccaagctaatattctggtctggttagatgatttggctacaacggcatctgcaactatctcttggcagggtttttagtgacgtaggcgctggcagagtgtgaatcattattgttgccatttatgttccatttatgttacagttcgtaaaccaaacagttctctaattgt

SEQ ID NO: 26416 - DNA, 1028 bp, Zea mays
  unsure (1)..(1028): unsure at all n locations
  Clone ID: MRT4577_124100C.1
acgatgggtacctcgnagccggccggagacttcacgccccgccgccgccgccgcgtctcctctgcaggtaagaaggtaaggaagagggcgaaatggtgaagcacaacaacgttatccccaacgggcacttcaagaagcactggcagaactatgtcaagacatggttcaaccagcccgcccgcaagcagaggcgccgcatcgctcgtcaaaagaaggctgtgaagatattcccacgcccaactgctggccctcttcgccccatcgtgcaatgccagaccctcaagtacaacatgaagtcgagggctgggagaggatttacccttgaggagctgaaggctgccggcattccaaagaagcttgccccaaccattggcatttctgtggatcaccgccgcaagaacaaatctctcgagggactgcaggccaatgtccagaggcttaagacgtacaaggccaagctggttatcttcccaaggcgtgctcgcaaggtcaatgccggggactctactccggaggagcttgccacggccacccaggtccagggtgactacatgcctattactcgtggtgagaagcgctcagtcgaggttgtgaaggttactgatgagatgaagtcgtttgcggcctacggcaagctccgtcttgagcggatgaacaagaaacaccttggtgcccgccagaagaaggcggctgaggcagagaaggatgaaaagaagtgaagcaggtataccctgtttttttctttctttctttattccgatgcagccactagtggaattttactgtcaagtgtgtgttctaagttctgtttttggtgttgaaaatagagaccagagttttggtgcccaactgtttgatacctggtacttgtggttgcaaactcatcagctatacccttatctaatggctgcctacccgatggtgcgtagtctcgtaggacaaatatgagccgaatgctcatataaataaatacatataccttcgcaaaaaaaaaaaaaaaaaaaaaaaaaaactcgaggggggggccg

SEQ ID NO: 26417 - DNA, 1210 bp, Zea mays
  Clone ID: MRT4577_124101C.1
ggcaaatgatgatgcaaagtcatgcaccactctgaatgaggggattatcctctctttgggctgacaaacggacttctacccatttttcgtctgagccactccgctggacaccccgctccgcctccactcctcgcgccgctgccgcatctcctctacaggtaagaaggagagaaagagggcgaaatggtgaagcacaacaacgtcatccccaacgggcacttcaagaagcactggcagaactatgtcaagacatggttcaaccagcccgcccgcaagcagaggcgccgcatcgcacgtcaaaagaaggctgtgaagatattcccacgaccaactgctggccctcttcgtcccattgttcaatgccagactctcaagtacaacatgaagtcaagggctgggagaggctttacccttgaggagttgaaggctgcgggcattccaaaaaggcttgctccaaccattggcatttctgtggatcaccgccgcaagaacaaatcccttgaggggctgcaggccaatgtccagaggcttaagacatacaaggccaagctggttatcttcccaaggcgtgctcgcaaggtcaaggctggtgactctactctggaggagcttaccactgctacccaggtacagggtgactacatgccaattactcgcggtgagaagcgctctgtagaggttgtgaaggtcacagatgagatgaaggcgtttgcggcctatggcaagctccgccttgagcggatgaacaagaagcacctcggtgcccgccagaagaaggcagctgaggcagagaaggaagacaagaagtgaagcagccaaactttgtagcctgttttgttctgttcagtcatagcgagatgctacttccatcaagtgcttgttccaagttttttttgggtgctggaaatagagaccagtcaaatattttggtgtcctactgtttgataccttgtatttgtttgcgaactcagctatctaatgggttaatgaattcttggcgacgcacgattctgccttaatgttttgaatttaaaaaaaaaaaaaaaaaaaaaaaaaaaaaaaaaaaaaaaaaacccaaaaaaaaaaaaaaaaaaaaaaaaaaaaaaaaaaaaaaaaaaaaaaaaaaaaaaaagggggggcccgttttaagggatcaaattttacttccccgggcttgcaaagtattaatttttttttggggcccccaaaa

SEQ ID NO: 26418 - DNA, 246 bp, Zea mays
  Clone ID: MRT4577_124102C.1
ttcctctccaaaagtcacctatctaatgtttctatctatctctttattacacatttcataaatacctttcttctatcgatagttcattcctatcccttaagcttttctcccattccatattgcacgattatatcattctctcactcattatccacaaaatcctacaatcatgagatattcccatcccatcttatttgtaattacctttatctatcttcatccccactcgatgctatcttatctcct

SEQ ID NO: 26419 - DNA, 156 bp, Zea mays
  Clone ID: MRT4577_124103C.1
cctatagtgagtcgtattacaggacggagccgagcgtcgagcggcgtgcgctgtatcggctatcactccttccggggcggtgatgacgcgacggacgcgcaaggagatgtcggagtatcagcggaggtgagatgaggcgagtggacggcgcacggg

SEQ ID NO: 26420 - DNA, 292 bp, Zea mays
  Clone ID: MRT4577_124104C.1
gacaaatggctcaaaagactagctaccgatgtctttggacaaccgttgtgttttgtttgaggtgagcgtctgctatgccagggtggtccgtatcaagatggagctgtccaccaaccatgtgcctaagaccgacataaactatcgcgcgatgtgcactgctgataatgtagcatgcaagtctggtaagccggtgaactacaatggctccaccttccaatgtaacatggtcgagatatgcgccaaggcggctgactgactcacggaaacgtgaccagtggctagtccatctacg

SEQ ID NO: 26421 - DNA, 630 bp, Zea mays
  Clone ID: MRT4577_124105C.1
ccggccggcagtctaaatgttacaactagctcttcttggtgaaaaaaaaaaaaaaaaaaaaaaaaaaaaaaaaaaaaaaaaaaaaaaaaaaaaaaaaaaaaaaaaaaaaaaaaaaaaaaaaaaaggctagacatcacacagcgagcgagcgaaagcggggagcccggccaccagcgccggaggccgtcgtcgttttactagccgacgctcgatttgggcataaattgctacccgggtgaaaaattgctaggtacccagctaggtccgggggggggagttaaatcggaggtctgccgttcgaggcggaaggcggcggcaaaaggccggtaggataaaaaacctccactggctggggcggttcctgttcggcccggggccggtctacttttgggggctggccatcctaatggggctaaccaacgcgcagaacttgggcctggggggcgtcggcgtggccccgcccaccggaaagctggcctcctcggcgcccggggtcagcgtaatgaagtactggaacattttccggggcgagggggtgccgaacccggaggccccttattacaaccacaagacgggccacatgatccaggagcaccaaaactgcctaaagtacggccgccccaacctggg

SEQ ID NO: 26422 - DNA, 366 bp, Zea mays
  Clone ID: MRT4577_124106C.1
catacaaataaatataaagaaatgtaacggtataatacaaaaagaagcaacgaaagccaaaccgaaccttgggattcgcaaagctggggtgggcgagcctaaacggcccaaaaaaaagaaagaaaagagctaaggaaaggaacgcatttccctggggggggtgggcaagcgaatcggggggggggggggagcatttcctggggggactcggcgccgtcgaccccccacagcggggaaagaaagcagaactcccaccccacccacaaaggctaatcggcggggggatggggggggccggaccctgcccagccgacgccgaacaaaatgaaaaggggcggccccccccccgcgatggcattccaaaaa

SEQ ID NO: 26423 - DNA, 295 bp, Zea mays
  unsure (1)..(295): unsure at all n locations
  Clone ID: MRT4577_124107C.1
ccgggccgggnaccccacacccccagcgcagcagccctgcctagccgcgcgagctagaggccgaccagaccgaccgacggtcgctcgctcgctcgcaaatccgcaatggcgtccatcatcgtgcaggcggtggtgatcctcctggacgtgatcgccttcggcctgggcgaggagttcgaggaggaagaggcgggggccatggagtcgcagaccgtgggggggatgatcgaggatgactgcgccgacatcggcatacctgttcctaacggtaactgcgagatgctatgcgaggtga

SEQ ID NO: 26424 - DNA, 776 bp, Zea mays
  Clone ID: MRT4577_124108C.1
gcataattgcaggagctgatgagttctcctggccgtcgtttgtgatgggatcaatgtttcttgcgattcttctaattatgaaaaatacaggaaaatccaataaaagattgcattttctaagagtttctggtcctcttacggctgttgtgcttggaacaatttttgtgaaaatctttcatccaccagccatatcagtggttggtgaaataccacagggtcttcccaggttctccattcctcaaggatttgagcatctaatgtcacttgtgccaactgctgtactaatcactggtgttgctattttggaatctgttggtattgctaaagctttggcagcgaagaatgggtatgagttggactctaacaaagagttatttggtctgggaatagcaaatatctgtggttcattcttctctgcatatcctgccacaggctccttttctaggtcagcagtgaatcatgaaagtggggcaaaaactgggttatctggaatcataatgggcataatcattggtggtgctctcttatttatgaccccattatttactgatataccccagtgtgcattggctgcaattgtgatttctgctgttactggcctggtagattatgaagaggccatcttcttgtgggctattgataagaaagatttctttttatgggcaatcacatttatcacaacattagtttttggcattgagattggcgtccctgttggggttgcattctcattggcctttgtgattcatgagtcaacaaatccacatttagctgtc

SEQ ID NO: 26425 - DNA, 510 bp, Zea mays
  Clone ID: MRT4577_124109C.1
accgggacccgaccaggcaccgcaccgcaaaacccgggaccaaccccgcgaaagaaggtgcagtgtacttttagtagtagggcagctcacaccccatggttaacctagcacaagtgcacaagggacaccatggggtgtgagctgccttggctctctccagtgcatttcccttttttcccgcattcaattatctgtaatgttctgttgtgccttgtacgatactgatattgtacagcatcagatatgtgccaaacctaaaaaatctggtcgacgcgctcctcatgctggcgaacgcccagatacttcttagggacctgattgtacatttctatccgttggtggacgcccttatgtcgtgtctgcacgaacttctgaagctgttgaattctcatgacttgttcgagaatgacggcccctcctactccatgttgtgcgttactttgcacgactcgcatctgttcgtggcgaggggccacatggatagcaatcccctgtttttgactccgcacc

SEQ ID NO: 26426 - DNA, 1219 bp, Zea mays
  Clone ID: MRT4577_12410C.1
caaaggaagcttgctgatggacaatttgtggcagtgaagagattaacaaaaggcggtaacaaagaggacagagttagcgatttcttatctgagcttggaataatagcccatgttaaccacccaaacgcagcacagctcctggggtttagcgtggaagggggtctgcacttggttcttcagttctcacctcatggaagccttgcttctgttctacatggtacaaaggagcccctgaagtggaaagtcaggttcaaaattgcacttggaattgctgaagggctgctttatctacatgaaggctgccatcgccgcataattcacagagacatcaaggcatctaatatccttctaactgaagactaccaacctcagatatcagattttgggcttgcaaagtggctccctgacaaattgacccatcatgttgtgtatcccattgaaggcacattcgggtatatggccccagaatacttcatgcatgggatcataaatgagaagaccgatgtgttcgcatatggagttctacttcttgaactagttaccgggcggaaagcggtggactcatccagacagagcctagtgatatgggcaaaaccgctgcttgatgcgaacaacatccaagagctggtggatccttcccttggtaacgagtatgaccctgaagagatggtgtacacactagcagtggcatccttgtgcatccaccacagctcaacctcgaggcctagtatgaaatcggtagtctgtttcttgaagggtgaccgggagtcacttgagctggtgagaaggcctaaaatcgtgaagcccctgatgtttgactcgggcgattcagaagattacacgcgctcgagctacctcagcgatctcaaccggcacaagcagctcgcgctggagcagtgaacatcgaattgagtttgaacagattcactgtaattttgtacatcatttacgctgtacccatgcacactgtgatcctcccaccttccacataggttttaaaaattgtatggattgatgtggggggctcagctatcattcactccatggttgctgatctatgctgtaactttgcccagagtttcagcgcatgttacagccctgtgatcatctgtatcatccggactgtccgattgtaatgtcaggtgatgcagccactagcgaccagtctgctatactgttcgtgaaatggtgattgttaaaaaaaaaaaaaaaaaaaaaa

SEQ ID NO: 26427 - DNA, 382 bp, Zea mays
  unsure (1)..(382): unsure at all n locations
  Clone ID: MRT4577_124110C.1
ctaaatcatgtggagctcaaaaggggatcggttcatccaagaccgtcgatctgccactacgccccggagtggggacttgcaccatccagctattatgttcctttcttccccatcatcggtatcccttgatgactatctcagtggattagagacagtgtaatagcagtaattaatgtcataagtatttgtgagaaagacgtgtgatatatatatttatatagttcttcgctgctatatatataataatatagtttgtgagtgcagactcgtaagattttatgtaatttctattaattatgtgtattaattaaaagtggagagtttgatgtaatatctttgtttcttgtttaatactagcatatagcagtttatagtaaanaaa

SEQ ID NO: 26428 - DNA, 215 bp, Zea mays
  Clone ID: MRT4577_124111C.1
gtgtggggagtacaccatcttacccgttgatctaaaagtccccccacagggtaatacctgggggggggatcccacaaaactagttacaagaaatggatccatagacatttttttttacaggcctgtgcttgtatttgagtgttcatgttccagagggggggggggaactttttttttttcaaaatcggccgcgaaatccctttgaaaccataaaa

SEQ ID NO: 26429 - DNA, 134 bp, Zea mays
  unsure (1)..(134): unsure at all n locations
  Clone ID: MRT4577_124112C.1
ctatagtgagtcatattagccngnggacgccgcaccatgtcgatctggggatcggagcgcgggcgacgggatgccacgcggcggctggcgcgcggcttcgtcgaacccgagggcgttcgggtcggattcggact

SEQ ID NO: 26430 - DNA, 812 bp, Zea mays
  Clone ID: MRT4577_124113C.1
ccggccgggataattgtgccgcaatatcgggataattggtgtagtagtgtagtggtataggagggtatgcgcgagagagaggttgcgagttcgaatctcaccatttacaaaacatataagtttgattcaaaataatagtgaaaaatgatagggcaacgggtaaggtaatagggtagggttggagagttgttcctagaatttaaaaaatgttttaaaaaaaaaaaaacaccccagcgcccatccatctcactctccaattcctaccctatatatacttgcgattatcccccttgtgcttaaccaaccccccttccccctttacaatctcacatcaatcactcgcttctccgattgtctcagtgctttcactcacatttttctttctaaccattacattcgactatactcgcttcaggaaaccatgtctcttcaaattcttgttaccctggcagcgatcgtcgccctcgttgtggctcaggacttaaccgttaacacacccacctctgttcaagaatgtcttcctgttgctctctcgtggaccggtggggtgccgcctgtttacgttagtctgattcccggcgggcagcccggtggcgcgatgatcaaggacttcggtgctcagaatggcaacctgctcacgtggaacgttgaccaacccgctggcacctcccttactgtacaaattcgagactccactggaaagcttaactactctgataagtttactgtgcaggagagcaagagctgcggtgccgatggcaagaccgcttcaactcccggcgggtcgaccgcatcgaacccccccgctgtta

SEQ ID NO: 26431 - DNA, 292 bp, Zea mays
  Clone ID: MRT4577_124114C.1
caattcccaattccaggcacgacgccacgcgtcccataaaaaaaactaaaactaataaaaagttaaaaacaacaaaacaaaaaaaaacagaaacagcataataaaaaaaactcatattaaaaaaaaaacataaacttaccatcaagagatctacaatgagtctcatcatcactgactactgcatgcccctacattacacgataccatcttctcaaacgcatgtaagggtcctcatatctcaaagacattccgatggtgatcatttcatcttataacctgcctttcccgatca

SEQ ID NO: 26432 - DNA, 315 bp, Zea mays
  Clone ID: MRT4577_124115C.1
tcgcttccgccgtgctcggactctgacggcgtcccggtctcaccgcgaccgggcggtgagaggtggaacggtcaccagacattaaccgtgaaggggtggtgtcaaggctgtagctgaatcggccgcgacatacaggctcgagctacttgccgagctcggagctaacctatatgatcatactccaaaggatacatggaggtggggacagggcggttgtcatagattgtcacacgaaggcggagtgctgcgtgtagattttgtagtacgtctcactgatatgcaggttatacgccgagcggaggggtggcctctgca

SEQ ID NO: 26433 - DNA, 597 bp, Zea mays
  Clone ID: MRT4577_124116C.1
ggggaaacagtatcttcatggtggaggagtgctctactatggcgagcctttttcacaacagcaatggtcgctgttgtgcttagggcattgatagacttctgtcaaagtggcaagtgtggtttgtttgggaaaggtggccttataatgtttgatgtgacagcagattatgtcacctaccatttgattgatttacctccagtaatcactttaggggtttttggaggaatactggggagtttgtacaactttttcctggacaaggttctccgtctctacaaccttatcaacgagaaaggaaaagcttacaaactactactcgctgcaacagtcactgtttgtacatcatgttgtctatttggcttgccatggattgctgcttgcaaaccttgtccaactgacactagagaagcttgtccatcaatagtccgttctggtaatttcaagaaattccaatgtgcaacagatgaatacaatgatttggctagcctattcttcaacacaaatgatgacactattagaaacctctacagtgctggcactgatgatgaattccacatttcgtccatccttgtggtctttattgcatcgcattttttg

SEQ ID NO: 26434 - DNA, 168 bp, Zea mays
  Clone ID: MRT4577_124117C.1
tcccacgcatactaccactcgttagcttcaacatccgggtgcatatacgcggtctattatttcttatcaaatcctctatcgacacaatacttcctgactaattaagattagatccgatcagccttttacccctccccattatcctcaagacgtctcagttgcctcatc

SEQ ID NO: 26435 - DNA, 1084 bp, Zea mays
  Clone ID: MRT4577_124118C.1
atgagctgcgcggggcaggccggcgggtggctgctcgactacgcgctggtggaggaggagatccagggctccgagttcatctacatggtcgacgacccggccgtctccagcgtgatactggggtttgatgctcccaggaaagaggacggcgtccaggacaaccccggcgccaagaagaggcaatctttctcttcttccttcctttctgttgaccctcaacataaacggaaaagtgtccacatcacactaagtccaattctgttgcccctgaagtccgtgggcataatttgctgtgctttcctgtttccctttcttctacgcagatcccggccggagtccagcgcgccacccggcaccaaggcttgccgtgagaagctccggcgagacaggctcaacgaaaggttcaacgagctctgtgccatcttggaacccggcaagccacccaaggccgacaaagtcgctatcctaagcgacgctgcccgtctcctgaaccagctgcagggcgaggcccagaagcttaagcaatcgaacgaatcgctccaggagtccatcaagagtcttaaggctgagaagtccgagctgcgagacgagaagacgaggctcaaggctgagaaggagaggttggagcagatgctcaagggcgtcgtcagccacgccgcggtggctgctccggggcccttcgtcccgcaccctgctgcggtcgctccatctttccaccaccacccggcggcgtttgctcaggctggaaagttcgtcccgtaccccagctacccgccgccggctgcgttctggcagtggataccgccgacgtccctcgacacgaccaaggaccccgcacactggccgccggtcgcctagccgacctaccacctcaccgtggcatcattcatcgtgtttgttgttgcccatctgtgtttttgattaaaggtcgctctgtgtcagttgtaagtgctgtgttcatcctcggccccaccaaacccatgcatcaaccagcatggactgcggatcgatgggtgctgttacccccgtcaggctttattctaagttaaatcctaaggaaaaaaatggtgcttcttggtgctgc

SEQ ID NO: 26436 - DNA, 420 bp, Zea mays
  Clone ID: MRT4577_124119C.1
cgacggagctcgagggcttgagaggccgaccggacacggactctatggcatggggctctagggatcctttgactgaaacgagaggctcattcctagatgctctgcgatccgattactatcaaagaccaatagagctatgcgagagtagagataactgaacactatgactaaatgattacacggagagaattgttctttaacctatcatatcgcggagaaagacacgatggataatgagaggaaaccttacttagtattatatgccttgccactcattctacgaaaatcagaaggatcctttccaagggacaggatcttgattgatgaatccgagcactactatctaagacttagaaatcagactttaagctaggaacatctaaggacgatattctcctccttctctatgcctacactcta

SEQ ID NO: 26437 - DNA, 392 bp, Zea mays
  Clone ID: MRT4577_12411C.1
cccacgctttcgtactggtgagggactggggactgactgagggatctattagtgattctattcgaaatatttgctcaagagattcaatgacgaccgcaatgacaaccatcaagaacaaaactaagttcaaatctgaggccgcatagccagtctccatcccactggtggacgtagcgcctgcggaagccattgaggtgcccatgaagatcctcttcaccatcctcttccacaccctcttccactcctacgagtactagtggcagactaacgtgtacactcccatctttcctcacatctctggacgcatcattgaaagtgttatagagagtgtgactgacgtagttactgacgaccatgtccttcactatttcattgctgagtgcactgagtat

SEQ ID NO: 26438 - DNA, 959 bp, Zea mays
  Clone ID: MRT4577_124120C.1
ctccgccgcccgcgaccaaccgggggcacgcccaggctcgtgctcgccccgcgacccgcgaaagactgtgctggttcgctcgctcgctcgcgccgcgccgccgcgtgggggtgccgatgagctgcgcggggcaggccggcgggtggctgctcgactacgcgctggtggaggaggagatccagggctccgagttcatctacatggtcgacgacccggccgtctccaggtgagggagcctctccgccttctcgctggatcctctttggtctttgatgcttgtgcgtggctggtggcttaccggtgagttgttgggtagctgttgattggttgattgatttaattggttcggtttgtgcttgcagcgtgatactggggtttgatgctcccaggaaggaggacggcgtccaggacaaccccggcgccaagaagaggcaatctttctcttcttccttcctttcagttgaccctcaacataaagttaagcttggcgaatttcgcatgcctagtaggagcttgcagagatataatcacgaatgggttgggatgtttcttgtttgtcgctagtattactattaccttaattgttgtgctggagtaatctggcatacaaattacttgattaccagtactccgctctgattgacacgagaggtagaactagtggggttcaggaattggcaaacatgtcaatcccgtcgctgtagaagaaaactcacagatttcaggttgtccagaaaggatgcagtgcttgcggacacgtctagcgaatttgctttctcgtaattaactccactttgagagctactacttgtgcgaattcaatggtcccattaatttcactgtactgtccaaataaagcggaaaagtgtccacatcacactaagtccaattctgttgcccctgaagtccgtgggcataatttgctgtgctttcctgtttccgactagtctagatcgcga

SEQ ID NO: 26439 - DNA, 790 bp, Zea mays
  unsure (1)..(790): unsure at all n locations
  Clone ID: MRT4577_124121C.1
ctcgaggccggccgggccgagaaaagaacacgacgggtcaagagagatgtggactaactaactacggcccattaatgaaactcagcccacctacgtacggttcgtcaggctccactctccagaccccggtcccgttcccacgcggagccgcggacacaccttcctcctcctcccgccgccatggacgtctgctcctccacgatctagcctgtggctattggttagcacgccggcgccggcgccggcgactctaaagggagcgttaacattgtatcccgagattttatgctctaagctttcgagccgcgtcatgggaaggaagcctgacgcggtagccaaatcgtatcattccggtggcggcggcgctgccgcctcctcgccgagggnnagcgaggaaggcgtcgccttctccggtgttcctgggaaccgcgctgtcgttctaaagggtttgtgtccctctttacgggacacgtggtcaccgacgctgactgggcgcggatccgcagtcgatggcgacccaaacagctgctgtgccagagaacagttccactggttacttgttgattgctactagtgggggcctgaatcagcagcgcatagggggtatgattgccttccaatgtctggnntgatttgtttttatcatcccttgtgttacctttatgatgttcagcttgcagataacagatggctgttgtagnttgcctgggattttgaatgccacacttgttgtacctgagttagaccaccactcgttctggaaagacgacagtgacttctctgacatttt

SEQ ID NO: 26440 - DNA, 429 bp, Zea mays
  Clone ID: MRT4577_124122C.1
tcgagcggccgcccgggcaggtgtacaagctctctttctttgttccatttgtccagctaccgtaccaacccctgtggcgttttcgttgtctttccgcccttactactgatttatgatttttgggaatattttcttttcccaagactccctaaaaccaaaactttattaggcccccggacgactctactggtcatcgcccccccatgaccagggggagctgcctggcccttataacccttttggttttaaggagaggctggggaaaggaaatttcccaaattttataaaacaaaattgggggggaaaggccgcggaaaccccccaaggggtggggccggagctgggcaattggaaccctggccgggaccccccccaggggggattttggaaaagtccaataccctggggggggggggggcttttatttaa

SEQ ID NO: 26441 - DNA, 454 bp, Zea mays
  Clone ID: MRT4577_124123C.1
ctacatactttttttttttttcacacatagggcggaatcggggggggaggtaccatttgcaaaacaactcccgcacacaaaaacaacaatactaaatggccatgacaacccacaaggctgcccacgcaagaacaatgagcgatgccaccctcatcgttcctgtacaccacacaagcatgtacctactcacagcaaacaactgggggacccagtagcacggatgctgatccaccaacgttataccggaactcgaggctggcgaacacctgcttggctaaggcctcacgacagttcgtcaaacatgggtatggaacgggccaacgccaaaaacgaacccctgcatgaagtcacacaagatggcaagcatggccagcctgccgtaattcagctccgtgaactggagcacatacatcacattcatggccttgcccaaaccgaccggtttgaagaaggg

SEQ ID NO: 26442 - DNA, 873 bp, Zea mays
  Clone ID: MRT4577_124124C.1
ttgggtacctcgaggccggccgggaggctccccggccgggaccccggtcccgttcccacgcggagccgcggacacaccttcctcctcctcccgtcgccatggacgtctgctcctccacgatctagcctgtggctattggttagcacgccggcgccggcgccggcgaccctaaagggagcgttaacgttgtatcccgagattttatgctctaagctttcgagccgcgtcatgggaaggaagcctgacgcggtagccaaatcgtatcattccggtggcggcggcgctgccgcctcctcgccgagggcagcgaggaaggcgtcgccttctccggtgttcctgggaaccgcgctgttcgttctagggtttgtgtccctctttacgggacacgtggtcaccgacgctgactgggcgcggatccgcagtcgatggcgacccaaacagcatagaaactacgaacctatcgatatttgggaatccaagtattccagcatgtactacggatgcagcgagagaagcgcgagtttcagatctgctgtgccagagaacagttccactggttacttgttgattgctactagtgggggcctgaatcagcagcgcatagggataacagatgctgttgtagatgcctggattttgaatgccacacttgttgtacctgagttagaccaccactcgttctggaaagacgacagtgacttctctgacattttcgacgacgagtggcttatttcccacctatcgaaggatgtactattgtcaaaaggatcccttatgaagtaaagttgtcaatggataaactaccatggactatgcgcgcacctaagaaatcggtgcctgagatttatatcgatgaatatgtgacactactca

SEQ ID NO: 26443 - DNA, 229 bp, Zea mays
  Clone ID: MRT4577_124125C.1
ggggaccagaaaattataatttttggggggttaaccaggaccacacggggccactacatgatcaccagcttgcaacattttattttttatttgcatgcggccagaggcttttattaaaaaaaacttcaaatgtctccaggctttaaaaagaacttggtgtaaaatttggagttcctttttttttacctctaagaattcctttgttccaattttaaaaaggggtttaagg

SEQ ID NO: 26444 - DNA, 360 bp, Zea mays
  Clone ID: MRT4577_124126C.1
ggccgcttttttttttttttttttgggagggggggccgctctgatctgatagaagagggcggcggctgctgaacgaacaccagcagcacatagaatcaagattacaggacgggggcttaggaatacagacctggctagtgggcgatgattgttcggccggcttgggcactcagctaatggcgggggggggagcgacctgctcatcagaacaaggagcaggccatgatgcaagcagactatgccttggtgctttgctccatgtgctaagctgctggagcacgaggcgcgcctgcagcttgggctgggggggcgacctggtgggaagcggcgctgccgccggggtgcgcgggacgctctcga

SEQ ID NO: 26445 - DNA, 673 bp, Zea mays
  unsure (1)..(673): unsure at all n locations
  Clone ID: MRT4577_124127C.1
gtaccccccggaacttccgggttgttacagtcacgtgtcaccatatatcctctttgttcatcgaaccgaatttcacattgtttcaatttaattttgtgtcgtgctctcgaagtcggaactaaaacccaatagtttgtaaatctaagtcagctatgtaaacatatcagtattagactgttatactagtgtgttgcatatctgaactcaaatacctgatttacatattcacttactgtatgtatatagagagaataccttttactggaggtgtgcctttgctgaaggttctcaaattaataagtcttagttgtcttgtggtttgttccagggtaagcaaaaatgatctttgtcacatccatccatataggctaaagaaggcgagtaatacctttgacattaacgcttagccaaggcacatcgtggtacctgaagcgtatggcaaggagacgaaggagggttcaagcgacatgttcgaaatgtttctaagaggcaaaggtagcagcaccctcgataatttctatgtatatgacttgaggacgtaaatgtaatttcatacaaagttgtatgttgtgctatccctataagtagcttgtatagtacccatgcatatggagggagcagnttactgtcgcatatcatattcactctcgnattgcntcgacgtcccgagcta

SEQ ID NO: 26446 - DNA, 400 bp, Zea mays
  unsure (1)..(400): unsure at all n locations
  Clone ID: MRT4577_124128C.1
cttagcaggggtaacaacgcagagtacttttttttttttttttttttttttttttttggggtttttttttttttttttttttttttttttctgttttttttcgtttgattatttagtagtttttgttgtattgttaagttaatagaaactggtattgtataattataattggcggagggggaccgtactagttagggatgactctaccaggagggaggttnatggcaaacaggcgttgatggaaaacagagtatggggacaagctagcgggaggggacccaggctactgatgagggacgcgggtctctggacgactggggccacaacgctggctggacttccaaagagctgtactgctcgggccttgctggcggtgggggaccatttcctgcgggcttgt

SEQ ID NO: 26447 - DNA, 1474 bp, Zea mays
  Clone ID: MRT4577_124129C.1
ccatttttcccccaaactgggttccaacccggattccccaggaaaggccccccctggggttgaatttcgccctggggggggtcggggcgcaaggagaccttaatgttgttccaagttaatgtccccctatatgtctttttcttcttttttaggcccgcccttatttttttcgtttcattttggtccgacgggaaggggccccgccccggaagggggaaatggcctttttttttttttttttttttttttttttttttttttttttttttttttttttttttctcccccccaatgcaaagaatggtgtactatttcctcccatgactgatccgaggaaaaaagtaaataaatctggagaccggtcaggctcgaaggatgtgtgacaagtctgtcaacagccatcagccaggcaaacagaacacgacacccctcagctgagcttagcaaaaccatgcaatcacgagcacaccagtacataatatcagaaaatgttggatacacataatccggaaagcaagcttgggagcaacaacactaggactgactgacgcactccgcaaaagtgacacaatcttgagcgagaacacgagctgtgcttaggccagggcagggaactgagcctggtcttcgatcgctggagcagcagctggtccccgataaccgccgttgtaaccaccacgggaaccccccacggggccctaccacggccacggccactagggttatagtacctttcgccttcagctggcttcaagaactcgttgatgctcagggacttcttgccccgttcttctctttcagcactttctttctttttcaagtccttgtcagagcccagcttgataaacacttcatcgccatcctttttaactgacagttgttgcatggcctgtagctccttgtcaatttcaacttttctctcctcagccttaagggagagtaaagcttttcgtttttcctccagtaccttttcatattcctccaaagtcatctccttatcctcaggttccttttcttcttcttcattctccgcgccctccttgtccttctcaacctcagactgtggtgcatcttcaggtttcttctcatcctccaccacggcagtagtctcctcaggattaacagcatccacagtgtcctgttcaaggccttcatcagttgcagttccccaatttccacgcccagccccttcacgcttcatcccgtagccacggcctgtgccgctgtggcgctcatatgcccggcgaggacgtccaaactcattcccagcctgcccatcgctgtacccaccacgtcgcccacctccacggtaaggctggcggggcccacggcccctctctgcctgcctaccctcaccattttcaccgcgagcaactccaccgtccccaaaaccgccgccgccgccaccataccccccctcaaagccgtgggcatcagcatcgccaaaatctcgcctcgggccagtcctgccacc

SEQ ID NO: 26448 - DNA, 674 bp, Zea mays
  Clone ID: MRT4577_12412C.1
acggacgcgtgggcgagtatgaccctgaagagatggtgtacacactagcagtggcatccttgtgcatccaccacagctcaacctcgaggcctagtatgaaatcggtaggtggatctttcctgctaatcaaagtgcaaatgaggaaattgacccttgagttttttttgttgttgctgcaggtagtctgtttcttgaagggtgaccgggagtcacttgagctggtgagaaggcctaaaatcgtgaagcccctgatgtttgactcgggcgattcagaagattacacgcgctcgagctacctcagcgatctcaaccggcacaagcagctcgcgctggagcagtgaacatcgaattgagtttgaacagattcactgtaattttgtacatcatttacgctgtacccatgcacactgtgatcctcccaccttccacataggttttaaaaattgtatggattgatgtgggggggtcagctatcattcactacatggttgctgatctatgctgtaactttgcccagagtttcagcgcatgttacggccctgcgatcatctgtatcatccggactgtccgattgtaatgtcaggtgatgcagccactagcgaccagtctgctatactgttcgtgaaatggtgattgttagcatggttgtgtcctgatcatttccatggtttcat

SEQ ID NO: 26449 - DNA, 325 bp, Zea mays
  Clone ID: MRT4577_124130C.1
gaaaaaccattgtgtgtcccaccatggggggccaaatattttgcgtttctgatgcgccccgggctttctgcgagagccggttccgcgaccacttttccacaatggtctcaaggtcctatatggttcttttttttcccacacctctctccaccggggtgttttgagtgtgtaaaaccaatttttttaacccccacaatccaacacaggctctcggaaggcgtatttcatctataatacccgtgcttctaacaaccccgtgagccatttcacaagataccccttgtgcgcatgtgggggcacaacacatagaggcaccacctccacc

SEQ ID NO: 26450 - DNA, 773 bp, Zea mays
  Clone ID: MRT4577_124131C.1
tagacagaaactgagcttaaggaaaagaaactgagggttgaggatgccctgaatgctacaaaggcagcagttgaagaaggtattgttgtcggtggtggctgtacccttctgaggctttcatcaaaagttgatgcaattatagaaacccttgagaatgatgaacagaaggttggggctgaaattgtaaggaagtccttgagctatccacttaaattgattgcaaagaatgcaggtgttaatggcagtgtggttactgagaaggttcttgccaatgagaacttcaggtatgggtacaatgcggctacagggaagtacgaggatttgatggctgctggtatcattgatcccaccaaggtcgtgaggtgctgcttggagcatgctgcatcggtggcaaaaaccttcatcacctctgacgccgttgttgttgacattaaagtgcctgagcaagcacctgctcctgcaaacccaatggctggtggctcaggttttggattctaaattgtttggagtttaggttccccttcgttccatcggcagcaggcagcagtgcgcattgcagcgacagaatcttaccttacgatagtctccagatataagtctggatgttattgttgcatcgaattgtgaaaatcaagtgcaagtagccaagacagctgaaaaatatttttgatgagagatgctgcttttttttctcctatattggtgttgaaaatgttgacacggtatcgatcagtcacgcaagtcgcgacaatagcatatctgtactccttttg

SEQ ID NO: 26451 - DNA, 718 bp, Zea mays
  unsure (1)..(718): unsure at all n locations
  Clone ID: MRT4577_124132C.1
ttgggtacctcgaggccggccgggatcatccttaacctattcccttcttctccttcttcccacttgcaatctctttatcataccaacaatctagtttcatttcagtatttcatcttctcctcttctatacttgcttttttccattttccaactaaatggaggaaactttggtgccaaagaggcctagagaagaagcccaagtggaaagaggcttggactttgaagaagattactcctcctcaaagaggcacaagccatacaaccacatcctatcccttcttgattcggaggaagaggactcaacacaagacctctcccctctcatgacaaccctccaacaagaaatcacttgtgcctcgaaaaatacccaagatgcccttttagtgtgcccaactcaagaaaatgaccaaaacaccctcacgatcagtagtttagaggacaataatgcaacaacctcacaagttttgaaggaagaggaagagaatgacaaggagagggtcatgagacacctccttcaagcctctgatgatgaacttgggattccaaatagtggggatgggttatggggttttgaagataatgaatttactagcggngatggattttcttctttgtgtgacaagatgtgggagcttgaagatgagagagctaactactatgatttcttgcaatctgaactcttcctaggggggggggggaatataaatattagacaatt

SEQ ID NO: 26452 - DNA, 2562 bp, Zea mays
  Clone ID: MRT4577_124133C.1
cattgggtacctcgaggccggtaccttaattatcggccgggtattgttatttgctaaaaaaaaaaaaaaaaaaaaaaaaaaaaaaaaaaaaaaaaaaaaaaaaaaaaaaaaaccacgcgtccggggccttctggatgcttcctctcccaaaaggacctgtcgctgtcagccgatcgatcgttgaccgatctctctttccactcctctcttaaaccctagccgctgcgcacaacaacctgctactcaatttgatcaaccgccatccattctcctcctccgttgcagctgcggcatccatccagtagtccgaccaatccatggcttcagcgttcgggaccgcctccacttgcggcattaaacatgcacctgccggcgttgcgcttgctgcgcccatgaagcacctttccctcgtctcgccctcgctggtttcgcttccgcgcaagatgaggccgcgaaggaagtacaacttcagggtaaacgctgcaaaggagctgcatttcaacaaggatggctcggctatcaggaaaatgcaaaatggggtcaacaagcttgcagatctcgtcggggttactcttggaccaaaggggcgaaatgtagtcctcgaaagcaagtatggctcacctaaaattgtcaatgatggtgtcactgtggcaaaggaggttgaacttgaggaccctgttgaaaatattggtgctaaattggtccgccaagctgctgctaaaacaaatgacttggctggtgatgggacaaccacttcggttgtccttgctcaagggatgattactgagggtgtaaaggttgtagctgctggtgctaatccagtgcagatcacccgtggtattgagaaaacagccaaagcactagtcagtgaactccaaaagatgtccaaggaggttgaggacagtgagcttgctgatgttgctgcagttagtgcgggaaataactatgaaattgggaatatgatagctgaggctatgaaaaaggttgggcggcagggagtggtcacacttgaagaaggaaagagtgctgaaaataacctctattctgttgagggaatgcagtttgaccgtggctatatttctccctactttgtgactgacagtgaaaaaatgacagtcgagtatgagaactgcaagcttctccttgtggacaagaaaattaacaatgccagagatcttatcactatcctggaggatgctattagaagtggatatccaattctaatagtggcagaggacattgagcaggaagctcttgcaacccttgtggttaataggcttagaggtgcattgaagattgctgctattaaggcccctggttttggagagcgcaaaagtcaatatcttgatgacattgctactctcactggaggcactgtcatcagagaagaagttggattatccttagacaaggcagacaatgcggtcctaggaactgctgctaaggttgtagttaccaaggattcaacaacaatagtgggagatggcactacacaggaggaagtgaacaaaagggtgacacaaatcaagaaccagattgaggctactgaacaagaatatgagagagaaaaactaaacgagaggatagctaaactctctggtggtgttgctgtcattcaggtaggagcacagacagaaactgagctcaaggaaaagaaattgagggttgaggatgccctgaatgctacaaaggcagcagtcgaggaaggtatcgttgtaggtggtggctgtacccttttgaggcttgcatcaaaagttgatgcaattatagagacccttgagaacgatgaacagaaggttggggctgaaattgtaaggaagtccttgagctatccacttaaattgattgcaaaaaatgcaggcgttaatggcagtgtggttactgagaaggttcttgccaatgagaacttcaggtatgggtacaatgcggctacaggggagtatgaggacttgatggctgctggtatcattgatcccaccaaggttgtgaggtgctgcttggagcatgctgcatcggtggcgaaaaccttcatcacctctgatgccgttgttgttgacgccaaggtggctgagcaagcaccatcatctcctgcaaacccaatggcaatgggtggtggctcaggttttgggttctaaattgttcagctgcccttcgttccatcgcagcgacagaatcttagtttcgagatataataataaattggatgatgttagtttcgagatattagttggatgttgttattgttgtctcaaattataaaaaatcaagtgcaagtaaccaagacagctgaaaaaaatagttttgatgagatgctgcttcgtttttcttttctaccaaaaaaaaaaaaaaaaaaaaaaaaaaaaaaaaaaaaaaaaaaaaaaaaaaaaaaaaaaaaaaaaacaatttgctccgacagacccagcggcctcctaccaacaacacatccttgccggtgccctgttttagatagcttattaacactgatgcaatgttatagttgtttgcatgatgggtgccgcctagcagaaataataagtcacatttgcagactctaatgggttg

SEQ ID NO: 26453 - DNA, 631 bp, Zea mays
  Clone ID: MRT4577_124134C.1
gtcctgtcttcgataaagccccagcaggttacatatgttgtgcctggtatcatgaattttgactattcaaaaatagatgaatttcttgagaaaacgcaaaatcttttgaatgtgcttggatggagctgtctgagaaggataaatcaataacagttgaggaatttgcagagatagtgtatggtaccaaggagtctttggaaagctactgtgcacatctcttgttgtcaagggatgtagtgtattttgtcaaggtagagagcagagattattccatgtaccaacctcgttcacctgctcaggtagaggaactcctacgacggaagcttgctaaagaggccgctgataaggaactggaagaatttgtccatttactcaagtctgccaaagcattgcctatggagtccaagcctcctaaagcgtcatggttggtggaagaaaaagtcaggcaacaaattgagtctcttcaagcatatgcagttgatgcatgtgatgatgaacaaagaagactagcaggaaatattctcaaagctatgggattcacgaggacatcatcagctgctctaaagcttcttataaatgttggatacttccctgtgcatgtcaatctcgaccttttcaggtacgacgtccg

SEQ ID NO: 26454 - DNA, 1020 bp, Zea mays
  Clone ID: MRT4577_124135C.1
ctatatatatctaggggcgcgggggcatagttctatcttggccgggccgggatgccaaatcacacggcagcaggtccttccattgcattgcattattgagtctatatatatctaggggcgccgtgccagagttatatcttgctagctacttcatttattttcttgaccattcgatccatttggaagatgaagaaggcgaccaagtacctaaagcacctcttctccgccatcgtcgcggcggtgaaggccaggtccaccgccgtgggcaccaaggccagctccctgcagatgcgcctcatcgtcctcggcatcatgcggaacaagaagctcctgctcagcgccatccagaaaaagatccacgccatcatcggcgccggcaatggcagcggcaatgcggtggctagccacggcagcggcaacaggatggccgcggtgctgcagagcctgccgagctttgccgtggagcaggagacgagggccctcgtcctgctcagcagcctgccgagcttcgtgctggagcgggacgctgccggcgctggcgccaacgaggacaagcaggacgtggtggaagcaacagcaggcgacaagcatgttgccgtggtggacgacgacgccaccgctcaggcgaaggcggagggggacttcctgctggaggaccagatcgaccacgtggcagacgtgttcatccgccgattccacgagcagatgaggctgcagaagctggagtccttcaagaggttctgcgagatgctggagaggggcgcctaaatcattgacttgcactagcttccaatgtgcatgcttttggtctaataattaatcaagcaagagttcagggaacgtagttagttctcattataataagtgacaagaatcgagtttgtttcatcggttcgtactttcggtgtagggtttaggcatctcgcataccaatttccatgaagttatagctatctctatccttatactcaaaaaaaaaaaaaaaaaaaaaaaaggcgccgttaaggtccagttagtacg

SEQ ID NO: 26455 - DNA, 355 bp, Zea mays
  Clone ID: MRT4577_124136C.1
aaaaaaaaaaaaaaaaaaaaaaaaaaaaaaaaaaaaaaaaaaaaaaaaaaaaaaaaaaaaaaaaaaaaaaaaaaaaaaaagggatgccaactttataggaaccaaaattgcgatcacccaaacaataaaacactaggggggcttcttttctgggggcgctacctggttattacctcgggcgtgtgcccaacttcgtcgctttttgggaaatccccgtatttccccttctttgtccccttgtagcccaccccctttttggcagttcccgtggtttcccaaagttccgggccgttcgcccttccccctttttgcccgccttttttggggattggggggcgccctctcgcgccttttc

SEQ ID NO: 26456 - DNA, 328 bp, Zea mays
  unsure (1)..(328): unsure at all n locations
  Clone ID: MRT4577_124137C.1
cgggaaacggcgcactactcacagaccagtacagacacatacaacgagcccgatcgccagagtacgccgacgttctctgcagagaatgcaccatgctgatggtgcagtgtatgctgctggggactgaccctgaggagacgcctaggcacgaggaacccgacatcggcggctgctttgcgatccgtaagtgctcgtcacagtatcggctgggagttgacctacgtatcccaaggagtagattgtagaccctgatggcgtcttcaccgtgctgcgcaantacagaggggtgcctcggagagccgcagaacatccaagcctcgagtaagat

SEQ ID NO: 26457 - DNA, 1245 bp, Zea mays
  Clone ID: MRT4577_124138C.1
cctcgaggccggccgggccggggcaagtcccgaacaaacctgaagcaactcgaagcgaagccgcgatactgcgagaagcggaagcggggagggcgaggaggagcagcaatggaggcgctgctggagctcgagaagatgcagagggtgctgtccctcatgagttcacgcggcctctcccacaccgactccagctgcggcggcgctgccgctgaccgcttcctcgcccaattcctcctcttcatgttagatgcttcaaatgaagactgtttacatgtagtcccagatgacaacacttcaaaagtgttgggaaagaaagaagaatctctcaatgagacatccttgtctcaaatgattgaaccccttgaagggcttcttcagtgccaaggattaatgacagaccgattgcgaactgaactcaaatcaggcattcagtattggtctctagagaggaagctctgccaagcattactaagaaatgagaagatctcgattgaagatgttatgatggcaatccatctgaaatcatttgactatcgagttcttaacctgttgatgtttcaacttactggtcagcgtgtcaatgaattgcatatggacttcttgtcagtttcagaatttttggttgagatatctgatgacctgtatgattatgaggatgacgttatgaacaatacgttcaatatccttcgcatgtttgctgcaatatatggaccattagaggcaccgaatatgctggccaagtgcataggcgaggctgaagagaaatacgagagcttctccaagaaactggatcctagtctctcaggtagttactgggggagatgtgaggaagcgacgaaggaaggcggaaaaacatcaggccatgcatatggaacatggaatatccctcgtgtgataagcaacgaagatgctttccgacgtgaaagacggagcaaacacgatgcttgtgctgtgatcacttgataggtgaaatgcagaaatgacctgcaaccgttgatgtaaggtgctaggggtctgctcagtgggaactccttgaggatatagtgtccttggcctaccttgggcccctttgatgctcacaaatgtacccattttcaagtcaaattttcacaaatgcagaaatgacatgctgaatttagtttctgtaaggctgtctccatcggataccccatctcatctcttttcaaacttatctgtaaataatgtcaaacagtatagttttttactgagtccaagaaggggccc

SEQ ID NO: 26458 - DNA, 1748 bp, Zea mays
  unsure (1)..(1748): unsure at all n locations
  Clone ID: MRT4577_124139C.1
cctcgaggccggccgggccgggactttgcaagtctcgaacaaaacctgaagcaactcgaagcgaagccgcgatactgcgagaagcggaagcggggagggcgaggaggagcagcaatggaggcgctgctggagctcgagaagatgcagagggtgctgtccctcatgagttcacgcggcctctcccacaccgactccagctgcggcggcgctgccgctgaccgcttcctcgcccaattcctcctcttcatggtgcaaccgtttgattctcttaccctggagaataagttccttttgatctctgagctattaagaaaggctactcctaatactttggaagaagtgcagcatctcacccatctggaagctaataaagatatatgttctggaggttcactccagccaattaagaagtttaagatgcatgccgagaaatcaaccgttcaagctatgccgatggttggttttgatgcgatggcaagagctaagtctacgcttgaagatttttgtaggtcgtactttatgtttcatggtttggatgttaacaagccacaagccattttcaagtatctacctgttctttctttcacagagagttacatatatcagttagatgcttcaaatgaagactgtttacatgtagtcccagatgacaacacttcaaaagtgttgggaaagaaagaagaatctctcaatgagacatccttgtctcaaatgattgaaccccttgaagggcttcttcagtgccaaggattaatgacagaccgattgcgaactgaactcaaatcaggcattcagtattggtctctagagaggaagctctgccaagcattactaagaaatgagaagatctcgattgaagatgttatgatggcaatccatctgaaatcatttgactatcgagttcttaacctgttgatgtttcaacttactggtcagcatgtcaatgaattgcatatggacttcttgtcagtttcagaatttttggttgagatatctgatgacctgtatgattatgaggatgacgttatgaacaatacgttcaatatccttcgcatgtttgctgcaatatatggaccattagaggcaccgaatatgctggccaagtgcataggcgaggctgaagagaaatacgagagcttctccaagaaactggatcctagtctctcaggtagttactggagaagatgtgaggaagcgacgaaggaaggcggaaaaacatcaggccatgcatatggaacatggaatatccctcgtgtgataagcaacgaagatgctttccgacgtgaaagacggagcaaacacgatgcttgtgctgtgatcacttgataggcaaatttcatgttccaggcatcttcaaaattgaatgaagctcggtacactgctaggcagcgtcttacttacctgtatgcacgtttccattcttgccaggtgaaatgcagaaatgacctgcaaccgttgatgtaaggtgctagggtctgctctgtgggaactccttgaggatatagtggtccttggcctaccttgggcaccttggatgctcacaaatgtacccattttcaattcaaattttcacaaatgcagaaatgacatgctgaatttagtttctgtaaggctgtccagcagatccccaatctcatatcttttcaaacttctctgtaaataatgtgtaaataatgtcaaacagtagaatcatctactgttccacatttctctttttacacgttcttttnnaaaaaaaaaaaaaaaaa

SEQ ID NO: 26459 - DNA, 322 bp, Zea mays
  Clone ID: MRT4577_12413C.1
gggccgaggaatgaaacaagattttgttccaactgttgccgttgtttttattggtcagctttaactcggaagtaacccggaccctaactcttacgactacttgcgggttgtactgaaatatacatgctgtactcggaccgttataaaccctggggaatgggggaagggactacttgacccgatactcatgtaatgcggaggagcggtaccctactctggggatactttggagctcttgcggcagaagccaggggcttacttggcccccaccatgtaacttgggtttttggagcactttcccacgggcgaccactgggggcag

SEQ ID NO: 26460 - DNA, 251 bp, Zea mays
  unsure (1)..(251): unsure at all n locations
  Clone ID: MRT4577_124140C.1
ggccgcccttttttttttttttttttctccannaacgaaagaaacacttttgtgtgcaagctgcactgctaaaatagggcagcattaattagtaccaattgtgaacacagataattcacatgattacaaactcaaagtcgtgcggacgtgacgcaaggttatctacatatagcatgttcacggcagctattacctacgagacgggttctctacttgcttttcacgactaacaacataaacagtttataagc

SEQ ID NO: 26461 - DNA, 230 bp, Zea mays
  unsure (1)..(230): unsure at all n locations
  Clone ID: MRT4577_124141C.1
ggggggaacttanaattatgggtgcgtgttttaaaaagatagccccgggggaaagcttatatttttataatctggtcagggtgaaatagcgaataaatttgacaaaattttcaccaggtcattttgaaaaaaaaagtttcttcaaatttttcaaaactaagtcaaatttttccaaatgaagtgcccaaaatgattatttaaagtgggttttttgattttaaaaaactgaa

SEQ ID NO: 26462 - DNA, 588 bp, Zea mays
  Clone ID: MRT4577_124142C.1
cctcgaagccggccgggaaaattttaatccgcagtccgcagacgatgagtgttagcgttgcgcacacaggaagagaagcaatgatagctgtccctctccctcgcgcgacccatacctctcacagataccgtcggtacatgaaacgggaagttacccgcagccagcctcgcattctcggggaaatgcttcttcggagcgtcgctggccgccaccgcggcctccgtatcgccatcgctcccacgaaagacggccacctccaccacctcaatccagggcgtcgcggcgagaaagaagggctacaagatgaacatgcacaaggcgtgccccgaaacgcgtccggctgacgcggaggtcaaaaagcgcgcggaggagtatcggtaacgagtacttgctcgccaacaacaactatcaagctgcaataaccagggtctactgaatatgattgcaaggccacaagagtgactacgagaatgatacagatgcactgccctacctcccagtgaataagaaagcaaactgatagctacgaggtcttcataaaatcattaacgtttcgatccaccaaaatgtaagtttgtgtatcatcca

SEQ ID NO: 26463 - DNA, 377 bp, Zea mays
  Clone ID: MRT4577_124143C.1
atgcgtgccaatgcagttgccgccgtcaccagagcagtccaccttggtctgatatggcgaccggaagtgcaagtgccatcacgtccttctccatgggcgggtcagacagtgctgatgtccgcgatatgaggtcatgcgctcgagctggcgcttgggccgactactatcaaccgcaatcaggcatactggtgagcctaaagagtggcgcctaactggaacaacaagttcttctgaggggcacacagtcctatgccgaggccagttgatgccaagctcaggtcgttggatctcaagtaccagagacctacccgtcgcaagctttacctacacgatcgaggagtctctccttgccggcgctgggtgccagctgagcgtcg

SEQ ID NO: 26464 - DNA, 697 bp, Zea mays
  Clone ID: MRT4577_124144C.1
ctcgaggccggccgggccgggatcacaactcgcactcgtcgaagacagcaatacaccgcagcgagtaatcggaaggagcgctagaagtgacatagaggttagcaccacagcgagcagctgaccgtacgcactcacacttgatggcgatggcgatgtccgagcttcgtcgctcaactcaaggaggtgttgctcgagctcgtctaccgcgtcaccgagctgcctcggctgtgacggagacgagcaggacgtgtcggaggtaatcttgacagcaagcctccatgccgttgagatcaagaagagagaccccatctgaggtagcaagatcagcgattgaggccaattgaatgctaatactggcagactatctgcactagattgcaaccgcttgctgagacgtccagcaattccacagttttttatttgtctgttcccaaaggagtatgctcgtatccaaaaagaacacgtaaagcctgagcatcgaaatagattgagttctcctctgtgagtggaaatggacccggaatttttttactttgcttcgtttacgtatgtttcattaagaatggcgtgaccactttagtgatatctactgaacagacatgctgtatcttgccatcttcaagtaaatagacagtaactgcttgtctatggtgggcctcgagtatatgctcctatgttgtagtgacatgggaatatg

SEQ ID NO: 26465 - DNA, 533 bp, Zea mays
  Clone ID: MRT4577_124145C.1
ctcgagggccgtgccgggaaaaaaaaaaaaaaaaaaaaaaaaaaaaaaaaaaaaaaaaaaaaaaaaaaaaaaaaaaaaaaaaaaaaaaaaaaaaaaaaaaaaaaaaaaaaatcccctgagcagggcccccgtcggttggcgccgaagccgtcgccgtcaacgccaattttaaccggaagccgtttgaagggggtcctttccccgttcccggggccatggactgcccaaagggaaggtcgatggcggacctttacaacgagctgaggttggagattttttcgggcatgcccgtaaaaaacctccgccattccacttacgggggcaaattttggggcaaccttataaccgaccccctaaaggggaaaaagctgccccaaaccctggaagggtttttccacgggggggtgggagggcctcgaagttacggccatttaaccagcctgccggggaggggagggcctccgggcgacccttcctttttttttatcaaggcaatggggcctggggtcgagcgcatggtcctcttggatttt

SEQ ID NO: 26466 - DNA, 158 bp, Zea mays
  Clone ID: MRT4577_124146C.1
ctggaagactgcccctcccgcgcatataggtcgagcgagtggttgatataccggctgagctctgaatgccacagccacctgcttgtatcaatctatgatgttggcagtcttgagaacaccactgtgacttgttaaatctgtatgcttattcccaaaaa

SEQ ID NO: 26467 - DNA, 320 bp, Zea mays
  Clone ID: MRT4577_124147C.1
ggagggactgctctgttgaaaccgaatatgaagccatatgactgggcatctgcttatggtgccaggggcgtgccaaaaaaagatattatagccctcaggtacttggagacaaaatagtgtgagaacgaccacaaaatatccagtgattgctacaaggaaagagatcccttgaaaccaactgtgaggggcgtatgatggatcgtttccatctcccaaatccaatctgacaacatgtactatcttggccctgctcctctgcaagatatgccaatgcaaattgctacagacaatggccgtactgtgtataatagggattacct

SEQ ID NO: 26468 - DNA, 758 bp, Zea mays
  unsure (1)..(758): unsure at all n locations
  Clone ID: MRT4577_124148C.1
cggccgctcgaggcggnctggncaggcaattctctgagggacacgttgagtttcctggggattttaacgtgttcctcccgtctccccttcagcttccaactcgcccgtcatcttcatctccctcatcacgcgaaatccaaacccgaacgaaagaaaatccccaaatcttaagtcttctccgcacctgatcctccccaactcccgcgccgcccgattcgatccggcgccgggccgccgatcccctgcggcggcatggaggcgcccgatcgcctgtacccctcggtcgagccgtacgacctcgagcccccgcaactcgacgacgacgccgccgtgggcaccggcgaggctagggtttgcgacccgccggtgaggtgggacgaggagcccaaggagggaacccacgtatgcgagcaaggggcaaaagataatcctgacagagatgacatggaagaccaccttagtgttgtcaatatttatgagagtgatgacgaaatgaccaccttcaagggatcaggagaaaacatccattctgattgcccacttcgtcaacaaactggcatctgggtacctccttctgttccaccgatgacaaagcatgatcatgaggagtggcaaaagggctttgtctcaaatgctggatacttcatagaagacgaatataagtgggatatggatgaagacattagggagatgacaatgtngggatgtgtttgctgagatggctgttgcaggaaagataaattatatctgttgcatca

SEQ ID NO: 26469 - DNA, 176 bp, Zea mays
  Clone ID: MRT4577_124149C.1
aattcggcacgaggacgatccatatcagaaacgcagaggataatctgacacggacgcgacccgaaggcgacgcaccaccaccagctagaattctaataaggcagggctcgattccccgagcaccttccgacgaatcagcgcgtacgttacaacgccggcgacccccgccggcgacg

SEQ ID NO: 26470 - DNA, 173 bp, Zea mays
  Clone ID: MRT4577_12414C.1
cgccgcctcccttccccgatattttaagcggtgaacaaggggggcagggcctgcccctactatagattcctcattgaacccaacagcatacccgctggctgatgctcaactgacgatgggtatcctcgatatcatccagcaggccgccaactacaaacagcttaagaagggag

SEQ ID NO: 26471 - DNA, 334 bp, Zea mays
  Clone ID: MRT4577_124150C.1
ttttttttttttttttttttttttttttttttttttttttttttttttttttttttttttttgcaaagcaaaatgaccatttcaataggggattttcctttaaccctttccaaatttacaagggcccccttataatgtttgcaaagcaaactgccctgaaaaggccccaagaggggctggaacccattaaagaatttaaaggggcccaaattaactgggttggtaaaacaaaattcgggcccatgtcccggggagaaaaaatgggggaacttcgacccccctcaatggcaaaacgaaaagggccccaatgggccacttatttacagacatacct

SEQ ID NO: 26472 - DNA, 225 bp, Zea mays
  Clone ID: MRT4577_124151C.1
attcggctcgagggttgctgctgcggcttttggctgagctcgggcaataatgcctagactggcaggtgttgtgcctgactatcacggatgactggactaagtgcggactgatgtactgatcgcgcatacaagccaagaagcccttgcgcagggatttatccgtgggaggttgaagctagtaagagatgaaaacgcataaggggcggtctaggactagagagcagc

SEQ ID NO: 26473 - DNA, 525 bp, Zea mays
  Clone ID: MRT4577_124152C.1
acacactctgccactggagttagaaccagcactttattgtagtgtatacacgttctgacctcatcaatatacacatctggaaagtgacaccacgcggagtccgcattagcatctatcattgtctacacagagcagctacagtgacagtacatgaggatggccacacacgacgcaggacagctgcattgtcctcgaaactagcagttatgatcacagaacagtattcaaaattattttcccccagttttagaaatctaaaattttacatgtaaattaaaaatgaagtgccataggggttttagctcatgacttgtcctctccttttccttccctgccaggccgagcagcagggctcctcactcctggggagtggggcttacctctggggctgctggagggaaagctggcactttgcctttgggccacggggcgtccttgggagcgtgtctgtcctcagacgttctgagtatggacccctcaggtgggttctgattccaaaccaggtggccagacgctttgcaccat

SEQ ID NO: 26474 - DNA, 114 bp, Zea mays
  Clone ID: MRT4577_124153C.1
ctcgagccgctcgactgcttcctcgtcccccatggcgacggcgctcaaatcgttcctgaaacgcttcgtcggcacctagaccagccacttctggggtcctgtcgcgaactgggg

SEQ ID NO: 26475 - DNA, 582 bp, Zea mays
  Clone ID: MRT4577_124154C.1
attaaattattcattgtctgttttttcatatttcttggggattatcaacaacggttagctttttttgtcagcactgtccaccttccctataatcaaactggcatacgtacttttcttgtcaaccaatagtgtctgacagggagggaactccaacgccatgtcaccacaatcggcaacaaagtatggagagagggctccgcgtgcaaatagcattccttccaaaaccttcagactgtactaggagcctgttccattttcaataataaccattccttgcctacctactaatatgaaaagtcatcataaatcatatccacaacagcataatcattttccgcactaactgtagccacatgtgcaataacatggtcttgaataacccgctacatcattctgagctcatacaccaaagcagcaacagtcttcttaatgccacttgcttacctgaactgggccgattacatctgcaagaaccttaataccttcatcaatgaggcctcgggcaaggattatagatgtggtacaaccatctactgcaatatcattggtacttgctccagactgacggaccaacttaacttc

SEQ ID NO: 26476 - DNA, 884 bp, Zea mays
  Clone ID: MRT4577_124155C.1
ccctcgaggcctgccgggaccgagcaggacagtgaaccagcatgaagccactggtggcgcgcctgctcctctgctactccctgctctgcctggcgcccgcggcagccccgttacgcctgcagcacgatcatgtccggggccacggccacggccatgcccacccgcctccgtacgcgcgtaacgcgacggcgtacggcgtctcggcggcgctgtgcccgggctgcggcgcgtgggcggacgcgctggagttcctctactaccacaacctggtgcggctggcgtcgctggagccgccgctggcgtggtccccgcgcctggcgtcgtacgcgggctggtgggcggcgcagcgccgcggggactgcgcgctgcgccactccttccccgacggccagttcgcgctcggggagaacgtcttctggggcgggcccggcggcgcgtggcggccccgggacgccgtcgcggactgggccgccgagggcgccgactactcgtacgccgacaacgcgtgcgcgccaggccgggagtgcgcgcactacacccagatcgtgtggcgacgcaccaccgccgtcggctgcgcccgggtggcgtgcgacggcggcggggtgttcatcacctgcaactactacccgcccggcaacgtcgtcggcgagaggccgtactaactagctagcttagcaactcagtaccctcggcctcggggatttattacgtgacgtggcgaacggcctcgtgtagccgtgtcgtgtgtaaataatattcagcggtcgttccggtgaacatgatggtaattcactcgagtttttcactgttggcttccgtaaatcgtgtttggtttgaccagaggcctcagagccacgatcccaataaaatgtggttttaccctt

SEQ ID NO: 26477 - DNA, 2433 bp, Zea mays
  unsure (1)..(2433): unsure at all n locations
  Clone ID: MRT4577_124156C.1
cattgggcgcctcgaggccggccggggttcgccttcctcgcccccatctctttctcgccgtgccactcccacctcttttcgctgataagcacgccgctactccccactccatccatccacccgccgcttttctctcttctttggagaagagccgcacgcagtggttgctgccgctggtccgccagggtcccgggcgctgtgctcattccaccggtcggcggtgcactttcaggcttcttcgacggcgtcgagagtggaggaaatgtcgaccacggagtgcgcggacctcggggaggagttctggctgccggaggactttttggacgacgacttcttctccgaggaggagaaggcggccgtggcggcccggagcgagagcgacgaggaggacagcctggcgggtctctcgcgccgcctcgcgggcctcctcggcgacgggggagagcgcaaggctcccgcggccaaggcggaggtgacggttgggtcgccgcagtcgacgctgtgcgggctgcccaagtcggggcaggagagccccagcggcggggcgtccaagggcacgtcgccgccgtcgtcgcccctggagcagaggcccgccgacccgtgggatctgctctacgaggcggccggacaggttgcgcgcatgcgcgccgccaacagcgtgccggtgcaggccgccaacggtttccacggccagagcgggttcgcgccgccgccacgcaagccctcgccaccgccaatcgcacctcccctccgccaaagtccctgccggtgggcactactacgaccccttcgcgcgcttggtctcgcagcgccagatgcaggctgctcagttccatctcctgaagcaacagcaactgctcaagctacagagggagcggcagcagcttgccgctgccgcggcgtggagcgcgcgccagggcgcatgcgccaagcccgtcggctgcgtccgcggcgacgcgctgcttggtctgaacccggcggcgtgcctcccgcttcagaagccgcagcagcaccaccaccaccaccacgcgccggcggctccggcctctggcatgcgtgccgtgttcctcaccccgtccggccccaagcgcgagcgtaacggcactggcgtgtttcttcccaggccggctggcgccccggcagagccgaagaaaaagacagggtgttcgacggttctggtccctgctcgcgtcgtccaggctctcaacctcaacctcgacgacctcggcgcgcagcctcgttacccaggcggatttgttcttgatcacgaggccttgattagtcggagcaacgccatgcttgcgagccagaagcgccgggctgcctcgcaggcactgtgccacagttcttgagtgaggtcgccgccgactggagcagacgaagggaaccaccaccaccaagattccggcgacagccaagccagccttcgcgtggtcgtcgctccagctacattcctaataattaaaaaaatagttccgagtaccttttgttaggtagtgtgttagcagcagagttaggaagacagtagtagcgttagcatcagtggtaggtctgttcattttggatccggtgatatattggttctttggtggagatggaggagaagcttagaaatccagtttggtggttcggggaacagtaataataaggggttcgagagagagaggtgttagctgatgcaagaatgttgagatttgaaaaaatgttggactagggatttatcgctcatggaggtgataggaaaataacaggtcatttccccaaccatccacgagtggcttttgcttgcgatagataacatgtcatttccccatccatccacgagtggcttttgcttgctttggtggggggctaccagcagccgcagctagagcctctctctcgtccctctgtttgcaacctttttttttacttgcaaaagaagcttgccgtgggctccatgaataagggcgtttgctttgttgtcctagagtatttatcaaaggaattgtttgtgtttcgcctgtaccagtgcttgctagtagtaacagtgtccccctgtttcgctagtagtaatggtgtttattagttaagtggctagttgcttagcacagctgctggttgcaggtttccagtgtcgacagcagcgatataaatttatatatatcttgtgtatgcctctcatggctttgtggtacaataatatatggaatttcactactaaaaaaaaaaaaaaaaaaaaaaaaaaaaaaaaaaaaaaaaaaaaaaaaaaaaaaaaaaaaaaaaaaaaaggaggaaaaaaaanaaaaaaaaaaaaaaaaaaaaaaaaaaaaggggggggcggtttttaagggtcccaagtttacgtccgcgggcttgcgaggtattagtttttttttgggcgcccctaatttaattccacgggccggggtttaccaacggggggccggggaa

SEQ ID NO: 26478 - DNA, 323 bp, Zea mays
  Clone ID: MRT4577_124157C.1
gtacgaagctgatccttagagcggcgcctttttttttttttttgcgaaaaaacatggattcttctttgctcaggcaagtgtttctatatataaataacacagatcgttgtcgtcttctcccataatatatataccacgggtgttattggcccttagtactctacccacgcactcctccatagatagaaacgagcggaaatacttacacattgaaggcaaatgagagagagagagactaccctgatcttttttccttccgaaagtctgtccttgtttacccttcttatttcaccagcgcggtgaagcattttctcgtgcgcgcc

SEQ ID NO: 26479 - DNA, 129 bp, Zea mays
  Clone ID: MRT4577_124158C.1
tcgcagctactagcaaaatagttcagctagtagttgaactattttactactagctgaactactagcaaaatagttcagctagtagtatctgtgaaggcttttgcgctgtaccttttatgctgggtgctg

SEQ ID NO: 26480 - DNA, 896 bp, Zea mays
  Clone ID: MRT4577_124159C.1
ctaaaaacacgttttattttgggacagagcatcaaatatgattgaatgcggttgcaacgctatgggtagtgtgtctactctatatatcatcgagcgagcgagctagtgatccaatctttcttgtatcactaagctagtggccacaactcgttggcaacgaggaagcagcaagccgagaagctacgccgccgccatatatggcacaggctgccggcaccgccgatgccactgatgaggctccactgctgctggcctcgtcggcggcggcggggtcgacgccgtcgccgccagctgcagcaccgcgccggaacaggttcgccttcgtctgcgccacgctcgcctccgtcaccaccatgctacatgggcttacgaccgacccatatacgtgccctgcagacctgacgctgatgagcggcgcggagctgttcatgcgggaggacgtggggctcaccgacggcgaggtcgaggtgctggcggggtccatgaacgtgttcatgctcgcgtccatcctcgccgccggctgggtggccgaccacctgggccgccgccgcaccctcgtgctcgccaacgccttcctcatggccggcgcgctcgccatgtcgctcggcaccagcttcgccgcgctcatggcggcgcgcttcgtcaccagcgtcggctccgggttcgcgcgcgtcgtcgcccccgtctacaacgccgagatatcgcaggcggctacgcgtggcgtcctctcatccatgctcgacatattcatcaacgtcggcatcctgctcagctacgtgtccaactacgcgttcgcgggcctcccggtgcacatcgggtggcgtctcatgtacgccatcggagactggggacggacgcggacgaggagagggcgggggaggaggcggtggtggaag

SEQ ID NO: 26481 - DNA, 1595 bp, Zea mays
  Clone ID: MRT4577_12415C.1
agctcagtcatgactgttgttacgagttcatcccctcgtccctttcctggaaacggatcttaggccgccgtcgctgtcgagtactccacgccgccgagacgtttcgtcgtcgcctagacattccacgccaccaccgagtactccatcttccctctcaggtacgagttcccatcttccgagtactcgtcgccgccgctgttttgcccttttccacgccgtcgctgctgcggcaggtactcccagagctcttcatctccatttccacggctcaggtaatccatggattccatttccacgttggcctctattgcttcgttctcctccacagaaaaggatgcaccgccagaaatggattccccccagaactggatgaccaagctcttgattggccctcgccggaaatggagtccccccaggcgcaatcaaccttatccctctcaacgagatagttgtcgacatcaatggaacatttgtgccttcactgagtgctcccgcgccaaccaacacaggcttctccctcaccattgatgaggtagacaacacttggttggaggcaccaccagcagctgaagcacccccttctctcgttactccccaggaacacggtcacttggtgacaaaacacagtttagattgtctgtctcatctcacgaaaaatgatttcgagggtatttcaccagatctccgatgggaggaagaaggacctcaacatgtaccaagtgagaaagtgatgtacctcaaacttggattagctgctaaggatgaacgcgaaaacaaagtagagaggatgcttgcaattatacaggtcatgcaaatattcgaaatgagttggaagatgatggttcagccgccttagattgtgttgattttatggaggctagtactccgaagaaatacaaagggtattgtcgaggtggcgactgtctatggagcatacatgcaagaattgagagggatggttcaccaaccataatcgtatgtttttatttgttcaccaaccatacagaatacatgcaagaattgagagcttgtatgaaaaaactaactccgaagaaaaagaagggatgtttgtaatttgtccccgcctactactatggatcaggtgtaatgtgtttctgtgtaatgtgtaaatggaactcagtctatggaattcagaatgtgtctgtgtaattggaacttgttttcaaaaagaagggatgtttgtaatttgtccccgcctactactatggatcaggtgtaatgtgtttctgtgtaatgtgtaaatggaactcagtctatggaattcagaatgtgtctgtgtaattggaacttgttttcagttcagtttgaatttcagaatgtgtctgtgtgtaattcggaatgtgtctgtgtgtaattttcagtttagttagggcacttgttttcagtctgaatttctgatgcaacttgttttcagtcagtctgaattcaataagttcagttcagttagtttagtaagtttagtctagtctgaacattctggcattccacacatttgctgacacattttctgtagccaagatgcaattttttcggaatggatttaacatgaactctgaaactgtgttttcagtctg

SEQ ID NO: 26482 - DNA, 313 bp, Zea mays
  Clone ID: MRT4577_124160C.1
agcactgtcctaatacttggaagacatgctgtctccacatgacatgaaacgtctagcggcgtattcaaacaatttactgcattatcatctgatatctggattttggacccatgcttgcacatcattctttttcaagagaggcttgcagtgtcattacatggtgcccaagcagctgatttgttttgagtaagactgcccgacctagacataagcactgggcaggaagaacgcgctatagaaggggaacgagtcctatggaacttaataaggacaatgagaagactgcttagataccttcgtaacattgcttggg

SEQ ID NO: 26483 - DNA, 203 bp, Zea mays
  unsure (1)..(203): unsure at all n locations
  Clone ID: MRT4577_124161C.1
ataataatnatttntttatcgaataacaaacgnnnaannnancnggaaaaggggcaaatttacaaaggacaaagaggccccgacaaaaagcaaaggaaagagagaagagtaaaaggaacccgacggaatcaagagaaaaaagaacgctaacaaaaaaacgaccccctaaaggaacgacgaacccacttcaaaactaacaaaat

SEQ ID NO: 26484 - DNA, 3088 bp, Zea mays
  Clone ID: MRT4577_124162C.1
ggaccctcgaggccggccgggactcaccaaccctctctcttcttctttccttgtactcgcctgtacaatcaggcaggttcgagtgcccatacgtcattcacccctcgggagacttgcctcgccagacacccacaaccaacaccaccatgggcctgttcaacaagcgaaacacgacgcctgtcgctgccgacacaaccactgcgactggctcgcacagggaaaagagaccaagacgccactccaagtctcactcatcgtcgtacaactccaggccaagctttggacaatggctcaaggctacttggctcgacatcctgaccatggccgccatgggtgccattggtctgggtgtctacatggccgacccagcccctagccgcagctttcccatcgtcttccaggatggcgagattgtctacccagagtttgcctaccccctgcgcaacgaaatcatccccagatcagtgagagcttatgcgaagggagacgaggagggcgacaagcagtccctgttcggaagcatcaccgaggcgctggacttctcgcaggtccggtcggagaaggacgccgagctgctgtacgaggccagggagtccaccaaaggtggagggaggatgacgagggagcagtacggagcacttaggcggaagattggtggcacctaccaggatttcttcaagtcatatgttgaagtcgacgggcaaacctggggagaataaaaaaaaaagaaagatgaaaagaaaaattgacttttgaaaccctttatttattatgtgtaacggaaaagagttgcgatttcttcttattcctatgaacgtctagtaacaagaatatgaaatcgtaaatagcgaaacttgccttgcgcgatctaagtctaaggaaatacaaaaatgcgcattggaccctcgaggccggccggggtaagaaccactttcacctgaactcctgaagcaatggccatgagagctctcccgctgaccccttccaggagctcctcgtttggagctcaccaaaccaggccgagcggcggcggccccagatcagtgagagcttatgcgaagggagacgaggagggcgacaagcagtccctcttcggaagcatcaccgaggcgctggacttctcgcaggtccggtcggagaaggacgccgagctgctgtacgaggccagggagtccaccagaggtggagggaggatgacgagggagcagtacggagcacttaggcggaagattggtggcacctaccaggatttcttcaagtcatatgttgaagtcgacgggcaatacgtggaggagggttgggtcgacaagacctgcaagatctgcaagaaggacacaaggggggagccgaggcaggttgacaagctaggaagatacgctcacgttgcgtgcttggataaccccaaacctgcgaactttttcgccaaaatcttcgccagatgagctatgctgcgtccgccgaaagcgttgtctcgctcgctcgtggttagagagtacaatatataggtagtgctgttgcgaagggggacgagatggtgcacaagcagtcccttttcggaagcatcagcgcggcgctggattctcacaggtccggtcggagaaggacgccgagaccgaggaccgcggcacggcgagcacgacaggtgggggggaggacggcgaggcggctgttagtgggcccccggggggggggggggaagaccactttcacctgaactcctgaagcaatggccatgagagctctcccgctgaccccttccaggagctcctcgtttggagctcaccaaaccaggccgagcggcggcggccccagatcagtgagagcttatgcgaagggagacgaggagggcgacaagcagtccctgttcggaagcatcaccgaggcgctggacttctcgcaggtccggtcggagaaggacgccgagctgctgtacgaggccagggagtccaccaaaggtggagggaggatgacgagggagcagtacggagcacttaggcggaagattggtggcacctaccaggatttcttcaagtcatatgttgaagtcgacgggcaatacgtggaggagggttgggtcgacaagacctgcaagatctgcaagaaggacacaaggggggagccgaggcaggttgacaagctaggaagatacgctcacgttgcgtgcctggagaaccccaaaccgacgaactttttcgccaaaatcttcgccagatgaactatgctgcgtccgtcgaaagcgttgtctcgctcgctcgtggttagagagtacaatatataggtagtgttgttgtggcttcaaaggggacaagattgtgcacaattttccaaatggattggtatgtactgatgagcatcagcgcgttccatagttccgactccaaaaaaaaaaaattcaagtcgaccatgaacccacgacccacaaagatcaagaacaaactactgaaaatatttagataaaaaaaaaaaaaaaaaaaaagcgcatccgtagtactctaggaagaagcagatttttcttcttttttttattaacattaagaaaaaagaatataattaaaatggaattggccatataatttttatgcacttttgaaatgaaagaaaaaggaaggatttttgacaatcgttatttcttgcctctgccatatcatgaaaacctttcgatttggaacggggagagatggctgagtggactaaagcggcggattgctaatccgttgtacaatttttttgtaccgagggttcgaatccctctctttccgccccctcggatcatttgggactttcgaattgtaaggaattctgacccccggattttctcataaataaatgtacgaaataaatccaatttaaatttataagaaaaaattccaaaaaatttttgatttttactcctcacgcccaggattacgtcctgggtcattagataagaatccaaagataaagagggaaacaaagaatatcactactgtataaacaaaaagtttgagagtaagcattacataatctccaaaaaattttttttgttaaggaatagattacccatttttccttaccacacggatccactaggatgggttttctttatttt

SEQ ID NO: 26485 - DNA, 362 bp, Zea mays
  Clone ID: MRT4577_124163C.1
ccaaaaaaaaaaagtttcagggggtttcccaaacggggggggggggggggtttttcaatttttttccttggggggggccaggggcccccccggcccgaatttttaggggggccataccccgcaaagctaagggttggtttggcctgaacttttttccttcgcagggggggaaacaaagcccccaacggggggctcgggggttataaaattgaaaaccaacccttaaggcccctccctcccctgggggtgggggtgcgaaacctggtgttgttggtggtgggggcccccttttttgttgtttttcccaacttgaccgaaccgaggggcgcaaacccggggctaagggttttaaactcctgcct

SEQ ID NO: 26486 - DNA, 1506 bp, Zea mays
  Clone ID: MRT4577_124164C.1
agcagtggtaacaacgcagagtacgcggggataggtctctttattgtcactccatattaggtatttctgtctacacttcattcaaatgatagggttgcccctcttgcatgtactctcatacacatacaagattattttacttctttaaattgccaaaaaaatcacaattttgccattgtgattggggctgctttttttttttacccttagccttagtgaaatttaaccggatctgttcatttttgtatttgagtgtttttaatggattagaaaatctttcttttgatgtcttgctaattcaatgtggtataatttcatcgatttttagattttgatcgtatctaagagatcctattttatccgggttgctaactcaatggtagagtaccgcccgcaggtactcggcttttaagtgcggctatgatcttttacacatttggatgaagcaacaaattcgtccagactcttggtagagtctagaagaccacgactgatcctcaaaggtaatgaatggaaaaaatagcatgtcgtaataaaatcaatttcttttttttttttaataaaaaaaattctgattttctgggtctagtgaataaatggatagagcctggctctaattctggtaaaataaaaaaaaagcaacgagcttaacttcttaattggttaattggaaggattccccgatctaattagacgttaaaaatagattagtgcctaatgtggggaaaggttaggttttcctatgaatggaccctttacttttttttagaaatcctaattattcttgattatggattgaaaagagatgttatgaattgaatgtgtaaaagaaacagtatattgatgaagagactgtattccaaagtcaaaagagcgattggcctacaaaaataaaagatttgttcttgtttgttttataattagaacaaacataaactaattagatagaaaaggagtggaaaaagttctatggattagactccctttctttcctgggtttgtattatgcaacaccttgttctgaccatattgcactatgtatcatcatttgataaaccgagaaatgctttttttctctatttcaagtagaaatacaaatggaaaaattcgaagggtattcagaaaaacagaaatctcgtcaacgctacttcgtctacccacttctctttcaggaatatatttatgcatttgctcatgattatggattaaatggttccgaacccgtggaaatttttggttgtaataacaagaaatttagttcactacttgtgaaacgtttaattattcgaatgtatcagcagaatttttttaattaattcggttaattatcctaaccaagatcgattgttggatcaccgtaattatttttattctgagttttattctcagattctatctgaggggtttgcgatcgttgtagaaatcccactctcgctagggcaactatctgtccaaaaaaaaaaaaaaaaaaaaaaaaaaaaagtactctgcgttgttaccactgct

SEQ ID NO: 26487 - DNA, 254 bp, Zea mays
  Clone ID: MRT4577_124165C.1
gaaagcaacaagctatctatcgaatcgttgcaattgaagttcgatctcgaagagaagagaagagatcttcgaaaagtaagtttttatgatccgataaagaatcaaacttgtttaaatgttccagctattctctatttccttgaaaagggccgacgagacgcaaaccctaaccgaggtcctgctccaaccccaccaaaccacctgtcgcctgctccttctggtgaaggggacgacgggatcactgcctccggtgc

SEQ ID NO: 26488 - DNA, 699 bp, Zea mays
  Clone ID: MRT4577_124166C.1
ttcctgccttttacactggactattctgtgccaatacgagatgctgaacgatgaaatagctaggaaggggaagagcaaccgaggaaggaaggcaaagaatgcacctaggagaagcaaaataacgtccatagtttgcccagaatgtcagggtactggaattcacgtcaacggagatgaacttgagaagccaagcatttctttatcagagatgtttcgcttcaagatgaaagcaatcgaagctcacaaagcatggctgaagagacctgaagtgcttgaaaactgttccactgggcttcatttcccctcagaacatgtggagaactctgaggtggaatcagaggcacactgttcgcaatgttctgttaacacaggtataaatccactcacaccagtctccatttccctttgcaggagaaggtgatgccactcaaatcacttcaattctatgccgctgatgggtagagagatcgttgatggcagctactggaggatgctgcagttgttgatgtaaataagctcgcttgacagttgtggaacagtgttgttagatgctcacatacgtgcattatctcagttaacctgtgtccgccagatgataactaagacatttaaactggcaactggctgaactattgtttttagctggattcactaaacatgtacgcagcccatttcgttgggttgggtttgctgcttccc

SEQ ID NO: 26489 - DNA, 5397 bp, Zea mays
  unsure (1)..(5397): unsure at all n locations
  Clone ID: MRT4577_124167C.1
tttttttttttttttttttttttttggacaagatagttgccctagcgagagtgggatttctacaacgatcgcaaacccctcagatagaatctgagaataaaactcagaataaaaataattacggtgatccaacaatcgatcttggttaggataattaaccgaattaattaaaaaaattctgctgatacattcgaataattaaacgtttcacaagtagtgaactaaatttcttgttattacaaccaaaaatttccacgggttcggaaccatttaatccataatcatgagcaaatgcataaatatattcctgaaagagaagtgggtagacgaagtagtgttgacgagatttctgtttttctgaatacccttcgaatttttccatttttttttctacttgaaatagagaaaaaaagcatttctcaatatagcaaacaactacagaatactccagcatgcaagttcataagcaggggtggatccaggaccagggctggcggggctgcagccccggtccagaagcctaagtaacacttagtaccatgtagtgatttttgatacatagtgcaatatggtcagaacaaggtgttgcataatacaaacccaggaaagaaagggagtctaatccatagaactttttccactccttttctatctaattagtttatgtttgttctaattataaaacaaacaagaacaaatcttttatttttgcaggccaatcgctcttttgactttggaatacagtctctttatcaatatactgtttcttttacacattcaattcataacatctcttttcaatccataatcaagaataattaggatttctaaaaaaaaaaagtaaagggtccattcataggaaaacctaacctttccccacattaggcactaatctatttttaacgtctaattagatcggggaatccttccaattaaccaattaagaagttaagctcgttgctttttttttattttaccagaattagagccaggctctatccatttattcactagacccagaaacagcatagtaatacgaagaaggcccacgattacaagatgcaggcgcataacagcacaatgcaggtccatcagttcatcacccatgtgcacggcacacagcaacccacacgcgtttgtaattcgcacattatttacatggtggttccattcattcgcattgcagccatctccagcctccccaatccataatttagcccctcatttgatctgtttctggatccgccactgacaaaagattcctactttgtcaggttggtggaattgattgcatcaagttgctggaatcactgctttgcataccacttctcatccaggcaatgctgctaatttctgataccaatgaagcaaagctaatatttaaaacaggtggatgaccttcaaactcactgaactcaggacccagcaatgagttcttacgatgctgctcatgagcaccgcagcaaccatacccacatttgtctggcacctcagcagcaaagcatataggatcaacaaacttgaatacctcgctttcaggagtcgagactttatgagttgagtcaaacatgacgacagcacctggcatttcttgttgggtaggttccgtgtgtcctagataatatggtctgaaagcaccaatctttgccgctggtcgggacaggtatggtggatcaacgacttgagtaatagaacaatgatctgtgatgtgccttgcccgaggagaagtatctggagctgtttgcacaggatcatcctttacatccatagcggtgaaggaattaagatcgtttaaaggccaaggttcttctgaaacttccctggacacctttgggatacttcgctccacagaaccaccatgcttgcattggccatcattgcagtagcgacgcctcagggtggaattccagtgattcttgatggcattgtctgttctcccatccaaaagctttgcgatagatgcccacttgttcccatggacagcatgagctgccattataatgcggtcctcctcttcagtgaaaggcttgcgcttgacttgggggtcgagctgattgcaccagcgcaggcggcaggacttgccggagcggcccgggatgccacgcgcgatcagcgtccagttccgcgccccgaacttctccacgaggttgctcagcaccgcgtcctcctctggggaccacggccccctcacccgctcttctatcgtcgcgttagccgccgccgcagcagaagcagatgccgcggcgtccccaccaacaggagcaccggaggcagtgatcccgtcgtccccttcaccagaaggaggaggcgacaggtggtttggttggggttggagcaggacctcggttagggtttgcgtctcgtcggccacccagagagaattggaactggccgcgtcggcggcggcgttcggatccgattgcagctgcggctgcggcgtcgtcgtcggagaaacagcggtttcggcggccgacatggtgcgatgggcactttggtctctgccgctagatcgcggccggcctcgaggtacccgtagccgcacttaaaagccgagtactctaccattgagttagcaacccggataaaataggatctcttagatacgatcaaaatctaaaaatcgatgaaattataccacattgaattagcaagacatcaaaagaaagattttctaatccattaaaaacactcaaatacaaaaatgaacagatccggttaaatttcactaaggctaagggtaaaaaaaaaaaagcagccccaatcacaatggcaaaattgtgatttttttggcaatttaaagaagtaaaataatcttgtatgtgtatgagagtacatgcaagaggggcaaccctatcatttgaatgaagtgtagacagaaatacctaatatggagtgacaataaagagacccatctatctacaaattctatttgttcaatagacctttgtcaatgcaaatacaatgtaattagatataaaaaggaaataaaatagggacttttgttggattggcacgacataaatgcagcaaaaaaaaaataggactaagaaagaggcaaattgtgtctaaataattaaggggtactaaggaccctctcctacttttttattcatttagttcttcaattaactcaaagttctttctttatctttaaagaattctgccttccttaaaatatcataaactgttcttgtaggttgagcacccttttcaaggaaatagagaatagctggaacatttaaacaagtttgattctttatcggatcataaaaacctacttttcgaagatctcttccttctcttcgagatcgaacatcaattgctatcgattcgatagatagcttattgggatagatgtagataaacaaccccccccccctagaaacgtataggaggttttctcctcatacggctcgagaaaatgattcgaatttctgtctataatgcaatctgtctataatgcaaatagatagaaattcgattatgacttgcattaatttccttaaagaaaagaaaaaacaaatttcatttatactcatgactcaagttggctaatttttactgacaaacttcaaaagaaaaacccttcgaaatttttttgagtcgtctctaaactcttttctttatctcatctcgaacaaattgacttttattccttattcagatctaattctattgttgagacggttgaaaatcgtgtttacttgttccggaatcctttatctttgatttgtgaaatccttaggtttagacattacttcgggaactcctattcttttttctttcaaaagagtagcaacataccctttcttttttcttatttccttcgataaagcatttcactcttctatagaaatcaaatatgaacaattgattcagatagacttttcatcaaaaaagtttttccaatcttccaaaattagactttttcttattttaaccttttgatttctatattaaggacagactgacaaagttggcctaatttattagttttcactaaccctagattctttcccttgatcaaaaagaaattctgtcctctcgagctccatcgtgtactatttactttacttacaaacaacccagcgaaaattcggttcgggacgaatagaacagactatgtcgagccaagagcattttcattactatggaaaatgatggataggcaaatccacaatcgatcatgtccttcaagtcgcacgttgctttctaccacatcgttttaaacgaagttttaccataacattcctctaatttcattgcaaaatggtatcgagaattgatccaatatggatggaatcatgaatagtcattgcttttgtatactaattcaaacctgctatctatggagaaaattggataaaagaaataagtatttatcggggaacactctgcaaagatacaatttatttaaacccatattctatcatatgaatgaaacatagttcgaaaaagaggaataaaatagtttacttaagacttatttattattattgaatttccattttcaacagagaactcaagatgattaatcctgaaatgagaaggatccactctttcccaacaaataaactatcaacctcaaaaaaagtggaattaatttaatgaattaatctatttttctgtaacaaaaacaattaactatataaacaaataagctatgccaatgaaaagattggtcgtttttgagtagttctaaaattctcatacttcttcgactcgaataacaaaaaaaagaaattttttttgtaaagtaaaattaaggtctttgcttttacttatagcattctttcttttacctaaaagaaagaactcaaaataaaaaataagaaaagtacgatttcgaatccattctatccaacgaacagttcttaccttaaccttaccgaaatggatcattctagatatttaaagaatcacagatcgagatcgttttcgcttaaccaaagaaaagaaggacgcttcttttttactaataatacaagaaaacaaataatacaacaaaaatctatctctatcataaagggataggtgtcattttctatacagtgttttacctcattaaatttttttttcaatcaatttgaaagtagagtagacagaatatatgaatttatctctaatcctcacattccattgatttagaaatggatatttgcaaatcagataatacctaaaatataaaaatagagtccctatccgtagaatggaaacctttttctttttttcgcgccgatcttggtcaaaagttttaaggcctgtgctgaaactaaaaacatcctactctttaatctggccatgaaacatagaattagaatactccccctctttttttttttacttactttagttctttagtttttganaaattgataactaacttgcagtcgaact

SEQ ID NO: 26490 - DNA, 412 bp, Zea mays
  Clone ID: MRT4577_124168C.1
gctagcgttccctcttcttcacctcactaacaccagcagctcgatcgctctgtcctgcaatgggggccgctcgctccgcctcccagcagctggtcgcggcggcggcggcggcggtcctggcagcggcgctgctgctgttggcggcgggggccgggacggcgtcggcggctgtgagctgcggcccggtcacgtttttggtggcgccgtgccttggttacgcgatgggcaaaggggcgatcccctcctcggccttctgcagcttgctgcaatcggtcaacaaccaaccgttcttgtctgccgccaacttgcaaactatgctttccattcaactccgtgggtccgcatcccagggcaagctcgttaaggtcaaggcttcatacaagctctcgggcgccgccaagaaggcatcccc

SEQ ID NO: 26491 - DNA, 3054 bp, Zea mays
  Clone ID: MRT4577_124169C.1
agagagcatggaccgggttccctgcggctgccctttgctcccgggaacggatctcgcaaccttccagcgaaggcaaagagtccacctatgtctccgcaacacacgtcctttggtggcccaccatctctttcacccttcctgccggtgacaccggactatcctgtgccgacacgccgtgctggagggtaacctggcgatccagggggctacctacggcgccaggcaagcaatgattacaccccatagaacctaaataccgtccttcgtctgcccagcatcggagggtactgcagcgcttgccatctatttcatacttccggccttttgcattgcactattctgtgccaacaccagatgctcacccatgaaatagctaggaaggggaagagcaaccgaggaaggaaggcaaagaatgcacctaagagagacagacaggtcttgcctcgggccgggttcttcttcgttctcgcgtttatctgtgcagccctgcctttcttctggggttccccgcggcctgcgcgcgcgttctctccctcacctccgcccctttctctctctctctcgctctcgctccgggcgacggctgggcgaccgccgctttatccgtgcggcccttccttttgttctcccgtccccccaaccccccttcgagctctatctgtctcttcctctcgaggcgacgcctgggctaccgcgccgctactgcggcctcccgcgacaggtgcctagtctccatcaggtgccatgtcttcttcgggctcttcaccggcgacgtgcactgccagctctgcatgtatacacccaagtcctttactgggtccgccgccgcccctatgtacttcgttaggtttagtatgttgttaagtttgtaattctagggtctggagggaagcatagatctcaagaggggtgaaatttggtggtaatttcctgagaatttcaaggagacaagggcgtggaggttgtttctggagggatctgtgagcacagcagcagaaatttgaggttggtggtagcctgttgatccacgatggtgggtaaggagctggtggtgcaaaggaatggccctgttgacatacgtgagattgctgcaaaggccacgcttcgggaggtgcggcagagcgggcacacctacgtcgaactacggcgtgtcgggaagcgtgtcatcttcttctgcaccatctgcctcaccgagtgcttcagcgacaatgtgctgtttgaccacctcaagggaaacctgcattcacggcggtatgctgaggccaaggttacgctgtttgggcccatgccatggccgtttaatgatggtgtgctcttcttcaacaactcacgcgagaaggatccgctcctgctggactcaagctcacagagcaccagagagcttgccctggttccagagcctgaggtttcagggaatgatactgaggtgacatcaaggctgagagatggttcaacctcctctaatggtgtgaaaggtgcacgctatggtgcaaaaggccgtgctaatggtagaactgctgctgtatctgaagatcacatgctttcaaaccatggaactgatggtcctgttgttattcctggtgtattgctaaaggatgttgtttcagatttgcctgtgcatcttttgggctatgggaatatttcatacaggatctgtgaagctagcaagaactgcaggaagataagcaagatctggtgtgcttgggtaggacaaggctcccatggttttgagagttgtaacacttatgagcaatctggatttgccatagtcaacttctcttatacctatgatttaggcaggaagtggtcttctgaggaacaagacctgtctgtctctgctggatctttctttgtaattgatgatgctggacaccgtggaaagcgaatgagaaaatcattctctgatcaagaagcatcttcagaagagtcaaacggtcagaacagctctttacagggcagtaggcaagctattgtgacttgttcaccggtaggtacctcaaatgatcttcaagttggtctcttatcaagcaaggcagcaaggagagagttgaggaagcagaagcgaatagcagctgagaaagtgtgtgatctttgcggcagaccaatgctctctggaaaggatgttgccaccttgctgaactgcaatacaggaaaactagcttgcagcagtagaaattcaagtggggcttaccatctatttcacacttcctgccttttacactggactattctgtgccaatacgagatgctgaacgatgaaatagctaggaaggggaagagcaaccgaggaaggaaggcaaagaatgcacctaagagaaggcaggaagtgtgaaatagatggtaagccccacttcctgccttttacactggactattctgtgccaatacgagatgctgaacgatgaaatagctaggaaggggaagagcaaccgaggaaggaaggcaaagaatgcacctaggagaagcaaaataacgtccatagtttgcccagaatgtcagggtactggaattcacgtcaacggagatgaacttgagaagccaagcatttctttatcagagatgtttcgcttcaagatgaaagcaatcgaagctcacaaagcatggctgaagagacctgaagtgcttgaaaactgttccactgggcttcatttcccctcagaacatgtggagaactctgaggagaaggtgatgccactcaagtcacttcccttctatgccgctgatgggtagaaagatagttgatggcagctactggaggatgctgcagttgttgatgtaaataagctcgcttgacagttgtggaacagtgttgttagatgctcacctacgtgcattatctcagttaacctgtgtccgccagatgataactaagacatttaaactggcaactggctgaactattgtttttagctggattcactaaacatgtacgcagcccatttcgttgggttgggtttgctgcttaaaaaaaaaaaaaaacccacgcgtccgggttgttatatatatatatcatataaataaatatcttaatatttaactagttctagatcgcga

SEQ ID NO: 26492 - DNA, 270 bp, Zea mays
  Clone ID: MRT4577_12416C.1
cgcccttttagtgccttaatttgagataattattttactgccatgagtaagtatagaaatttcaaaaaatgtattttcaaaaaattatgtgtgtcagtgagtttttcattgataattggtttaatttaaaatatttagaggtttttggactttcataaattgagtacaatctttgcatcaaactacctgctacaataatgactttataaaactgcaaaaaatgtagaaggttgcaccaacatactaaggacatatggcaatacatccatg

SEQ ID NO: 26493 - DNA, 1224 bp, Zea mays
  Clone ID: MRT4577_124170C.1
aaagcaatggccatgagagcttttccctgaactcctgaagcaatggccatgagagctctcccgctgaccccttccaggagctcctcgtttggagctcaccaaaccaggccgagcggcggcggccccagatcagtgagagcttatgcgaagggagacgaagagggcgacaagcagtccctcttcggaagcatcaccgaggcgctggacttctcgcaggtccggtcggagaaggacgccgagctgctccgctcgaggccggccggggagttaggtggtatgatggtaagaacacccactttcacctgaactcctgaagcaatggccatgagagctctcccgctgaccccttccaggagctcctcgtttggagctcaccaaaccaggccgagcggcggcggccccagatcagtgagagcttatgcgaagggagacgaggagggcgacaagcagtccctgttcggaagcatcaccgaggcgctggacttctcgcaggtccggtcggagaaggacgccgagctgctgtacgaggccagggagtccaccaaaggtggagggaggatgacgagggagcagtacggagcacttaggcggaagattggtggcacctaccaggatttcttcaagtcatatgttgaagtcgacgggcaatacgtggaggagggttgggtcgacaagacctgcaagatctgcaagaaggacacaaggggggagccgaggcaggttgacaagctaggaagatacgctcacgttgcgtgcctggagaaccccaaaccgacgaactttttcgccaaaatcttcgccagatgaactatgctgcgtccgtcgaaagcgttgtctcgctcgctcgtggttagagagtacaatatataggtagtgttgttgtggcttcaaaggggacaagattgtgcacaattttccaaatggattggtatgtactgatgagcaaaaaaaaaaaaaaaaaagcggccagaaaacaaaaaggaaaaaaggaaagaagaaaccaagcaagcaaagggtacacggtgacctgaagcaaacccgcacgacagagacgacgcatggccctaggtactagctcacgacgtctagtatcaagaatatgaaatcgtaaatagcgaaaaattcttgccttgcgcgatataagtgtaaggaaatacaaaaattcgcttatgccccaatttcatccacatcgaattctttttttgagaaacttaggccgcggcc

SEQ ID NO: 26494 - DNA, 4277 bp, Zea mays
  Clone ID: MRT4577_124171C.1
ccttcgataaagcatttcactcttctatagaaatcaaatatgaacaattgattcagatagacttttcatcaaaaaagtttttccaatcttccaaaattagactttttcttattttaaccttttgatttctatattaaggatagacggacaaagttggcctaatttattagttttcactaaccctagattctttccctcgatcaaaaagaaattctgtcctctcgagctccatcgtgtactatttactttacttacaaacaacccagcgaaaattcggttcgggacgaatagaacagactatgtcgagccaagagcattttcattactatggaaaatgatggataggcaaatccacaatcgatcatgtccttcaagtcgcacgttgctttctaccacatcgttttaaacgaagttttaccataacattcctctaatttcattgcaaaatggtatcgagaattgatccaatatggatggaatcatgaatagtcattgcttttgtatactaattcaaacctgctatctatggagaaaattggataaaagaaataagtatttatcggggaacactctgcaaagatacaatttatttaaacccatattctatcatatgaatgaaacatagttcgaaaaagaggaataaaatagtttacttaagacttatttattattattattgaatttccattttcaacagagaactcaagatgattaatcctgaaatgagaaggatccactctttcccaacaaataaactatcaacctcaaaaaaagtggaattaatttaatgaattaatctatttttctgtaacaaaaacaattaactatataaacaaataagctatgccaatgaaaagattggtcgtttttgagtagttctaaaattctcatacttcttcgactcgaataacaaaagaaagaactcaaaataaaaaataagaaaagtacgattttttcgaatccattctatccaacgaacagttcttaccttaaccttaccgaaatggatcattctggatatttaaagaatcacagatcgagatcgttttcgcttaaccaaagaaaagaaggacgcttcttttttactaataatacaagaaaacaaataatacaacaaaaatctatctctatcataaagggataggtctcattttctatacagtgttttacctcattaattttttttttttttacttactttagttctttagttttgggaaaataaatagggggtacttcttttctttcatattgggtgtcaaatggatcctgtaagaattcccacttcatagatacggggtataaagtttatccaaaaagttccaatttcaaaacacatattcaaaacacatatgagtaatgagtagtaggggcatatcctgaatgtgcctgatagacaaaaatttttcatgaaaataaagatattaaatttgactggacttgacactttattttttgttttctgagaaagaaaaaaaatgcttagaaatgcatctaatctacgagttcataagagataattattctctttaataaacttttgtgtcgtgcagggcacaatacgattctatctttcgcttcatcagaaaaaatctgggacgaaaggattcgaacctccgagtaacgggaccaaaacccgctgccttaccacttggccacgccccatgtcatttcgttttatgaaacactaataaacactattatttttatatattattcgtcaatcccacttcaattacctaaaaaaatgagggatattttcttgctaggattctagacatgcagataatatagaatccaaaaaaatgcattgatcattacatggaattctattaagatattatatgaaagtcgaatttcttccattctcatttgagaatgcgaatacaaggaggtattttgtgtttgggaaagtccgaagaaaaaaggatttggaatctacctcttcttttgctttttcccttataaaaataactcaatcaaaatccaattatctactctacaagaatgaaatgcttgttatgcctaatatacttagtttaacctgtatctgttttaattctgttctttgtccgactagctttttcttcgccaaattacccgaagcttatgccattttcaacccaatcgtggatgttatgcctgtcatacctgtactcttttttctattagcgtttgtttggcaagctgctgtaagttttcgatgaaatctttactattctgcctgccaaattgaatgatgtattcatgcaaaaaaaaaaaaaaaaatggataagagccgagaagtcttatattatgaaccttcgattctaaaatgaaaattcttctacattgaatgtatagctgcagcaataaatttttatcagcctttctaccccctgcgcctacgttgaacaggtacctttaggtacccacacaatacctaaactaatttttgatattgataagagtgcttattataaagcaattcttgcaatttttttaagaattgatttttgcatttttaggtgtcaaaataaagaaaacccatcctagtggatccgtgtggtaaggaaaaatgggtaatctattccttaacaaaaaaaaattttggagattatgtaatgcttactctcaaactttttgtttatacagtagtgatattctttgtttccctctttatctttggattcttatctaatgacccaggacgtaatcctgggcgtgaggagtaaaaatcaaaaattttttggaattttttcttataaatttaaattggatttatttcgtacatttatttatgagaaaatccgggggtcagaattccttacaattcgaaagtcccaaatgatccgagggggcggaaagagagggattcgaaccctcggtacaaaaaaattgtacaacggattagcaatccgccgctttagtccactcagccatctctccccgttccaaatcgaaaggttttcatgatatggcagaggcaagaaataacgattgtcaaaaatccttcctttttctttcatttcaaaagtgcataaaaattatattgccaattccattttaattatattcttttttcttaatgttaataaaaaaaaagaagaaaattctggttttttctttccaaaattcgatataggctgaaagacaatcagatcttttttctcttcagcgggcagttccatatagaatttgttagaataaaacaagcgggttaaaaaaaaaaaaactctttttttttatttatccacaaagcaaaaaaggttcttatcaaacccacaataaaatgggaaagaaagataaagtaagtagacctgaccccttgaataatgcctctatctgctattctgatatataaattcgatgtggatgaaattggtgtataagcgcatttttgtatttccttagacttagatcgcgcaaggcaagaatttttcgctatttacgatttcatattcttgttactagacgttctataggaataagaagaaatcgcaactcttttccgttacacataataaataaagggtttcaaaagtcaatttttcttttcaatatctttcctttttttttcagaattccatttttgttcttccacccatgcaatagagagcgaatgagaaaagaggggttttcccttaaaaaatgggctttgaaatagaaatcatggaataatgctgaattcaaatgtttatttctttatttcttttctatagtataagaaaaatgaattaaatgaaatttgtggatttagcacgacctgggttgtgaccccatagataaaaatgcaaaatttctatcttcgagacgactgaaaaagggcattgaacgagaaagaaatcgtccacagataatcaaccgcttgcccgtcgacttcaacatatgacttgaagaaatcctggtaggtgccaccaatcttccgcctaagtgctccgtactgctccctcgtcatcctccctccacctctggtggactccctggcctcgtacagcagctcggcgtccttctccgaccggacctgcgagaagtccagcgcctcggtgatgcttccgaacagggactgcttgtcgccctcctcgtctcccttcgcataagctctcactgatctggggccgccaccgctcggcctggtttggtgagctccaaacgaggagctcctggaaggggtcagcggaagcgctctcatggccattgcttttgcttcaggagttcaggtgaagggagtgttcgctcgcaatttagaagccgtccgcagtggacatgggagcaacagctggatatacgatcgcatg

SEQ ID NO: 26495 - DNA, 245 bp, Zea mays
  Clone ID: MRT4577_124172C.1
aagtaaggaaggcctgaagacttcctttcacatctccagttactcccatacaggtaggtattcatagccactttcatcgaactaggacgatctcaccgacatgtaagcactaagcaacccaataggatcatcagaccctgcctgatgccaacgaacccaactacatcttcccttgcgacatcgtcgacattgtaaacttggcccgcatgcatacatacgcagcctcttacgagcgccaatggaca

SEQ ID NO: 26496 - DNA, 1271 bp, Zea mays
  Clone ID: MRT4577_124173C.1
cattgggtacctcgccggccggggggaaaacactttcacctgaactcctgaagcaaaagcaatggccatgagagcgcttccgctgaccccttccaggagctcctcgtttggagctcaccaaaccaggccgagcggtggcggccccagatcagtgagagcttatgcgaagggagacgaggagggcgacaagcagtccctgttcggaagcatcaccgaggcgctggacttctcgcaggtccggtcggagaaggacgccgagctgctgtacgaggccagggagtccaccagaggtggagggaggatgacgagggagcagtacggagcacttaggcggaagattggtggcacctaccaggatttcttcaagtcatatgttgaaggtatcttatctacacctttcccgtgagaatatttaaacgccaagtgaacagtcccgtatattgcctactgatattcagattaacactgcatcactgaataatccgtgtagttttttttttggaaaccagtcccgtatgatgaatgtagtgattcatattaatattgcatcgcagactaattcttgtttttttttttagagaaacaagtgcagtatgatgaaagtagtgtccactgaaaatatattatcgcacacatccttttttttctcctaacaagagagaatatcaagttatcgacgaccaaccaaattggtttcgaatttcagtcgacgggcaatacgtggaggagggttgggtcgacaagacctgcaagatctgcaagaaggacacaaggggggagccgaggcaggttgacaagctaggaagatacgctcacgttgcgtgcttggataaccccaaacctgcgaactttttcgccaaaatcttcgccagatgagctatgctgcgtccgccgaaagcgttgtctcgctcgctcgtggttagagagtacaatatataggtagtgttgttgtggcttcaaagggggacaagattgtgcacaattttccaaatggattggtatgtactgatgagcataaacgagttccatagttccgactccctcttcagtgtattcaagtcgaccatgaacccacgacccacaacgatcaagaacaaactactgaaaatgtttagatagttcgactccttcacgacaagcaagttagtagtactctggaggtcatctattattagctcgtgttccttgtcataacacaggaggagcttccaactttaagcttatttatagaactgtggagcacttacgaaaaaaaaaaaaaaaaagcggcc

SEQ ID NO: 26497 - DNA, 842 bp, Zea mays
  unsure (1)..(842): unsure at all n locations
  Clone ID: MRT4577_124174C.1
attgggtacctcgaggccggccgggacgcgctagtatactactagtaacttagagtatttgatcttttttccttctttacctcaacggtagagtggattggtcacgataatttattggctaaacttagttgatgtgacaaaagtaactgcctttaaaactattggttggagtgtgtaatagtcgtggtttcagcttatccatggaaatcaagaggccaaaaatggattggatttcaaactacgcgaattattttctaactatatatgtccccatgccattgtgtttgtaacacaacactagataaaacaaagaataatttgctggcaactcaatttggatgatgctgtgatctgtttctgccaaaaagtcatgtgaagttgcatctcttgcatgtattatgtaggaagctttgctcagttaagcttcaaaagcagtaacaaaatccagttcaatgcaactaacattaagcataactacagtctacttcagttttatgtctacctaatagatgaaataacaaaccctgtattttttttaaaatatgtaggaagcttgatgtttttttactcatactagtctaatgctatactctcacggtctcacctctttatgcatggtcatgtttgtcatagttttactgttatattggtaaactgatggccggcagtgtgatggtcatgctccacaggcagaanaggaacctattttgagtagcttcttgtatgccagtgtgctgtctcatgactgcctagagcgtgcattgagcttcgtccttgcaatangctttgagatccacattgcttgctactcagctaatcgatattttttacgatgtcatgct

SEQ ID NO: 26498 - DNA, 471 bp, Zea mays
  Clone ID: MRT4577_124175C.1
aaaaaaaagggggggagctttgcttttggtaattaaaaaaaatagtttataggggaaagattcagcagcacaggggaacctttgcatcctgcatgaggctatagggcgggcgggcacgtactggtaacatgggtagaaccaagggggttattaagggggaaaaggattgcaaaaaggccccccaaaactttggcctgcctggcttttccggtactggacctgaaccgaaaccactactggtgcccccacaagtggttaagattaatgtattggggcctttttttcttgttcctcccaagccaggaaaagatgcccctctacaagaagcctccgccataaccagggtttttaaacaagtcctgctttatgggggggggggcgaccatttccctttgcatttcagagcaggaggggtgctttccaaagtgcataaaacaacggaccacacactggtggatgtctacccctaag

SEQ ID NO: 26499 - DNA, 1883 bp, Zea mays
  Clone ID: MRT4577_124176C.1
cccgtccaagcccctgctccggcgccggctgccggcggcgaggctcgcggcatccgccgcatccaggggtcaagcctcggcgaccgcgggcgcggcggcgccggcggccgtggagacccgcggcggggacagggaggggcaggtcacgccgcggtccacgcgcttgaacgcctggtacacggacgtcatcgccgctgccgagctcgcggactacgggcccgtgcgagggaccatggtcattcgcccctacggatacgccatctgggaggccatccaggattatttgaatgtcaaattcaaggagacagggcacagcaacatgtacttccctcagttcattccatactcatttatagagaaggaagctagtcatgttgaagggtttagcccggagcttgcattggtcaccattggaggaggaaaagaactagaggaaaagcttgtggtaagaccaacaagtgagaccattgtaaaccacatgttcaccaaatggattcagagctatcgtgatcttcctctcatgataaaccagtgggctaacgtgacaagatgggaaatgcggactaaaccattcatccgaactcttgaatttttatggcaagaaggccatacagcccatgccacccttgaggaggcagagaaggaggcgatgcagatgattgatgtatataccaaatttgcctttgagcatgctgcaataccagttattccaggtagaaaatcaagagtagaaacatttgcgggtgccaatcggacctacactatagaagctatgatgggtgacaagaaggccttacaagctggaactagtcacaaccttggccaaaacttttcacgagcttttggaacacagtttatggatgaaaatggtcaaatcgaacacgtctggcagacctcttgggctattagtactcggtttgttggtgggattatcatgacccatggcgatgatgccggtctaatgcttcctccaaggattgcacccattcaggtcataatagtaccaatatggaaaaagggtgatgagaaggctgttgttgtggaagctgtagattcagttcaaaaaatactcaaagaagcaggaattagagttaaagtggacgactcagagctgcgaactcctggatggaaattcaatcactatgagatgaaaggggttcctgtaagaatagagataggtccacgtgatgtcacaaataagagtgttgtggtttctaggcgtgatgtccctggaaagcaaggaaaggagtttggagtgtctatggagccttcgatattggtgaaccatataaagggtcgtctagatgacatacaagcatcccttttacagaaggccataacattccgtgatagtaacattgtcgacgtaagctcatatggcgagctgaaggaagctatttctgaaggaaagtgggctagaggtccttggtcagctagcgatgctgatgagctgaaagtgaaagaagagaccagcgccaccatcagatgctacccattcgagcagcctgagggcaccaagaaatgcttcatgactggcaaccccgcagaggaagtcgcaattttcgcaaagtcatactaggcccactgtgtgtccactgtcagagataagaacagcatttccttttcaattttataggaaattgaaaatttgataatcaattggtcaattttgttccactacctaaggtccagattgatgacggttcatggaacagcattgtgtgctgctgatatttaaaatgtaaatttgataatcaattggtcaattttgttccactaacactggaaaaaaaaaaaatgcctactcagtatcaaatgtttcaaacaagttccccaatatgctaaatcatgcaagttatcacaaaaaaaaaaaaaaaaaaaaa

SEQ ID NO: 26500 - DNA, 481 bp, Zea mays
  Clone ID: MRT4577_124177C.1
cttccttagcttggattctttaaaaccggccccccttgtttttttttttttttttttttttttttttttttttttttttttttttttttttttggggcaaaaagggacctttttttaaaaaccctttccaatggggccaatcaacccccttaaaaaaaatccacttttggttttacactaccaaaacagatttgatccacccttatttttccgggttgttggaaacttaaccaaattccccccaaacaatttttccagggggatttcccaaaccaacttacctgaattttcccccaaggattgtcccctttgtcttaacaccaaaaaaatggcacctcgaaccttttggtttttttttaacaaaaatctttcaagggttaaaaagccccttcatttttggggaattcacctaacttttggagaaccccaaaccatttggtcaattaaacccctactccttcgggggtttacttttaaaccc

SEQ ID NO: 26501 - DNA, 361 bp, Zea mays
  Clone ID: MRT4577_124178C.1
actcctatgggcgattgggaccctcgaggccggccgggattatcttggtcatgctcttcaaaggtaagaatgggaacgacagctgccactggtgccattacctgaactgcgtaccaacgtccagatggaagtgcgatacctgaattccgcgaactatatgctccactagtgttcgtgtgtttgtggaaatgtacgaccaaatgttccacttgaccatcctgcgcttcttttgcccggattctccctggttccatgaaatacaaatgttccagaattgtagcacgagcttataactgttgatttcggcataattgatgtattcatctcacaaaagaaaaaaaaaaaaaaaaaacccgcggcc

SEQ ID NO: 26502 - DNA, 331 bp, Zea mays
  Clone ID: MRT4577_124179C.1
cggacgcgtgggtttagaatggagtgtgaataactatagctagcataaggctatctccagcagattagccatcctcacatctaacagtacagtctatagtgcaaaatattgtaaaacagtgttttagttgaccatacggtgaattgttggaaaaaaaaaaaaaaaaaaaaaaaaaaaaaaaaaaaaaaaaaaaaaaaggtcaacaatcttgggggtcccggtttggcgactcctaccttccgacggctgcgatgccacaatgtgttctcttagattgaattagcggcctgaattataaggcgctggggctgggaaaacccggggggtaacc

SEQ ID NO: 26503 - DNA, 237 bp, Zea mays
  Clone ID: MRT4577_12417C.1
cggctcgagcccacaaatataagaaaggcctagtctctggtggccactgcactcagatatatttgggtcaatgtggattctattggtaatggcccatggaagtcattcttgcgaataatatcatgtgcagaaatataacctctcgcagatttgatccccactcttgcacttggccccgaactgatacgtgggctttcttccgccgccatctaaaataaaataatgaccaatgagaat

SEQ ID NO: 26504 - DNA, 195 bp, Zea mays
  Clone ID: MRT4577_124180C.1
agaagggaggatgcaagggagaacgcgaacgctgacatggagagaatgctcggtgggaataaaccagatgtttaagaaagcgtggaaggagctatgaggaagcgacagtacacaaggagagaggaattcaagaagacacggaaacgcaaagtgggggatggaaaagaaggactgaaaaacagaggagaagaaaag

SEQ ID NO: 26505 - DNA, 108 bp, Zea mays
  Clone ID: MRT4577_124181C.1
ccggaacgggggtcctccataacactgctataccgcaggaccagcaggggcgctgcaaacggtatagatacagacggccaccactgtgtcacaaggcgtgcgctccgg

SEQ ID NO: 26506 - DNA, 274 bp, Zea mays
  Clone ID: MRT4577_124182C.1
ggacgagagcacaatttgggttgggaaaacattgaacacaatcaaaccgaaaaacatggcataacgctctgaacttgcgacgactcaccaaaaacgaagtgttctcatccggacacacatttccgcgcaacacaatccatgataatgctctaacctacagcgctctcgcccttcttcctctgtaacttcttaatgtagaactcaagctctttaccctcaagggtggacccattagctctggcacaatgcccagggccggaagaaatgcatgcca

SEQ ID NO: 26507 - DNA, 212 bp, Zea mays
  unsure (1)..(212): unsure at all n locations
  Clone ID: MRT4577_124183C.1
atacaacatagcgatgccgtccatttccaatccaatccaagtgattacngtacaatgaaagcaatgaagcagcgcaaaagcgatacctcacctcggagtgcggagctacattaacgtacagtaccgttcaccccttttcttaggggcctggagatagaacccagccgaggctagatgcccgccgttgccgcccttcttcagcgggcttttct

SEQ ID NO: 26508 - DNA, 439 bp, Zea mays
  unsure (1)..(439): unsure at all n locations
  Clone ID: MRT4577_124184C.1
gcaggncgactntagagcatgtagtaatttcatcgctctctcatgatcattatagggtagttgtgccttggtggcacgcatcttgttcacaattgactggaacctggagagcatagaatcaatggtctctccagccaactgtgtgaagttctcgtactctcgtctgtatgtctcaaacagtctagtcttcacattgatcgttgccctcatggaatctctcgagggtagaccagatctgatgagccatagtcagatgtccaactcgctcaaactcaccaagcgagagacacgagaacaaagcgtttcgagctttattattcgaatcatggaactccatttgaattggagtgatccgggcacttgtagcatcgaaaatcgcatgaggcatatttcccaaatccggttacttgtgctctgaagatacgcagacatgcgaatc

SEQ ID NO: 26509 - DNA, 322 bp, Zea mays
  Clone ID: MRT4577_124185C.1
acctactattttaggccaactatacttccttaacaacgaactttcaaacgctcaatctaaatgcccctatataccggcgtattcaaacgacacccctggctctaaacgagatcaaaatgagaacccctaaatgaattgtgtataaaaccacttatatcaacgaaattacataggaactcatccgaaaaccttatatgggtgcttccaacgtgtaagcattccttaaactgcattcgcctccctgatggttaagctaactgaacccgccttccatgcattgtaccgtaggtgaccgcatttttcagacattggacatatttgc

SEQ ID NO: 26510 - DNA, 639 bp, Zea mays
  Clone ID: MRT4577_124186C.1
gagatcaccgtctctccgcatacatcacctcggccggcgctggcaccgatctcctccagagtccaagcctcttcacccaaagccatggccgcgcggcgtcgctccctcctcatgctcctgcccctcctcctcctactcctctcccacttcctctccctcgccgccgccttccagtcggacgagctgctcctccacgacgatgacgagttcgagggcacccgggcctcctccaccccctcgccccggccgccctcgacgccgccggtagtgtcctcccgccgccgatccgcggacgcaacgcaggcggtcggcgcctccgagtccaacaccgtccagttcaccctcgagcacgacctcggagccggtctagggttcgcccccgccgggtccttctccgcccgcctcaagtcctcggcccacggctcccagactcttactaagctccgatttacgaggaatgagttgactgaggatgaaaagaatgcatttaagaaattactggaagaagatagtttttacacaataaggctaccgtctaatgtgttggatcctacaagaaacgattatatttattcctcaatcaaagcgagatgcattccacgtgacagcttggatgaacatattgtcatccacatggac

SEQ ID NO: 26511 - DNA, 621 bp, Zea mays
  Clone ID: MRT4577_124187C.1
ggggaaaagtagccccttttaaaaaattttttggggtgtttgaacccctttccattataaaaattttcgggggggaaagctttatcgacaagcttaaaaccttgggggaaaatttgaccacgagcccaatgcgttgtgacccaatttactgtggcccctgtgataataagatgggggggccccagatgtgccatgagcccttactatactccatttttcaagagcgccattttttttagagtgcctaacaggagtttgagcgacatgggtgcccttttactgggcgggggttggctctccccatatgtgcaaaacaaaaaaagacaccgggtttccctttgggagatttgggggggcccgaaacgctcacaaaaaacctgagctctccatatggaaaaaaaactttttttttttgcttttgcttttgcccgaccacgcgggtctaccccggaaattccgacccggacccgtgggggtaccaaattttcctatatagagaggcattaaagattggggcaaacatagggatagatgtgttctgtgtgaaaaagttataccctcacaaattcacacaaaatataagaccgaaacataaaaagtgaaaaccggggggcccaaaga

SEQ ID NO: 26512 - DNA, 357 bp, Zea mays
  Clone ID: MRT4577_124188C.1
gatgatatcaggtatactgcttgatggatgtactgaacgaacgagatgcctgtgctgggacacgggttccactctgtcggttttattgtttttaaaaacagtttggagtccaaagagtggctagaacctggcacgccgaagttatcccagctcagcctgttttcttgtgggtagattctttgatttgacaatgatattagccataaacccataacttctcggccccctattctacttatgctgccttttttcctgaccaaacttttgttggtcgcagggtacggcaaaatgcctggatacgagcacgtgttcaccgacttcctgctgagccttgccaagaaagagtacaagagacga

SEQ ID NO: 26513 - DNA, 133 bp, Zea mays
  Clone ID: MRT4577_124189C.1
cgacccacgcgtgcgacccagtctccactcactctgcctttttttcttcaaggagacgtcggcagactcgcgggcggtcatattcagcgtggagcgctggcccctgcatctaccgtatgcattgcaccacctt

SEQ ID NO: 26514 - DNA, 1116 bp, Zea mays
  Clone ID: MRT4577_12418C.1
cccctcgtccctttcctggaaacggatcttaggtcgccgtcgctgtcgagtactccacgccgccgagacgtttcgtcgtcgcctagacattccacgccaccaccgagtactccatcttccctctcaggtacgagttcccatctttcgagtactcgtcgccgccgctgttttgcccttttccacgccgtcgctgctgcagcagaaaggatgcaccgccagaaatggagtccccccagaactggatgaccaagctcttgattggccctcgccggaaatggagtccccccaggcgcaaccaaccttatccctctcaacgagatagttgtcgacatcaatggaacatttgtgccttcactgagtgctcccgcgccaaccaacacaggcttctccctcaccattgatgaggtagacaacacggtcacttggtgacaaaacgcagtttagattgtctgtctcatctcacgaaaaatgatttcgagggtatttcaccggatctccgatgggaggaagaaggacctcaacatgtaccaagtgagaaagtgatgtacctcaaacttggattagctgctaaggatgaacgcgaaaacaaagtagagaggatgcttgcaattatacaggtcatgcaaatattcgaaatgagttggaagatgatggttcagccgccttagattgtgttcattttctgccccacgagactagagtgttttatgactctaaccatccagtgatggaggttggcagtctatacgcatcgatgactgaattcaggcttgcaatgtggcaatatgacatagaaaaagaatttgagttaggcactgaggctagtacttcgaagaaatacagagggtattgtcgaggtggcgactgtccatggagcatacatgcaagaattgagagggatggttcaccaaccataatcgtatgtttttatttgttcaccaaccatggagcatacatgcaagaattgagagcttgtatgaaaaaactaactccgaagaaaaagaagtaagggatgtttgtaatttgtccccgcctactactatggatcaggtgtaatgtgtttctgtgtaatgtgtaaatggaactcagtctatggaattcagaatgtgtctgtgt

SEQ ID NO: 26515 - DNA, 477 bp, Zea mays
  unsure (1)..(477): unsure at all n locations
  Clone ID: MRT4577_124190C.1
gggggtgttttttttttaaaaatttttttttttttttttttttttttttttttttttttttttttttttttttttttttttttttttttttttttttttttttttttctttttttttttttttttttttttttttttttaatttttttgggggtggggggggnncntaaaaaccccccccaggtttccatcccggggggggcaaaaacccaagccccccattttttaccactttttttcgcaaaggtgaaaatttattttaaccatgtcttcctttgccaaatggtgcttaatttgtccaaaaacaaaaaatgggaccaaatctatgttgttttttttaccaccgaaaaccaccggtggtgggactacacacttaactttttttgttcccacagtgaagattttttttttaacaagcccccccacctaaggggagcttttttaaaacctttctcttgcataaatatactgaacccct

SEQ ID NO: 26516 - DNA, 508 bp, Zea mays
  Clone ID: MRT4577_124191C.1
gcgccaggagccgaagccccccaaggcggaggaagcaccgcgcccgaagcgcggtccgggggcaccaacaccggagaggccacggggagagcaagaccgacgagagcggcgacggcggcggcagccgaggacaccccaagccgaaggcgcggggagaacggagacacccgcaacgggaggagggaggacgccaaacccgggaagagcgaggagacggagccgcagggcacaagcaacccgctgagcgccgaagaacgaaccgtcccaagggagcgacagggaaccggacaaacaagccggggggagcgtttccctacaccacaagccagaccagagcggacggagcagcaacgacaagaggaaccaggcacccagcagagagcacacgtggagagacacacgcgcagaggccgcacgcgaagaagggcagaacggcgcacccacaccgggcatgaagggcaaaggtcggcgaccccaggaaaaccgaactggtgagtgacaagcacaa

SEQ ID NO: 26517 - DNA, 343 bp, Zea mays
  Clone ID: MRT4577_124192C.1
ttttatttttttttttttttttttttttttttgtttttttttttttttttttttttttttttttaagggggaaggccttagcaagaatatgcgggcgccaaacacccatatttgccatttcatttttattccggcattcctatcaaaaccatgacgcccgggcaggaacatgacagggatgacccaaactacattttgccagctagctagctagggcctcgccgccaattcgggggggggtacaaagtttgagggaagaacaaagctccttttgaacgttcttgaaaattgtgggggagggttagcgacaagcccaatttgacaaccctttaaaagcccttga

SEQ ID NO: 26518 - DNA, 591 bp, Zea mays
  Clone ID: MRT4577_124193C.1
ggccgcttttttttttttttttttcttttttttttttttttttttttttttttttaaagcttgttaattttaatttaccatacattttttcgaactttggtttattttagtagacagggaattttgtggaaccgaacaggcgatgggatcgacccaaaaacaaaaacacaatccattttaggaacaatccctgaaaagagctcagacccaaatttaattcacaagtcctatttttgctgaaccttgagaaaaagtaaaaatatgttttttaaaagcagccataatttgttcagacatcctctctttaggagccctgccgaaaagattcaagacttgctggagatgaagctggaaagccagagaagcccctcaaacaacccttaaccatatgtagaacaagtgctgtgaatgaaccaaggccgttgtcacacgctttgcagacaaagcttgagagttttttgagcaccattcatagcattgggaagatcttgctagcctgcaaatacaagcatcacagcgccactcaactcatgcgaattcatcatcctgtggagaaaatctatagcctcaacaacacgttccctgtcgttg

SEQ ID NO: 26519 - DNA, 431 bp, Zea mays
  Clone ID: MRT4577_124194C.1
aagaacattaatctctatacaaaaaaaagggtaatttaacccgttggatacaaagaaacccgcccacgactatgcccaatacaccaaacgcctttcctattgacatttgtttacgggaggggttcccatgccccacaaaattaaaacctcttagcaaccgtgttgcacccttacaagccttgcaccaaaaccacatgggggggatgatctgaaaagcatcattgcgtttcatggaccgcatttacctgttttaggctgtcaccggttcctgctcaagaccagcgtttattcctttgcaaaactgtttccctagcccttcctgtatttcatcccttgttcgcaagtttcccttttttggcagtttttgtccaaactttttttgggaaaccagaccccatctatcccgtattttcatggcatttttatgtttt

SEQ ID NO: 26520 - DNA, 369 bp, Zea mays
  Clone ID: MRT4577_124195C.1
gccggccgggccgggcagcctcggcctctgctcccggctcccccacggtactccagccgctaccctgcgattcaaggactccattgagaagcttctcatctgatctgccgaagacctttcagtgtgatgggcctcatcgacacttttttcagaggcttggactggtgatggtgtcttgtttactttgcgcttttcaaactatatttgaacactgttaagtcgatcatacttgaattgtactgcatcttatgtttgtgattgtcatgtaatctgaagatgcctctgtattgtggtggcttgtttctgctgagattccgaccacatcattgtgacggctgattacaaaaaaaaaaaaaaaaaaggccccta

SEQ ID NO: 26521 - DNA, 148 bp, Zea mays
  Clone ID: MRT4577_124196C.1
tcgacccactcgtgcgggcaccgccaggcgatacgaatccgacgagctcgatcgctccacttccccgatcgctcgccaatgagtaccagccaccgtggggattacggaggatgctgatgctaacgctaacggcaacgcggctgtcgcg

SEQ ID NO: 26522 - DNA, 641 bp, Zea mays
  unsure (1)..(641): unsure at all n locations
  Clone ID: MRT4577_124197C.1
ctcctcccggcttcctcacacggcactcctgccgctagccctcactcaaccagacaaccagtacaccaccgccaccaagcccgggccgaataactctgccgggcaaccgccgccgccgcccttcgccggcaaagaacgcccacgagatccaccccggcctgctatggagtccgcggtgaacccgaaggcgtacccgctggctgatgcgcagctgacgatgggtatcctcgatatcatccagcaggccgccaactacaagcagctcaagaagggagcgaacgaagcgacgaaaaccctgaatagggggatatcggagttcgttgtgatggcggcggacacggagcctctcgagatcctgctccacctccccttgttagccgaggataagaacgtcccatatgtatttgttccatcgaaacaagcacttggccgtgcttgtggtgtgacaagacccgtcattgcttgctcagtgaccagcaatgagggtagccagctgaaacaacagatacagggtctaaagatctttcagtgtgatgggcctcggcgacacatttttcagaggcttggactggtgatggtgtcttgtttactctaccctttncaaactatatttgaacactgctaagtcaatcatacttgaa

SEQ ID NO: 26523 - DNA, 929 bp, Zea mays
  Clone ID: MRT4577_124198C.1
tccggccgggaaccgaagcgtccgcctcccacacacgggactccggccgcgagaacccgcgactaagccaggacgcgggacgccacagccaccggcctcagcatccgcctaggacgaataacccttctaggctgccgccgccgccgtccttagctcatattgttgccggcgaagagcgccccagatccgcccctgctatggagtcggcggtgaacccgaaggcgtacccgctggctgatgcgcagctgacgataggtatcatcgatatcatccagcaggccgccaactacaagcagctcaagaagggagctaacgaagcgacgaagaccctgaacagggggatatcggagttcgtagtgatggcggcggacacggagccgctcgagatcctcctccacctccccttgctagctgaggataagaacgtgccatacgtatttgttccatcgaaacaagctcttggccgtgcttgtggtgtgacaaggcctgtcattgcttgctcagtgaccagcaatgagggtagccagctgaaacaacagatacagggtctcaaggactcgattgagaagcttctcatctgatttaccaaagacctttcagggtgatgggcctcagcgacacatttttcagaggcttggactggtgatggtgtcttgtttactagattttacgtctttccaaactatgtttgaacactgttaggtcgaccatacttgaattgtgcttatatctttgactgtcatgtattctgaagatgcatctgcattctggtgccttggtttctgttgagattctgaccatcattgtaacggttgattactatgagtttgagaattggatcgattggatggttgcaacttccatgtgaccaggacagataaaatcttagagattcagtttgtcccaaaaaaaaaaaaaaaaaagcggcc

SEQ ID NO: 26524 - DNA, 887 bp, Zea mays
  Clone ID: MRT4577_124199C.1
cattgggtacctcgaggccggccgggttgatactatatatatatactaaaaccggacttattataaaaaaaaaaaaaaaaaaaaaaaaaaaacagtctcggcctctcctcccggcttcctcacacggcactccagccgctagccctcactcaaccagacaaccagtacaccaccgccaccaagcccgggccgaataactctgccgggcaaccgccgccgccgcccttcgccggcaaagaacgcccacgagatccaccccggcctgctatggagtccgcggtgaacccgaaggcgtacccgctggctgatgcgcagctgacgatgggtatcctcgatatcatccagcaggccgccaactacaagcagctcaagaagggagcgaacgaagcgacgaagaccctgaacagggggatatcggagttcgtagtgatggcggcggacacggagcctctcgagatcctcctccacctccccttgctagccgaggataagtgttttttgttattagatctttttctgtgtgataagaacgtgccatatgtatttgttccatcgaaacaagctcttggccgtgcttgtggtgtgacaaggcctgtcattgcttgctcagtgaccagcaatgagggtagccagctgaaacaacagatacagggtctcaaggactcgattgagaagcttctcatctgatttaccaaagatctttcagggtgatgggcctcagcgacacatttttcagaggcttggactggtgatggtgtcttgtttactagattttacgtctttccaaactatgtttgaacactgttaggtcaatcatacttgaattgtgcttatatatttgactgtcatgtattctgaagatgcctctgtatcgtggtggctggttt

SEQ ID NO: 26525 - DNA, 822 bp, Zea mays
  Clone ID: MRT4577_12419C.1
ccggccggggttgttacgagttcatcccctcatccctgtcgagtactccacgccaccgagacgtttcgtcgtcgcctagacattccacgccgccaccgagtactccatcttccctctcagttacgagttcccatctttcgagtactcgccgccgccgctgttttgcccttttccacgccgtcgctgctgcggcagaaaaggatgcaccgccagaaatggagtccccccagaactggatgaccaagctcttgattggccctcgccggaaatggagtccccgccaggcgcaaccaaccttatccctctcaacgagatagttgtcgacatcaatggaacatttgtgccttcactgagtgctcccgcgccaaccaacacaggcttctccctcaccattgatgaggtagacaacacctggttggaggcaccaccagcagctgaagcacccccttctctcgttactccccaggaacacggtcacttggtgataaaacgcagtttagattgtctgtctcatctcacgaaaaatgatttcgagggtatttcaccggatctccgatgagaggaagaaggacctcaacatgtaccaagtgagaaagtgatgtacctcaaacttggattagctgctaaggatgaacgcgaaaacaaagtagagaggatgcttgcaattatacaggtcatgcaaatattcgaaatgagttggaagatgatggttcagccgccttaaattgtgtgatttcctgcccaccagactagagtgtttatgactctaccctcccgtgatggaggtgggagcctatcccatcgaagactgaatccggcttg

SEQ ID NO: 26526 - DNA, 830 bp, Zea mays
  Clone ID: MRT4577_1241C.1
gattagagaggctttcagcagcatggacgacttttactccttcaggtctggctttttggcgccgccaggccagacattttgttgcaggtcgatgctgttgctggtcgccgaacaaagcatgcaggggtagccatgtccaccggcccgaaagcacgcaggcccagccgtggatacatccaatgaggcaacgcgcttgagaggctttccagtttggtcgtgcatgtaattggcagtgtctgatgcctcaaccaccgtgagcagacgtctggataattggaggctagcacccggtctcctgctgctcagtggggtactggggttcatggtgcctaggggctgagctgcaagacgtgaagacgacggtgggaaaacgcgaggaaaagaaaaatcttgggccttctgccggcgtgggcttgtggtggcgggagggaaggcacatgtcaagatgcactagcatgactgtcttcgatgaactttaactgctttgagcctttgacaagcaacgaggcaatttcccgttctctatttaagacacttgtgtgttcgacacccttgtgcctcgccaagctaatattctggtttggttggttagatgatttggctacaacggcatctgcaactatctcttgtcagggtttttagggacgtaagtgctagcgctcgagtgtgaatcattattgttgccatttatgttatagttcgtaaaccaaacagttctctaattgtaaacgtggataccgcttcttttggctggtagcccacgacttattgtttgccccttctggacaaataccttagcaatacaatgctgaaacgaatcaatgcagggt

SEQ ID NO: 26527 - DNA, 147 bp, Zea mays
  Clone ID: MRT4577_124200C.1
gtttctctcccggttcgtcccctcttctgcgacgtcagggttgggttacggcactcgccgacgacgtcctacgcaagtgccgaggccttcatcgatctcttagccgtcgacaagcacccaagagatgcaagattgaatgagaccgca

SEQ ID NO: 26528 - DNA, 1213 bp, Zea mays
  Clone ID: MRT4577_124201C.1
cattgggtacctcgaggccggccgggagcctcggcctctgctcccggctcccccacggtactccagccgctagcctgcgactccgccaccgccagtacgccaccaccaccgagcctggactaccgccgccgcccttcgccgatatcttcagcggcgaacagcgcccaccagatcccgcccctgcgatggagtccgtggtgaacccgaaggcatacccgctggctgatgcgcagctgacgatgggtatcctcgatatcatccagcaggccgccaactacaaacagcttaagaagggagcgaatgaagcgacgaagaccctgaataggggcatatcggagtttgtagtgatggcggcggacacagagcctctcgagatcctgctccacctccccttgttagctgaggataagaacgtgccatatgtgtttgttccatcgaagcaagctcttggccgtgcttgtggtgtgacaagaccggttattgcttgctcagtgaccagtaatgagggtagccagctgaaactacagatacagggtctcaaggactccattgagaagcttctcatctgatctgccgaagacctttcagtgtgatgggcctcagcgacacttttttcagaggcttggactggtgatggtgtcttgtttactttgcgcttttcaaactatatttgaacactgttaagtcgatcatacttgaattgtactgcatcttatgtttgtgattgtcatgtaatctgaagatgcctctgtattgtggtggcttgtttctgctgagattccgtcacaatgatgtggtcggaatcggcacgaggcggacggaggcaaagcgaaggaaggaactcgccgtcgccgaactgcaactgcaactactacaggacccgattcccagagacagacaccgctgcaactgcaactgcagctgcgatggagatggcctcttcctccgcgccgaccgcgtcctacaacgtgtccgtggcacaggcggtgctgacgctctccatcaacgccatcctcctctggctcaccaccgtcatcaagtcctactcctcctcatcctcctccgcccgccgccgcgacgccgcccccgccccggcaccgccgtctccgtctccggctaagcccgccgccgctgccgccgccgtcgacttggacgcggtgctcgggctgatgggcgccggcgccgagtccgtcggcttcgaggaggcggccgc

SEQ ID NO: 26529 - DNA, 146 bp, Zea mays
  Clone ID: MRT4577_124202C.1
gtgctgctctttcgattcgagaagataggctggctctggatcagaagtggtaatcggaagagagatttagcttcgtgacgtcgatgtagtatatgtgccgcagatgtgatttgttctgaagggtgttatagtcacgttatcgggag

SEQ ID NO: 26530 - DNA, 153 bp, Zea mays
  Clone ID: MRT4577_124203C.1
cgtccgaattcccggtcgccaacctcctttacctcctcgctgccgtcaggaccccaatcgtggagaccctgtcccggggctcaggacagggatgaaaacaccccgtcaaacaaaccgcccgcaggcacccttaagcctctctctcgcacggac

SEQ ID NO: 26531 - DNA, 366 bp, Zea mays
  Clone ID: MRT4577_124204C.1
tgatgcacgctgccgcggcttgagctctgtatactgtagcgcgctcgccctttttttttttttttttttttttgtttttttttttttttttttttttatttttttgccaaaaaggcattttaaatattccttggatagatctaccaaaaaaaccgttccctttttttgggtggacaccttcaggcccagggcataaaggaccaacaggaccttaatttttcccttgtgaagggttctggtctacccattaaaaacaaattaatcattggggaagcccctgagttgacgggggctcctttttttcactcacaaatctttaggggtctcaaaataagcgcgctccctaagagcttaaacacggtaaaa

SEQ ID NO: 26532 - DNA, 175 bp, Zea mays
  Clone ID: MRT4577_124205C.1
ttttccatcaagtggtctcatcaaaccgtgcttctctgcacatgaacttttgggatgaacttactcttgcctttccttacaagtccagcaaagagctagtgagctactacttcaatgtcttcatgttgaggaagactgcttagcataacaggttcgacccatctaacattgacag

SEQ ID NO: 26533 - DNA, 2443 bp, Zea mays
  Clone ID: MRT4577_124206C.1
catcgggaacttcgactgcggccgggaaaaacgacctcctccgcccgcccgtcggcgttgtttcgtctccaccgccgctctcctttccagtctcccaccaccgctcgtctccccgtaccgcccgcaacccccctcccctgcgagatccggggcgcgatgtggcgcagctgcgtctcgcgaggcctctccagggccaaggcctccgcctccaggctcctctccacggcgtcgtcgtcctacacggtggtcgaccacacctacgacgcggtggtggtgggggccggcggcgcggggctccgggcggcgatcggcctctccgagcacggcttcaacaccgcgtgcatcaccaagctcttccccacgcgctcgcacaccgtcgcggctcagggaggcataaatgctgcacttggaaacatgagtgaagatgactggaggtggcatatgtatgacactgttaagggaagcgattggctgggtgaccaggattctattcagtatatgtgcagagaggcaccaaaagctgttatagagcttgagaactatggactaccattttcaagaactgaagagggaaagatataccaacgtgcctttggagggcagagcttagattttggcaaaggtggacaagcctaccgttgtgcctgcgctgctgacagaacaggacatgctatgctgcacacactatatggtcaagcaatgaagcacaacactcaattttttgtggaatactttgctttggaccttctcatggacaatgaaggaaaatgtcagggaatcattgccttaaacatggaggatggaactcttcaccgtttccgtgcttctaatacaattctagccacaggaggttatggcagggcatatttctcagcaacctcagcacacacttgtactggagatggcaatgctatggttgcacgtgctggtttacctctccaggatcttgagtttgtacaattccatcctacaggcatttatggtgctggatgcctgattactgaaggttcccgtggtgaaggtggtatccttagaaatagtgaaggtgaacggttcatggaacgatatgctcctactgcaaaagatcttgcttctcgtgatgttgtttcaagatcaatgacaatggaaattagagaaggacgtggtgtagggccattgaaggatcacatttatttgcatctgaaccatctgccacctgaggttctcaaggaaaggcttcctggtatttctgaaactgctgctatttttgctggtgttgatgtcaccaaggagcccattccagttttgcctactgtgcactacaatatgggcggtattccaacaaactaccatggggaggtagtggatatcaagggtgataatccagatgctgttgttcctggtctaatggctgctggtgaagcagcctgtgcatctgttcatggtgcgaataggctaggcgcaaattcgcttcttgacatagttgtttttggcagagcttgtgcaaacagggtagcagatatttctaaaccaggtgagaagcagaaacctctggaaaaagatgctggagaaaagaccatagcctggttggacaagctgaggaatgcgaatgggtcattgccaacttccaagatccgtctcaacatgcagcgtgttatgcaaaataatgctgctgtattccgtacacaagaaacacttgaagaaggttgtgagctgattagcaaaacatgggaaagtttccatgatgtgaagctcagtgaccagagtctcatttggaactctgacctgatagagacccttgagctggaaaatcttttgataaatgcatgcataaccatgtattcggcagaggctcggaaggaaagcagaggagctcatgctcgtgaggatttcacgacaagagatgacgagaagtggatgaagcactcactggggtactgggaaaacgagaaggttcgattggcatacaggccagtgcacatgaacacattagacgatgaagtagagtccttcccgccgaaagcccgtgtctattgatcgattcgagcctcacaccctcgggaattccgtgtaaggtgttaataaagcagatgggcgttcctggctgagaacatgatctgaactcgtgacccccctttttctgtggttctgtattttgtctgatttgctagaaataaaaggaacacatgctaatgcctgacagacgtttgtgtacatgaaattttgcatgggtttgttacttgttgatgctgtacctgctgttttgagctcgcatgattcatgaacgttgcctgataaaaaaaaaaaaaaaaaaatgtctaaaaaaaaaaaaaaaaaaaaaaaaaaaagccacttctccagtttagacagtgtagtataatgcaaccttatggagagctgctgctacgtactggcacaactacagctagagactagagtgtatgttctggatgctaaataggag

SEQ ID NO: 26534 - DNA, 2397 bp, Zea mays
  Clone ID: MRT4577_124207C.1
ccccgcgtccgacaaaactcccccgacgtcggcttctccagcgccacgctctcctctccagtctccacctcccctctcccctcggcacgagggtcctccccccaccgccctccccaccccgcgcgtgcgccgccgccgccgcgagatccggggcgcgatgtggcgcagctgcgtctcgcggggcctctccagggccaaggcctccgcctccaggctcctctccacggcatcgtcgtcctacacggtggtggaccacacctacgacgcggtcgtggtgggggccggcggcgcggggctccgggcggccatcggcctctccgagcacggcttcaacaccgcgtgcatcaccaagctcttccccacgcgctcgcacaccgtcgcagcacagggaggcataaatgccgcacttggaaacatgagtgaagatgattggaggtggcacatgtatgacactgtgaagggaagcgattggctcggtgaccaggattctattcagtatatgtgcagagaagcaccaaaagctgttatagagcttgagaactatggattaccattttcaagaactgaagagggaaagatataccaacgtgcctttggaggacagagcttagattttggcaaaggtggacaagcctaccgttgtgcctgtgctgctgacagaacaggacatgctatgctacacacgttatatggtcaagcaatgaagcacaatactcaattttttgtggaatactttgcattggaccttctcatggacaatgaaggaaagtgtcaaggaatcattgccttaaacatggaagatggaactcttcaccgtttccgtgcttctaatacaattctagccacaggaggttatggcagggcatatttctcagcaacctcagcacacacttgtactggagatggcaatgctatggttgcacgtgctggtttacctcttcaggatcttgagtttgtacaattccatcctacaggcatttatggtgctggatgcctgattactgaaggttctcgtggtgaaggtggtatccttagaaatagtgaaggtgaacggttcatggaacgatatgctcctactgcaaaagatcttgcttctcgtgatgttgtttcaagatcaatgacaatggaaattagagaaggacgtggtgtagggccattgaaggatcacatttatttgcatctgaaccatctgccgcctgaggttctcaaagaaaggctccctggtatttctgaaactgctgctatttttgctggtgttgacgtcaccaaggagcccattccagttttgcctactgtgcactacaatatgggtggtatcccaacgaactaccatggggaggtagtggatatcaagggtgataatccagatgctgttatccctggtctaatggctgctggtgaagcagcctgtgcatctgtccatggtgcaaataggctaggcgcaaattcacttcttgacatagttgtttttggcagagcttgtgcaaacagggtagcagatatttctaaaccaggtgagaagcagaaacctctggaaaaagatgctggagagaagaccatagcctggttggacaagctgaggaatgcgaatgggtcattgccaacttccaagatccgtctcaacatgcaacgtgttatgcaaaataatgctgctgtgttccgtacacaagaaacacttgaagaaggttgtgaactgattagcaaaacatgggaaagtttccatgatgtgaagctcagtgaccggagtctcatttggaactctgacttgatagagaccctggagctggaaaatcttttgataaacgcatgcataactatgtattcggcagaggctcggaaggaaagcagaggagctcatgctcgtgaagatttcacgacaagagatgacgagaagtggatgaaacactccctgggatactgggagaacgagaaggttcgattggcatacaggccagtgcacatgaaaacattggacgatgaagtagagtcattcccgccaaaagcacgtgtctattgatcgattcaagcctaacacctcgggaattccgtgtaaggtgttaataagggcttgttcggttagctctcaatccatggattgagtgggattggatgggtttgaatcccaaacaagtcaaatatcttctcaattttttccaatcacatccaatccatatgtattgggaataaccgaacaagccctaaagcagatgggcgttcctggctgagaacatgacctggagttgtgtccctcattttctgtgtttctgtattctgcctagtttgctagaaataaaagggtaagatagaacacatgctaatccctggctgatgtaatgatgtttgtgtacatgaaattttgcatgggttgttatctgttaatgctctgcctggttcctt

SEQ ID NO: 26535 - DNA, 310 bp, Zea mays
  Clone ID: MRT4577_124208C.1
ccggggttctatctgtcatattttcaccggacctatctatgtgggtgtgatcggactaattaaaagttcgtgtctctgtggcatgtgcatgcatggaccatatcctcgggcatgtctattatgtgtgtgacgcaccgtcgatcggtacgtataggatgcctgttgttagcatgtgtgtcattacctagtcgtgtgtagggtatgaatgtgcttgccgggcaaaagttgcatctagctaaacagtagtattacttttgttaaaaaaaaaagaaacaccaccaaaagaatataaaaaaaaaagcatccaatg

SEQ ID NO: 26536 - DNA, 295 bp, Zea mays
  Clone ID: MRT4577_12420C.1
aatttttcttttttatcattttttcacttatgaggttctaaaacaccattaactatataaaaatgcttgggcacccaaacttaaacttaacaattaaaatggggggttatcccaaaaaaaagggccaattgttcatccctggggtccccaaccggaggggggaaacaacggctccctttcccaattattacaaaaaggcgggggaattatttaaataatattgatgtttaaaaaaaaagggcctctcttttatttttatgaaaacccccttggaattcgggaatttccctttttt

SEQ ID NO: 26537 - DNA, 2041 bp, Zea mays
  Clone ID: MRT4577_124210C.1
gtcggtgcggtgggaggacggggagagcgagaggtatggacgaacgagtaataaagtggtggggatgagcgcgccgaggaggacaattatcaggcgctgctcacgaaagatatacccgcttttttttttttttttttttttttaactgacagtcccaaattcccattctaagtgaaaaatacagtctcgtatacagtatctgagcagttttctggatacatttgtcatcagaagttgacttccaaaaacatcgaagctttgcaacacagtaggtgtttctgcaaattctgcagccttctacttgagatgcacactgaaactcagcactctgctcaggctgacattattcccacccgtttctggtacaccaccagcagctctgacaacggcaaagccggaggcgccactgtaccgccccgtccctccgacgaccgcgacgtgagactcctcctggtcgtcgcggcggacgccgaagaagctgatgctgtcgcccgcgccgtcgccggcgaacgaggccttcacggccaccatatggctgccgttgtcagccacgccggtgacgaggacgccctgcagcctcccatccagaggcagcccgaactccttgctgccgcggagccgctcgtcgaccacggtgaccgcggcaggccggagcgcgtccggcctcgtcaaggcgcgcagccagcggctgccgattggcccctcgtccgtgaagaccgggcgccgcgtggaaggagctgcgggtttgagaggagcaaggcaaatgtcatgggaactttgaatatgttgggtctggcaaagcgaattggtgcaaggtttttgttgactagcacaagtgaagtttatggtgatccgcttgagcatccacagaaggagtcatactgggggcacgttaatcctataggtgttaggagctgttacgatgaggggaagagaacagcagagactttaactatggactatcatcgtggtggtggtgttgaggtgcgtattgcccgtattttcaatacatatggtcctcgtatgtgcctcgacgatggtcgtgtggtcagcaattttgttgcacaggcactgcgaaggcaaccgatgacagtctatggtgacggaaaacaaactcgaagtttccaatatgttgctgatctggttgctggactgatggctctaatggagagtgatcatattggtcctttcaacttgggaaacccaggagagtttaccatgttggagctagcacaggttgtgaaggaaacaattgacccaatggcaaccattgaattcaaacccaacacagctgatgatccccatatgagaaagccagatatcaccaaggctaagcaactgctacattgggagccaaaggtctctctcaaagaaggccttccgctaatggttcaagatttccgtcaaaggatctcggatgagtaatcaaagcaattcttttttccccgaatgtgccatgcacgtgtttgtaatcagagcaatcgtatgatactggtgaccggtttgattctgaacgatgctgcaactacagtcaggagctcttcaccaactggaggcctggagccctgcagtacgatgtactgtgtacacaacagactgtagaatcacgcaggccccatttggagtgtggggattccatagtatttctacgacatagtactatttctgtgaaatagctgaaaagttcatgggttcgtgtcgatgttttatatatatatcttggtgaggcagaacagaagcaatcaattgttttttgtgcatgtgtgaaattcctgaattgtgggtggtgagagataggatacaatgctgtatttcaggagcttttgtaacacgggaacattcatcatgtgaaaaatgtaactgaatgtgttggccagctcaaaaaaaaaaaaaaaataaaaaatttgggcgacgcgatgccggtcagcgtgatcgtttgcggagctgctacgatactggtgaccggttcgattctgaactatgctgcaaatacagtcagaagctctttatcgattggagccatgcagtacaatgtactgtg

SEQ ID NO: 26538 - DNA, 1616 bp, Zea mays
  Clone ID: MRT4577_124211C.1
gctccatatgttcttaggttgctggattgatggctctaatggagagtgatcacattggtcctttcaacttgggaaacccaggagagtttaccatgttggagctagcacaggtttgtagacaatttgttaaaaaaaacttaaagtgcacaattgacaatagcaccttccccaggttgtgaaggaaacaattgacccaatggcaaccattgaattcaaacccaacacagctgatgatccccatatgagaaagccggatatcaccaaggctaagcaactgctacattgggagccaaacgtctctctcagagaaggccttccgctaatggtcaaagacttccgtcaaaggatctcggatgagtaatcgaggcaatcctacgatactggtgaccggtttgattctgaactatgctgcaaatacagtcagaagctctttatcgattggagccatgcagtacagtgtactgtgtacacagagactgtagaatcacccaggccccatttggaatgtggggatccatacaatttccactggatagtactgtttctgtgaaataactgaaaagttcatgggaagttcgtgttaatcttttttttttatatcttggtggggcagaacagaagcagtcaaatatttttttgtgcatatgtgaaattccagagttgtgggtggtgagagataggatacaatgctgtatgtatttcaggaacttctgtaacacgagaacattcatcatgtgaaaaaatgtaactgaatgtgttggccagctcgctcttgctgtacattcaactgacagtccacaaattccccattctcaagtgaaaaataacagtctcgtatacagtatctgagcagttttctggatacatttgtcatcagaagttgacttccaaaaacatcgaagctttgcaacacagtaggtgtttctgcaaattctgcagccttctacttgagatgcacactgaaactcagcactctgctcaggctgacattattcccacccgtttctggtacaccaccagcagctctgacaacggcaaagccggaggcgccactgtaccgccccgtccctccgacaaccgcgacgtgagactcctcctggtcgtcgcggcggacgccgaagaagctgatggtgtcgtccgcgccgtcgccggcgaacgaggccttcacggccaccatatggccgccgttgtcagccacgccggtgacgaggacgccctgcagcctcccatccagaggcaggccgaactccttgctgccgcggagccgctcgtcgaccacggtcaccgcggcaggccggagcgcgtccggcctcgtcaaggcgcgcagccagcggctgccgattggcccctcgtccgtgaagaccgggcgccgcgtggaaggagcagctgtgggtttcggcgacgcgacgccggtaccggtggtatacagcgtgatcgtctgggcggagctgcgggacggcggcgaggaaccgcggcgtgccggacgggcgctggctgccgtgctggtcaccgcgaggaggagcgcgagagcggcggcgcaggcttgcttgaggatgcgagtgcgagattgcgcgtgcatctttgggcccggccggggccgtgcgtgtcccggccga

SEQ ID NO: 26539 - DNA, 308 bp, Zea mays
  unsure (1)..(308): unsure at all n locations
  Clone ID: MRT4577_124212C.1
gcagatttgggtaccacccaagtattgactcacccatcancaaccgctatgtatttcgtacattactgccagccaccatgaatatngtacggtaccataaatacttgaccacctgtagtacataaaaacccaatccacatcaaaaccccctccccatgcttacaagcaagtacagcaatcaacccccaactatcacacatcaactgcaactccaaagccaccccttcacccactaggataccaacaaaccttacccaccctttaacagtacatagtacataaagccnttaccgtactagcacntacag

SEQ ID NO: 26540 - DNA, 423 bp, Zea mays
  Clone ID: MRT4577_124213C.1
ggggcgtgggggcaatttttcaaaaaaaaaagggcccccgggttcctgctaaatgggtttcttacacaaaaacttcttttgtcgtttcgggggaaaacccgtaaagaagttttagaagagtaaaaccgtccctttttttttgccaaatcggggggggggggtgcatttttacaaaggcagttgttttttggacagggaggggcttggttaacaaaaaaaaaaccttggggtgactcgggaggggcctgtttgcaggctttcactgcaattaaactcctgggggggggggccgataaactccccgtgattttgggggggggacccccccccccaagaaatttgcttttttaacatcaggcaaccttgtttggaaaatcccccttttttttcaaaagggggttttatcctcgggccgaatttcgg

SEQ ID NO: 26541 - DNA, 793 bp, Zea mays
  Clone ID: MRT4577_124214C.1
cgagccgccggggaggctccggctctccgctgtagggttttctggtcctggtaggcgagctggggaagacgcaaggtactgcggctgcgcgcgaggggtcgtcggacgaccgacgaggacgagcggcataggcgcgtgcatggcgctcacgaacttcatcctcacggtggtgggggtgggcgcggcggtgatgctgctgcggaaagacgtcaagcagtcggccaccgtcttccgccgcaacgtgcgccacatccgcaactggctcgaggaggagtccgccgccgccgccaaatctactgaacagtcttcagtgaaggagttggagtcccaagctgccaagaaagacgctgtgcccaaggacgacaaacattagatgatcttacaccctgtttcttgtaatgcgttggcagtttgaggtccaggattttgaattggtcctttaaaaaaaatgtatgtgttgtaggacctttagttctgttggaaattttactgaataatggaagacatcttaggttcaaggttctgaaatgggatcttatatctcaatgagattatgatggtggatatctgcacatcatgtctaatctttgtcgagtcttcctgtgcttcagattaaattgtacctggaaaaaggtgtaccatcctcactctacattaatctgacaacccgttatacatgtaatccgataatggtccttgtattcagtatttgatgacataagcattgattgcgtataatctatttttatcatgacttaaaaaattacaccagctgacaaaaaaaaaaaaaaaa

SEQ ID NO: 26542 - DNA, 1468 bp, Zea mays
  Clone ID: MRT4577_124215C.1
aggccggccccgccgtcgactccaccatccaggccctctccccctacctcgagcccggggacgccatcgtcgacggcggcaacgagtggtaccagaacacggagcgccgcatccaggaggcggcggcgcgcggcgtcctgtacctcgggatgggcgtctccggcggcgaggagggcgcgcggaacgggccctcgctcatgcccggcggcagcgccgacgcctacgccaacatcagggacatcctccagaaggccgccgcgcagacggaggacggcgcctgcgtcaccttcgtcgggcccggcggcgccggcaacttcgtcaagatggtgcacaacgggatcgagtacggcggcatgcagctcatcgccgaggcgtacgacgtgctccgcaggctcgggggcctgtccaactccgagatcgccgacgtcttcgcggactggaacaggggggagctcgagagcttcctggtccagatcaccgccgacattttcaccgtggctgacccgttggacgggagcgggagcgccggcggggcgctggttgacaggattctggacaagactgggatgaaggggaccgggaaatggaccgtgcagcaggcggcggagcttgcggtggcagcgcccacgattgccgcgtcgctggacgggaggtacctgtcagggttgaaggacgaacgggtcgcagccgctggggtgctggaggaagaggggatgccggcgggcctgttggagacggttaatgtcgacaagaaggtgctggtggatagggtcaggcaagcgctctacgcctccaagatttgcagctatgcgcagggcatgaatctgctgcgagccaagagcgtggagaagggatggaaccttaacctcgcagagcttgccaggatctggaagggcggctgcattatccgtgcgaggttccttgataggatcaagagcgcgtacgacaggaatcctgagctcgccaatttgattgttgacagagagtttgcaagggagatggtgcagcggcagaacgcgtggaggtgggttgtggcacgcgcggtggaggctggcattagcacgccaggaatgactgctagcctttcgtacttcgatacctacagatcaagtcgattgcctgcaaatctgatccaagcgcagagggatctgtttggtgcacacacctatgagcgcattgactgtccgggttcattccacaccgaatggaccaagctggcgaggaggagcaatggcgcagccatttgaggaattgatccaagtcgagtacttcaaataatgctgtactgtatggttggcaggtgaagaacattgtgtagcttcagttttactgtgatgtaggtacacacagtttgattctcttaattttggtatgcaattgctatgatgcctctcaaactccaatgttgtgtgtttaaagagttatctgaaatgtgttgaaactgctactaagagtagcgagttttgcc

SEQ ID NO: 26543 - DNA, 237 bp, Zea mays
  unsure (1)..(237): unsure at all n locations
  Clone ID: MRT4577_124216C.1
gcctcgaaaccgagggggccnacagcccgggaagagccacctaagaccaccggccggctacccccccncagggggaaggaccaacgcgccgagcgaagaagagggggcagacagacgaggacgagcacctgaggcgcgagaacgagggccaccaccccacggcggccggcagcggcggccacgacggcgccccccagggccccagaagcaaccggaaggcgcccaagggcaaagccc

SEQ ID NO: 26544 - DNA, 2689 bp, Zea mays
  Clone ID: MRT4577_124217C.1
agaagcccattagcccctctcggccaccaaaaaaaactctaaccagtcgtgtctctcgcccccagccgttgcctccgttgttgcgcgtgtagcagctgtgccctgcgcctcgcccttgcaataggtgcgcccctgccatggcggattcacccccatctcctgtcgcctcagcccgcgttgccatctcttctgctctctcccacctctctagtttggagctcttcttcgggcagcagaggacgacacagagtcctggattcgtgacccatcgactcctcacccgctagatttgtcgggaaggacgccggctatgtcaaccgccatcgacggagtacatcctcgtataccgagccggacgaactcgaacgaggcgacgacaaatcggtggcagtgcaacgttggagaagacgaacaccctgccaccaagtctgctccccgagattccaacgacgtgtcgagtcaagttcacgcccccgaactctctctctcctcctcggccacctcccatccccgttccttcccctccatctcatcaccgccgccagcgccaaaaccctacccacccaccccccgatggcctccccggcgccggcctcccccgcggccgcggcggcgcactgccccccgccgcgcatcgggctcgcgggcctcgccaccatgggccagaacctggccctgaacatcgccgagaaagggttcccgatctccgtctacaaccgcaccgccgccaaggtggactccacgctgtcccgcgcgcgggacgagggctcgctgccggtgctgggccaccgcgacccgcgcgggttcgtgctagccctcgcccgcccgcgcggcggcgtgctgctcgcccaggccggcgccgccgtcggcgacaccatacggcccctctccccctacctcgagcccggtcacgcgatcgctgaccgcggccacgagtggcatctagaccacggatcgcccgttggaggagagcggcgcgcggcggggcgctggttgacaggattctggacaagactgggatgaaggggaccgggaaatggaccgtgcagcacgcggcggagcttgcggtggaagcgaccacgattgccgcgtcgctggacgggaggtcgcagacggaggacggcgcctgcgtcaccttcgtcgggcccggcggcgccggcaacttcgtcaagatggtgcacaacgggatcgagtacggcgacatgcagctcatcgccgaggcgtacgacgtgctccgcaggctcgggggcctgtccaactccgagatcgccgatgtcttcgctgagtggaacaggggggagctcgagagcttcctggtccagatcaccgccgacattttcaccgtggctgacccgttggacgggagcgggagtggcggtggggcgctggttgacaggattctggacaagactgggatgaaggggaccgggaaatggaccgtgcagcaggcggcggagcttgcggtggcagcgcccacgattgccgcgtcgctggacgggaggtacctgtcagggttgaaggacgaacgggtcgcagccgctggggtgctggaggaagaggggatgccggcgggcctgttggagacggttaatgtcgacaagaaggtgctggtggatagggtcaggcaagcgctctacgcctccaagatttgcagctatgcgcagggcatgaatctgctgcgagccaagagcgtggagaagggatggaaccttaacctcgcagagcttgccaggatctggaagggcggctgcattatccgtgcgaggttccttgataggatcaagagcgcgtacgacaggaatcctgagctcgccaatttgattgttgacagagagtttgcaagggagatggtgcagcggcagaacgcgtggaggtgggttgtggcacgcgcggtggaggctggcattagcacgccaggaatgactgctagcctttcgtacttcgatacctacagatcaagtcgattgcctgcaaatctgatccaagcgcagagggatctgtttggtgcacacacctatgagcgcattgactgtccgggttcattccacaccgaatggaccaagctggcgaggaggagcaatggcgcagccatttgaggaattggttggtatgagaagggatgttttctgctttgtgtgatttctctctgtgggttatcttttgttttactattgttatctttatgcttctagatccaagtcgagtacttcaaataatgctgtactgtatggttggcaagtgaagaacattgtgtagcttcagttttactgtgatgtaggtacacacagtttgattctcttaattttggtatgcaattgctatgatgcctctcaaaccacaatgttgtgtgtttaaagagttatctgaaatgtgttgaaattgctactgacagtacgaagtttttccaaaaaaaccccttgtctgaaacatgttgaaattgctactaagagtagtgagtgttgcatcatagcctctcgaatcaatgatgtctttaaagaatggtatgccatgtgtaaaaagtgctactacagttgaggtcctagtgcaccagtattgatggtaacctcgtcaaattgattgagatgcggacatttgtgttaacatggtgccatgggttgcccactgaaagttgttgcagttactagtaagttcaccttgtgttaaattctgaaaattaacagtcacagta

SEQ ID NO: 26545 - DNA, 327 bp, Zea mays
  Clone ID: MRT4577_124218C.1
agcggcgggatgtcctcacagagttaagggatatgatgagtggtaaaagctcggttttttattccgagaggggtgcctgccacaaataagcctgttacgacaacatggtgctcacaatttgtatcatctgatcccgaaaaaaaaaaaagaaaagaaaaaaaaaggaatgaaaaaaaacacagaaagaaaaaaaatgaaaaaaaaatagaaaaaaaatgaataaaaaatactcctttgcccggttctgatccagagggttatgaaaaagttcatatgcctggagtcaaggtccacttcccttcgggtctattgaccggacccgtcctt

SEQ ID NO: 26546 - DNA, 823 bp, Zea mays
  unsure (1)..(823): unsure at all n locations
  Clone ID: MRT4577_124219C.1
ccggccgggggcctgtatacataggtacagcttctaccagcttaatacgtatctagtcattcacacatctgtcccatcaagccagtaatcacgtcccagtgacacaggtcgatacattgaagaaccttattatcctcccgtcgaccgctcgcttcacaatattgattcacggccaacgaattgcgtccccagaaagctgcgtctgaaacaaaacatcgtctcttttgcctgtcatatcgtcgtgaaccgacaaagtccacgagtcgcaaataccaaggtttttgcatctcgatcaagcagaaaggcaatcgcatgacaggcaactttaccgcacgcgtgtctgcacgagctcgacgttcgtaaggctgcttccaagcgaggacggggagccgtgctccgggtatggccgacgagacctcaggtcaaccagtaaacaagccagcaaacactcttgtgcaacgaccatccgttaggactcttgatacagttgtatatcttactggatatcacttcccatcacatttctgatccgaaattcacaacacaccatccacaatgtcgtataagctgggaatcacctccatgtcgctgggccgcgccacagccggccactccctcacacacaagctcaacatggcccaaaaatacggctacaacgggatcgagctgttctacgaggacctggtcgaggaggcagccacccgtttcgggaatggggcgcccccttctaaagaagcccagctggaggctgcccgatatatccgtgggctctgtgccgagcgtgatctgttcatcatctgcctccagncattcgcacactacg

SEQ ID NO: 26547 - DNA, 314 bp, Zea mays
  Clone ID: MRT4577_12421C.1
agtgatggtcacgcatactttacagaatatttaagtttgttgcatcacgaacgccaaatcaaccccacttcattctatcactgtggaaaaattgaactgatcacatactccaaatgtgccttcagctcgaaagaaggtgaaagatcaacctcgaacaaacatccgggtggcaagggagtggtaacagtccaagggcactcgcaatttatttttaggcacggggggcaaccctggtcaaaatgccctcttgccctttacatttgcctaggaacctttaaaactccctaggggcacgaatcacccttccccttttt

SEQ ID NO: 26548 - DNA, 399 bp, Zea mays
  Clone ID: MRT4577_124220C.1
tctgacacatcgcaaaaaaaaaaaaaaaaatttatttaaaacaaaataaaaaaactaaaaagaaaaaattaaataaaattacaccaataacctaattatatttaccaaaaaattttcaatactagcaaatcaatataatccactaattctttggactataccacaaatttctcacacatgctatattttcacgacccacaaatactctatctaatccggctctatataacaattcacactaatcatcatatcaccaatgtcagtgctcatactgttcatctggttggcacttctctgtcaaatccttatctttctttcgcatccactctaaatggtctaactgtaccactgcatgtcctttcaaatcatgaactgctcttatttatcaaatctgtaatt

SEQ ID NO: 26549 - DNA, 263 bp, Zea mays
  Clone ID: MRT4577_124221C.1
ccgttgtttacggtgacagtaccacccatctcggtgtggagctggagtgcacccacggggcggtctgtgagggctccactggaccagccaacctgatcgtgcaccggcggcggtgcctcggtaacccgtaacaagggccagcgcctgcccatgtcctttctatcccgcgcgagatggaagagtcctccaacgactcctagaaagaggtcgtcgctgcctcccattgaggacactctcgagaacggcgcttacgggcactccta

SEQ ID NO: 26550 - DNA, 541 bp, Zea mays
  unsure (1)..(541): unsure at all n locations
  Clone ID: MRT4577_124222C.1
aaagaaaattcttctttattacaataaaataaaatgttacagaaataataaaatttgaaatgaaaatttgatcatctttagatacgttctgtgacataaacttttgctgttgctggagcatttgaacgacgtactgcaaaagatacaagtacagccaatgcaatgagcacgcatccaagtgaattgatgacaagaccctcctctgtaaatttcgaataactttcgcctaacgtccaaatcgctttttgtgttaatccacttaaacagctggaaatggccaataaaaatgttgctagaccgatactggcgtgcacaggaactaatgcaccacggcaaccataagtcattttattgcaaattaaacaaacgaggaatgtgaagaaaccaatcacaaattgtaatgcaaacaagcccattgtaaccataccaagccatgaatgtaaggagtaaaaatttggtttcggtggattatccaaattatgggaatcatacacggccaaaaatccgattgcaatacatgngaattgctaatgtatggaac

SEQ ID NO: 26551 - DNA, 328 bp, Zea mays
  Clone ID: MRT4577_124223C.1
tgctcgtttgagcggaacccgcagccccaccggggaggggcacgtttaaacacagggtctacgtgtccttccaaacactagcgcaagctggacgtggataaaaccaatcagagctgctacggggagaccaagtcgaccgacctgacaactgacagggcccatcgaacggaactgcccactcaaaaaggaaggaccagcacacgatgtgcagaggtcatactctggcttcagaataggtcgaggaatacgagggtaagcctcccaaggaaacaatattcaacaggaagggctaccctcctgttgagcttggggaaggaccctacaatgc

SEQ ID NO: 26552 - DNA, 560 bp, Zea mays
  Clone ID: MRT4577_124224C.1
gggacatgtacttaagcggtgatggaacaacgactactcgagggctcagatgaattccagctactatggcaaggcacatgcatgatcctcgagacaactctgtaacactacagcatccacacaaaaaaatgcctgaagccgctcccatgagttcagaagcctgaaggagagaagtgaacctacattgaaagcgttgcagccttatattgaacacaagatgaacaccctgtacactatatgctcagcttattactgtttcaacaaagcttgaggaggatatttctcgtactgcaggtgcatgacagactgtgaggaccatcgcagcgacttcctataacacgggcatacatacctaccatcgaagctgtactgcgacactccactctgaaggggggtacgaaagagcaccttcaaaagtggagggtgccccaaatacggaagcggaagccgtggctgtatcgacgatgagagacgaaccgctcgtggactatgagaggcgcgggctacagtagctggcccttccgatgatgaagagacccgtacttcccatacggaggaac

SEQ ID NO: 26553 - DNA, 240 bp, Zea mays
  Clone ID: MRT4577_124225C.1
gacgtttccctgcctgccacaacaatacatgggcgagctaaagcctttttggacgtaaacgccgcactcccgaatgacggacacaatggccaggcactcaggccccaccacgcctgcctacacgaccctgtacagctcctaatacaccagctggaagctcacctggacaatgggcaccccgcgcaaagcctcgaacggaaacggcaactgacggacctcaaaaaacatcttcaagaacca

SEQ ID NO: 26554 - DNA, 129 bp, Zea mays
  unsure (1)..(129): unsure at all n locations
  Clone ID: MRT4577_124226C.1
gcggcgtggcgtgaagaggggggttctttcagctgcgtatggactcatttcacgagcgtagcgtgtcgactgatgtgcgncgccgtatctcgttgagagggcagggtggtgttgaggatgcgttgaana

SEQ ID NO: 26555 - DNA, 286 bp, Zea mays
  Clone ID: MRT4577_124227C.1
gtcagatcgtgacatgtctaaccatactaaagctagctactgggaagagcttccttgtgggatatacagcatgcatatgaaagacattggaaagcatggtgcatgcatgaaggaagggtggattgtggaagttaacacacataaatggatggcttcttcattgaatggattgatcaaatgggagaggaaactcacagttcctaccatggagaacattcctgttgacagagggaaccatcagttgtctcagagcttcataagctcaagagaacctgaagaaaatacg

SEQ ID NO: 26556 - DNA, 316 bp, Zea mays
  unsure (1)..(316): unsure at all n locations
  Clone ID: MRT4577_124228C.1
gctcgctccctccttcccgtggggtgccgggggcgggtttgntggcgnccgncgtgggtgnggctcccgcgccgttggtgggtgcggncccatggcgcccgccgtcgccccgggggggcctgctgccgncgcgaagccggccaaggcctagaagggcaccgcgcctttgtggggggggggggccgncccacccgccgttcgccgtggtgggctcgggggcggtcacgttgttcttgggggagggcggggtcctgcngcttttcgattgccaagtttgtgggggggctgctcttgggcttgctcccgcccttcttcc

SEQ ID NO: 26557 - DNA, 218 bp, Zea mays
  Clone ID: MRT4577_124229C.1
tgtctctaccttttgctgcggctacgcacacatccgcccgtgccccgcatctccgcagcccctgcgtcggtgccaaatatgcatgagtcttcgccaaggaccctcactggcgaagactatcaccgctggaggtgggagtctatctgacacctattgacaacgtcagaggccaagatccaggacaaggtagggcatcccccgagaccagcagcgggtgg

SEQ ID NO: 26558 - DNA, 564 bp, Zea mays
  unsure (1)..(564): unsure at all n locations
  Clone ID: MRT4577_12422C.1
cccaancaaagacgagggggaacaaaaggcgaacgaggncgncgcagcacnnccacgggncaagaaggnagacgncacaagggcggcacaacccgcacagccggnacanggaggggagcnnccagaagggctacagaagagggggaagcaaagctttttttttttgcaagggaggggnagggaaancaacngnngcngnaaancnngccnacacaccacccggaangggcgcccgggnnggaancnncgacgccgacgncnnnggcccaagcnaaccgacnanggcnncnccngaaaaccggnngcnagngangaacccagaaagcaaanananncnnccgaccgagnannngggcgncaaaanggngncccccgggnnngcnggacaaggaagggcgaacacgcggggnccaanggnnncaggagncancaancagcngcngaccacnacngacnggggngaacnngacnaccnnggcancganangccnccnggaacaggcgacanacacnnaacactcngncaggnggcnccanngacngcagcagngaaggggaccaccc

SEQ ID NO: 26559 - DNA, 370 bp, Zea mays
  Clone ID: MRT4577_124230C.1
cattcagcttacttagaaccggatggaaaggaggtgttgtatggattagaaagcccccacaagcattcactcacatcgaccaaccaaccgccataccaacctacagaaaagaatgtgctactgacaaaacatacatatgcatcaccgcacatatgcccgcacccacacacacacatacccatacagaccgtcatccaacccacaccgaacgcagcaatatatgggtctacagcagatggaatgattcataccccctctcactccgtgaggaaatgagcacgacatactaacatgaccaacgggatcagctgatctggatcgccgccaacatctacataagactatcaaagaacccggcaaaaaatgcaaa

SEQ ID NO: 26560 - DNA, 331 bp, Zea mays
  unsure (1)..(331): unsure at all n locations
  Clone ID: MRT4577_124231C.1
cccggaataaaaacccgggtcgaccaagctcacttatcggcggccgccctccatttnnaccgggggtttttaaaaggattttattttgaaaacaccccacaaaactggaaaagacattaaacctgacaacaaatgacaagaggttcacgaattgcccaacaccacaaaaaaaaacattcaaacaaaaccaaaaacaccacacagagcaaaaaccaaaaacagtaccaaacccgacgcgaagatacagaaaaaccaatcaagcaaaggggcaaaaagggaaaaaccccacaaacaaacaggaacatcaagatccacaaccaaaatgacccca

SEQ ID NO: 26561 - DNA, 334 bp, Zea mays
  Clone ID: MRT4577_124232C.1
agcagtggtaacaacgcagagtacttttttttttttttttttttttttttttttttaggtttttttttttttttttttttttttttttttttttttttttttttttttaacaagcaaggaacaggacctaaaaggcaaaaaaccgcaagcatcatttccagtttaaaggagggggggaaaattcaagggcagaaaaatgggacaacgggttcagctaaaaagccctaaaacaaaaggggtaaaaggaaagcaaagttatagaagaggccaaaagatcccgggaactctgggggggtaccactgttaaaggggagaaaaaaaaaaaatggggggc

SEQ ID NO: 26562 - DNA, 257 bp, Zea mays
  unsure (1)..(257): unsure at all n locations
  Clone ID: MRT4577_124233C.1
acggtcgacatcggtcgccctttttttaggatattttttcaatttttttattgcatgacgacaatgctagattggactgcaacaatacattattagccacggtgctggagaatatgactccactacctntntnatggggccaaaaacaaaaacaaaaatttaggtttcaaacccccccctagggttttatttcatgggaggaaccgtgcccacatcacgaggtcccatgtttttaaactggcgtaataatcttctta

SEQ ID NO: 26563 - DNA, 196 bp, Zea mays
  Clone ID: MRT4577_124234C.1
agttccagaatatcagccctggtgcagcagactcgctattacaagttgctgtgaatcatactcatcagccagtgtggtatttcaatgaaaaaattccactgcatgttttcgttggtgaagatggataattggacccatctaattttcatgatgcctggatatcctttgctgatcaacattgattttcgatctaatt

SEQ ID NO: 26564 - DNA, 585 bp, Zea mays
  Clone ID: MRT4577_124235C.1
ttttttttttttttttttaaaatatgtcactaagttattaccatattttgatagggacacatttttgtaatagatgtcacatgaacatagttattagtgacccatttttaaaaaagatgtcactgcgaaaaaatagtgacgtgtttttaaccagtgtcacagatggccacgtcccctttgagtttgagccttttttacgtagtggtccttgggctggtgcgtgtcccaagtgtcagtcaccacggttagtcttctagcttcttcaattcctcgatcaagacccagtgctcgtccttcgacgctcctggcccatcggcacgaactcacatgatcttcgcattcgacgtcgaccaccgtttctatactgcacaccacaagccgagagacatggatacatatacacataatctcgtactatggttagtctatgacttacatcaaagcaatactcatgttaacaattacttatcatcaacccgaaccacaaaggtcaaattaaccttgtgttcgcaacaatgactttgttggcgttcccgcgcttgcctctggtgccgtaaactgacttggaatggaatggcggacaaa

SEQ ID NO: 26565 - DNA, 1513 bp, Zea mays
  Clone ID: MRT4577_124236C.1
ccccaactcgtccagagttagttgtagctatagacctggttgttgtagcgcacgcagtagccataggaaatacggctgcttgctgccaagatgagtggcggcgccaaggcctacgccgccgtcgtcctgatcaggatcatgtactccggcatgcacgtcatgagcaaggtggccctggatcagggcatgaacccgctggtgttcctgttctaccggcataccactgccgcgctcgttctcatccctgtcacctttgttgtcgagaggcggaaagctaagccggttacgttcaagattggatggaagatgttcatacatgccctctatggggtgacagcatgcggtgacttgtttaaccttggactcaactacacttctgctacgtcatcttcagcgttgtacaacgttcaaccggtggtcacattcatcctagccgtcatatttgggatggagactctgaaactgactcggttccatggcaaagtgaaattcgcgggcatcctgttctgcgtcgccggcgtcaccatcctggccttctacgaggggccgatgttcaggtccttcaaccaccaccatctgtttcagaacggcggcggcggcggcggtagctctgcagcaggagcaggagacacgcactccaagaagcagtgggtgctggggatcttcctcatgacactatccaacgttctagcaggcctgtggacagtgctccaggggcccctgatagaggacacgtcgaagctgatgaacacgacgctgcagatctcgtgggcgtcgctccaggccttcctggtggccgttgcggtggagagggacttctccaagtggaggctgggctggaacgtcggcctcgccgccataatctacagcggcgtgatcgtgacggcgctttcctactacatgcaaatgtggacgatcgccaagaggggcccggtgttcctggccatgtccatgccgctcaccttcgtcttcaccatcgtcatatcctccttcgtcataggggacgcagtcagcctaggaagcatctttgccggggcgttgctggttggaggcctgtacaatgtgttctggggcaagagcatcgaggagcgagacgacgacgacctgatgaacaagatcagcggcccgggaaaagccgggcagcaggacaaggcggcggacaataatccggcgtcgtcccaagtgccggatgacggtgcggaggcaaaggtgtaatacagcctctctcatcagtcagccagacacgggaacgatcgatctgtgtcaaaagctaggcggccagcaggccaaagccaagccactggttaatttatttcaggggtgctgggaaacaaaacaacgaggaacgaagcaggaattagcacacgtattgtgatttgtgaatgtgacgtgatcgatatgcaggtctactcaccggccggccggccggactcgtgtggcacacgcacgctgtaaatttggtctcggattttcaaaatggaaagaaggcacgtcgttgctgtgccattgtatc

SEQ ID NO: 26566 - DNA, 179 bp, Zea mays
  unsure (1)..(179): unsure at all n locations
  Clone ID: MRT4577_124237C.1
ggtcnccgcctcaccgtgtaggttctaccagagaccttcgcgtccctccggccgcgagctcgccgatggcgccacaggttcatagtccaggggggtcggcgctgccgcccctccgtggccccctgtctccgctgagctctggccccgcgtggtccgcctgccggttctgctcttggggg

SEQ ID NO: 26567 - DNA, 384 bp, Zea mays
  Clone ID: MRT4577_124238C.1
aattcccgggccgacccacgcgtcagccacatctccactcccacaacaacccgcaataccaacgacacaatgctcggcctccgcaccgccgcccgcgcctcgtctgcgctccccgttttccgcaacgccgctgcgcgccgcttcaactccagcgccgcgaagggccttgagggccctgccgacaacgccttcaatcgcgagagggccgctgtcaagcagcacgctgctgacacttctggcacctggcgcaagctttccatctacgttgtgatcccctccatcatcctcgccagtgtcaacgcctacaggctctggaccgagcactgggagcacgtcgcccagggaccagctcttgaggacaagcccgagtaccccttccagaac

SEQ ID NO: 26568 - DNA, 735 bp, Zea mays
  Clone ID: MRT4577_124239C.1
gccgcgtcaagcacccggacgccgagcgcctcctcccggacttcgacttcgttgccgccgtcggcccgcgcctcgcgtcgccttccggggccaggtctctcgtgctgctcctggcggacgcctctgacttcgatggatcgttcccgcgcgccgtcgcgcgattggttgccgcagccggcgaggcccatcgcgcggactggaagcacggggccccggccaacctcccacgcgcgttgctcgtggtcaccaagctcgacctactccccacgccatcgctgtcccccgacgatgtgcatgcgtgggcgcactctcgcgctcgcgccggtgcgggtgccgaccttcggctcgctggggtgcacttggttagcgccacgcgcggatggggcgtccgcgacctgctcgaacatgtgcgcgagctcgcggggacgcgcggcaatgtctgggccgtgggtgcgcggaatgttggcaagtcaacgctcctcaatgcgattgccagatgctgtggcatagtcgggcgaccgaccttgacggaggctccagttccgggaacgacccttgacgtgattaagcttgacggcgttcttggcgctcaagcaaagctgtttgacactcctggtcttctccatgggcatcagttgacatctagactgacgagcgaggagatgaagttggttcaagtgaggaaggagatgagtcccagaacttacagaataaagacaggacagtctatacata

SEQ ID NO: 26569 - DNA, 610 bp, Zea mays
  Clone ID: MRT4577_12423C.1
taggggccttttttttttttttttttaggttttttttttttttttttttttttttttttttttttttttttttttttttttttttttttttttttttttaaagggcaaaaaaaaaaaccccagggggggggaaaaaaaaaggaaacggaacaaaagatctccaccctaaacccccccttcaggaaagggaaaaaccaggccccccccaacccccccccccttaaaaacagggagggtttgaaaaacggcccaaatttggaccccccaaaaaaattaacccccacaaactggcccaaaaaggaacttaagggttcaagggttgtcttccaacccaaaacagctccccagggagggatggaattcccccccaaccccaaatcaaccgaaaaaagcctggaaaaaggggttgggccatgggcaaaaaaggggctgcaaaaggttgtcaaaaggccccttgccggggacgttgggctggatcagaaaacccaaaaaagccagattccccacccccccgggggggaactccttccccttggccccaagggggggcgcaaaattgagggggttgaaaaacctgcccgggaaaccccactcgtgggggggaagggtg

SEQ ID NO: 26570 - DNA, 182 bp, Zea mays
  Clone ID: MRT4577_124240C.1
taacctcgtcgcctcctccattgaccatcaattaaccctccccgatcgccatatctatcatgtgcagtcatgggtgtctgtgcatcgatgcctactacgcttgacgggatatcaccaactgacgctaccatctccacacgtaacgttggacctaacaccatctagtatccacattgaggttg

SEQ ID NO: 26571 - DNA, 744 bp, Zea mays
  Clone ID: MRT4577_124241C.1
gaggctcggccggggcaagtaggacaccctccccgtcggattgggatcctcgccagtcgactggccgcggagcccatagccggccaattccgacgccatggccgaccacgacgacgctgccgtcctctcggacgtcgacgaggaccttctcccatcatcatccccctccatctcttctgcctcctcccacaaaaccctaccgcaagcccaacccctgccacagtccgatgcccaggcacaacagcagcggctgctggccctggccgcggagctcgaggaggagcgccgcctccgccacgcagccgaggcctccatcgcgggggccgagtcccgcgtcgcccgctacaaggccttcgcgcaggacgtgctccgcaagagcgacgccctcaccgccgaggccgcggcctccgcgcggtccctcgccgcgctccaggccgaggccaccaccgcctcctccatgctctcctccggcttcgagaggatctccgccaaggcctccccttccgcggccgacgccccgctccccacctcccagaagtactcctccggcctcccggccctcgcgtacggcgtcctcaagcgcgccgacgacatcgtggacgacctcctagcccagatcaacgctgctaaccgcgaccgcgatcgcgcgcgcgagcagatggaacaccgcaactaccagatcgccatcgaggtctctgagctggaggcgtcgctcgcatccaggtctgccgagggcgaatccct

SEQ ID NO: 26572 - DNA, 145 bp, Zea mays
  Clone ID: MRT4577_124242C.1
agaccaaacggaagcatttcaatggaaggagttatcattgagagctcacgccagaaactatcagaaacagttttgtttattttgtttaatttacacatttatgcctatttgattactacagttcctctcttaagacatctcacaa

SEQ ID NO: 26573 - DNA, 1673 bp, Zea mays
  Clone ID: MRT4577_124243C.1
gggaccctcgaggccggccgttccagcgaccggccgctctgccctctgctcaaaatttcccccaaaacttctcctcttgaggaaggcagcccgagcgagcgcgctgcaatggcggactcgtcggcgccgacgagagtgatgatggcggtgaacgagtcgtcgctcaaggggtacccgcacccctccatcagctgtcgcaccgccttcgactggacgctctccaagctcgtccgctccaaccctgggggcttccacttcctcttcgtccacgttcatgtccccgacgaggacggatttgatgacatggatagcatctatgcttcgccggaggactttcaccaaatgaagcagagagacaagataagagggcttcatttgctcgagtactttgtaaaccaatgccatcagttagggataaaatgcgaggcatggatcagacatggagatccaaaggaggttatctgcagcgaagtgaagagagtccagcctgaccttctagttgtgggaagtaggggtcttgggccatttcagagggttttcgtgggcacggtgagcgagttctgcgttaagcatgccgaatgccccgtcatcaccataaaacggaacgctaccgaagctcctcaggaccctgtcgacgattgatgcttccaagccaagccatgccatgtcactggagaatgagatgttcttcttcactgcttttataatgggttgatgtacaaaatacgatatggaagtggtgcctggaactagttcgcggagggttccaactcttgcacactgcgcccccaaaaactagagttgaagatgtaaaacgccgtcgtccgcccgagggacgacgagagattgtacgtgatacatcgatcgagtctcgtgaacctaaaaagctgccgctacattattgttcgctcacccgcgacccttcgctggaacgaacgccccgccccttatttgcccctgcccctcctcccccacagccacagcttgagcagggtacctgaagcccgcgtagtcctttggcacggcgtatcctttgggaacgccgacgagctggggctgttgctgatgcttaagctgacgccccttgttgctgccagcaagcttgccgtcgctcttccacgccggaggcttccccggcgcgaacttgatctcgaagccgtcgtcgatgtcgtggatcgtggcgcgggagctcgccacgggcttcatcgccgggcacttgatctcgaatccgccgcccttctccaggtcgcctccgacggagtaaaaaatacaaaaaaagacaaaaacaaaaaaaaaaaaagaaatcaaataataaaaaaacgagcataaaaccaagccatgtggaggagggctttaacaatggtcctgttaatgactggctcctcactgctcacctggtctgccgtatccagcactcagaatgtcgtgatgattataatcacccgccccatgttccaaatcatgctaagccaccgagggaacagatgttgcaaggtcactttttaaacctacaaccccttgattgaggccttcaataagttccccggattgagcaccaccggggacaagcagacgcacaggcggtagctcacccactttttctgccatacttccaacgaaaccaccggtggatgggcaactgctccggatgtaccgtttgcctggggatactg

SEQ ID NO: 26574 - DNA, 1658 bp, Zea mays
  Clone ID: MRT4577_124244C.1
cctcgaggccggccgggagagtctcaccattcggcacgaggctccactctggtctcccaccattgatcccactccgtcccgggcccttgaaatggtttgatgcctgcaaccatgcccggtctctccagacgccgcctgctctgcttcttcttgatcgcatgcctcgccgcccttcttttgtcgatcgccggcagcgccgggaagcccaaggaaactgacaatggcgacgcaagttcagagtgctgcgaggtatcgacactctcggccggatgcagaagcagcgtcacggccatggaatctctccggcctcggcgccggcgccggcggcggcgcgtgcccgcctacctctgctccacaaggacgcgcggctcccggtccccggaaaagtcacccgcaaccataaaagaggaggaagtgcaacggcaccgaggcagagcccgccgcgcggcgggggaggcaaaggcgaaggcgaaggcgggagcaggaagaaaagtatgccgctggccgtcgtcgccgcggcggcggcgctgtccggggcggcgctggtgctcctcgccgtcctggtggtgttcctggcgtgcaagaagttgcagggcaagcgcgggggtggcggcgaccagagcggcggcaccaacaaggtgagcttcgagcccggcccgggcatgttctacctggacgccatcaagccgtaccttgacgacgccggccgcgacagtgaggggaaggcggcgccggagatcgccgcgcccaaggacgaggagcccaagcgcgatgacgaggaaggcgatggcgcttgctcagactacgactgtgcccagtcggtccactcctcgtgctgcttccagtcctcgcatttctcctactccgagctcgcgaagggcggccaggccgacggcgtgtcgccgtcgccctccgtccgctccaagcggcggggctctgccccgacaacgccttcagacaaggcaaaggtcgcaagcccatattcgccactgggcccgcgcacgccgagcagtgaggaaaggggccgccgcacgcactccccgtcgagcacgtcggtgtccgtgttgacagagcagtcgttcaatgatcatgagatccagggaaccgctcattccgtcaggtctttgaaattccacggcggcggcgtgtgccacgcaaaagaagctggagcagagacagacgccgcaagtagaaaaacagtaccacctccgccgccgccgcctccgccaccaatgatggtaaaacagcagcagatcgttcagatgagctgtggtactctggccgtgcccgcgccgccgccaccgcccccaccgctgctaataccacaacgacagaatggtcagaggagcaacggccccaccctcccgccgccgcaggcaccaccgccgggactgttcaggcagactgcgcctgtgggcaagaacggcgcgccgctgcccaagctgaagcccctgcactgggacaaggtgcgcgctgcgcccaaccggcggatggtgtgggataggatccgctccagctcgttcgagctggacgaacagacgatcgagtcgctgttcggctacaacgccgccgctcggtgctcggtgaagctcgaggaaggccagggccggagcccctcgctcggacaccatgtcctggaccccaagaggctgcagaac

SEQ ID NO: 26575 - DNA, 827 bp, Zea mays
  Clone ID: MRT4577_124245C.1
aatcttctcgtcccgagccccgcgcccccttcgcctcgtctcctccccgctccatcctctcccatgccgccgcaccctctcctcacacgcctcagcgccctcccctcctccccgtgccgccggcccccttccttctccccgcgctagagcagagatgcgcctcagtagggcagcagcagtagcgtctccatgggtgcggcggcgtgacggctcccaggcacggatcccctcctccgcctccatcctccacctctccggtcgcccagttgcaacttccgtagcagcagcaggcgacctgcagcagctccttcctaccttccatggacgagctcgacggagacgccgtccagcccgaccacggccacgactaccccacgcacaagaggaaggttgattcatttgtcaaattcattccaccgaagccatctgctccctccaccaacccgcccagaaaggtagttacagtgaattgatgttcgcactgaggccggaggcgagaggcgagggcacggaggtcggtggcaagtgctcaggagagaagaggaaggcggcagcgctgggcggtggctgcggtttacacgagagcgaggtgacccgcccagaaagctctgttgatggatgatttctgccatgtttatggagggggaggacgccaactactaggagaaggatcagtttagcaagtacatgatgtaattctcttatgattatggattgctgagaagcgcaaccttttgatcttcgagaacccgcagtttgctgacattgaaaaccattcattatgcaagacgaatggtgagaaatgtgttatttcctatccttccatc

SEQ ID NO: 26576 - DNA, 237 bp, Zea mays
  unsure (1)..(237): unsure at all n locations
  Clone ID: MRT4577_124246C.1
gtgttccgcagcggcgggncccggagggagagcgctgcctcgtcggcggcgggggggcggnacgagccgacgccgcagcccagnannnagaagncgnggccggggaggngccacgggngcaccncgcngacgnngcgcgacagcgcgnaggcgnncnggagcagcacgncgacggnggagnagagcgccaggacgnacacgaagncccccaccggcgagaaggggnacggcggcagg

SEQ ID NO: 26577 - DNA, 221 bp, Zea mays
  Clone ID: MRT4577_124247C.1
ctcaaacatatattcgttcatccttgacaattctaatccatccttcgtatatatctagtgggccaaccacactaaccccagggagcaattaccaaaactatctcacttatactcttttgccataatacttcacataacgatcacttccaaacttttcaccaacatcctctttcctatcttatttatctctaccctaaccattttcctgaaacctgcttata

SEQ ID NO: 26578 - DNA, 315 bp, Zea mays
  Clone ID: MRT4577_124248C.1
acgatcgatcgtcacagccaacatcacccgccgaggttacgcgacagtcgacaggaggaaggaataagctcagtgacagacagcgaagggtgagaagcgtactgctctcgtgaccagagcactgcaccgacagacagagctcgttaatctctgacgacgaccagtggattaatacgcatggcagctatggccacttagcaggtcgttgtaacgcccgacggactgggcgtacatgacgcatccacgtttcgacgtggcgcctcacagggcctgaagggggtccaggcatatgtgacggttgacactcttattatg

SEQ ID NO: 26579 - DNA, 173 bp, Zea mays
  Clone ID: MRT4577_124249C.1
ttgcgggtcgcccgacacattgggtgacacatggatgtccggctcgagcggctactatgattcaaccaactgactttgtgctactgtgttaccctcctacgacagcgaccacacaaactgaatacacatggaccggctaacccattggttgtttgcggaggacagcatgaaca

SEQ ID NO: 26580 - DNA, 316 bp, Zea mays
  unsure (1)..(316): unsure at all n locations
  Clone ID: MRT4577_12424C.1
gagaccgacgagaagcacgcggagggaacccggaagcgggggaanagagaaaggcacagcagaaggccgcccgggaagaggagggaatgcacgggcgacgcatggtgacgaatgctggtcctcttctcctccctcatctacaccgagggagtccccatccagccggccgcaaagatcctgcaaatggggggagggagacacaacggtggaagcctgaacgtcgacgcgtccgacatcgcgggggcgccgagcgacttttttttgttcgcccgcgccgaggccatggcggcggtccatccgcccgcggacggcggac

SEQ ID NO: 26581 - DNA, 335 bp, Zea mays
  Clone ID: MRT4577_124250C.1
ataatgtatcccttaggccacccagggcccctaaggttattttttaaggacctcttttattgaaacaaaaattagaggacaagcactcccatataaaagtacatcacaaaattactattttgagcagtattacaatctaataataacagcattcattacatcccaaatttctaatcctgatgcaaggccttaatcatttataaccttgaaaaattctgaccatcaaccccttttatatatttgcaataactgcatatcttattatttactaaatagcccttcaatcgttagggctcatgaataagcttaaatatatgaattaattgatctttttt

SEQ ID NO: 26582 - DNA, 331 bp, Zea mays
  Clone ID: MRT4577_124251C.1
cccatgttcaaattaacacaacaagcttctcggtttaatatctgattatgaggctgatcaaccccacctatcatataatcaagatgataccagctaacatagcacttacatgtgctgcacaaaagcttataaccttcactacattttatttctgataactgaaggcgtacattattactagaaatattatgtaagcaagtacatttccacaagcaggaatgactacccaactccctaagccaaaagacctggtgaagtacgctgagagcttcatgtacagccacatctacctatcgtacaggtgatgtgagcggacagtgctggattcacc

SEQ ID NO: 26583 - DNA, 245 bp, Zea mays
  Clone ID: MRT4577_124252C.1
ggcggagtcgcagaccaagattgacctcttcgttggcatcaactcgggtcatgtcttcaggaagctcgagctgacttcagggccgttcctccttaggggggaatcaactacgagggtgtatatagtgaggcgcctgaacagagaggctgctcggtgtgttgcttatgagaagcgtattagttagcttgtgaaggttggctagggacaagcgtgctctgaatgtcgctaagataaagcttggaact

SEQ ID NO: 26584 - DNA, 667 bp, Zea mays
  Clone ID: MRT4577_124253C.1
cctcggagctcggccgggctccgtctctcctgttgtgcgtgttgctgttcagtgcaaggttgcctctgaccttcccaagctagtcgaaggtttgaagcgtctagcaaagtccgatcctatggttctctgtacaatggaagaatctggtgagcatatcattgctggagctggtgagcttcatcttgagatttgcctgaaggatctgcaggaggacttcatgggtggtgctgaaattattgtttcccctcccgtcgtctccttccgtgaaacggttcttgagaagtcctgccgtactgtcatgagcaagtctcccaacaagcacaaccgtctgtacatggaagcgcgccccttggaggagggtctcgctgaggccatcgatgacggccgtattggcccacgtgatgatccgaaggtgcgctcccagatcctctctcaggagtttgggtgggacaaggacctggccaagaagatttggtgtttttgggcatcaaaggagggtgcactggctgaggagaacatgcgtggaatttgctttgaggtatgtgatgtcgttcttcatgctgatgctatcccaggggtgggtggtcaggtcattcccactgccaggagggtcatctatgcctctcagctcacggccaagccaaggctgctggagccagtctacctg

SEQ ID NO: 26585 - DNA, 935 bp, Zea mays
  unsure (1)..(935): unsure at all n locations
  Clone ID: MRT4577_124254C.1
atataaccaattactaaaccaaagataccacctctgtttcatctgctacatcaaaacggatatcaaaatagtgtctcaggctctcagcacagattgacaaactacatgatgaccaatatagttcagagacaggtgcattcgacaactaaaacgaagcaaaatattcaagtagttcccattacagtacacgaattgacgattaaaccagcaggtgtaacagtagaacaaacaaccaaaaatttagagcttgtcctcaaactcagagagaggggtcatctgttccttgagacccttcctcttgcggatatccagcaccagctgagcagcctgggagccagcctccaaaggatcagagcccatcatgtcccaatggtcaaagacacactgggggaacgcctgaccagaggttgcagccctcagttggctggagaacccaaacgactcgatgacagggaggtaagccttgatgttgtagagcggggtacccggcctctgcatctcctcaaacacatgccctctcttctggttcagaacaccgtagataccaccaagtgcattttctggggcctgaatctccaccaggtacactggctccagcagccttggcttggccgtgagctgagaagcatagatgaccctcctggcagttgggatgacctggccaccacccctgtggatagcatcagcatgaagaacgacatcacagacctcaaagcaaattccgcgcatgttctcctcagccagtgcaccctcctttgatgcccactggaaaccagccacgacagaatccttgatttcattgagatactgcactcccttacacatatcaacaaccatgtttgggccagtggtctcaggtccaaaacaccaaatcttcttggcgagatccttgtcccacccaaactcctgagagaggatntgggagcgcacttagg

SEQ ID NO: 26586 - DNA, 762 bp, Zea mays
  Clone ID: MRT4577_124255C.1
gggggggggggttttttttttttttttttttttttttttttttttttttttttttttttttttttttttttttttttttttttttttttttactaaaccagacatcaactctgtttcatctgaaacatcacagcagataacaaaatagtctcagactctaagcgcgggggggcactacatcacaaatattgttcaaaaacaggggcatttgacaactaaaacaaaataaaatattgaagtcgctgctattacagtagacgaattgatgattaaaccggcagatgaaacagtatcaccaacagccaaaaattttagagcttgtcctcaaactcaaaaagaggggtcatctgttccttgagacccttcctcttgcggatatccagcaccagctgagcagcctgggagccggcctccaaaggatctgagcccatcatgtcccaatggtcaaagacacactgggggaacgcctgaccagaggttgcggccctcagttggctggagaaaccaaaggactcgatgacagggaggaaagccttgatgttgtagagcggggtacccggcctctgcatctcctcaaagacatgacctctcttctggttcagaacaccgtagataccaccaagtgcattttctggggcctggatctccaccaggtaaactggctccagcagccttggcttggccgtgagctgaaaggcataaatgaccctcctggcagggggaatgacctgaccaccacccctggggatagcatcagcatga

SEQ ID NO: 26587 - DNA, 425 bp, Zea mays
  unsure (1)..(425): unsure at all n locations
  Clone ID: MRT4577_124256C.1
ggggcaacacactggaataagtttacaaccacttacaagaccacacataccaactttgtctaatttgctaccatcatatgtccatgcaaatcactgtagattatattgtttacagcatgaagtttaaaatagggggtgggatggacgggtgagataaataaaatgttggagatagcttaacaaatactcactccgttttttttttatgncgctggatggttcaattttgcactatccagcgacaactaaaacgaaacggggggggttttaaaatagagcattagactggccgcacaggagcacacactgggtttacaggaaaaccaattgacgattgaaccggcagctgtaacaggggaaccaacaaccacaaatttagagcttggccccaaacccaaaaagggcggacccctgggcggaccccg

SEQ ID NO: 26588 - DNA, 1947 bp, Zea mays
  Clone ID: MRT4577_124257C.1
tgaaacaaaccaacaaaagggtgaaattctcggacagatcaggcagagcattagaagtgagcaacacactgggaataagtatacaaccacttacaagaccacatataccaactgtctcatcagcatggagtttaagataacgggtgggatgagtaagctgctggagatagcttaacagatattaaaatagagcatcagactgtccgcacagcagcacacactgcatttacagtaaaaccaattgacgattgaaccggcagctgtaacagtgtaaccaacaaccacaaatttagagcttgtcctcaaactcagaaagtgggatcatctgttccttgagacccttcctcttgcggatatccagcaccagctgagcagcctgggagccagcctccaaaggatcagagcccatcatgtcccaatggtcaaagacagcctgggggaacgcctgaccagaggttgcagccctcagctggctggagaacccaaaggactcgatgacagggaggtaagccttgatgttgtagagcggggtgcccggcctctgcatctcctcaaagacatgacctctcttctggttcagaacaccgtagataccaccgagtgcattttctggggcctggatctccaccaggtacactggctccagcagccttggcttggccgtgagctgagaagcatagatgaccctcctggcagtgggaatgacctgtccaccacccctgtggatagcatcagcatgaagaacgacatcacatacctcaaagcaaattccacgcatgttctcctcagccagtgcaccctcctttgatgcccactggaaaccggccacaacagaatccttgatttcattgagatactgcactcccttacacatatcgacaaccatgttcgggccagtggtctcaggtccaaaacaccaaatcttcttggccaggtccttgtcccacccaaactcctgagagaggatctgggagcgcaccttcggatcatcacgtgggccaatacggccgtcatcgatggcctcagcgagaccctcctccaaggggcgcgcttccatgtacagacggttgtgcttgttgggagacttgctcacgacagtacggcaggacttctcaagaaccgtttcacggaaggagacgacgggtggggaaacaataatttcagcaccacccatgaagtcctcctgcagatccttcaggcaaatctcaagatgaagctcaccagctccagcaatgatatgctcaccagattcttccattgtacagagaaccataggatcggactttgctagacgcttcaaaccttcaactagcttgggaaggtcagaggcaaccttgcactgaacagcaacacgcacaacaggagagacggagaacttcattgctctgattgggcaagcgtcagtctccttctcattagtgagtgtagcattcttcgtgatgaactgatccagaccaaccatagcaacagtgttaccacacggaacatcctcaaccgactcttgcttctttcccatccagataacagtacgctggacactcttgacatacagatccttcttctgcccggggacatagttgggacccatgatccgaaccttcataccagtagcaaccttccctgagaagacacgaccgaaggcaaagaacctgcccttgtcagatgcaggaatcatctttgaaacatacagcataagaggaccctctggatcacagtttctgatagcagttgcatacacatcatcaaggggtccctcccacgcgtccgcaagacctgcatgaatgaccagaaggagaaattgtggcccatgctgcaaaagctcaatgttaccatgaaggctgatgagaaggagttgattggcaaagctttgatgaagcgtgttatgcaaacgtggcttccagctagcactgctctgcttgagatgatgatattccaccttccttctcc

SEQ ID NO: 26589 - DNA, 162 bp, Zea mays
  Clone ID: MRT4577_124258C.1
attctgacaccttggactgggatgacaatgtgagatgcttggcgttacaatataaaaaacaaggacagctgcaggccatttactcttgactacagaaaactcttccacagcattggagcaatgaagtgcgttacgctgtgcgaactttgactgcatgtacac

SEQ ID NO: 26590 - DNA, 3381 bp, Zea mays
  Clone ID: MRT4577_124259C.1
aaaaaaaaaattggttctcttccccttttttttgttttggagaacacatagtgggtaaaaaaaaatttttcggggggggggcgccccgggccccccggggggaggggggcctttttgtgaaagatctctctttcttttcgggggggggaaggggcccccccaaccccccaagtaaaaaaattttttgggggggccaggggggggggggggcggggggtttttgtggggccccccccccccgggggccgggggaaaaaagaggggttttttttttttttttttttttttttttttttttttttttttttttttttttttttttttttttttttttttttttttttttttttttttttttttttttttttttttttttttttttttttttttttaaatcaaggtagcacaagcatttactacaaacacttccaccaagccagcatataccaactgttacatcacgattgatagaaaaaagtgtctcaacagcacttggatagtacagtatgaccaatgatgttcagaaacatgcacttgacaactaaaaggaaacaagatataaatagttcccagactccgagtgacaattaaaaccagtatgggataacagtagcaaaaacgaaaagattagagcttgtcctcaaactcagaaagaggagtcatctgttctttcagacccttcctcttgcggatatccagcaccagctgggcagcctgggagccagcctccaaaggatccgagcccatcatgtcccagtggtcaaacacacactgggggaacgcctgaccagaggttgcagccctcagctggcttgagaacccaaaggactcgatgacagggaggaaagccttgatgttgtagagcggggtaccaggcctttgcatctcctcgaatacatgtcctctcttctggttcagaacaccgtatatgccacccagtgcattttctggggcctggatctccaccaggtaaactggttccagcagccttggcttggctgtgagctgagaagcataaatgaccctcctggcagttggaatgacctggccaccacccctgtggatagcatcagcatgaagaacgacatcacagacctcgaagcaaatcccacgcatgttctcttcagccagtgcaccctccttcgatgcccactggaaaccagccacaacagaatccttgatttcattgagatactgcactcccttgcacatatcaacaaccatgtttgggccggtggtctcaggtccgaagcaccaaatcttcttggcaagatccttgtcccacccaaactcttgagagaggatctgggagcgcaccttaggatcatcacgtgggccaatgcggccatcatcaattgcctcagcaagaccctcctccagggggcgcgcttccatgtacagacggttgtgcttgttaggtgacttgctcatgacagtgcggcaggacttctcaagaacggtttcacggaaggacacaacaggaggagaaacaataatttcagcacctcccatgaagtcctcttgcagatccttcaggcaaatctcaagatgaagctcaccagctccagcaatgatatgctcaccagattcttccattgtacacagaaccataggatcggacttcgccagacgcttcaaaccttctactagcttgggaaggtcggaagcaaccttgcactgaacagcaacacgcacaacaggggagacagagaacttcattgccctgattgggcatgcatcaacctccttctcattagtgagtgtagcgttcttcgtgatgaactgatccagaccaaccatagcaacagtgttaccacaaggaacatcctcaactgactcttgtttctttcccatccagataacagtacgctgaacactcttgacatacaggtccttcttctggccagggacatagttgggacccatgatccgaactttcataccagtagcaaccttccctgagaagacacgaccaaaggcaaagaacctgcccttgtcagatgctggaatcatctttgaaacatacagcataagagggccctccggatcacagtttctgatagcagttgcataaacatcatcaaggggtccctcatacaagttctccacacgatacttttgagcctttgccggggaaggaaggtggaatatcatcatctcaagaagtgcagtgctggctggaagccacgtttgcataacacgcttcatcaaagctttgccaatcaactccttctcatcagccttcatggtaacattaagcttttgcaacatgggccacaatttctccttttggtcattcatgcaggttttgatgatttgcttgattggctcgtagcagaactgaacaaatcctctcttgcaggtaggagaacctgtgttcttggtggtccatttctttgtggcagggtcaaagaaattctcaccccatagcctctccatcatcttagattcatcaactccaaacttagatgcatacatcttcgcaaagttagtgagtgtaaaggcccatccatgcagaccagcagaaaaggcaactgtccccttctctgggtatacttggacatcaccaaggagcttatcttcatatgttgccatgatgacattggcattctcaataacacgggagaaagtctgataagcttcctcaccctcaacctgaagctcaaggaagcacctgtccatcttgttcacggtaagaactggcctaatcctctcaccaagggcttggcgaagcacagtttcagtttgcacacagacaccttcaatacaatcaaccacaaccagagcaccatcggtgatgcgaagagcagctgtgacttccgaagaaaaatcgacgtgcccgggtgagtcaataaggtttatcaagtattggttaccatccctctcacccttgtagttcttcagtgactcatcagtcatctcataataaagagagataccagtagatttgattgtgatgccacgctcggcttcatctgcacgagtatcagtcatgcgaacatcaccagcaacttcctgggcaataatcccagcagctgccacaagggaatctgtaagtgtagacttgccatggtccacatgagcaataacagacatattacgaatgttgttctttttgtccatgatggcacggagctcttcagccgtgaacttcaccatctttacttgttatgatggtaccactacaaatatgtatatgtatgccttggtttcgcctcccgatctgagagacgagatgtggaggcgccgccgggagagaagcactaaaaccctccatctcttccggatcccgaagcgaggatcgcgagcaacgaattgtccggcggcgcttagggtttttgtgttggcgagaagagcaggattatgtacgggcgtatgcta

SEQ ID NO: 26591 - DNA, 1192 bp, Zea mays
  Clone ID: MRT4577_12425C.1
cagccgtgaacgtgttaacttcacttttggaggcgctccacaagaacctgcacggcatctaccttacagcagtccttttgtacgttcccacgcgtgcgggagcaaaaaggcagtagcagagcacatgtcaacaaacacaagtgacaaaagaaacgaggatgacggagcagagcaccagagacgtgcgcgcgatgctcaccgcctcaccgtcgagactcgatcgagagttagtgcaagaagaaagaggtgcgagcaagagggatgaacggcgccggcaatggtgagccctcccttgtagttgtagcggaggaagggccgccgaacgatggcaacggcgccggcgttcacgcacccaacttcggcgcgaatgaagcggacacgctgctggtggtggcgacactgatcacagcgctgacgtaccagctgggcaccaacatcccgggcgggtactggcaggacgatctcaaggggcacgacggcctcgcggggcacgtcgccggagacccgatcatgcgtgacaagcaccggcggcggtactggctgttcatggcggcgagctgggtggggttcggcacctcgatgctgctcacggtggggctcatcacgggggtgcccgcgaggtcgcgcttcgtccggttcgcgttcctgctggcctactccagcctcgtgctcacgttcgtgacgtcgcagccgcgcacgtcgctcttctgggacctcatcatctgggctgtcgtcatggcgctgctcgccatcgccaccaagtacctgcgcctcgacaggctccccagatgggcgcgtaccctgtgccatgctcctccatccgcgttctgctgctcacgttcgtgactcgtgagcgagctcgccatggacgagcgagctcgtcatctgggtcgccgtcatggcatcgacgcatcgttgccatcgtcacgaagtacaagcacgtcgacagacctccccggctgggtgcacaccgtctatcttcagtaccagcttgctagtagcaacaatgtgtgtgttttcaaaaaaaaaggaagaatgtgtttttatctttgtttaattttggccgtaatgtcttgtttagtggctgatgttcttgttctctgctactgtgtgcgtcctcattggttgatctgaatctgatgttaaatgtatcgctgttcagtcaaaaaaaaaaaaaaaaaaaaaacgctca

SEQ ID NO: 26592 - DNA, 289 bp, Zea mays
  Clone ID: MRT4577_124260C.1
aaaaaaaaaatggggggggtaaaaaaatttttgacaggggcttaaaaaaagcaaaagggtactaaaagttccaaacagcccactctgaaaaacccaaaggtttttatttgtccccaaaaaggggggggttacaccaattacaacccaccgcatggaaatcatttaaaatgggacaacttattgttccgcaatttttttgatgacatatgggggaaatgccccccttgggcgtaaaaagcaagccccaccccaggggcaaatttgagggggcaaggaaacaacttcccat

SEQ ID NO: 26593 - DNA, 690 bp, Zea mays
  Clone ID: MRT4577_124261C.1
gcagaggccgggcaccccgctctacaacatcaaggcttacctccctgtcatcgagtcctttgggttctccagccagctgagggctgcaacctctggtcaggcgttcccccaggctgtctttgaccattgggacatgatgggctctgatcctttggaggctggctcccaggctgctcagctggtgctggatatccgcaagaggaagggtctcaaggaacagatgatcccactttctgagtttgaggacaagctctaaatttgtggttgttggtgacactgttacagctgccggttcaatcgtcaattggctttactgtaaatgcagtgtgtgctgctgtgctgacagtctgatgctctattttaatactccctccgtttcgttttagttgtcgctggatagtgcaaaattgaaccatccagcgacaactaaaaagaaacggagtgagtatttgttaagctatctccaacatcttattcatctcacccgtccatcccaccccctatcttaaacttaatgctgtaaacaatataatctacagtgatttgcatggacatatgatggtagcagatgagacagagttggtatgtgtggtcttgtaagtggttgtatacttagttccagtgtgttgctcacttctgagtgctctgcctgatctgtccgagaatttcacccttttgttggtttgtttc

SEQ ID NO: 26594 - DNA, 2721 bp, Zea mays
  Clone ID: MRT4577_124262C.1
tcctttgtttctctataaggggcccccccttttttttttttttttttttttttttttttttttttttttttttttttttttttttttttttttttttttttttttttttttttttttttttttttttttttttttttttttttttttttttttttttttttaaagagcaatacactaagaatataaccatttactaaaccagacatcaactctgtttcatctgaaacatcacagcagataacaaaatagtctcagactctaagcgcggcagggcactacatcacaaatattgttcaaaaacaggtgcatttgacaactaaaacaaaataaaatattgaagtcgctgctattacagtagacgaattgatgattaaaccggcagatgaaacagtatcaccaacagccaaaaattttagagcttgtcctcaaactcagaaagaggggtcatctgttccttgagacccttcctcttgcggatatccagcaccagctgagcagcctgggagccggcctccaaaggatctgagcccatcatgtcccaatggtcaaagacacactgggggaacgcctgaccagaggttgcggccctcagttggctggagaaaccaaaggactcgatgacagggaggaaagccttgatgttgtagagcggggtacccggcctctgcatctcctcaaagacatgacctctcttctggttcagaacaccgtagataccaccaagtgcattttctggggcctggatctccaccaggtagactggctccagcagccttggcttggccgtgagctgagaggcatagatgaccctcctggcagtgggaatgacctgaccaccacccctgtggatagcatcagcatgaagaacgacatcacatacctcaaagcaaattccacgcatgttctcctcagccagtgcaccctcctttgatgcccactggaaaccagccacaacagaatccttgatttcattgagatactgcactcccttgcacatatctacaaccatgttcgggccagtggtctcaggtccaaaacaccaaatcttcttggccaggtccttgtcccacccaaactcctgagagaggatctgggagcgcaccttcggatcatcacgtgggccaatacggccgtcatcgatggcctcagcgagaccctcctccaaggggcgcgcttccatgtacagacggttgtgcttgttgggagacttgctcatgacagtacggcaggacttctcaagaaccgtttcacggaaggagacgacgggaggggaaacaataatttcagcaccacccatgaagtcctcctgcagatccttcaggcaaatctcaagatgaagctcaccagctccagcaatgatatgctcaccagattcttccattgtacagagaaccataggatcggactttgctagacgcttcaaaccttcgactagcttgggaaggtcagaggcaaccttgcactgaacagcaacacgcacaacaggagagacggagaacttcattgctctgattgggcaagcgtcagcctccttctcattagtgagtgtagcattctccgtgatgaactgatccagaccaaccatagcaacagtgttaccacacggaacatcctcaaccgactcttgcttctttcccatccagataacagtacgctggacactcttgacatacagatccttcttctgcccggggacatagttgggacccatgatccgaaccttcataccagtagcaaccttccctgagaagacacgaccgaaggcaaagaacctgcccttgtcagatgcaggaatcatctttgaaacatacagcataagaggaccctctggatcacagtttctgatagcagttgcatacacatcatcaaggggtccctcgtacaagttctccacacgatacttttgagcctttgctggggaaggaaggtggaatatcatcatctcaagcagagcagtgctagctggaagccacgtttgcataacacgcttcatcaaagctttgccaatcaactccttctcatcagccttcatggtaacattgagcttttgcagcatgggccataatttctccttctggtcattcatgcaggtcttgatgatttgcttgattggctcatagcagaactgaacaaatcctctcttgcaggtaggagaacctgtgttcttggtggtccacttctttgtggcagggtcaaagaagttctcaccccatagcctctccatcatcttagtttcatcaactccaaacttagatgcatacatctttgcaaagttagtgagggtgaaggcccatccgtgcagaccagcagaaaaagcaactgtccccttctctgggtatacttggacatcaccaaggagcttatcttcatatgttgccatgatgacattggcattctcaatgacacgggagaaagtctgataagcttcctcaccctcaacctgaagctcaaggaagcacctgtccatcttgttcaccgtgagaactggcctaatcctctcaccaagggcttggcgaagcacagtttcagtttgcacacagacaccttcaatacagtcaaccacaaccagagcaccatcggtgatgcgaagagcagctgtgacttccgaagaaaaatcaacgtgtccaggcgagtcaataaggttgatcaagtattggttaccatctctctcacccttgtagttcttcagtgactcgtcagtcatctcatagtaaagagata

SEQ ID NO: 26595 - DNA, 308 bp, Zea mays
  Clone ID: MRT4577_124263C.1
gaatgaattatttgctttttttacttgttttcataaataaattaatcctctggagggggatacatagacagggggcaatttttcatagactaagtctgttaagggtggatgacaaaaagaatggaagagcacacccgtaataggggcatgcccaacatactggtggaaataaaaactattgattgggtgaggtaggggggatagcctatctaacaaggggggggtcagttaaaaaaaaccgtaaggtctacctacctcttgtctgaaagaatccagctttaaaaaaagaaggcttttggatgtgccca

SEQ ID NO: 26596 - DNA, 3025 bp, Zea mays
  Clone ID: MRT4577_124264C.1
tttttttttttttttttttttttttttttttgagcaatgtaagggaacaagaattaaatcaagatagcacaagcatttactacaaacacttccaccaagccagcatataccaactgtttcatctgttacatcacgattgatagaaaaaagtgtctcaacagcacttggatagtacagtatgaccaatgatgttcagaaacatgcacttgacaactaaaaggaaacaagatataaatagttcccagactccgagtgacaattaaaaccagtaacagtagcaaaaacgaaaagattagagcttgtcctcaaactcagaaagaggagtcatctgttctttcagacccttcctcttgcggatatccagcaccagctgggcagcctgggagccagcctccaaaggatccgagcccatcatgtcccagtggtcaaacacacactgggggaacgcctgaccagaggttgcagccctcagctggcttgagaacccaaaggactcgatgacagggaggaaagccttgatgttgtagagcggggtaccaggcctttgcatctcctcgaatacatgtcctctcttctggttcagaacaccgtatatgccaccaagtgcattttctggggcctggatctccaccaggtaaactggttccagcagccttggcttggctgtgagctgagaagcataaatgaccctcctggcagttggaatgacctggccaccacccctgtggatagcatcagcatgaagaacgacatcacagacctcgaagcaaatcccgcgcatgttctcttcagccagtgcaccctccttcgatgcccactggaaaccagccacaacagaatccttgatttcattgagatactgcactcccttgcacatatcaacaaccatgtttgggccggtggtctcaggtccgaagcaccaaatcttcttggcaagatccttgtcccacccaaactcttgagagaggatctgggagcgcaccttaggatcatcacgtgggccaatgcggccatcatcaattgcctcagcaagaccctcctccagggggcgcgcttccatgtacagacggttgtgcttgttaggtgacttgctcatgacagtgcggcaggacttctcaagaaccgtttcacggaaggagacgacgggaggggaaacaataatttcagcaccacccatgaagtcctcctgcagatccttcaggcaaatctcaagatgaagctcaccagctccagcaatgatatgctcaccagattcttccattgtacagagaaccataggatcggactttgctagacgcttcaaaccttcgactagcttgggaaggtcagaggcaaccttgcactgaacagcaacacgcacaacaggagagacggagaacttcattgctctgattgggcaagcgtcagtctccttctcattagtgagtgtagcattcttcgtgatgaactgatccagaccaaccatagcaacagtgttaccacacggaacatcctcaaccgactcttgcttctttcccatccagataacagtacgctggacactcttgacatacagatccttcttctgcccggggacatagttgggacccacgatccgaaccttcataccagtagcaaccttccctgagaagacacgaccgaaggcaaagaacctgcccttgtcagatgcaggaatcatctttgaaacatacagcataagaggaccctctggatcacagtttctgatagcagttgcatacacatcatcaaggggtccctcgtacaagttctccacacgatacttttgagcctttgctggggaaggaaggtggaatatcatcatctcaagcagagcagtgctagctggaagccacgtttgcataacacgcttcatcaaagctttgccaatcaactccttctcatcagccttcatggtaacattgagcttttgcagcatgggccacaatttctccttctggtcattcatgcaggtcttgatgatttgcttgattggctcatagcagaactgaacaaatcctctcttgcaggtaggagaacctgtgttcttggtggtccacttctttgtggcagggtcaaagaagttctcaccccatagcctctccatcatcttagtttcatcaactccaaacttagatgcatacatctttgcgaagttagtgagggtgaaggcccatccgtgcagaccagcagaaaaagcaactgtccccttctctgggtatacttggacatcaccaaggagcttatcttcatatgttgccatgatgacattggcattctcaatgacacgggagaaagtctgataagcttcctcaccctcaacctgaagctcaaggaagcacctgtccatcttgttcaccgtgagaactggcctaatcctctcaccaagggcttggcgcagcacagtttcagtttgcacacagacaccttcaatacagtcaaccacaaccagagcaccatcggtgatacgaagagcagctgtgacttccgaagaaaagtcaacgtgaccaggtgaatcaataaggttgatcaggtattcatccccatcgcgatcgcccttgtacatctcgagtgattcaggagtcatctgatagaaaagagagataccggtggatttgattgtgataccacgctctgcctcatctgcacgtgtatcagtcatgcgaacatcaccagcaacttcctgggcaataatcccagcagctgccacaagggaatctgtaagcgtagacttgccgtggtctacatgagcaatgacagacatgttacgaatgttgttctttttgtccatgatagcacggagctcttcagctgtgaacttcaccatcttgacttcttatagatatcacactaccaataccaatatttattcctgctgggctgccagagctcgctgccggcgccggatctcgtcgcagacgcggaggcgggcaggcagctgctggctgctgcggagtgatggatgactgggggagggatgacggaacacgggaagtaacccgagataggttttgcctcgtgccgaatt

SEQ ID NO: 26597 - DNA, 129 bp, Zea mays
  Clone ID: MRT4577_124265C.1
tcgtgaacgggcacctgttcccgaagccgcttacccaagtgcgttccgagccgtccttctggcagcttttcgccggcaggaggccgggcgaggaaccccgcggagaggtgttgcgcttctcggggaggc

SEQ ID NO: 26598 - DNA, 541 bp, Zea mays
  Clone ID: MRT4577_124266C.1
agaagaggagagcacgtggttcaaacagaatgagtgcgttatggaatgatacctctcaaccaaagcaagcccgaaaacaaaacgtgctcacaatgaataaattaggacggcaattgtccgattgcactgcagacatatattgctacccttgggagaaaattaaccccctccgctttaaacttcgcgcttgataagtttggcatcctgagcacaaaatgaccctggtttatattttttctccttgaaaaggggctgcctatacacactgcgaaaccttgtcgaccttgcactcggaccccaataatatctgccaaaggggggcccttactaccaaaaccagcacttgagacgctgtggttgtgtcctagtggagttgaaacaaccgtcatttgccccgaaggcaaccatgttattgccattcttaacatgctggacaccaacacacttactgatagaggagttgggctgcttggcctaaataccaatattgttcaggacaatgccctagggatgggatgacccagtgacgggttccttccac

SEQ ID NO: 26599 - DNA, 175 bp, Zea mays
  Clone ID: MRT4577_124267C.1
ggaagacgccgcaggaccgcccggaagaccgggcgacccacgcgcctattacccaacaaacgcacagacgggggcagagacaaaacaccgggcagagcaacggcaaggcacgcgaccggacgagagcccaaccgccgagggcgcagaatcccggccgaggaccagcaagggacgc

SEQ ID NO: 26600 - DNA, 352 bp, Zea mays
  unsure (1)..(352): unsure at all n locations
  Clone ID: MRT4577_124268C.1
cgggtcgaccccgcgtctcgtctagnacgcgagcggccgccctctttttttttttttttttttttttttttttttttttttttttttttttttttttttttttttttttttttcgggaagaaattccatggccctcccggcttaactatccaaatttaggaaagggttggtttttaacatcccaactccncattaacacggggggggggcatgtctggcttaaaaaattaattggagcaaaattaaaattgaaaactattcccaagccaagggggttttttccttaatgccggacgaagtttgctgagctgactggggtctcaaaagttttgcctttaaataccagggaccc

SEQ ID NO: 26601 - DNA, 529 bp, Zea mays
  Clone ID: MRT4577_124269C.1
gtccggaccctccccgcaccggtccgtacctgaaatgatcagaatgagtgcggtcctattcgaccgcccgctccgggttcattgccccactccctcacgcctatcgcgcccgccggtacaccacccccatgcacgctcatggaagggggtctgggttgcgtacaggcgaaaggcacgcgccgccggtgccaaacgagcctgtgcgttcgcatcgactgacagatggatccgtccatggagcccctgtacgctcacgtcgagccgtacgactacggtttcctcatggtctacaatgttcacaccatctactacaaacattccggaaaccggcagggccatgctgacgtgttgctccacggctggtgcatgagccagcacgtaggccccaaacaggatgttctttgacccaaagttctacaggataggactatgcgaccacaggggcgcatgctgaagcactacccatgcgtgtataaaacagaccactacttgtgacttgattgctcacttaggtaagctgaaagtgcat

SEQ ID NO: 26602 - DNA, 1702 bp, Zea mays
  Clone ID: MRT4577_12426C.1
cccgttctttacaagcaccccactgcttcagctggcggagcctaccgtgggggccccggcgcccgcgcccgcggtggtcaacggaactccaacgccaccgacgaccggaggagcacgacgagaattcaccacgagtaaaactggtagagttttagccattacactgcctatagttgctgcagtgctagctactgtagtactttgttcatgcctctggaggaggaagaggaaaacacaagggaagtcgtcactaccagatacaactaaccctgaggacatacaaagtattgattccctcattattgatgtgtcaactctacgagctgcaacagaaaactttgctgaagccaataagctcggtgaaggaggttttggttcagtatataagggaatcctccccgatgaccaggaaatagcagtgaaaaggctctcgcagacttctagacaagggatggaggagctgaaaaacgagctcgtgttggttgctaaactgcaacacaagaatttagtgaggcttgtcggggtttgcttggaggaccatgaaaaattgcttgtctatgaatacatgcccaacaaaagcctcgacaccattctatttaatcacgagagatgtggagagctggattgggggaagaggttcaagatagttaacgggatcgcccgtggcttgcagtaccttcatgaagattctcaggtgaagataatccacagggatcttaaagcgagcaatgttctgttagacaatgacttcaaccctaagatctcggattttggcttagcaaggctattcggaagtgagcaatcacgagatgtcaccaaccgcgtcgtcggaacctatggatacatggcccctgagtacgccatgcgtgggcactactctgtcaagtccgacgtgttcagcttcggcgttttaatcctagaaatcgtcaccggaaggcgaaatggtggctcctatagctctgaggaatcggccgatctccttagtctggtgtgggagcactggacgacggggacattggtggagatcatggatccatccttgagcagccttgctccacgagacctgatgttgaagtgcatccacatcggcctcctctgcgttcaagatgaccatgaggacaggccgatgatgtcgacagtgaatgtcatgcttagtagcagcacggtgaccctccaagctccatcgaggccggcgtttttgcttcccgaagagtggcttcaactcagagatcaactcagaagtgtacccgccaggagcttatcagtccgcgagcaggtcgcccatgtcgctcaacgacgtctcaatcactgagctcgagcccagatgatccatgcatggcggcgatgaattgatgattctcttcttcgaaggagtttctgttgagtgtttgtgttttacctaggccagcgctggcagccgagcacgtaagtgtgacccgtagtatacaatgcaaaaccagtagactaccaatatggcgaaatataacgcctattagtcgtccaattacttatgtatctgtatggcattgcctttcaaatgtagaggagagtagaaatgagaacgtggataagagaatgtatcggtggttcctgattcctgaaaatgtcatcccagtattggttgaagttaggtgttgtttgattcacgaaatgtaacgcaaagggtaacggtaatggtttacacttgattactgtcggtaac

SEQ ID NO: 26603 - DNA, 220 bp, Zea mays
  Clone ID: MRT4577_124270C.1
ttggataagtattatggccaatctcaattttggaggcctggaccaggtttctatgagagtgccacctctgtctccagtggcaggcgccagtgtcagcctctcgcgcactggaacccgagcatttggccgggcgggtgcggctgctttttctgaacttaccaatggagagttcaacgaggcttagattaaaaaaatcatgggccatgatcccctaacttag

SEQ ID NO: 26604 - DNA, 285 bp, Zea mays
  unsure (1)..(285): unsure at all n locations
  Clone ID: MRT4577_124271C.1
cggccgggcaccgagccccttcagtgcttacacacgcaacacgattactcgnggtatctaagccgcacaaccggacgaagaactagatcaatgcaccgctatcagcgagtcgtgcatacacactgccaacactaaggagtctgtcgcacctcacttgaccaaagccgaagaatgcggggagatcggggaaattccctccacttggcgcctggtgcgggcctcctatggcgcatcgctcactgcgccatgtacactgcaagaagttgactgagagcccgctttctg

SEQ ID NO: 26605 - DNA, 379 bp, Zea mays
  Clone ID: MRT4577_124272C.1
ggacaaaaaaaaaaaagtttgttttttttaacccttgactgctttaaaaaaagtgtttcaaaaatgcctttaattctaaaatttccctaaatataacaatgaaacgccaactccccaagtttttggcttttccacccgccccctcaaaaaaaattttcatttcccgctggaccgtaaaaactttttatttgagtgggttggcaaaacttatttttggatttgaatggcttcgccaccccttatgaactaaaaggggggggcttatcccggttttaaaaaaaacctaggatttgtactgccatacaaccaaaggttgggatttcatccccctctgacaggcctttttttttttttttcgggtttaaccccctaaagggaa

SEQ ID NO: 26606 - DNA, 628 bp, Zea mays
  Clone ID: MRT4577_124273C.1
ctgcgagtttttttttcccttttttttttttttttttttttttttttttttttttttttttttttttttttttttttttttttttaaaccaacaacgaaaaccgccttattttttttaaataccccgggagcagggggggggaaaaaacaccttttacaacatgggggggggaaaaccacccaatttttaaaaacaaacccccaaaacacgatagcgggagcacctcccgggaaatcacgggaaaggggcaacccactggcctgaggctgggtaaaaaaaaaatttttttagaactcggccccctgggggccatcctcccccttataaaactaagggccgacctccttgtattctttttggagccccgccaggtcctcaggggcctaaaaaaactaacttttctccatacccttacggacgaaccagggcaaaaaggcccccttggggaacatgagggcaaacttgggggcgaggcgggaaaacccccccccaaccctgggggggggggaaaatatgcccacaggacgctggaccttgggcagggcccccccaggcaacaccttaggagggtggttattgatcccccatttaaacccagtggggccccaatccacaaacgggaggggg

SEQ ID NO: 26607 - DNA, 589 bp, Zea mays
  unsure (1)..(589): unsure at all n locations
  Clone ID: MRT4577_124274C.1
ngacactaatggcaacccttcgagtcgacgaaattaataaaattctccgcgaacgtattgaacaatataataggaaagtagggattgagaatatcggtcgcgtagtgcaagtgggggatgggattgctcgtattataggtcttggtgaaataatgtcaggtgaattagtcgaatttgcagaagggacgagaggtattgctctgaatttggaatctaaaaatgttgggattgtattaatgggcgatgggttgatgatacaagagggaagttttgtaaaagcaacaggaagaattgctcagatacccgtgagcgaggcttacttgggtcgtgttataaatgctctcgctaaacctattgatgggagaggcgaaattgtcgcttcagaatctcgcttaattgaatctcctgctccgggtataatttctaggcgttccgtatatgaaccccttcaaacagggcttattgctatcgattcgatgatccccatagggcgcggtcagcgagagttaattattggggacagacagactggcaaaacagcagtagccacagatacaattctcaatcaaaaaggtcaagatgtaatatg

SEQ ID NO: 26608 - DNA, 380 bp, Zea mays
  unsure (1)..(380): unsure at all n locations
  Clone ID: MRT4577_124275C.1
natggatgaagaatgacaaggctgctggaacacggagtggtcttggtggtggaagattggtagccaagactgtaagcaaggacaaaagggccgttgagggtttgcctgatggatggcgaaaagaatacaggccaaggaagaatggttcatttctggatgtgtactacattgatccagtcagtggatatgaatttcgctcttttaaggatgtgcaccgttatcttgaaactggagatattagacagtgcgccgtaagaccaaagaagagtaccatctgcgaagttcatataatagaaagtcaaactcatgcaagtgcatcaccacaacacacgaggcctggtactgcggataagggtattcagtgtgaaatattaacttcg

SEQ ID NO: 26609 - DNA, 375 bp, Zea mays
  Clone ID: MRT4577_124276C.1
gccacgcgtactgatgctgccaatagagctgcacagagaggcatacaaccttggggagcactttgaagaacccttgcaagattatcagcgtgctgtacactctatacaagccactatgcttgatcgaaccaatgctttcaagcagcactacgatatgaatcatgagaggctgtatcaagagcttaatcttgacatattcaagttcatgaaccctgaaacgtatgccgaagcacaatctgagtttccagacttgaaagcagacactgaggaggctgctcacatatttggactcatggatggactaatgaatgaagagcatgctcgtttgccagatcatattacacttgatattggactatcattccatgaatatgc

SEQ ID NO: 26610 - DNA, 460 bp, Zea mays
  Clone ID: MRT4577_124277C.1
aaacaccggggctggttggttcaaaaaaaaaaacaccccggctagcaatttcaaaaaaaaagcccgaattcaaatggctaaaaaaaactaggggaaaaacacccggggggtcatttaaacaagagggctggtatgggttgggggaaccctacaggggcccggggcccccccaggcctaaatttccaaaacccttggaggggttaaaaaacccgggtttttttttttttccttgaaaagggggaggggggaaaccccaaaaacctttacgaccttgaaacgggcgccgggaaaatttcccaaaggaggggccttacgaccgaatccagcaatcagcacctcatcggtctcctcgagggaagtaaagcaaccattgtttgggaaaaagggagaaatttttttcccggtttttaccaggtggacacgagcgcacttacggatagcaaagttagggtgtttaac

SEQ ID NO: 26611 - DNA, 362 bp, Zea mays
  Clone ID: MRT4577_124278C.1
cctgatccagatccaggggcttgtcatggcatccaaacctatgctaaaggagttaaaggacttgcaaaaggacccccaacatgatgcagtgcagggccctggtggtgaggatatgttctactgggaggcaaacatcatgggtcctgctgatagaccatatgctggaggtgtattcttggtgaacatgttatttgccgccagactaccccttgaagcctacaaaggtattttttaagacgaaggtcttacatccacacattaatagtgatggaagcatatgtcttgacattcttaaggagcagtggagccctgctttgacaatcattaaggtgttgctttctatctgctaactgcttactgat

SEQ ID NO: 26612 - DNA, 1626 bp, Zea mays
  Clone ID: MRT4577_124279C.1
ttgcacgcctgcaagctctcggaattcggctcgaggtccggtcggagctactgcaagctaggcctacagcaatggcggcctcttcgtcgatccaacgaggcgagagacgaggaaggtgggggagccccgagcgcaccgtggtgtggactgaacccaagcccaagccggcgaggaaggtcgccgtggtttactacctctgccaccgcgacggccacctcgaccacccgcacttcctggagatggagctatcccagcaccagcagtcccactcctcccgccctgctcccggcctctacctccgagacttcaaggcccgcctcaacgcgctccgcggcgacggcatgcccggcatgtactcctggtcctccaagaggagctacaagaacgggtacgtgtggcaggacctcaccgaggacgacctcatccaccccgcccacggcaacgacgagtacgtcctcaagggctccccgctcctcctcttccctcagccaccgccgcagcaggaggatgccgacaagtgggccggccgtcaccgcaagaactggagctccttcgacctgggggactgcgatagtaagctggtcgtcgtggcccaacaccaacagtctgcggccacgcgggtcgaccgggacgacgccgacccgtcgtcgacggagctggccatcgacgagatctcgccgccgccgtcctccagcagcccagacgagccggagagctgcggcagggaggtcggcgtggtcgccggcgggcggatgtgggcgtcggccgtgctgatgcagatcttctcctgcgggtccacggcggccgtgaggcggggccgccacgcgcgcacccgctctgaccttgtgatgtcaagtgcgagcaacaggcgggccaagaaggaggcggatgcggacgcggacgcggacgcgtcagcaagagcggctgaatgcctgtcagtgtcaggcgtcgtggagcgggactacttcagcggcagcctcattgagagcggcaagaagcgcggcggggatgacgcccttcttctcaagcggtcatcctcctgcaacgccgacaggggcgccgcgaagctgaagttgccgccggtgccggcgacggcgaaggaggtccgtgccgggcgccttgcctcccgagggagccccgcgcccaagaaaagtatgactaaatccacggtggcccagagcagggacggaggcgaatgcaatggcgcgacggcggacgcggcggggagcacgtagcagtgtgcagtccatgaagcgcctcggtcgacttgcatagttgcattgcaggtggcgagacgggcacgacacggtgtcgcgcgcgggcgagtgctccgagatgcggatggacgagtcaactcaaagtcagctgagatctgctactagtaggactagaattagcatgcaagtgcttgtaagttgtaacggcacagacttgtacttttactcagtcactatatactatatagacaataaagatacggttttctaacaaaaaaaaggcacagacttgtacttttactcagtcactacacactataaacaacaaaaatacggttttctaaggcggtggatttagttttgcaggatacggtctaatgtttgttcaacaactcatgctagttgctac

SEQ ID NO: 26613 - DNA, 684 bp, Zea mays
  unsure (1)..(684): unsure at all n locations
  Clone ID: MRT4577_12427C.1
cgtcaaaaaagaccccggttttgaaaggtccctccaccattagaaaggcctgctgggagaccaaggaagcagagaattaaggctagtggagagccagngaaaaagaggtccatatcaatgtaaaaggtgcttcaagtttggacatatagagaagggatgcaatgcaactcaagctgaactagagcaggagcttccaccacctcgtccaaaaaaacaaaaaaagcaaagcaaaaccaaatccgaagcttatgaaaactccacaaaaggtgctgagccatcaaacattgatgttgatccaaaactaacttcaagcccaggtgttacgacaagaaggatggcgtccctctctccggcaagagcaagtccatgtgttaccacaaggaggatggcgtccctgtctccaaccagtccgggtgtgtcaacaagaaggatggcatttatctcacctggaggaatcaaccgcaggcttatcattgattagttgtattagtgcaatgttagcatgtactgtaacttagtttatggcatgctccatggctagcttttgggcatttgtctagttaccatgtgaactagggtctctgtgaactatgaacagcttgtagtcttatgccaagtcgttatgcacggacaaaattagtattatatcatattttaatgtgtttatggtctctttgatctgtt

SEQ ID NO: 26614 - DNA, 339 bp, Zea mays
  Clone ID: MRT4577_124280C.1
gttgaagagggataaagtttctcaaaggaagctagcatttcagggagtggtccccaggggagatgaggtttgttcaaaaaatcaacaggcacctatgagctataatggggagagacgtatcaagtgaaatgccagcacataatgatgggtgcaaatggtgagtatgaatcaaggtaacgccacaatgtgatatggatgacatggtatggaaaatttaaggaaagacaccacatactatggaatacaagatgaaaaggattaagagtaggttcaaagattataaggaaataaaggtgaggaggtgcaaaagaaagataccatgttatatgggtaacagga

SEQ ID NO: 26615 - DNA, 386 bp, Zea mays
  Clone ID: MRT4577_124281C.1
ccccggaaaaccgggcggggggggggccccggggatttcgggccgggccctgggggggtccccggtttccctatgggggggggttttaaagccggggggaaacaggggcaaaggtgttccccgggaaaaaatggtttcccccaaaaattccccacaaaaaaaaagccggaaggaaaaagggaaaaacctggggggcccaaaaagggagccaaacaaaaataaatgggttggcccaaccgcccggtttccaatgggaaaacctggggggcccgctggtttaaaaaattccccaacccccggggaaagggggtttgctttttgggccccaggggggttttttttttacaagtgaaaagggcaaaaatttattgcccttcaagccctgg

SEQ ID NO: 26616 - DNA, 451 bp, Zea mays
  Clone ID: MRT4577_124282C.1
cttcttcggttttggggggcccccccacttttggcggggaaaataccccccccccccccccaattggggccggggggtttttggggtggaaaaaaaatcgggtgggctattatttctctctccccccccctttttttctttttccccgggggggggtctccccctcactcttttgtgggggaaaaaaactccccccctttttttgtgccccccgggaaccagatttttaacccccgccttaatcatcgttcttctcagaattttttgcatagggtttttttttctcgttgcccactttaaaagtttttcccccctctggatctgtggaacccctcttcaccttttgttttcggggggggctctttttttattggaactctcctcatgctttacttgttccaatggccccccctctttttttcccctcccatggtgggttcccttttttttg

SEQ ID NO: 26617 - DNA, 228 bp, Zea mays
  Clone ID: MRT4577_124283C.1
ccctgtgttcctccccctcttctttttggtttatctatctcttctctttaaaattcttgagttcaatttttatactgcaccaaaacaccagtgtctttctttttggggaaacccattaaaattttctctacaaggggtgggggctcttttttctcttttataaaaaactggttcacctcccatgaactgtttttttctttttccgtgtgcgagaaacatctttccttg

SEQ ID NO: 26618 - DNA, 513 bp, Zea mays
  unsure (1)..(513): unsure at all n locations
  Clone ID: MRT4577_124284C.1
accccnaaaagggggggcaccgacgaggccggcaacgnagaccccgaccccggccacggcttcgaggacanccgggagcagaacggcggcaccgccgacacccccgcggagccgcccccaagnccgagagcgcccagaacgcgcgcggcangggccncggcaggggggggagcgncacgagcggcnacaagcccgacgccgcccccagcgacgccgcccgcgccgacgacnncgccgggnacgaccgcgggnccgccnccgggcccaccgccacgcagcccaaccgccaggncgaccacncggcgaccgcccacggccgcaccggcaacgcccgcaaggaccncagccaaggngncccgcagaagaccancnnngacagccccgaggagaaaggccagaccnggggcaacgacgaccagaacagcccggccacgcccngcgaccaaagccnccgccgccaaaagcaccgcaggaagnnccaccaggacagacncaagggcaaggcggacgcca

SEQ ID NO: 26619 - DNA, 1967 bp, Zea mays
  Clone ID: MRT4577_124285C.1
ggtaccactgcgctcgccaggcgcccaggcccacggggagagagaaggttctccaagtcaatcgcaatcacgaagagtcatcacgccatacgacacggaggacaccgagccggaggcgaagccggtgcgcagcgcgagagtagcggcgagtcggcgaccatcaagcaactgcatggccgcgttacccgccagcgcccccgcccccgcccccgccccctccgaggcggcggagctcgtgccgacgctctcctcgctggagccggtctacggcgcgggcgcgcagctcgacgaggcgcgcctccgcttcgcccgcctcggggaccgcttccacgccgtctacggcgcccgccccgcgctcttcgcccgctccccagggagggtcaatctgatcggggagcacatcgactacgagggctactcggtgttgccgatggccatccgccaggacatgatcgtcgccatccgaagggccaacgggcgcccaagtgagggtcgccaacgtcgacgacaagtaccccctctgcgtttaccccgccgacccagacaaggaaattgacgtaaaaaatcacaaatgggggcactatttcatgtgtggatacaagggagtttatgaatactgtagatcaaaagggatagatctgggcaaacctgttgcgcttgacgtcgttgttgatggcacagttcctcaaggctctggactgtcaagctcagcagcatttgtctgttcagcaacaattgctatcatgggaatccttgacaaaaactttccaaagaaagaagttgctcaattcacttgtctgtctgagcgccacattggaacgcaatctggcggcatggatcaggctatatctatcatggcgaaacctggattcgctgagttgatagattttaatccaatccatgcaactgacgtccaactaccttcaggtggtacatttgtgatcgcccattgtttggccgagtccaagaaagcagagacagctgcaacaaattataataaccgcgttgtggagtgtcgcttagcagcgattgttcttgccatcaaacttgggatggataggaaaaaagctatctcctccgttacaaccctctccgatgttgaggggctatgtgtttcttttgctgggagagaaggttcatctgatcctgcagtagctgtgaagaaacttctgcatgaggacccatatacagctggagaaatagagaaaattacaggagaaggcctgacatctgtcttccagggctctcagacgtcattggatgttataaaagcggcaaagcactacaagctatttcagcgtgcgacccatgtctactctgaagcaaggagggtttatgctttcagggatactgtctcttcaaaactcagtgaggaaggcaagcttaagaaacttggtgatcttatgaacgagagccattacagctgcagcgtgctatacgaatgcagttgccctgagctggaggagcttgtgaaggtctgcagagacaacggagcactgggagcacgtctgacaggagctgggtggggtggctgcgcggttgctctggtcaaggagcccatcgtccctcagttcattctgaaactaaaggaaatgtactacaaatcaaggattgacaggggagtaatcaagcagggcgatgtgggcctgtacgtgttcgcatccaagccgtcgagcggcgcggccatactgaggttgtaggcaggcaggaaggcagaggcagccgctattcttttcacgagtgtggtggccctgtaaaacatggaataaagttgccatgaacaccgaacccttgtagtagcgttgaattatctcagacaacacgcgcattaaattgatatctatctataggagtaacacacgagttcgggttggcttgcaaaaaaaaaaaaacacacgagcgaaccatgctgttttaaatcctctttcttgctaaaaaaagaaaaatttaaaaaaaattaaatattg

SEQ ID NO: 26620 - DNA, 971 bp, Zea mays
  unsure (1)..(971): unsure at all n locations
  Clone ID: MRT4577_124286C.1
agatactaaatactgattgaaactgtgatacaaatatgaagtcatatgtctgaaattgcagaaaataaaaggagtaaatttagtctagccagacatgtggccgaacagcccaaccaagcctggcgtgccaggtgcggcccaagtggcacagtgcggctaagctggccggtccaggcagccaggcgagcggcccagccgagccagcccaggcgaccaggcgagcggttcaaccggccggcccaaacagccaggcgagcggcccagccgagccacccaggcggccaggagaaaaaaaaaataaggacggctagggtttggtaccctaaccagtccatctttctcatttcagcggacgcgtggggtgattccaccggtcatggcggctccgatccgagcacctccggcatgggcgggcgcgggttcctccccggcggcgaggccctagcagcggcctctcctggtgggcacggcctgccccggcgacgcggtagcagccgtcccggcccgtgcgcgggtgcggcggtcaaagggcgagcaggaccgacctggctcgggcggcaccagccactgccggcgcggggcacggccttcggcttaggcccctggaggctcggcctccagcgtgggcacgaccttggcggttggagcagccctcggtgcgagtgtgcaaccccggcgcgtgctccagcgggtgcgggcagcatccggcggcgcacacggcgcggtgggcacggcccctgcctggctccccggtgacccacggcgtgcggccccggcggctcgggtgcggatccgacggctgcgcagcctctagggcgcggctccacgggagcgcggccccggcagcccctcggcgtgctgccttgccccgacggcctcagcctcggcggtgcggnggtggctccctgcggcccggggcgcggtggcccagccacagcagctcgggtcacggctcgcagcgcggcctcccc

SEQ ID NO: 26621 - DNA, 322 bp, Zea mays
  Clone ID: MRT4577_124287C.1
tacgccacaatacagtccgaattccaggtaacccacgcgttcgattcaaaatcgagtcgggtactcgggtcgattttgacggggggggaactttataatctatcaaactttaaaaacaatccactaaaaaagaaattataaaaaccccaaggaaattgatatgtaaaactattaaatttaaacactaattgactaaatttttaaacattcacaaatcaatataattaatttatactattaataaatttttcaaattaaagataatatattaatataattataattaattttaatattttaaaaaatagattaattatttata

SEQ ID NO: 26622 - DNA, 421 bp, Zea mays
  Clone ID: MRT4577_124288C.1
ccggccgggctttttctcatttcagtcgccgccatggtgattccaccggtcatggcggctccgatccgagcaccttcggcatgggcgggcgcgggttcctccccggcggcgcggcccttgcagcggcctctcctggtgggcacggcctgccccggcgacgcggtagcagccgtccctgcccctgcgcgggcgcggcggtcaagggcgagcaggaccgacccggctcgggcggcaccagccactgccgacgcgggggcacgaccttggcggctggagcagccctcggtgcgagtgcgcaaccctggcacgtgctccagcgggtgcgggcagcatccggcggcgcacacggtgcggtgggcgcggcccctgcctggctccccggcgatgcacggcgtgcggccccagtcgggttgcggcgcgg

SEQ ID NO: 26623 - DNA, 383 bp, Zea mays
  Clone ID: MRT4577_124289C.1
cattagctttatctacatgagagcgcagaaaaacccgatcgacaccaggcgggagggggtaggtgccctcgctctcctggctgtcgctgcgagcgcgacctacacgcatacaagcggagggtgcggctgacagccaccggcgtcagatcatataccgccgcccgtgcatataccacctacggttcacctgccacctacggtgcatgtatcaccgacggtccacctgccgacgacggtccaactgccaccgacggtccatgtgccggcggcaggtcatatgtcggcggcaccatgccactaccctacttaaccgacccggcctcagcctcattcacagccacacacatgcccgtgccaacagacgcattcaatcccgtgccagc

SEQ ID NO: 26624 - DNA, 261 bp, Zea mays
  unsure (1)..(261): unsure at all n locations
  Clone ID: MRT4577_12428C.1
tgtgttaatcactccacatgaaactaacaatctctccactcatagccagctatcggatgccaaagggactcatgacgagacaacattgagaacatgggggagtcgtggggagaagattgancttttagcgggtaacacagagaccccacagccacaggcgggacagctcccacacgcactgcatgacagttgagcgacaaagatgcggctatagaccccgacgcctaccctcacggcggctggcggcactgcaggtctgat

SEQ ID NO: 26625 - DNA, 998 bp, Zea mays
  Clone ID: MRT4577_124290C.1
cgggcaacctaccttccctcctcgcactctgtgttgcagacctccgccaccggaggttcctgcgggtgcgtttgccctgacagaacactggaggcccctgcgggtgcgctacccctgaccaagcaaccacggactagtctaccgccgtccgcagcatccgttcaccttcaccccgcctgcgcgctctctctctgcgacgactgggtgggctactgcagccgccgccgccctacgccgggtgccgaggccttcgccggtctcttcgctggtgacgagcactcaccaggctgcttcatcgtgaaaaattgttgcatgcagccacgcacatggtttgcactatccacctacacagtgatctatgcttctgaccccacatgccttaggtctatctgcaccagaaagaagtgaatcgtttcaaggtgtctatatactttttggatgctttaagaaagggcctggaagcattgcacgggtaacatatttgtctgacagcgattgattttgggaaccaatttggtaatcagtacaatggagtgcaaccccagccttgccttgaaagccagcgaaactgctgttaagaagttggaaagcagagattttgttggtgctaaaaggattgcccttaaagcacagaggattttcccagagatagagaacataccccagctgttaactgtctgtgaagtacattgtgcagcagaagcaaaagtaaatggaatgttggatttttatggaattctccaagtagaaggaacagcagatgaggtgaccataaagaagcaatatcgtaagcttgtcctctcacttcaccctgataaaaacagttatgctggtgcagaatctgctttcaagtttgttgcagaagcatactcaacattgtctgatcgaaccaaacgatatgcatatgatgtcaaatggagggctgctcccaaagttgcaccaaagcaggctacacagccgacacaaccaaatcaggctacacaacagaaacaggatgc

SEQ ID NO: 26626 - DNA, 3081 bp, Zea mays
  Clone ID: MRT4577_124291C.1
attacggaccgggagttgccactggtggccctctccagtctgcacggaggatcctggacgccctatatgccgctcgaggtcctctctctctttctctttaagtctctacccctttctctctcctctgtgtgctccttgccctctatacaccagtacacctccgaagccgccattccagcagctgagctcgtcctgccaggacgcagtgccaagtgccaacggcaccactattccaccgcctgtgccccttccacgcgtggagatctgagccggcatttcctgggtgtgcgctggttgctgcgcttgccattaaaaggctacttttctgggagctccctggtgctctcatcttggaagacgttcagtggaaggtgcaggcttgcctgcccaggatgcccctgcaggcgacggactgagttggcgtattccttgtctgccagtgttgaattagtctaattgggccatggagtcatctggctgtagctctgagatagttgagtccaccgaggaattcgatactacaccctctggtggatccagcttgctgcatattaaactcaaagatgaggagaaacgcggcaaaagtcatgattattctgtggaagatgacctcgaccagctccttaaagctatcgatagcaggaccttccgacgcgcgcttagtcctggcagtacaggtggagatgcgctgggtaagagtgttctgaagaaaccagctaggtctgggttgtctcaaaatgcaggcattgggatatcctccaaggctgttaatatgaagcaagcgctaagaaggctatgcatttcccaggcatcagaaatggctgcaatgaagaggttgtcgatgtcacctggatcttcaagttcatccgaagctgggactatccacaggctttatgcctctttgatggtccaaagtagttctgagggtcttctgcatgatgatgagaagatgaacctgattgaagtatcgatcactccagagaagattgataagagttcatctagaggtacaagtgagttcagtgaagactgtgaatttgagacagctgatggaagtgcagtcacctctacctctatctgttctgcttcgtcaacctacaccgatattaggaagatcagaatccaagatgtcatcattggtgaccctatggataacgagagttccttgggggaaaatggcaacctaggaaataaattttctgcagctactgatgatggctctcccaaaggcccaatcttgagcaaacctatcactacatctcgacttgtcaagccagtctttcgatgcaagccttccggtaagaagaaggtgaaacaagaaccatcttcgttgggtgattcctccaatagtactaaattctgctcttcaaaggagtcaatctccctcacatcaaccagctgctcttcaacatctagttttacaaatcccgccaaccgtgcagaagagaaatcatctcctgggccagaaaaatctgatggcacatctcctgagtggttggcagagcaaaatgaatgttcccagaactcaaagagcagcattagtgagtatggttgcagcacaagtatcagcggtgagagccaatttggattgtgtggctatagtaacaggccacacatggcgaaggatctgcgctggctaaccattcgtcagttggcactgcaacagggttccttaggactcgacaatttcaagcttctgaagaggcttggttgtggtgacattggaactgtatatcttgctgagttggttgattcagattgcttatttgctttgaaggttatggacatcgagtaccttattaatagaaagaagatgctacgagcacaggctgagagggagatactagaaatgctagatcatccatttctcccgactctttatgcccattttaccacagacaatctctcatgcttggtcatggagtactgtccaggcggtgatttgcatgttcttcgccaaaggcaacctggaaaaagctttccagagccagcagcaaggttttatgttgcagaagttctccttgctttggaatatcttcacatgttaggggtcatataccgtgatctaaagccggagaacattttagtccgtgaagatgggcatataatgttatcggacttcgacctttcactgaggtgctcagtgaatcctgtgctccttcggtcatcttctgttactgcgaaccaccaaccgaggaaacatacaggaccttgtgcagagaactactgcataaattcgtcttgcctccagcaaccctcttgtgcccaaacatcttgcttcacaccacgcctaccatcaattccaaagcctcggaaacctaaatcctcccagaaaaggcttccacagcttgttgtagagcctactgatgcacgttctaattcctttgttggcacacatgagtaccttgcaccagaaatcatcaaaggggatggccatggaagcgctgttgactggtggacgtttggtgtcttcctttatgaacttctatacggcaagacacccttcagaggacctgggaatgatgaaacattggcaaatgtggtctcgcagaatctccggttcccagaccatccagctgtgagcagcaacaccaaagatctcatcagaggtttactggttaaggagcctgagaacagatttggatcgttgagaggagctgctgagatcaagcagcaccccttctttgaaggcttgaattgggctctgattcggtctgctgctccaccagagacacaaccttgcaacatcgtgactcttgccaaagagcggaagaaagaaggcaagtgcctggagttcagaagcaactcagaggaccttgagtttgaagttttttagtttcgttctggtacagtttagcactatttccgctgatataagcctacatttttttttctatgaatagccaaaggcttgggggtgtacatgtagatccttgtatttcagtaattgctatgtccctgtcaatagcatcaccaaattgaaaagaataagcagcttatgctattattatcattgctgctgcatatgaattggttcctattggagacccagtaaattttactcgtgtatttgcatgaaaa

SEQ ID NO: 26627 - DNA, 168 bp, Zea mays
  unsure (1)..(168): unsure at all n locations
  Clone ID: MRT4577_124292C.1
accaanncggaattcgacccacgcgngcgcggacacntantcaaacacctnacccaacgtctttgttaaaaaaacaacaataactacaacggccactgttaaaattggaaagtggtaaaggccaccaaacctaaaaaaacaaaacttaacaaacacncgcgcgcccct

SEQ ID NO: 26628 - DNA, 124 bp, Zea mays
  Clone ID: MRT4577_124293C.1
tttacgcaatcgtgaacatgatcctggcgattcaaggcgaaacctgagctgatatgcgccgcgcgacggcatccttcggcatcactgggacaaaatctggactgtcactcaagattgggatata

SEQ ID NO: 26629 - DNA, 2216 bp, Zea mays
  Clone ID: MRT4577_124294C.1
attgggacctcgagccggccctcacgagaaaaagacgcccgccccggccggcgaccagtacctcgccattgctagtgctagccgccgtcgctggtgtcccctcctcccacttgcgccgcctgtccccgcgccctcgaaaccttttctcccaaaacagatttcgtcccggcgctctcctgcaaagggcggctagctgtcgccggtggatacgtttcacctctgtctcactgcttgggggggttctgcttcttcctgctttcccaagagagggccagcagcagacgaagcgagcaaagcgcgcaggaaccgctcggtctggtgattttaaggggcgaggtcgtgttcttgggaggcggagagacacgagctctctctcttcctgtcctctttcccgcggcttctctcttgtcttagctccaagagggcaaaactcgtcggggtagggaaatggcggaggtgaagccggaggagataagccatccgcccatggagcagctccaggggttcgagtactgcatcgactccaaccctccctggggcgaggcgatcatactgggcttccagcactacatactggcgctgggcacggcggtgatgatcccgacggtgttggttcccatgatgggcggcgacgatggggacagggtcagggtggtgcagacgctgctgttcgtgacggggataaacacgctgctgcagtccctcttcgggacccggctgccgacggtcatcggcggctcctacgcgttcgtcatcccgataatggccatcatccaggacccgtcgctttctgggatacccgacggtcatgagaggttcctcgagaccatgaaggccatacagggggcactgatagtgtcctccagcattcagatcattctgggctacagccagctgtggggtattttctccagattcttcagcccagtggggatgactccagtgcttgcgctgctcggatttggcctcttcgaaaggggtttccctgtggttgggagatgcgttgagattggcctgccaatgctgatcctctttgtcgtgctgtctcagtatctgaagaacatacagataaaagaaatccccatactggaaaggttctcccttttcatctgtgtcgcgttggtatgggcgtacgctcagatcctcacttcaggtggagcctataagaacagcgccgaggtcacccagaacaactgccgcaccgacagagccaatctcatctcttctgccccatggattaagatcccctacccactgcaatggggtgcgccgaccttcaacgccggccagtcatttgggattgtgtctgctgttttggtctcgctggtagagtccacagcctcctacaaagccgctgctcgtcttgcgagtgcgactccacctccggctcacatcctcagcagaggcattgggtggcagggaatcggcatcctccttgacgggctctttggaacggggactggctccactgtctcagtggagaacgtcgggttgcttgggtcgacaaggatcgggagccgacgggtcatacagatctcagctggcttcatgatctttttctccatgctggggaaatttggagccttgttcgcttccatcccgttcaccatctttgcggccgtgtactgcgtcctgttcgggctagttgctgcggtggggctgtccttcctacagttcactaacatgaactccatgcgcaacctctttatcgtcggcgtctccatcttccttggcctgtccgtgccggaatactttttccgctacaccatggctgctcaccgtggtcctgcgcacacgaaagctggatggttcaacgactacatcaacaccatcttctcgtcgccgccgacggtggggctgatggtggccgtgttcctggacaacacgctggaggtgaagcaagccggcatggaccgggggatgccgtggtgggtgcggttccggacgttcaagggcgacagcaggaacgaggagttctaccgcctgccattcaacctcaaccgcttcttccctccggcctaaaagtcaagtcactcagccagactcagattgctgagcagaggcatagtgtagcttatttattgttccattcgttcatctctacttgttcctgttgtagattattttgatttttggagaggtccagtaagtatacttactgcccaatccactaaatgtggtcgcctaccgttttatatatatatttttacatgcac

SEQ ID NO: 26630 - DNA, 1358 bp, Zea mays
  Clone ID: MRT4577_124295C.1
tgggtacctcgaggccggccggggtccatttcccactcgatcgccaataatggagtttccgcaccaccaccaccaccacggccatcgccgcgacgacgacgaagacgaccgcagaggcccgcctcccccggtctacggcggctacggccagccaccgccacccgacccgtacggccgcgcgcccgtcgaccccgatccgtacggtcgacctccgccccagtccgcgtacggtggggccggggacgcctacggccacagcggccaaggctacgcgcccccgccggcctacggcgccgggggcgggtacggcaacgtcgtccacgtcgcgcacgaggtcggcgacgagaggccttactacggcggcggcggcggcggtcttggtggcgcctacggaggcggtggctccgagtacggccacgagggccgaccgcaccacggcggcggcggatcccagtacggccacgagacacgcccgcaccacggcggcgccccgcctgtgaggcagcagacgtacaggatctactgcaaggctggggaggaccagtacagcctcgcctcccgcgacggcaaggtctgcctcgtgcgcacggaccgtgatgacgacgcgcagcactggatcaaggacatgaagtacagcaccagggtgaaggatgaggaaggctaccctgccatcgtcctcgtcaacaaagccactggagaggctctcaagcattcccttggccagtcacaccctgttcttctgacccgccataatccagactccctggacgagtctgtcctgtggacagagagcagggacgttggtgatgggttccgctgcattaggatggtcaacaacatctacctgaactttgatgctttacatggagacaaggaccatggtggtgtgcgcgacgggacggcccttgtgctgtgggagtggtgcgagggagacaaccagcgctggaagattgttccctggtgaacaaggaaatgtgtgaccgagcccgcaccaaggaggagctcctgccgtaataagtgaagtgattggtactgaagtttctggaaataagaggctcttccgagatgcctgtttgtgtgagtatttgcgtttccattccgttttcatgataataaaacgcattgattattaatatatgtaatgtgatgctacactgagtggcagcgttggtatatatttgtaagaagtaagaacccattgttgttggactaagcgtgacgagtgatgtactgatgtatgaacctttgcttgatgccaaaaaaaaaaaaaaaaaaaaaaaaaaaaaaaaaaaaaaaaaaataaaaaaaaaaaaaaaaaaaaaaaaaaaaaaaaagtactctgcgttgttaccactgct

SEQ ID NO: 26631 - DNA, 1096 bp, Zea mays
  Clone ID: MRT4577_124296C.1
tcgccaataatggagtttccgcaccaccaccaccaccacggccatcgccgcgacgacgacgaagacgaccgcagaggcccgcctcccccggtctacggcggcggcggtcttggtggcgcctacggaggcggtggctccgagtacggccacgagggccgaccgcaccacggcggcggcggatcccagtacggccacgagacacgcccgcaccacggcggcgggggcggcgccccgcctgtgaggcagcagacgtacaggatctactgcaaggctggggaggaccagtacagcctcgcctcccgcgacggcaaggtctgcctcgtgcgcacggaccgtgatgacgacgcgcagcactggatcaaggacatgaagtacagcaccagggtgaaggatgaggaaggctaccctgccatcgtcctcgtcaacaaagccactggagaggctctcaagcattcccttggccagtcacaccctgttcttctgacccgccataatccagactccctggacgagtctgtcctgtggacagagagcagggacgttggggatgggttccgctgcattaggatggtcaacaacatctacctgaactttgatgctttacatggagacaaggaccatggtggtgtgcgcgacgggacggcccttgtgctgtgggagtggtgcgagggagacaaccagcgctggaagattgttccctggtgaacaaggaaatgtgtgaccgagcccgcaccaaggaggagctcctgccgtaataagtgaagtgattggtactgaagtttctggaaataagaggctcttctgagatgcctgtttgtgtgagtatttgcgtttccattccgttttcatgataataaaacgcattgattattaatatatgtaatgtgatgctacactgagtggcagcgttggtatatatttgtaagaattaagaacccattgttgttggactaagcgtgacgagtgatgtactgatgtatgaacctttgcttgatgcatatgctcttctgctcctaccgtgggcttcgatgagtgcaaaaaaaaaaaaaaaaaaaaaaaaaaaaaaaaaaaaaaaaaccgagagaggggccggtac

SEQ ID NO: 26632 - DNA, 2855 bp, Zea mays
  Clone ID: MRT4577_124297C.1
atccaaaggaaaagggcttagcctcacgagacaaaagacgcccgccccggccggcgaccagtacctcgctcgccattgctagtgctagccgccgtcgctggtgtcccctcctcccacttgcgccgcctgtccccgcgccctcgaaacctttttctcccaaaacagatttcgtcccggcgctctcctgcaaagggcggctagctgtcgccggtggatacgtttcaccttgcttgggttctgcttcctcctgcttttccaagagagggccagcagcagacgaagcgagcaaagcgcgcaggaaccgctcggtctggtgattttaaggggcgaggtcgtgttcttgggaggcggagagacacgagctctctctcttcctgtcctctttcccgcggcttctctcttgtcttagctccaagagggcaaaactcgtcggggtagggaaatggcggaggtgaagccggaggagataagccatccgcccatggagcagctccaggggttcgagtactgcatcgactccaaccctccctggggcgaggcgatcatactgggcttccagcactacatactggcgctgggcacggcggtgatgatcccgacggtgttggttcccatgatgggcggcgacgatggggacagggtcagggtggtgcagacgctgctgttcgtgacggggataaacacgctgctgcagtccctcttcgggacccggctgccgacggtcatcggcggctcctacgcgttcgtcatcccgataatggccatcatccaggacccgtcgctttctgggatacccgacggtcatgagaggttcctcgagaccatgaaggccatacagggggcactgatagtgtcctccagcattcagatcattctgggctacagccagctgtggggtattttctccagattcttcagcccagtggggatgactccagtggttgcgctgctcggatttggcctcttcgaaagaggtttccctgtggttgggagatgcgttgagattggcctgccaatgctgatcctctttgtcgtgctgtctcagtatctgaagaacatacagataaaagaaatccccatactggaaaggttctcccttttcatctgtgtcgcgttggtatgggcgtacgctcagatcctcacttcaggtggagcctataagaacagcgccgaggtcacccagaacaactgccgcaccgacagagccaatctcatctcttctgccccatggattaagatcccctacccactgcaatggggtgcgccgaccttcaacgccggccagtcatttgggattgtgtctgctgttttggtctcgctggtagagtccacagcctcctacaaagccgctgctcgtcttgcgagtgcgactccacctccggctcacatcctcagcagaggcattgggtggcagacgttcaaaactgaaaaaaagagatgctcctgcgaacgacagggaatcggcatcctccttgacgggctctttggaacggggactggctccactgtctcagtggagaacgtcgggttgcttgggtcgacaaggatcgggagccgacgggtcatacagatctcagctggcttcatgatctttttctccatgctggggaaatttggagccttgttcgcttccatcccgttcaccatctttgcggccgtgtactgcgtcctgttcgggctagttggttggtcatcctgtttccttcctgatgatgtgctttggtgtaatgcaatgcaatgctgcctgggctgacggcttttctctgactctcagctgcggtggggctgtccttactacagttcactaacatgaactccatgcgcaacctctttatcgtcggcgtctccatcttccttggcctgtccgtcccggaatactttttccgctacaccacggcggcggtggctcccagtacggccacgagacacgcccgcaccacggcggcgggggcggcgccccgcctgtgaggcagcagacgtacaggatctactgcaaggctggggaggaccagtacagcctcgcctcccgcgacggcaaggtctgcctcgtgcgcacggaccgtgatgacgacgcgcagcactggatcaaggacatgaagtacagcaccagggtgaaggatgaggaaggctaccctgccatcgtcctcgtcaacaaagccactggagaggctctcaagcattcccttggccagtcacaccctgttcttctgacccgccataatccagactccctggacgagtctgtcctgtggacagagagcagggacgttggggatgggttccgctgcattaggatggtcaacaacatctacctgaactttgatgctttacatggagacaaggaccatggtggtgtgcgcgacgggacggcccttgtgctgtgggagtggtgcgagggagacaaccagcgctggaagattgttccctggtgaacaaggaaatgtgtgaccgagcccgcaccaaggaggagctcctgccgtaataagtgaagtgattggtactgaagtttctggaaataagaggctcttctgagatgcctgtttgtgtgagtatttgcgtttccattccgttttcatgataataaaacgcattgattattaatatatgtaatgtgatgctacactgagtggcagcgttggtatatatttgtaagaattaagaacccattgttgttggactaagcgtgacgagtgatgtactgatgtatgaacctttgcttgatgcatatgctcttctgctcctaccgtgggcttcgatgaaaaaaaaaaaaaaaaaaaaaaaaaaaaaaaaaaaaaaaaaaaaaaaaaaaaaaaaaaaaaaaaaaaaaaaaaaaaaaggggcgggccgtttaaaaa

SEQ ID NO: 26633 - DNA, 696 bp, Zea mays
  Clone ID: MRT4577_124298C.1
cctcgaggccggccggatctgttgctttctcttgcacctgagaacattgctagtgcatggccatccctgactgaggtctcattcaactgaactgatgtcctcaatggcatgagatcacacatatccttcacttactggagcatttataccaacaaggatatgactagacatgctctaccaccaacgcgtgtgcttacatcttaacaatcgctctaactgcatgcattccacctgcattgatctttgcaaggtccaagctaaagtggcaagcatttagcgctgccattgcaaaaagaaggttgacaaagcatgtcatagagccattcttgggtgcactgttctaccatctgtataaccagactgctacaaacaccttggagacagtggcctctctggcacatggtggctccaaagggatggaaatggttattgccagcggaaacccaaacattggatattgcaacgaaaatatcacacgcactgcaagtgggaaccccaatatcataggaggcgctgctattgacccttacactcaggctcatattggaaacgtcaaaaggaaaaagaatccatgaccgctgtggataagaatatagggatcttcctcgtggacaacatcttggagcatgacgaactacatctataccttcatattgttgccacgtgcgccacaagtgccattgtttagtaccaccc

SEQ ID NO: 26634 - DNA, 734 bp, Zea mays
  unsure (1)..(734): unsure at all n locations
  Clone ID: MRT4577_124299C.1
tgctcgcccggaaaaaaaaacccattaccgatggtagctttggttagaacaagcagaaaaggagggtgacactgacacctcgctgtcgtcagcgaccggcaaaaagtgctggtaaagtgaactcgaattcacaaaaaaaaaaaaataccagtccagttgatcgtaatccagcacttttatctgatgctgtcacagactagactggcatgtcaactccggttcgatcagctccgatgaaagagcatatatggcaggttctcttttgaatatggtgggacagctgtgccaataagcccaatataatcagatatttgaaacaacaaaaaggcatcgcgcgctgttctccaatctgtctgcgctcaacatgcaattatcacgagtccattcctcctgcacttgtactgttaagttccagcccaaactacgcaggcatcaccatgcagcatgtcgtagatggttgacacagaatgagaatcacatggtgagggaataagaccatgtgcgacttatatactatatgttacacggtctctaaacactggatacacttgatattcatatacaatccagtgtatttaaatattatatcttattcactaaaactcctcaagacacgattcatctacacgagttatataagtggaaccgtatcttaagctcagagaaccgtggttgagacattatattacttcaccaaaatacgtatgctgnggcttttttgcacttactccctt

SEQ ID NO: 26635 - DNA, 389 bp, Zea mays
  Clone ID: MRT4577_12429C.1
ggcacataaatgtttgcttgctcttttaagaataagcacaagtttttccttttgatgttaaacataaatttttttgattggggggcagctggttaaaaatattcttcaaatttttcttttcttgccccccagtacaatcgattttttaggataagcacccgtcccgagtttgtttaagaagacccaccccccctttccgagggcccccgtttgaaaaatttccgggggaaagcaaaaaattgctgcaatgaaataattggttgggaattgcagcccaccgatggcagactcgttcaactcccccatgttcctccttcacagaatttcctgaaacctgcggacccattgcctaaccttctttttgaactcatcccgtttttttctccaat

SEQ ID NO: 26636 - DNA, 1589 bp, Zea mays
  unsure (1)..(1589): unsure at all n locations
  Clone ID: MRT4577_1242C.1
gtaccctgccgggccggccgggaccacaccgatcccttctgaaaaatccccctcccctcccctccccgaggtctgcagcggcgagggaggggagagataataataatcgcaggagggaaaagcagcagcgcaggcgcaaaaagcaaatcaaagccacaccaccaccaccggcagctgccgagagctgcgcccgcgcccgaacacaagggagagcggccggagaggaaagccaaatccatccactccacccccgtacgccgccgcagctctagcagcccccgtcccgcgcgcatgggccccaaatcgccagcgccgcgacgagcgcgcctgcccccgctcccgcggcgggggtagcagcagcagcagctgctgctgtgtgcttcgcgtcttcgccggggatggcgcggctcgggcgagcgggctgccgctccggtccagcccgagcttttttttcaggaattcctgaagacacattgagaaattttatgtccaatgtcttgcctgctgtattgatcctggagtttctcagtgggaccaatttgattgttcaaacgtttgctctagaagtagtcgcccctgccatgcctccattccaagatctatcacgtcctccagtgcagcataccagacacttagcaacagctgctcctgctcacgtagatgctgaccctccggatgcagcttcaaattctagcgcagctcctttgggattagtgcagcctccagtgtctcctcacagtggttgttgtgcaccgaacatggtacaaaaacgagggacccgggactgccattgtgtttatccagtgagaattgagctcttccttcgtaatgtttccttgacttcaaactggagcaacaaatttcttcaagaacttgcttctcagctcaacctgcgcgttaatcagtttgagattgtaaatttttatgttgttggagcttctgggctaaatatcacaatggatatagctccctatactggaattagctttgctgctgatcaagtcaaggcaatgaattattcacttactctgcatacagttcggattgatcctgtgttggtcggggactataatcttcttaatttaacttggttcaggtcattggctccagctccagctccagcattcacaatggcacctagggcctctccatctacagcatctacctttccaagacagagtgagggtccaagcaacaatagacatgcaagcctgatcacagtggttattatatgtgttggttctctaattggagtcttgctgattgttttaacaatatgcttctgcacatttaggaaaaggaaaaagagagtgcctcatgttgaaactcccaagcaaaggacagcagatgcagtttctacagtggagtcccttcctcgccccaccagcacaaggttcctttcatatgaagaactgaaagtggcaacaaataacttcgagccttcaagtgtgcttggagaaggtggttttggccgtgtcttcaagggggtactgggtgatggcactgctgtcgctatnaagaagcttactaacggagggcaccaaggagataaggagtttttagttgaagtggaaatgctgagcaggttg

SEQ ID NO: 26637 - DNA, 444 bp, Zea mays
  unsure (1)..(444): unsure at all n locations
  Clone ID: MRT4577_124300C.1
cggaanncccgggggcggccgcacgcgtaccgcccacgccgtcccgactacccgtcccccatgttggcaagggaagaaatcgtcgagtacaggcgagggcctcgnccttattttgtgtggtctaacctcaagggannatccttgtgggccaacgcggtnngaccgacaactactacgacaaccatcggcacggtcancctaactggtggtacgcccacgccatgagtctccgacccggcacctacaagggcgcatcctcagggtggtgcgaacttcagcnnagcagcagcatctcgcgcccctggcaaccgcgccatgaagctancgccatgaaccagaagttcggggaccaatcgaccagtaccagcatctacancgccgtcgtgccgccgccgccgcggccaggggccaacgccacacgtgctcaagggttcaagaacaccc

SEQ ID NO: 26638 - DNA, 177 bp, Zea mays
  unsure (1)..(177): unsure at all n locations
  Clone ID: MRT4577_124301C.1
gctagcgctccagtcgagctcncnnnaactgttccgatgnccacgaagaaggtcgcagtactgnccaaacagggcggggcgcgccaccacggctggggggagacgcgcgccccactcgcgcgggtacctcccaacccttttttcagccagcccaaccaaaacaccgacgggtccaag

SEQ ID NO: 26639 - DNA, 261 bp, Zea mays
  Clone ID: MRT4577_124302C.1
ttttctatatatagtctagccttatgtaaatggctattaaatacagatatgtgatgacaaatgtaccattgtcatagtgacatggccttgagaaatcttagctttctaatgataatggtcaaatattctatctaattacttccattttcctccttttgccctcttattatatttggggaacgtcagtgttgtttgtggtatttctcagtatgacaaggctttcccatttcaggtccataagcaaggcagcgcccttggcag

SEQ ID NO: 26640 - DNA, 693 bp, Zea mays
  Clone ID: MRT4577_124303C.1
aattcggcacgaggcacatttatttgccttgagtaacataccagctcacctagtggctttacaactcttttatgttccttttgttcggcaatcccccatgcagtagctcttgttagatcatcggacaagaatagccccaaaggagccattgagtttattcttcagctactgaaggttgttgctgctctctggttcacattttatttatttgtcatctgtggccctgtaaccgtattacttatatttatagactatggagtaatcgttgttcttttttttttcttgaacccgcaagagagctgcattatattaataagggaagaaacggcaatacaaaacagggggggggaagacccgcacctccacacacccaccagccctaaaacattacaaatctaaacgacccagggccaactccttgagcctactggcccctgcagcacaccacacaggatactccaatgagatgcgatgcaatgccctaccaacagtatgttgcagcccattaaacacagtcatttctttgcttccagagctccaggcgacacgagtaatgacagcattcattcctttcctcgattccttgcaaatctgactatttgctctgctccaccaggatgaaaaacaggcatctgagggcttgtggcaccaacgatggaagcctcagcttttgaagacagcagctcatacttg

SEQ ID NO: 26641 - DNA, 298 bp, Zea mays
  Clone ID: MRT4577_124304C.1
aggtactactgcatctagcattcccggagttcacgcagcgcatccaggttgctgacacttacaaggaacatgactgcttactataaggacctttgtacaacttaaagcagagtatagtgcaatttcagaagccgctaaaggtatatcgtagccggatattgttcctacgaggtggtcaaagtgttatgcattgcactaactttgaggctagggactcaagacatgcagcagatctgagaagtggcagaaggctagggctatcgtttactccttatggcactccaaatgtagtgcataa

SEQ ID NO: 26642 - DNA, 342 bp, Zea mays
  Clone ID: MRT4577_124305C.1
cggaattccgggtcgacccacgcgttcgtgattcctctgatgctgcggctgcacaagctctacgtacagaccaaagacggggctgcgaaccggtttgcatagttgtgggttctcacgttaaccctagtgactctatggtggatacttgatcctattttttgctagaagctttcgcattgacctgtcaacccgctaggtcacgcctggtgtcatgtgcttctgggccttaacttataccatgcggacacactgctaatggtttgttagtctcagcagcgcatgctgctagcacgaatccccttacctgttggaaatctggcttacgtcatggcacagaaacca

SEQ ID NO: 26643 - DNA, 399 bp, Zea mays
  Clone ID: MRT4577_124306C.1
gatcatcaacaatcaatataattcaaatgagtaatgctacagattatgatcaatacgaacttctactggaaggtggaagcccaagaccagacgatacagagttttcggactgcattttcctacaggaatagtaatctgacaaaccagaggatgcacagttgacagaaccaatccaaccaattccatcatgagccctgatacaatgtgccaaacgataggacaaacaacaaatcgaattcaaatgcaagcagggaggaaatcatgaataaatactttcttctatccatcattcatcttcatccgttcattcatgaaacaacgcgctgcatttggttacatcccacaaaccatcagtcttaaacccattgacaacagccccaaaacccgaaagcccaaaca

SEQ ID NO: 26644 - DNA, 633 bp, Zea mays
  unsure (1)..(633): unsure at all n locations
  Clone ID: MRT4577_124307C.1
cccacgcgtccggattcatatcatgcacaattccaggaaggaagaaggtggggattgtaggacgtactggtagcggaaagtcaacttttatccaagcacttttcaggatcattgaaccaaggggaggaacgatccaaatcgacaatgttgacatcttgaaaatagggctgcatgatttaagaggaagactaagcatcattccacaggatccaacgatgtttgagggaacagttagagggaatctggatcccctgaatgagtaccctgatcatcgtgtgtgggagattttggacaaatgccagcttggtgatatagttcggcaaaacccaaagaaattggactccatagttgtagagaatggggaaaattggagtgttgggcagaggcaactattttgcctcggaagggttctcctaaagcgaagcaatgttcttgttcttgatgaggcaactgcttcagttgactcctccactgatgcagttatccaaggaacgatacgcgaggaattcagganatgtacggtattgacaatagctcacagaatccacaccgtaattgacagtgatctcattcttgttttcagtgaaagaagaattatagaatatgacacaccctccaaattactggagaacg

SEQ ID NO: 26645 - DNA, 199 bp, Zea mays
  Clone ID: MRT4577_124308C.1
ggacgcgtgggctccgagtcgcccctccccttccgccgtcgatggcgctgccgtcgagcgccttccattcgtcacggccatcctcggggtcccctggtactacaagaaagcggcagcctcgggccgagacatcaggtggtggtgcacctgtgatgagccccacgtggcgtgcttggaggacctgggcgttcctaccacc

SEQ ID NO: 26646 - DNA, 126 bp, Zea mays
  unsure (1)..(126): unsure at all n locations
  Clone ID: MRT4577_124309C.1
cgtgggtgctggtgagacggggtggtccgcaaccaacccgaccantccgcatgccctctagtgcgtcgcctcgatngtgccggtggcgccccacgggcngggctccgctgtgacgccggtggcggt

SEQ ID NO: 26647 - DNA, 693 bp, Zea mays
  Clone ID: MRT4577_12430C.1
acgtacttgttgatcgccccagcgttggacacggttaatcaggtgatatgcgtctctactaattactatgtgtatgtaataaattccaggtacaaaatgcaggatttgtctcgtatgagtcgtatcatagtagagaccaaaaaaaaaaaaaaaaaaaaaacaaaaaaaaaaaaaaaaaaaaaaaaaaaaaaaaaaaaaaaaaaaaaaaaaaaaaaaaaaaaaaaaaaaaggcaaaaaaaaaaaaaaaaaaaaaaaaaaaggtccctgggccggaaccaccttaagggcaatttttgaaaatttccttaacactgggggccgttggaccttgcttttaaaggccccatttccccttttaggggggggttttacatttcattggccggggttttacaacggggggacgggaaaaaccttggggttacccaatttattggctttgaagaaaatccccttttccccagttggggtattaccaaaaaggcccgaaccgttcgcctttccaaacatttgcccaccctgattggaaattggaccccccctgtaccggccctttaagcgcggggggggttgggtgtttacccgcaagggtgaccgttacatttgccagggccttagggcccgctcttttggtttttttcctttcctttttggccaggttggccggttttccccgtaaggctttaaatgggg

SEQ ID NO: 26648 - DNA, 555 bp, Zea mays
  Clone ID: MRT4577_124310C.1
ctgcatactagatttacccaaaatactccatgttgacaattgtacagcaaacgaccggcaccaagaccttatcaagcaggctacaaaataccagctcgcatggaatggctgtttatcacacacatctaccaatcagactttgtatggtgcatactcctacctgcacatatgggggcatgcatggactgtttgttagcgtgggatttgggcagcatcttgttgatgaccttgtacttgttctttagacttctggaactgttaaaagtcgagcagcccccctgatgatactgacatctaacatgcgcggagacgaggtactgtatcgactgactgcagcggcaaaaagaagcttgtgtatgatgcttgacaatgccaaagtcacacaatttatacgaactcatagtaaatttaacattgccattcatgaagtccagtggaactgggatgtacctgctggactcaagcctttcaggctctaggaccacactgtcaagatactggaatgatttgattcgacgatccacacaagcaattgccttctggcactgtgcgagc

SEQ ID NO: 26649 - DNA, 281 bp, Zea mays
  Clone ID: MRT4577_124311C.1
ggccgacgggcactcgacaatggtgccctcataccggcttgtgttgactagaaataaacaatatgttgattgaaaggaatgtcagtgtatttcaaattgatgttggcgctgagggggggtgaacaccaaatggtttaaataaaggagggacccaaaaggggggtaaaatgctagtatacctttaacctattttttgggatgcctttcctggggcgcgcacccggccggggagtcgctccaaagggccaactctggacggtccgtgaaactggcgggggggg

SEQ ID NO: 26650 - DNA, 1176 bp, Zea mays
  Clone ID: MRT4577_124312C.1
tccatgactatcctctctacaatcagaagatgccggtgtccggtcatttgtgccaagatcagcatgagtacttgaaactgcgtgcctttgaacatttgagaagcatggatttaaaccggaatcgagctcaaggtcatcattcctaaaagagcttacagcttcatttacagcatcatcttgagggtttgaaacctgctgaaccggtgctagttgttgcgtggatgtaaaatttagatctccggttgcacagcttccttgatatagcaattccaattggttgtagagaggaaatggctttgattggaacttcttcatctttggatggtttttaattattctgtcccatattggtggcaatgcatttatcatgccaaggctgtcattccatccagccccactttgtttccgggcttcctttattaacttgtaatttgctttgagctctttttctttctcttggatttgcgctttcgaaaattgagctagaggaaatttctcattgaacatttgagttatactacgccagccctccggaatccaaccattttgacccctaaatcttggattattatgctcatgcaagatgtcaacaagactcttctcataattcatattccaagaagccggacgcatgggcggacgcgtgggctgataatgttgcctgtgagcgattgtttcaacagtccaggtgggtgcttggccggagttaatgttgtgccacgctaacggatcaatggtgcggcagcagggcgacgacggagcggcggcggcgaaggaggaggaggagaaggtgcggctggggtcgagcccgccgagctgccgcggcttgtgctacgcgtgcagcccgtgcacggccgtgcagatgcccacgatgtcgtcgtcgtcggtgccgctcgtggcggcgctctccaactacaagccggtcgggtggaagtgccgtatggcggcaggtgccacaggtcgaggggggcgatcacgatgggagggggaggggaggaagaggcggagaggcggcgggtgaggggcggcggcgggtgcggctccgggtgtggcggcggcggcggctgtggtagcggcatggctatcgaaggcttcaaggccaaccacgccgagtctggtggctgcggctctggctacggtggtggctgcggcacccgttcgagctccagcgctgcg

SEQ ID NO: 26651 - DNA, 564 bp, Zea mays
  Clone ID: MRT4577_124313C.1
agcgtggtcgcggccagagtactttttttttcttcctttcttgcttttttttctttctttccctttccattttaatttttttttttttctagtttttttttttttttttttggccccccacaaaattccattttttttaccaccaaacggggtttcccaagttgcaaaataataatcccctttttcctgataaaaaaaaggaattttttgggcttggaaacaaaaaaatcccctgccttggaacaaaaaaacttcaaattgggggggggccctaaaaaaaaataccttcccgggcgggccgtccaagcccaatttttcaaaaattccttaaacttggggccggttgaacattctttttaaaggccccatttcccccattttggggtgtattaaaaattaattgcccccgttttacaaacttttgacttgaaaaacccctgccttacccaaactaaaaccctttgaggaaaatccccttttcccaagtgggggaaaaaccaaaaaggactgaccgattcccctttccaaaattttcccaacctaaattggcaatagaccccccct

SEQ ID NO: 26652 - DNA, 498 bp, Zea mays
  Clone ID: MRT4577_124314C.1
aaaaaaaatataatcaaaccaaacaagatagactctaacaggtatacccaagacctaaccagcccatgcatgataaaggaacaacgaaaaggttcatgttcttaaacaagatctaccctggtatttcatgacaagcaaaaatagagatattatatatgatgattgggcaactgacagcacatggaaaaataggaacaggtacttactaaacacgacaattatagacggagagcacataattatttgagcacggtactacaacggaataatgaccaacgacgagaccacgaattagaatccctgatgatgaaacacatcgggagcctgtccgtttggaattgctacactttgaaccaatacattttcttactgggagttcccgaacccaaccgaaagaacaccccaccccaggccctcgaccgtggtggcctgcccgtcatgaacttatcgctggcgcataaggactgagatgaaaaggacccaggctctgaacatgtt

SEQ ID NO: 26653 - DNA, 767 bp, Zea mays
  unsure (1)..(767): unsure at all n locations
  Clone ID: MRT4577_124315C.1
gtccaagctgtgtggggggcgatatttggccgggtatatttgtgctttggaatgcctgaagtctatcgtgtcctttttgaggcatttggaatggatccagatgatgagagctgtcagccaaaattgcgtcgtcaactagaggatgttgattatgtttcagtggagttcgaaaagaggcagctcacttggcaggatgttgctgcctacaggccgccaccggatgctctttttgctcatcctaggcttttccgagcttgtgtgccaccaggcatgcatcggttcagaggaaatatttgggattttgacagtagacccaaggtcatgactaccctaggatatcccttgcccatgaatgacagaattccagaaatcacagaagcaaggaatatagagcttggacttggtcttcagctgtgttttttgcacccatcaaaacataagtttgagcatccaagattttgttatgagcggcttgaatacgttggccagaaaattcaggatctagtaatggcagagaggctactcatgaaacacctcgatgcaccaggcaggtggctggcggagaagcatcggaggacgttgatgaacaagtattgtggacggtacctgcgggacaagcacctgcagcactacattatctacggngagacagtgcaagacagattcgaacacaatcgacgtctaaggaatccttcaacgacctctgtccagcaagcgctacatgggcttngcatactgtgtgtatggcaaccctgacgggcggcgtt

SEQ ID NO: 26654 - DNA, 397 bp, Zea mays
  unsure (1)..(397): unsure at all n locations
  Clone ID: MRT4577_124316C.1
cagtggattgcatcattcgttatttcnacctctccttgggccggttttatnaggctgtgggggcttaccataaagctcttactgcattcaagaccagcnaatggtagaatcatgcaactgtggcttctgcttttgtgcgcataacggntccgtacaataagtcatggaatctgatggagccaaaatcttactgtgaaaacgctctcaatatttaccaaagacctattcctaggacttctttggaagaaattgccactgttttaacttanntttcatccatatattagactattaatgagcatgagcaagcactcangttacttcaaaaggccttaaaaatttacaacaattttgcttgccaacataacacaatttcttgtaattgaagctcatattg

SEQ ID NO: 26655 - DNA, 233 bp, Zea mays
  Clone ID: MRT4577_124317C.1
agactgtcgctgaatcctaagctcacgccgcttgacatgtgacagaatcgacctcaatgaaatgggccaatgcgagtctgaactataaagatgctcggcccaagagaagcgagagctgaataaggccgcgctgctgcagcgaccctgtcgatggacatatacatgcacaactgtatatattccaaaagcgaggagctgtcttataactaaggctgtcaggatgtcagaggaca

SEQ ID NO: 26656 - DNA, 266 bp, Zea mays
  Clone ID: MRT4577_124318C.1
tgtgaggacacccagttctagtagagcactttttttaaagctcccattttgtaaccactagtttgcggttgacttgagtactctggtgacttcctgcgtcaagcgttctcaagctgtgagaatgtgcgcagtccaggcaggttttctctcggagagttaagtcttcccttgaaggcagggaagcaggatggatacacatatatcacacgcataaaacaccaggtgcgggagcagcccagactcaaggctgactaaactggaggctg

SEQ ID NO: 26657 - DNA, 472 bp, Zea mays
  Clone ID: MRT4577_124319C.1
tcgctacgacagccaggggatactcgggtttgtttacagattggtggtgcctaatcatagagacctcaggaacaaaatcttggatgaggaccatccctgcaaattctccatgcaccccggaggcaccaagatgtaccatgatatcaagcccctatgttggtggaccagactgaacagggaaatagcccaatgtgtatcagcaagtgacacgtctcagaggataagaggcaagccacttaaaatcagctggtgcctcgcaacccctatcgataccttcatggaaatgggatgacataaacatggatctcattgtgggattgcccacaacctttggccttatgatgcattttggggcactgaggaccgattgacaaaagtcgggccattttgttccaggtgcaccccacctataagggtcaaaattttgccgaactggatattgacccaatcttgtgtttgcacgagttacccc

SEQ ID NO: 26658 - DNA, 498 bp, Zea mays
  Clone ID: MRT4577_12431C.1
gggggaaaaaagggcccaaatttttccccatacaaaaaaaaaccacaaacgggtaaaagggggaaacaaaaaaaaaaaacccaacttaaagccgggccaggaggaaaaccgaaaacgggccaaaaaccccgaaaaaaagggaaaaaaaaactatcacagggggcttaactggggaaaaaaaaaacgggaagcatgcgaagggaaacttaagcaaccccccccattttggtttaaccaagggggccccaaaagggggggatttaaacccttggccaaaaagggttggcctaaatgaggcccaaaacgagtttgaacaagcgggggaacccggtgccaaagggggtggggccaaccaagctaaaacccgagggaaaaaaaaaaattttaaacaaaaagggcaaaaaaaccctgacggacttggaaattttggaaaccccgggaccctgggggagccaaaccaagaaaggggtcccgggggggaaccccaatggctttttg

SEQ ID NO: 26659 - DNA, 370 bp, Zea mays
  Clone ID: MRT4577_124320C.1
gccacgcgtacgatcgcgcggtctgccacgcgttcgactggatacgctctggttgaggactgtctgtgcgccgagcgatcttacgcggacgaacagagctgcgtcttggatgcatttaacatgatctacgcgcgactcactgtcagatgttaacttggagtgcttgatatcgtggaagctgatgaactgagtaccgatagtcctggcatatgtctacacatagctgagaggcctcgagcgatatggcacagagtctcatgcgttccgatgatattgatatgtcccaggcccatatcaagaaagctctagttatagacactgacaacagggatgatatgatggggtacaagaggctggacgagaaggtcta

SEQ ID NO: 26660 - DNA, 286 bp, Zea mays
  Clone ID: MRT4577_124321C.1
cctagctgatccttaacgcgctttttttttttttttttttttaggagggtggattatgcttccaatgctaatggaaaataactacctactgacaacccattattacatcacttacaaaggaaaatgcattgttggccctgtcttcttcttacctctggtgacagagactaccactgactgactaatctcccgtctcattctgagcgagacattctgccaactccttctcacaacgggtcctggcagcatctgcctggcgaccacggatagcccttctagctgctcg

SEQ ID NO: 26661 - DNA, 1135 bp, Zea mays
  Clone ID: MRT4577_124322C.1
gcacgagccagagtccagaccaccaggagactctctcagacagcataagctcacatcggcaataaaaaagcatccccgtctcccctgattctctccgcccagctcagctctgctccccgccgctcctctccgcgccccttcatcccggatctcggcatgggcaccgccaccaccaacggctcggcggagcaggcgtccgcgcccgtgcccgtgccggcgctcaagttcctcatctacggccgcacgggctggatcggggggctgctgggcggcctctgcgccgcgcgcgggatccccttcgtctacggcgccggcaggctcgagaaccgcgcccagctcgaggccgacatcgacgccgccgcgcccacccacgtgttcaacgccgcgggcgtcacgggccgccccaacgtcgactggtgcgagacgcaccgcgccgagaccatccgcgccaacgtcgtgggcacgctcacgctcgccgacatctgccggggccgaggggtcctgctcatcaactacgccacgggctgcatcttcgagtacgacgccggccacccgctcggctccggggtcggcttcaaggaggaggacacgcccaacttcgtcggatcattctactccaaaaccaaggccatggtagaggaattgctcaagaactacgagaacgtatgcacccttcgtgtgaggatgcctatctcatcggatctctcgaatcctcgcaacttcatcaccaaaatcacccggtacgataaggtcgtcaacatcccgaactctcaataagcacaccccctgtttcgtgtgcaatgcatttgaaacggttaggtttctcataggagatgtcatgctgccatactcctttgtactttcagattattgaacggagcggggcaagcaaggtgtaatttagctcaactttcgcattggctcctggcctcctggggcgttatcataccgtgcggttggaatgaactgaggagcttcatgcctgcctgcttctgttgtgccatagaatttgtagttcgcgatgtttcatttgtaaccttttattgaatatgacttttaatgggatccttagcaatacaggacccctgtttcataaaaaaaaaaaaaaaaaaaaaaaaaaaaaaaaaaaaaaaaa

SEQ ID NO: 26662 - DNA, 113 bp, Zea mays
  Clone ID: MRT4577_124323C.1
tcgtgcctccattagccacctgcccgattgcggcctctctgcctggcagaagaagcggcatggccgctgtcctactatctaccgtccggaaattcaccttttgcgcaaaattc

SEQ ID NO: 26663 - DNA, 1290 bp, Zea mays
  unsure (1)..(1290): unsure at all n locations
  Clone ID: MRT4577_124324C.1
aatcttccctccatctcgatctcgccaccactcccccatttccactcccctcccggatctcgccgattcgccatggcggcctccaccaacggctcctcgccgccggcgctcaagttcctcatctacggccgcaccggctggatcgggggcctcctcggcaagctctgcaccgcgcagggcatccccttcgcctacggcgccggccggctcgagaaccgcgcccagctcgaggccgacatcgacgaggtcgcgcccacccacgtcttcaatgccgcgggcgtcaccggccgccccaacgtcgactggtgcgagacccaccgcgtcgagaccatccgcgccaacgtctgcggcacgctcacgctcgccgacgtctgccgcgcccggggcctcgtgctcatcaactacgccacgggctgcatcttcgagtacgacgcgggccacccgctcggctcgggggtcgggttcaaggaggaggacacccccaacttcgttggatcgttctactccaaaaccaaggccatggttgaggaactgctgaaaaactacgaaaacgtgtgcacccttcgtgtaaggatgcctatttcatctgatctgtccaatcctcgcaatttcatcacaaagatcacccggtatgacaaggttgtggatatcccaaactcaatgacaatattggatgaacttcttcccatctcaatcgagatggcgaagagaaacctcaccggaatctggaacttcactaatccctggtgtggtgagccacaatgagatacctggagatgtacagagattacatcgacccaggcttctcctggaaaaacttcaacctggaggagcaggcaaaggtcatagtcgcaccgaggagcaacaatgagcttgaccagaccaaactgaagagagagttcccggagcttttgtcgatcaaggagtcgctggtaaaatatgttttcgaaccaaactgtaaggcgtccaaggcttgacaagtggagattattgaacggagcggggcaagcaaggtgtaatttagctcaactttcgcattggctcctggcctcctggggcgttatcataccgtgcggttggaatgaactgaggagcttcatgcctgcctgcttctgttgtgccatagaatttgtagttcgcgatgtttcatccgcaaccttttattgaatatgacttttaatgggatccttagcaanacaggacccctgtttcataaatgatgtagttctagaatactgttcagtcaactcgtttgagtaaatttataaaaaaagatacaatgtttatcat

SEQ ID NO: 26664 - DNA, 332 bp, Zea mays
  Clone ID: MRT4577_124325C.1
taaaaaaaaaaaaaaaaaaaagaaacaaaaattaaaaaaaaaaaaaaaaaaaaaaaaaaaaaaaaaaaaaaaaaaaaaaaaaattttgttcttttggccgggaccacgctaggggggatttttggggatttccctcccactgggggtcgttcgggcttccttttagggggcccattttggccttttgtggggcgggttccatttccctggccggggttttacacctcctggcctgggaaaaccttggcgttcccccccttattccctttggggcacatccccttttttccagctggggtgctcgcgagggggcccgccccgttcgcctttcc

SEQ ID NO: 26665 - DNA, 1670 bp, Zea mays
  Clone ID: MRT4577_124326C.1
cctgccggatggttacgcccctgtttgtacctgtcggtggatgcagccattatggtccaggtcatggcgagtacgaaacacgatcggccagagtgaggagccgacgaaggatcccgcacggtggcggtggaccaggctgtgttgcggcgtcaccgtcggtgttggggcctcgcgtgtgccaccaggagcccgatcgctccagagtccagaccaccaggagactctctcagacagcataagctcacatcggcaataaaaaagcatccccgtctcccctgattctctccgcccagctcagctctgctccccgccgctcctctccgcgccccttcatcccggatctcggcatgggcaccgccaccaccaacggctcggcggagcaggcgtccgcgcccgtgccggcgctcaagttcctcatctacggccgcacgggctggatcggggggctgctgggcggcctctgcgccgcgcgcgggatccccttcgcctacggcgccggcaggctcgagaaccgcgcccagctcgaggccgacatcgacgccgccgcgcccacccacgtgttcaacgccgcgggcgtcacggggcgccccaacgtcgactggtgcgagacgcaccgcgccgagaccatccgcgccaacgtcgtgggcacgctcacgctcgccgacatctgccggggccgaggggtcctgctcatcaactacgccacgggctgcatcttcgagtacgacgccggccacccgctcggctccggggtcggcttcaaggaggaggacacgcccaacttcgtcggatcattctactccaaaaccaaggccatggtagaggaattgctcaagaactacgagaacgtatgcacccttcgtgtgaggatgcctatctcatcggatctctccaatcctcgcaacttcatcaccaaaatcacccggtacgataaggtcgtcaacatcccgaattcaatgacagtactggacgagctccttcccatctcgatcgaaatggcgaagagaaacctcacgggaatatggaatttcactaaccccggcgtggtgagccacaacgagatactagagatgtacagagactacatcgatccaggcttctcctggaaaaacttcaacctggaggagcaggcaaaggtcatagtcgcaccgaggagcaacaatgagcttgaccagaccaaactgaagagagagttcccggagcttttgtcgatcaaggagtcgctggtaaaatatgttttcgaaccaaactgtaaggcgtccaaggcttgacaagtggaggtgcgcacagctgtatgttgacgctatttgttccatctgaattgacattactctctccgggaactctcaataagcacaccccctgtttcgtgtgcaatgcatttgaaacggttaggtttctcataggagatgtcatgctgccatactcctttgtactttcagattattgaacggagcggggcaagcaaggtgtaatttagctcagctttcgcattggctcctggcctcctggggcgttatcataccgtgcggttggaatgaactgaggagcttcatgcctgcctgcttctgttgtggcatagaatttgtagttcgcgatgtttcatttgtaaccttttattgaatatgacttttaatgggatccttagcaatacaggacccctgtttcat

SEQ ID NO: 26666 - DNA, 1856 bp, Zea mays
  Clone ID: MRT4577_124327C.1
ctcgaggccggccgggaccaccggctacctttccttgttccgcgacgcacacagccgccgctgtttcttcatcttcctcgcagcgccggcgctgaggctcgggctctcagcgacggcggcagcggcagcggcttcccctcccgcctctcgccagtcgcctcgcgccctcgcctccggtcctccgcacaccggataatggctcatcgtggacatctagatggactgactggccaagctcctgctcttatgcgccatggttccttcgctgcaggcagcctctctagccgctcacctttgcagtcttcatccacactggagatgctggagaacaagcttgccatgcaaactacagaagtggaaaagcttatcacggagaatcagcggttagcatcaagccatgtggtcttgaggcaggacattgttgatacggagaaagagatgcaaatgatccgcacccacctaggtgaagttcagacagagactgatttgcagattagagatttgttggagagaatcagattaatggaggtagatatacatagtggtaatgtagtgaacaaggagcttcaccaaatgcatatggaggcaaagagacttattactgaaaggcagatgctaacccttgagatagaggatgtgactaaagaattacagaaactctctgcctctggggacaataaaaggcttcctgaattgctttctgagctccctcgcgtccggaaagagcatcataatttacgatctcagtttgaatttgagaaaaatacaaacgtcaagcaagttgagcagatgcggacaatggaaatgaacttgataaccatgaccaaacaagctgagaagttacgtgttgatgtggcaaatgctgaaagacgggcacaagcagctgcggctcaagcagcagcacatgcagctggtgcacaggtgacagcttcgcagcctgggacagctcaagctaccacggtttcagcagcagcagccacagactcatatgcaggtgcatataccagctacccccctgcatatcagcagggagcccaggctggggcatatcagcagggtgctcaggctggggtatatcagcagggagcccaggctggggcatatcagcagggagcccaggctggggcatatcagcagggtgctcaggctggggcatatcagcagggagcccaggctggggcatatcagcagggggcccagtctggggcatatcagcagggggcccaggctggggcatatcagcagggagcccaggatggggcatatcagcagggagcccaggatggggcatatcagcagggtgctcaggctggagcatacaactatgcttatgatgctggcacggcttatgcatatgcaggttactctggctatccagttgcaggctacgcgcaaagtgcagtgcccaactattcctatgctgcacctccgcagccaacaagcagcggtgcagctacgaacgccgcaggaggccagtatggggcagttggtagtgctggatatcctactgggcaagttcagccgagcagtggcactgcaaatgcagcgcaagcacctcctcctcctccaccaccggcagcaccatatccccccagcacatatgaccaaaccagaggagcccagagataaaatctgggatgtaagccagatggatgtttgccatgcacatttgttgagcagacaaatatggtgaaatctgggatgtaaaaccaagatggctggctgtctgtgcctccatcccattggctagggcgtattttcaccaatattgtgcctccagtgcaatttcttttgtgatgtatatcaccaccatttgttgagcaccgtagaaatgagttccagacggccgggacagc

SEQ ID NO: 26667 - DNA, 380 bp, Zea mays
  Clone ID: MRT4577_124328C.1
ttgaagagggacagaaccaagctgccaatgaagctaatggtgaggatagtgaggatgaggccaccgatatggagttatgatttttctgcagctgttcatgggagtctgtttcccaagtttcagtgctccgaagcctaagatgatgcttaaatcttggttttcgatattttggcgctagctggtagctgctacacttaatccttaatgtagtaatgacaacgtagttctattttggagatgcatgtactattgtgacattttggcgctagctggtagctgctacgccattttggctgctagctggtagctggtagctagttctattgtgatatgtacgcagtacagtacttagcatttagcaatgctgatggctcacgctc

SEQ ID NO: 26668 - DNA, 699 bp, Zea mays
  Clone ID: MRT4577_124329C.1
ccggccggattgttccgcgaacgccacagccgccgctgtttcttcatcttcctcgcagcgccggcgctcaggctcgggctctcagcgacggcggcagcggcagcggcagcggcttcccctcccgcctctcgccagtcgcctcgcgccctcgcctccggtcctccgcacaccggtcggtgaccctgcgtgcgtgcctctctagtggctcctggttcagatggcgggctgctgacacggccgcgccgcccgcggcctgagggcagcgggagccaccagccgctgctccaccaaggcggtctcgccgctttgaggagcgcttatgcccaaagcgaagcgttagcgcttcagcgcgctgaagcgtgcgcttagtgctgtttttttagaaccctgatctttttcatcattccctaccattttttgtattttcaggataatggctcatcgtggacatctagatggactgactggccaagctcctgctcttatgcgccatggttccttcgctgcaggcagcctctctagccgctcacctttgcagtcttcatccacactggagatgctggagaacaagcttgccatgcaaactacagaagtggaaaagcttatcacggagaatcagcggttaacatcaagccatggggtcttgaggcaggacattgttgatacggagaaagagatgcaaatgatccgcacccacct

SEQ ID NO: 26669 - DNA, 311 bp, Zea mays
  Clone ID: MRT4577_12432C.1
gactagcatttcggttaatgtccattcctcattctgaaccaataacgtcgctgatatgagggcagatgaatcggtcccattcgcaggctcattaggcctatgctgtagccgtcggcgctgaaatcggaattgcttacctaatgccagttccacatattcaagatgtaatgaagcaaaaacactcatacattaattctaccaatgaaggtttcttattattcctattctgatgccaaacgctacgacatctccattgctccgcgaattcaaatgccacatcttctctaaataatgacgcaaatacgttcata

SEQ ID NO: 26670 - DNA, 2015 bp, Zea mays
  Clone ID: MRT4577_124330C.1
ttgggtacctcgaggccggccggggtgctttggtgtttttcttctcccgttcaagtcgcgtgctgctttcttctctcgttcacctcgcgtgcgcgaaccaactagggcgaccgctgccgccctacggcctacgcccagctgctcaggtcttattcgggcctttggcggcgagaaccgaccccgccaggataatggctcaccgtggacacctagatggactgactgcccaagctccagcactgatgcgccatggttccttcgctgcaggcagcctttctagccactcacctttggagtcttcatctacactggagatgctggagaacaagcttgccatgcagactgcagaagtggaaaagcttatcatggagaatcagcggttagcatcaagccatgtggtcttgaggcaggacattgttgatacagagaaagagatgcaaataatccgcacccacctaggtgaagttcagacagagactgatttgcatattagagatttattggagagaattagattaatggaggcagacatacatagtggtgatgcggtgaagaaggagcttcatcaagtgcatatggaggcaaagagacttattactgaaaggcagatgctgacccttgagacagaggatgtgaataaagaattacagaaactctctgcctctggtgacagtaaaagccttcctgaattgctagctgagctagatgggctaaggaaagagcatcttaatttacgatctcaatttgaatttgagaaaaatacaaacatcaagcaagttgagcagatgcggacaatggaaatgaacttgatgaccatgactaaacaagctgagaagttacgaggtgatgtggcaaatgctgaaagacgggcacaggcagctgtggctaaagcaacagggcatgcagctggtgcacaggtgacagcttcacagcctgggacagctcaagctacagcggttccagcagcagctacagacccatatgcaggtgcatatgccagttacccccctgcatatcagcagggagcccaggctggggcatatcagcagggagcccaggctgggacgtaccagcagggagcgggaacccaggctggggggtaccagcaaggagcccaggctgggggcgtaccagcagggagcgggagcccaggctggggcgtaccagcagggagccccaggctggggcgtaccaacagggagcccaagctggggcgtaccaacagggagcccaagctgggcatatcaacagggagcccaagctgggacatatcagcaaggaaaccaggctggagcatatccctatgcttatgatgctgccacggcttacacatatgcaggttattctggctatccagttgcaggctatgcgcaaagtgcagtgcccaattattcctatgctgcacctccacagccaataagcagtggtgcagctacagacgccgcaagcctgtatggtgccgttggtagcgccggatatcctactgcgcaagttcagccgagcagtggccctgcaaatgcagcgccaccacctccaccaccaccggcagcaccatatccaagcacatatgaccaaaccagaggagcccagaggtgaaatctgggatgtaaaccagatggctgtttgccatgcacatttgttgagcagacaaatatagactctgtcatgccccatttgtagactgattactggttcagttatgtagatccagttacgggtagattaatttacatcacgacggaagagttgatgtatgcgtaactgtgttggtacttgggttgatcggagcaatgcggcattaaaccacaaaatagtgtagtgtcgttgttctctattcttttataccatttattttcaagtaaaaccaagatggctggctgtctgtgcctccatcccattgactagggcgtattttcaccaatattgtgcctccagtgcaatttcttttgtgttatatatcaccaccatttgttgagcaccgtagaaatgagttccagacggccgggacagcaacc

SEQ ID NO: 26671 - DNA, 384 bp, Zea mays
  Clone ID: MRT4577_124331C.1
cgcctgcatgtgccggtcctgaatatattgcgggctcgacgttgcttctagacggcggccgcccttcgcccaatgggatgtttatcgtcttcgtttccaccgcggccaatgccaccttgcttaataattggctccggcgctgattccacccgtttgaccatgtatgggactcctaataacacacctacgtgggtttttaacatgaactcatccctgtctggaacatgttgtaaaaaaacatatagctattacttctcgacccatgctgagacaacagaggccgacgggctgttcaagcacatcatgaccacgggacagtagccggatctataagtgctgttaaacgcagctcgtgctcctggacctgaaggtcatggacaccca

SEQ ID NO: 26672 - DNA, 215 bp, Zea mays
  unsure (1)..(215): unsure at all n locations
  Clone ID: MRT4577_124332C.1
acggggggggggggggngaattaaaatgacaattagagangcctgtatnntacagcggtccaggaacgtggaaaagaatatggtgccgggggaattcaaaagaataacggtgaaagttcattaccttaaatcggcctcactagacgggtaacataagccatccgcaataaacatcaacagnnaggggatcgggttattggaccgagttttgtaac

SEQ ID NO: 26673 - DNA, 135 bp, Zea mays
  Clone ID: MRT4577_124333C.1
agggtttgcgctccgggcatgatccccttgtagccaccgcttccatggcctaacccggttctggttggcatgaacaccttgggtttccggtttttccaaaccggcaggggcacttgacgccccccctttccggca

SEQ ID NO: 26674 - DNA, 230 bp, Zea mays
  Clone ID: MRT4577_124334C.1
ctagaaacggttgtattatggctatcaccttgctcctggataaaaaatgtgcgaggagggggatttccttgaggccttgctgtaacgtgttgagcactggcacaaatcccgcctatggtggaaaagatgataagtgtatggtcttgtcttgatgcctactgtatcgccactggatacgaggcatattcttttgtataacatgagctaaaacaacatactgtgaagcatgg

SEQ ID NO: 26675 - DNA, 1604 bp, Zea mays
  Clone ID: MRT4577_124335C.1
cagctttcttgttcgatccctccccccccccttcactttctcctcctcgtgaagcgagctctccgacgcccctgcgattccatttccatcctgtccgctcccaacttcaaaatcaaaacggccgcggcgcagatccacacgcacgggcaggcaggcatacggacaggaccgccgccgcagcagctttcaaatcccggggcggattaccctgcagacggagcccacagcccagcaccgcagcagtccaccgggatctcgccttcgtcgccccgtgtcgcgtcgcgccggtggccgaagggtgagggcgctagctagagcctactactgtagaccgtagagccatggggaacagcatctaccggttcctatgcggcctgtgcgcgccctcgtcgtcggagcacgggctccacggcgcgcaccccgccgtcgccgcgctcggccgcgacgtcctcagcttccagagcacctcgcaggttccggacgagctgagccggcacgtcgtctcctccaagaaagcgcaggcgaattggtacaagaagctgctggtggcatggaagagagcccggccgcctccgaagacgcccgaggaagccgcggccttcgttgtgcagacgctcaagaaccatcagaaagcagatgtggagggcctgttgtctttctacggcctgccgcatccgaacgcggcggcagcagcagcaggcgcgcccgccgctcgcccgccgcccaagaaggcccagcagggcgccaagttcgagctgcacacgctccccattgaccccaagtctgtggccgacggcgacacggtgaacgtgtacgtcgacgcggcggacccgcgggaggccggcagcgtgccccgcgaggtgcagaaggctgcggcggagcgggccagggcgcgggctgccaaggactaccagaaggccgacgcgctgcagaaggtcatagtcgacgcagggtacaggccggttcctaacgcgagaggcgaggaggtgctggcgaagaagtacaggatcaggctgagggggatcgatgcgcccgagagcgcgatgccgtatggcaaggaagccaaggaggcgctgctcaaacttgtccaggggaagagcttgaaggtctacgtgtacgacgaggaccggtacggtagatgcgtcggagacatctactgcgacggggtatttgtgcaggagcaaatgctgaagaagggtttcgcgtggcactacaccgcctacgatcaacgcccggagctggccaagtgggagaaacaagcgcagaccggccggaagggcctgtgggcggcgtcgaagccacagaaaccatgggagtggaggaaggacaagcgcaacgggacagcatgaacaaacccccccgtgcatggttcagtgtgtgtgtgtccatgaacacctgatacattgatgtacctgcagacttttaggacggtatgtgtcggggattcagtagcggtgcagtatggttgtgtgtacactgtaatagacgattccttacagttacagggatgtgaagcaggacaagagagattggcgtgatccctaatttcgtatggggattcgtcgtgcaactgtatcaaatgcattgtaccatcatttacaccc

SEQ ID NO: 26676 - DNA, 189 bp, Zea mays
  Clone ID: MRT4577_124336C.1
attttaaccgcttgcatctattcggaggaacacagtcatcaggcgagccagccagggacgggagtaagagagaaggggttcttccatttatttttttcctctcgggtgatcaaccgcgccggccggtcgaagaaaggaggaagaagtatgtttggggactgccaggtcctatcctcgatggccgcggtg

SEQ ID NO: 26677 - DNA, 318 bp, Zea mays
  Clone ID: MRT4577_124337C.1
acaagcttttttttttttttttttttttttttttttttttttttttttttttttttttttaaaaacttatttaggaccatgcatatattatgggccaacccacacaggaaaagggggggcgtctaacggcattattacatatatagatagagagagagggatagaggagattccccaaatatcatgaatcagtagtagggcggaagggcagcggaaaccccacaggggtgggggcggaagctgggcagctggtactggaaaagcccacccatggccggaatgttctgccccatcataagggccagggggtggaaaccc

SEQ ID NO: 26678 - DNA, 168 bp, Zea mays
  unsure (1)..(168): unsure at all n locations
  Clone ID: MRT4577_124338C.1
ntgtgaggtagagtcggatcgtcgagcggatcgcagacacatcgacacgtcacggcacgatcacgacaaggagagcattctaacagaccagcagcgtctcatctatgctggatagcagcttgatgacgcgcgcacgcttgccgactacaacatccagtaggagagcac

SEQ ID NO: 26679 - DNA, 352 bp, Zea mays
  Clone ID: MRT4577_124339C.1
gagccctcaaaatcccggcgggtctaccaaccacctattaaagaaaaacacaaggcccccaggggggggagggggccccaaaaaccaaccaggcgtgcaccccgggcggcaacaacccaacaaaaacacaccaaccaaacacctaatgagagcccaaaaaggcaagcgttacaaaaaggagccccaaccgaacaaccaaacaaaaagtaccgtgcacccaggaccccagggggacccccccaaagcccagacaaaaaaaaagaggcacaaacggtgcctttcaccgactggaagacttgcttaacaaaaaaataagaaggcgcgggaggacaccaccccccacaacaacgcc

SEQ ID NO: 26680 - DNA, 733 bp, Zea mays
  Clone ID: MRT4577_12433C.1
ccggccgggatcttcaccttgcctgccaatttgaagacgctctcgaaccacaatggctgatgtcaaggcaaacgccgaggccctagtgcccaagttcaagctcgaccgtgtcctcaaccaagatcaagcaggtcgacgtatctctctctacggctctatcgatgaaaacccagctcttctgatcctcgagcgcgccccgttttctacttcgcagaaatatctcgccgatgtgcctgctcagctcgcgcaagtgcagaacttgggtgccaacgacatatatcactggtacatgggccgcagcggtgctgagacgaccaagcctgacgactctgactttttcgccgacctgaagatcaacctgatttacccatgcaccgaggcacatgtcaagaagtacagcaagcagggagtacgatttgtcacagaaacaccagagatttacatgaaccatattcgaccatacatgctcagcaagagagagcagggaagactcaattgggtattcacattatagaaggacgtaaagaagtagaagatgttatgtacagaacaaagctgggcgaggctggcgacgaaggcttcctgatgttgccggacctcaactgggaccgcaagacgctggacgcgctgctcttactggcgctggtcgagcgacgggacatctggtcgctgagagaccttcgcaagagcacattccctggctgcaacacatgaagacccgtcttattgacgc

SEQ ID NO: 26681 - DNA, 345 bp, Zea mays
  Clone ID: MRT4577_124340C.1
aaaaaaaataaataaatataaaagtaattaaaaaacaaaaaaacaaaaaaaaaaaaaaagaaaaaaaaaaaaataaaaaaaaataaaaaacaaaaaaaacaaaaataaaaaaggggccgccctttttaaggttccaatctttctaacgcaattgttcaaagtcttaattttcctattggtgaacctaatttcaattccctggtccttttttaaaaacttggttactggaaaaaccttggcattaccaatttaaacttccttccagaaaatacccttttaaacatttggcttaatatctacaaggccctacccgatctcctttacaacaagtatcccatcctgaat

SEQ ID NO: 26682 - DNA, 391 bp, Zea mays
  unsure (1)..(391): unsure at all n locations
  Clone ID: MRT4577_124341C.1
ggagncaaactccccaatccccaaagcctccgacccccttttctctctccctccgacgacgatgcgcactgctcggaacacgcgccccgggcgtttacgccttcgtgtgccgactcagcggccgcgagcggaccgcctgcgcccgtcctgccacgatcgcggcttccgccgctaccccatacgagctgcagggccgcctcgccgccgctggctccgcggccggcgctgcctacggggtccaggcgcccttctccgtggtcggcgcccggttcgacgtgcttcatgccgctcgtgggtgctgttggccggcggggccatgatgctgagccggggtgtcccccctgctgttgctttcgggggtgctgctggcgggcgcccaggcggggctttt

SEQ ID NO: 26683 - DNA, 284 bp, Zea mays
  Clone ID: MRT4577_124342C.1
cgggtacccgggcggaatataatattccgggtggacgagctctcttttcggcgggcgcgctctttttttttttttggttggtacaacacaccaaggctctacagttcaacacacacaccctcaacttattctgtgcatgcgggctggtgccacacacaaacacgccagacgtgctgtcggataccgcgttacaatatccatgtaggatacatcacacccacatcacctgtcgaccttactagaggtgttgtggaccaccacgctggtattcgtggacctacacc

SEQ ID NO: 26684 - DNA, 394 bp, Zea mays
  Clone ID: MRT4577_124343C.1
attcggctcgagcggcaacccttacttccattgattgacgagcgagtcgtgtgcgcaacatccgagctagctaggatggcaggatgcggggcagagtctctgacatcggcgctgatggtgtgggtcgcttgctgcaccgggatgctgatcatgagtgtggacgctgctttaccgcacggcgcagacatgactgatctgatccgccatgagcagtttttagacgaggacagagacacgcttgttactatagcggagagctctaacggtgctactgccagcggatagacccctgctttcgcactgtctttggccacagcagacccatgctgctgttggtcctttgacaacccctcctgaaaagttaccgaacatcaatgtctacgttgcccacatc

SEQ ID NO: 26685 - DNA, 316 bp, Zea mays
  Clone ID: MRT4577_124344C.1
aaaagccaagcgaattttaccaaaaggcggccccccccaattttttacaaaaaacaacgttttggtttacaaatccaacagcccaaaagggccggttttaaaacatttaaacggggtaggggggcccacggttgggtggcaccacaaactaaaactttatagtccgaatggggcatataccaaacggccaaagctggccaccacccaccgatgcattttatttgcccgcctcccgggtttctcttttgagggctccccctttggggagatcgaacctcctggggttaagcggtctgggtttccccggggggggggg

SEQ ID NO: 26686 - DNA, 300 bp, Zea mays
  Clone ID: MRT4577_124345C.1
attcggctcgagcgacaagcactatggatgggcactaacggatcatagccccaggggtatgggccgacgaggccacggcctcagaggccagaaacaaaggacaaagccgaaaacatgccgatccgagagagcacagcaagacagaaccaagagccaaataggaagacaacctgcccaaagaccagatcaacctatagagccagaaggaggacaccagcaagcccgacgccactacagcggaacacgatcatgggccaagaagcaccaatggcacacaacgcagagccagaatgcacgcca

SEQ ID NO: 26687 - DNA, 338 bp, Zea mays
  Clone ID: MRT4577_124346C.1
gggcccccactttgccttcccaaaatacatcccccaaattttcgaaaccgcaatcgggttttaaaaagcaaaagcaaattcctcccaaactggaacttttgggggccgggccaattgaataaaaaatttttaatttaacccgggcccggaagggcccccacaggaaaaaccggtcaattgaattttttacacgagctgcacaaaaccctcccaaaaaattacttggccctgtttggtttccaaggccaaattattgaggatctcgggtgggtaaaccccaaattaccgaataaaaatctccattattttataaacaaatacaattttggagccccaac

SEQ ID NO: 26688 - DNA, 143 bp, Zea mays
  Clone ID: MRT4577_124347C.1
cgtcttagaatcctgcgcgatcttgcggacgaggcgctgggaggggagcttgcggatgagcagctccgagctcttcaggtacttgcggatctcgcggagcgcaacggagccgaagcggaagcggtgctattttttaacgccga

SEQ ID NO: 26689 - DNA, 438 bp, Zea mays
  unsure (1)..(438): unsure at all n locations
  Clone ID: MRT4577_124348C.1
aagctcggatcctntagagcggtcgaccttncgtttataatttttttaccttccaagaagggcgggggaccgggacgattgatgaggaaccacgtcaagcatgggctatcaaacacacccaccttcacacataaaccagggtatcaccccccgctcaaagggctttcctagggtagggctgggccaacctaagtgggctgctcaaaaaccccccaaacccagggtactcgggtgttgtacccgaagaactaaattttacaggctctagatagggaaagcgaagaacttgtcaactgcagacctgaacaccgggggcgccgtcccgcccaatgcttaaaaaggggttgcatggggtggcgtattgcgtccccatggaactgaggcaggggagccgccccccctcccataatggcggtgacttggggcccaaccctgaac

SEQ ID NO: 26690 - DNA, 614 bp, Zea mays
  unsure (1)..(614): unsure at all n locations
  Clone ID: MRT4577_124349C.1
ttttcggcacgagggaagcagccatgcaagtcctcctgcagttgctcccgttagttctctcggcggcggccatcctgatcgcctggcgtgcaacgccgccggccgtcaaagcacgcctggccgccctccagtccggcatagcacgtgcgcgtaagccaataatgttggtcaccgacttcgccacagcgcaccacctgctcgtgcggggcagcagcgccggctccttctccaaccgcccgccgtccatggcacccagcgccgtcctctcgggccgccgctaccacaacatcaactcggtgccctacagccagctctggcgcgcgctccgctccaacctcacctcgggagtgctccacccgacgcgcctgcgccactacgctgccgcgcggcgccgcgcgctacaccgcctcgccgcggacctcagggagcagcagctcgccgacgacggcgtggaggcgctcgcggcggaaagcatccgntagcgcggtgttncggcctcgtctccaccatgtgcttncgcgacagcggcgtcgacgcggnccgtgggtcgcgccatggccgacgtncagaccgagctggtcctgtccctgtccgcggtgcgcaccttcgcgttc

SEQ ID NO: 26691 - DNA, 1607 bp, Zea mays
  unsure (1)..(1607): unsure at all n locations
  Clone ID: MRT4577_12434C.1
caagcagcaacagcctgcagccggcagtcctcgcctccgcctcctccaccctgaccgtcaacagaggaagacgaggatgtcgggatccaaggtgtacaccctcgaggaggtggctaagcacaacaccaaggacgactgctggctcgtcatcggcggcaaggttacatctttttcttcttctctctctatctggctgtggaattcggaaggatccatccctccccttgccttgctgggtgggaactgggatcttcccatcttcccttgatcagaattatcattaagattcgttagatgcctcctggaatcgagatcgagattgagaagcaacgggggaggtaggcggtgggtggtgacctaacaaatcattgaggcgagagggtggctcctactgtgtgtgctttgccttcatatggttttactagtatcagctgtcactgacgttgctagttttgcttccaagaataagcattccatatattccctatgcctatgggacttaatcacccttgcaatgataacactgctgtgcgtgcacacacacacacacaatgtggcactttcatgaccatcattcactaacacaccaagcaaccatgatttgtcttcactttgtggttatcattataggttgggttccctgctgctcagatgtttcatcctcactcttttttttaaaaaaaaagacatctctctactctcaacataatgtcgataggaagaaacatatatatcttttactgaccatatactggccttactctctcctgggtacctggtgaaggtttcttcggtagcaaagcttcatatgatgaacaaagtgaacccttttctgtctgtttgtaggtgtacaatgtgaccaagtttctggaggatcaccctggaggcgatgatgttctgctgtcttccactggtaataaagctacatactcctcatatcaggtctttgaagttggtgaatgaaggtgtcatttcaaattttctgttgatacaaaatgcagccaaggatgctaccgatgatttcgaagatgtggggcacagcagcactgcccgtgcaatgatggacgagtacttagtgggtgagattgatgcagccacgatacccaccaaggtgaagtacacgccccccaagcagccgcactacaaccaggacaagacccaggagttcgtcatcaagatcctccagtttttggtccccctcgcaatactgggtctggccgtcgctgtaaggatgtacaccaagtcggaatctgcctagtctcttgtcatcaacgcttcaaacataacatcatccacaaactgaataagttagtgttgaaatgctgcaaagatcattaattctgaaacttgagtctttgctgtcgtgtgagacgtacgtctattagtataaaatcacttctatttttccttctttaaaaaaaaaaaaaagaaacacaaggaccaaaaaagcggcctttttaagctccatttcactcccaaatttctagtacaatatataaatataacacatgtatgtttnnnaaataaactttctgnaagngccctcattagtttaacaaaactacaaaagggtgttcactataaagtttgcatgcgttcagaacttt

SEQ ID NO: 26692 - DNA, 502 bp, Zea mays
  unsure (1)..(502): unsure at all n locations
  Clone ID: MRT4577_124350C.1
cccacgcgtccgcccacgcgtccgcccacgcgtccgcatttgccaagattgctcctgcatgccctgccatggcacaccccatcaccgtccgtaacctgttcgacgcgatcaccaactccaccggaggacggctgcatttccttatctaccacaagtatctcagaatcctgaacgaggcgttctgctctgcgaagcgtgtgctaggggggcacagagcccctgccctccagctctccgacgacgaagtgatccttgacatccacggcgctgcgacgaccaagccagttctccagcacatcggcacatccacatggcctgggaggctcacgctgacgaaccacgcgctctacttcgaggctatcggcgtcgatttctcgtatggagaggccgtcgtgtatgatctggcaagggacttgaaacagtcggtgaaacgagagtccactgggccatggngtgctcacctattcgacaaagctgtcatgtacaagtccagcctgactga

SEQ ID NO: 26693 - DNA, 172 bp, Zea mays
  Clone ID: MRT4577_124351C.1
caaaaggacaagccaaatcgacattttattataatatgtatatgtacacccacacggtcacaaagacattttctcgcacttgcatgatacagtgccacaacatacctatatatatagctactatatgctgtaggaatgaaggggatcattaatcaagccgtgcctacatgga

SEQ ID NO: 26694 - DNA, 326 bp, Zea mays
  Clone ID: MRT4577_124352C.1
cccacgcgtgcgcccacgcgtgcgcggacgcgtggggtctcacagaggttcgcaagaatggaacctgcctctggctcaggcccgatgggaagacccaggtgacagtatagtaccgcaactagggtggcaccatggttcccatacgagtgcacacagtcctaatctgtactcagcacgacgagacagacaccaacgacgagattgctgctgacctgacggagcacgtcatcaagccagtcatccagaagcagtacctcgacgagcagacattctaccacctcaacatgtctggccgctacgttatagtcggacctaacggctacccc

SEQ ID NO: 26695 - DNA, 160 bp, Zea mays
  Clone ID: MRT4577_124353C.1
ataataacaaaacattaccccccccttaccaatattttactccaaaccaactggaaagggtctccccatcaaacataccaaacaacaacagcagcttgtttatatagctcctgcttgaaacaaaactaggcggtcggacggaggaaaacattcttttcga

SEQ ID NO: 26696 - DNA, 420 bp, Zea mays
  Clone ID: MRT4577_124354C.1
agcgcaaccaagaaccaggctggcattacggggccagagattaaggagcccacagaccttaagagaacaaagaataaagaggtggagggcaaaaagagtacagaagccactcatagcgtcgacgaaaacgggtgagggcgggaaagacccactgcaccagatacacctttccacagccaaggaaagccgggtttgcaggctgcaacaacatggcgttgccaggaaccatccacaacaagctgctgtactccccagccttcatagagtctcatcagggaactaccgtctgaacgcaaagggtagcttgcgcgctcacatctacgagagtacacacacaacaaggtcaggaagacccaaaagctcaaccatcactggagcattcatgctaaggtacaaggctcgaagccccagaatgcgcgc

SEQ ID NO: 26697 - DNA, 2993 bp, Zea mays
  Clone ID: MRT4577_124355C.1
gtcctctccattctgccgtctcctctcctactcctcccccctgccgccgcaagatccaccagggctctcgaccgcaatggagccgcagctgacgcccggcgcggtggcggcggtctccgcccacgccgacggcaacggcacgctgcagccggtgctgcaggtggtggacgtgcggatggtcaacaacgccaagaacccctccgccgagcgcttccggatggtgctctccgacggcgaacacaccatgcagtccatgctcgccaccgccgagaacgcgcgcgtccgggacggctccatccagaagggctccatcgtccacctcctggagtgcacctgcagcaccatccagtctcgcaggatcattatcgttatcaaacttgatgttctgcaaagtgagtgtgccataattggaaaccccaggccctatgaaatgagaaaccaacctaatgagcagggcaccaacataccggccaatgctgctcaagctaatactggaacgtattccagtggccctggtcctctgtgatcacctgctgcttctgaacgagcacaagttgctaataatgtaccatacagtggtttttattaggtgcctcatggtaatggcatccctgcgtccatgtgtgcaggatgcaaaccacccccttttatgtttgtgtgtgaagttagaactatgtatcagtacttctttatgttttcgtcttataaatcctcgttgctgtgtcaaaaaaaaaagaactctcaccagaaccaaaggtttgcagttccttccatggctggtggcagtggtgctcctgggaatacatatggacaacctgcacagtcgttttatcagcaaccgcctccagggcatatgaatagaactcctgtgtctaagaacgatgcatatcgtcttgtcccattggctcaattgaacccttatctagataaatggacaatcaaggtcagggtaactgcaaagactgatctcaggttctacaacaatgctagaggtgctggaaaagtcttttcctttgatctccttgatgaacagcgtggagaaatccgtgcaacatgcttcaatacgcaggctgatcagttttttaacctcattgaggttgataaggtgtacctgatatctaaagggtcgttgaaaccagcacagaagaagtttaactccttgaatcacgagtatgagataagtctggattccagaacatctattgaagtttgtgctgatgatgatagcaacatccctaggcagcagtataatttccggaagataagtgaaattgagaacattgagaaagatgctattttggacttgattggaattgtcacatcagttggcccttctgtcacgtttatccgaaaggatggcgtggaaacccagagaagaacacttgaactgaaagacatgtctggtcgaagtgtacaacttaccttatgggggaagttgtgtgttgctgaaggcaaccagctgcagtcgctgtgcgattctggtttgaatcctgttctagctttgaaaggtgcccgcgttactgactacagtggtagatctgtgtcctcagccggctcaactcagttaaaaatagacccagaaattcctgaggctgagagtctgcggcgctggtacgcaactggaggaaagacagctgcttgtgtttctctgtcagtggtaagtatgggtggtacttgtgtccggaaatcaatcgctcagatcaaggatgaaaatctggggcagttagagaagccagactttatcactgttaaagctgcaatttcacatctgatagcagacaatttttgttatcctgcttgcaccattgatgtgaatggtaggatgtgcaacaaaaaggtaacagataatggtgatgggacatggcgttgtgacaaatgcgaccagagcttaccaaattgtgagtacaggtacgtgctgaatggccagatccaggaccacagtggggtcaccaattttactgcattcgaagatgctgctaaggtgatgattggccacagtggccacgagctcaacaacattagtgtagaagactcggaacgatttgcagagatcttgcaggcggctcgttggcagcagtttctgttcacgctgaaagtcaaggaggagatctataatgatgcgccgcaagtcaagtgcaacattactaaagcagagaagctggatccggcaatagagagttcttaccttctaggggtaatcaatggcctgttgcaggatgacactggctcatcttctggggcgcaaggtgccatggcctacaatgctggtatcagcaacactggcgctggacgaagtgtgccaaccaccaacagtgcctacaccaccaatttgagtggtccaaggtatggcgagtctgcaaaccagctcgcgcagcaggaaagcacgtacaccggggtgaccactccagtgtcggcggcacggaatgtgcagcagacctgcgtgtcttgcgggtcaagtgggcacaacgtgcagaactgccctgcaggaacgtacaggcagcaggcggctgcaagcgcagcaagctcctacggttcttcgcagcctcgcaatggactgtgcttcaaatgcaatcagcctggacactttgccaactcttgtccactactggctcctgctccccagcagcagcagcagcagtatcggagcggcggcgctccctcaggcggttatggtaggcagcagccctatgttggggctaccaactactgaaagtcattatctctgtcgagtcaggcgtgatgttggttttgcttagatgcctgtcctgaatggcatcgctgcgtccatgtgaagtagatgcaaaccattcctttttatgtttgtgtgtgaactatgtatcagtacttctttatgttttcgtcttataaatcctcgttgctgtgtcagttctgttgaattcgtttcgtggtttgtctccctgaataactcactgtatggtgggtgtaaattaaatggaaatcacttatcaggagacaaaaaaaaacgaacagag

SEQ ID NO: 26698 - DNA, 506 bp, Zea mays
  Clone ID: MRT4577_124356C.1
tccttttattgcgtattgggcggcacagggatactgaatgaatgccgactttgtaaatacatgcaaaactgctctttctacctcggcgaaacacagaacccgtattgctcacacctatggcaagggacgcttactgtcaccttcatgtacgtgcgtgatatgacaatccttaaggatgaatccaatgatatccccactgaccggacttgacacttcacttctagttagatagagaaatgagacctatgctttatacagcgactactctaccacttcactatagataactatcttttgaaacaatctatagaggaatggctctaccctttcgatactgactgtcactgactatgaaataaaatggaacgaacggactactacctgcatgaaaccctacctaaacccggatgcttaacacatgttacacgcccgatgatcactatatacctgctagtgaggacgatctactagggacaaagaactctactctggaggtcggaaccaga

SEQ ID NO: 26699 - DNA, 500 bp, Zea mays
  Clone ID: MRT4577_124357C.1
ccggccgggcccggatatcttgttatacagttgtctttatagaatccccaagcaatcaaacttcctacacgtcagaggagaggagaggacatgaaagcttggacctgagacaccatggctccgatgaaaatatacgtgccgccgatgtcaaggaacgtgaccccatgaacaacgccgctgcacgagcctgcatccgactactacatctcccccatcaacttctccaccgctacctgaagaggcccgagcacctcatccgcgagccactggcgcccccgcctacttcgccgcctgcctgcttgacctcctccccaacgctatgaatctgcaagtacaactgctcgaaagaacaaaacaaaactggtgtcataacgaaacctgcgctcctgacgattggcgaatgctaggatctcggtagaatgctgccaggacaccgcatgcgctgaagcccattctcttcccagtatctcattccgcggatgtgtgcaagaatccaccga

SEQ ID NO: 26700 - DNA, 351 bp, Zea mays
  Clone ID: MRT4577_124358C.1
agctttgaatgtatgggcatcttttctttctgatacgatcgtccatgcaaatccactgtttacgtgcctgtgcaacatgaagaccacagtgggctatcatgagactctctcggacattctcgacgcagaggacaacgttaatgtcgtggaggacctgaatgacgccctgatgtggctggactacattcagtccgcctagaatgacgattactacgagaagctcaaggaggtggacgccgtgtgcatccccatcgtgtcagccgtgtatcaacggtcgggcggcacccccggtggtgatgccgacggcggcgtcgacgacgaccacgacgagctgtaaatggttgtcgggaa

SEQ ID NO: 26701 - DNA, 276 bp, Zea mays
  Clone ID: MRT4577_124359C.1
gacaagaagaggctgaggaccattggcaccttctttgcgcgcgcctactccatagagttcggcaactgacatttgcattacaacttcactgggtgccaggacctctgcaagcatgaagaaagtccgcttcattagcgacgaccttgatattgagtgcgaggggaaggagaagattaattgcgagcgtccacgctctctggaaatggtggagcatctagcaccgaccgttgatgggaatggaagagatcatcacctgtcgtggcgaacctaaatatg

SEQ ID NO: 26702 - DNA, 268 bp, Zea mays
  Clone ID: MRT4577_12435C.1
ggccgccctttttttttttttttccttgttattattactacaagcaatttcacaaaaaacctggcgaaaaatcgtatcgttttctcgcgattttttttcctgagcgtaattccaggagcccgtgagccttcttccttcctttttttttccccctttggctttggaaccccgagaggcgaagagcccgtgaactatagactctcgagtctcgacaggcctctctctctacttgcaggtgcatgtggcgtggcgaggcgaaaccgcttta

SEQ ID NO: 26703 - DNA, 765 bp, Zea mays
  Clone ID: MRT4577_124360C.1
ttgggtacctcgagagcgggcgggggccggaagtctagacctctatggcggacctcgtcatggcccctccgccggccatggacctcttcggggagccgatcgaggcgcaccctccctggttcaagcccgacgccttcctccgcgcgggcttcgacgcggacgcctacgtcgccgagctccgctcctacgtcccgctcgacagcctcgccgccgagctccgcgcccacctcgccgcgctccgcgccgagctcgtcggcctcatcaaccgcgactacgccgacttcgtcggcctcagcgcgcacctcaagggcgtcgacgccgccgcggcccggatgcgcgccccgctcgccgacctcagggacaaggtcgccgccttccgcgccggggcatccgccgcgctcgccgcgctcagggaggggctccagcagcgggccgccgccaccgccgcgcgcgagctgctcgagctcctgctcgacacctcccacgtcgtctccaaggttgagaaattgatcaaggaactaccaactgcaccgtcagattcatctaatgctgaaattcctatcaatgacactggaacaccaaatgggaaggctgggacaggtgtcagagaaacacagagcattctcctagaaagaattgccagcgagatgaaccgtcttaaattctacattagtcatgcagagaacctcccttttattgagaacatgggagaagaggatccaaggtgctacaaaactgctggatggtaatttggagcgctgcttt

SEQ ID NO: 26704 - DNA, 848 bp, Zea mays
  Clone ID: MRT4577_124361C.1
ttgggtacctcgaggccggccgggaaaccagtctccgcacgcggagaaattccgaagcggaagaagttgaatcgacaggtgagagagaaagagataggagagacgactccacgagggaggcagggagagaagatgcgttgcgccgccgccgcgcttgcggtcgccctcatcgctgtcgttgccggcgcaaccgccccggggtcgccggccgcgggcacgtgcgcgcggagggttgcgccgccgttcctcgacgccgtcggatcccgctgccccttcgtccggatcgagccgtccccgcctctcgaggtaggtccaccgcctacgcgccgtctctcgccggtcgcggcctcttgctgtcaaaatcgttacatgtcacagcaggaattagtggcgacgcgggacgcgctgtttttgttttttaatctgccgtcgatatacggatatatacgatctgcgtgctaagctggtagccgggcggtattagaggggacagagaaaagatgccgtgatttttctttttggctagaaatattcgtaacataatggatgcgaatattgtgccttgctaattaatcctccctccttaacaactgaaagagcaaaattagcaatatggggaaccttttgaagaagagttatgctataaaccatggcaaatggggaatccactctccaaataaacctttgctggcgtggaaagtatatgcaaccggccaatataataaacaaaataaggctagtggagctagaaattgcagcctggttctggttggctggtctagtggaagagaataatcaagaatatgtgaggcagacttctgtttgaccgagtttagaatttggaaatc

SEQ ID NO: 26705 - DNA, 2616 bp, Zea mays
  Clone ID: MRT4577_124362C.1
acgtccgcttgcacctccactcctccattcccagtctagatctcgatccacctccatggcggatctcgccacggacctcttcggggagccgatcgaggcgcaccctccctggttcaagcccgacgccttcctccgcgccagcttcgatccggacgcctacgtcgccgagctccgctcctacgtcccgctcgagagcctcgccgccgagctccgcgcccacctcgacgcgctccgcgccgagctcgtcggcctcatcaaccgcgactacgccgacttcgtaggcctcagcgcgcgccttaagggcgtcgatgccgccgccgcgcggatgcgcgccccgctcgccgacctcagggacaaggtcgccgccttccgcgcgggggcatcagccgcgctcgccgcgctccgggcgggactcgagcagcgcgccgccgccgccgccgcgcgcgagctgctcgagctcttgctcgacgccttccacgtcgtctccaaggttgagaaattgatcaaggaactaccaactgcgccatcggatttatcgaatgctgaagttcctaacagtgacactggaacaccaaatggggtggctggaacaggtgtcagcgaaacacaaagcattctcctagaaagaattgccagcgagatgaaccgtcttaaattctacataagtcatgcagagaacctcccttttattgagaacatggagaagaggatccaaggtgctacaaaactgcttgatggtagcttggagcgctgctttgtggatggtctggaacaccgtgatgctaaagttatatacaactgtttgcgtgcttatgctgcaattgacaacacatcatcagccgaagagcttttccgtacagcagtggtgtctccattgattcagaaaataatccctcaaaattatgcaagagctgttgctgggacatcatctgatgagctggaagacgattatcaacagataaaggaatgtgtacaaaaagattgtaaatttatattggaaatatcttcctcagaaaactctggattgcatgtttttgattttctgggtaattcaatactcaaagaagtcctttctacaatccagaaaggcaagcctggggccttttctcctggaaagcctaaagaattcttgaggaactacaaagcgagcttaggatttcttgattttcttgaaggttactgcatctccaagtctgctgtaacgaagttccgctctgagcctgcttacacagatttcatgcgacaatggaatgttggtgtctacttttcgttgcgatttcaggaaattgcgggtggccttgattctactcttacaaatacctttagtcctactggatcgaatgaggctcaacagaaaccgttgctcttgaagcaaagtattaagctcttagaaagtttggattcatgttggagtgatgaggttcttgtattctctcactgcgataaattccttcgtctgtccttgcagcttatttcaaggtatacaacatggctttcatgtggtttatcagcacgtaaagcttctgacaggagcccaaattcacctgcagatgctgaatgggcactgtctattcctatagaagatttcatatatataatgcatgatgtgcatgctgtaattggcgagctttcagaatcaggcagcttcattggacatgtgaatcagttactagggtcatgccccattgaagtatttaatcttgtgaaacaaagtatactgcaagctgctgaacctttaaaggaactgttgcctgcaataatcaatgttatgattggaatcatagttaagaagtctaacgaggacttgaagcacctgaaaggaataacagcgacatataggatgacgagtaaacttccagtcaggcattctccatatgtatcagggattttacatccgttgaaggtgtttcttgaaggggaccgtatacgctatctatcagaagatgataaaactaagttgtgtcgtgggtctacagataagattactgcaatttactatgacttggtctctgaagttgtcactgtggcaaggaaaaccgagtcttcgttgcaaagactgcgccaaggtgcacaaaggcgagtaggagctagtacagatgcctcagataacatcatatctgatacagacaagatctgtatgcagctatttcttgatattcaggagtacgcacgaaaccttcgtgcgataggaatagacgcgagagagattgattcctacagagctctatggcagtgtgttgccccaaaagacaaacaagagaacattcagttttgatgtaaagaacgctgtcagtacatataaagttgtctgcccgtagatctctcaaacatgtaggcgtatctgatgttgtccttttcggtttgaagtacttattatggatgcatacgtagagtagatagagagctggattttggtacacattttattgttaggatggatggtcacctccagatataatccagaactggagaacgtgtaccagtatatgatttcattttgatgtgaaatactaggatactgttgaaaatcgttcgtgtctcctcaagttgtcacgagcgtgaatcttagctctggctagttgtgaaaaaaaaaaaaaaaaaaaggcccctagggcc

SEQ ID NO: 26706 - DNA, 443 bp, Zea mays
  unsure (1)..(443): unsure at all n locations
  Clone ID: MRT4577_124363C.1
ggcagaagcagacacaccccagtaagaccgcactcagggtggaagccagagtcccagacattcagtcaggtagctagataggcaggacagtcgaaagcaccatcagtcgagtccaggtagcctgctccagagagaaactgttagacctgtccctcaaacgtagcagaagaacagaaagagactccttttaaccctccgagaaagtagctcctctgagaaagagtgccagcacaagggtcaacaaacagctagcaggtcccctcaagcactagtgttgataaagaaacgtctcaacccaataaagttgtgccccacagaggaaactgggatagaaatactgcgtgagattagcataggtattaactaccacncgaacagaaaattcgcacatttctagcccggtaagagaagacaagcaaggggcttttggagagatagaccta

SEQ ID NO: 26707 - DNA, 349 bp, Zea mays
  Clone ID: MRT4577_124364C.1
tctggaatctttctgatctatgtcaaagagtttcagctacacatcttccaccataggatgggcatcaattatccaagcaactggtccctagtggattctgtttctttgcgtcaggtatgcgccaatcttgatatggcaaggtggccatctgtgaatggacctagtgctggtgttaaattgtgcgcagttggggacaatgcggagtttgtgctcttggagatatttggtactattgtattcttggatattacaagcaggcaagcagagaaggtgtatgagctgacaccagaggataaggagttggtcagtggccgccccctggagggtgatatggcctcctgttttccct

SEQ ID NO: 26708 - DNA, 327 bp, Zea mays
  Clone ID: MRT4577_124365C.1
gctagaaaggcagaaagagcgcgtgaagaaactgagcctgactcaatccagtgctctgtgcaggatgcacacgaggccgagggtgccgtgctcatgaaactggacgtcgtcttactcgctaccaactcagctaaccttaccgactccgacagcaacgacactttcttttacaagaaggccgaacacttgccaaccatggggctattcatatgcgacgactatgatcgcttgcaagcggacaccaatgatattgtgaaacatcacatggggactaccacgcttggctatatcttggacaaggtcatcgtcgtcaacgatgattccagg

SEQ ID NO: 26709 - DNA, 446 bp, Zea mays
  Clone ID: MRT4577_124366C.1
gggcacagggaaaagtttaccccttcggactgaaaattggttataggctacttttatttaaaacgtcagcaactgaacgcacgtagcaaccccccgagtattaaatctttagctaggacaaaaacaaagggggcacgggaagggactaacctcacaaactagggggggcctcgggcgctcaaattaacactaaaatcgaaagcaacacaattcccatgattggttgattgggtgggggggtttaggcccacggggtcacgttgaccatgctgagctcgtgtttggaagaatggagggcatgacaactggttgcacccccccatgcagaatagagctttttttgggcgctggcctgtaccagcaaaaacccaaaaaaactactttcccagcgatccaagctagcgcgagacgggcccttgacatgtcccaaaaaccaaacaccccaa

SEQ ID NO: 26710 - DNA, 325 bp, Zea mays
  Clone ID: MRT4577_124367C.1
ccccaacccaccaccatccccgttccccaaccccaaagccgagagccatccgccgcaccgcaccaggcagcagcggagccgcactcggccttcggagggcgttgacttgaccgacgacgacgacgtccgtcgtcaccaccatgagcgcgcggacgggccatgagtgaccccactccgcgcgcgggcattctccgcgcagcgcaagccaagggacggaaggggacctggacgcctatattcacacatggcgaagaacggagccagcgccatattacatggaacgtgcgggcacagctattggatcgcttcagctaaggttggaaca

SEQ ID NO: 26711 - DNA, 420 bp, Zea mays
  Clone ID: MRT4577_124369C.1
cacgcctgcagtgtaccgggccgctattacacggtcgacctcagcgttcgaacagtaaactgcaacaaatagatccatctttgactgaaataactgtggcgaaccctggtgccttacttacaacacatgctatcattcaaccaacagattgcgccaaacactggtgggtgcctacaagaacgacaacagaaactgaactcattggcagggactaacccattgggctcttccttgctggagcaacacaacattgctgcctacaaccagttatcttttgtgaaccctgccttgcggccacccatacgatggaggagccaccttttagattacataagaaacggactcgacaatggtgccctcatacccacatgtgtttgactaaaaataatgaatatattgattgagatctaaaaaagaaac

SEQ ID NO: 26712 - DNA, 241 bp, Zea mays
  Clone ID: MRT4577_12436C.1
ggatggattaaaatttttatttccaggggtcttgaatttttggggggagagaaataacacaaccatgtgtaattgtgggcgaaattatcataatattatatttttattgttaaaaaaagaaggatctattttaaaaacaaaaatttttttttgtatttatggcaagtgtagataaactttttttatatagatgacaaagctttgtgttttttattccccccccgcaacgttatgaggggtt

SEQ ID NO: 26713 - DNA, 306 bp, Zea mays
  Clone ID: MRT4577_124371C.1
gggtgggggttttttttttaatgtttttattttttttttttatttttcaaaaaaagggggtttggggacccaagtttttttttatataattaaaaattaagactttttttacaacgaaataataaatctcgggtttgggaggataacacatttagggggcacattttatttataaagggttgttcatccccgctggttgggggtttgtttttctttttcccaggtatattgcaggcttttaaaatttttaagattttttgaaattggggaaactacctttgagttgcattatttttggggaatttt

SEQ ID NO: 26714 - DNA, 307 bp, Zea mays
  Clone ID: MRT4577_124372C.1
tcttgcccctcaacctcctgttcttcacagtggccaacgcctgcggcagctgcccgaccccaacgccgccggtcgtgccaccgccgtcggctactggtgctaccccacccccttcatcatccagtgggaagtgcccgctgaacgcgctcaagttcggcgcgggcgtcaatgggctcgggctacgcacaggcgaggctcgaaaggtaccagctgagccatgccgtaacgtaatcaaagggctcgcagacttcatggccgtgcactgactgaggacgaccctcgagggcgtgggtgtcggtgtgtgtgt

SEQ ID NO: 26715 - DNA, 308 bp, Zea mays
  Clone ID: MRT4577_124373C.1
acgcggacgcgtgcgaccattttttttattgaaaaagccggtattgtaaaacagcacagagtagggccgaaatgatggccctgttgtgaaggcgcatatcacaccttattgacaatggtgtaactttaaataccgagcccgctccatctctttagatacaaggtctcgacgtacaactccaggctatgaacacaccacagactggggaaaacagattgccattatctatggatcagtttgccaagataatacaggcgctgctgacatcgatccacatgctttgtcaagcctaataatgcatacctaaa

SEQ ID NO: 26716 - DNA, 161 bp, Zea mays
  Clone ID: MRT4577_124374C.1
actaggcatgtcccccgctgcccggaaccttatttctatctgttgccaccgctgctgcggctgtggtttcggagacggagtccagcatcagcggcgaggcctcgacgagcctatccggctggttcaccgcaagctcgtctgggaccgcaaactaggactgc

SEQ ID NO: 26717 - DNA, 168 bp, Zea mays
  Clone ID: MRT4577_124375C.1
ccctacctaaggcctggaatcctttaaacgggcggttttttttttttttttttcttttttttttttttttttattttatttcttcgtagctacagcatttacagacactcggctctcaccatatccaaggatccttgaggttaagctcggctgcactctactagcccc

SEQ ID NO: 26718 - DNA, 632 bp, Zea mays
  Clone ID: MRT4577_124376C.1
cccgggtcatcccactcctttctttcactcccaagtccacaccacccacaagcccgcctctgcactgcggcacatgcttagctgcggctccgctcaggtcgagcagaacaaaacgcaacgggcagagcaggccgacgaggcacacaacaaagtgaccaagatgccagcctcaacacatcaaatctcccaagccagccatggtgagtgctgacttttctcagctcatggcaaatctatctgataaggccacaggataccgtatcctaaactgccactgcaccaaacgtattaaacactaaaaggaagactgctgagcgatcaagaatgctcgagcaccacacaggatagagtctatgacacgtccaacactatcactaagaacaacatgggagctatgccggttggcaaacctgcacagaacaaatcaatgcctggcattatcaccgagacagaaacttccggaaaagcacattccaaccaaggacttgcacatgaactaaggtgcgcgacatcatgactgagaagcacacactcgtcacagtgcatgccaacacctaggtcctgcatgcaatgcacttcatgacagaaaaccgcctcagacacacaacggtgatcgacggcacacccatgct

SEQ ID NO: 26719 - DNA, 189 bp, Zea mays
  Clone ID: MRT4577_124377C.1
gtcacgtatgtagtataacatctgtgactacactacagatgttatatatcatgtagtgtagtcacgtatgtagtataacatctgtagcagaacatgatatattcggttttctgattgtgatatctgtacgtggctacactcacatgtgagatttgaataagtcctgcagcctcagggctcagctagcac

SEQ ID NO: 26720 - DNA, 385 bp, Zea mays
  Clone ID: MRT4577_124378C.1
cggatgggccgacccactcgtgcgtcgggatcctgtgagtctctactctgctttcacagagtcgaatcctctgacgcagcatgcgtcaaatggcggacggaggggcctaggcatcgccgctgcggccccggcggcgcgtcggctctagggacgagcttataatattgtgccgcatatacgatcaagacaggctcgccttccagattcctatgatacacgtttatcgtaaccaaccatcaatggcagagaaagacccagttcaagtgattcggaaagcactggcaaaaacacttgtgatctattacccttttgcgggtaggcttaaggagaggcctgaccacaagttaatggtggattgtactggagagggcgtcttggtcattga

SEQ ID NO: 26721 - DNA, 463 bp, Zea mays
  Clone ID: MRT4577_124379C.1
agaggttgaaaacgaaaacttttattctgggggggcaaaggttcaaattacaaagttttattctgggggtccaaaggttaaagatttgacccccatgtgccccacacgatgtctgggtcttgcagttgtagaaacagggagctcttggtacttattaggcgtcaacgggatatgaggggggattattgggggggcttaaaattgggtttcccaaggggctttggtcgtaacaatccaagttgtccccctagctgaaaccaaacatgtcccaatagcgtttgtaaaaacccatccgggtggcaacacaagcgtcggcgccctggccccactcaaggccccccttgatgatgttggggaggaccccataccccgggagcctccctggggccaccttgtcgggcgagggcccccactggcccctgatgacctcttggcaggaccgcttgggcgggtgcggggttat

SEQ ID NO: 26722 - DNA, 255 bp, Zea mays
  Clone ID: MRT4577_12437C.1
gtctcacctcccgcaatgccggaattgttggggcctgtgaaacaccggcagttctaactaccatgtagaaaaccatatatcctgcactacccccgtaaagaaaactgggctcatcctgcaaagctaactaacttagttgatacaagaccggactgatacatggttctgggccacgaatccgaattttttatgatagcaatgcagtctttacgtataatacaagaggtcatcacttgaggctgtgtacttaacaaa

SEQ ID NO: 26723 - DNA, 433 bp, Zea mays
  Clone ID: MRT4577_124380C.1
gcacaagcaaagggcaacccacacttaaaggggggggggaaaaacacgaaaaaaccaaaaattaatgcaaggaaccccctaaaacaaaaataacatacccaacggcccaacaacaacaaaactgcaaaagcaagttaaacaaaacatgaaaaaaaaaacaaggcccaagcccttccgcagaccaacaacaaaaaaaaacctcctttaaatttaaaccatggaaccaaaccccccccgaaaccaaaaaaatttgatttcaaaaaaggggccagcggggtccaaaaaaaaacaccccctgatccctgggcggaaacgtttatggacaaaaacaggaccggatctgatcctttccaaccccccaacttttggtcttaaaaaaaaaaaacatccctggcaaaagccttcgcaatggttcgcctttaaaaaaaacaaa

SEQ ID NO: 26724 - DNA, 206 bp, Zea mays
  unsure (1)..(206): unsure at all n locations
  Clone ID: MRT4577_124381C.1
gtgggggtttttttttttttgaccctccaggctccagcaataatttatgaacacgccacttatgtgcattacatattgcgagaactcgcaacattatgtgctatgtatgtaaggtcacaggttttatgggtgcccggatnttgaagtcagtggtggggaacgacaaggtttggtgaaatgctcaactgggcacagtcacttaattg

SEQ ID NO: 26725 - DNA, 172 bp, Zea mays
  Clone ID: MRT4577_124382C.1
gcgaccattccttcatctctgattggtcagtgccacgttctctcatacacgctgcgattaacaatgtttatgctaacgtcagtgaacctgtgaatgataaactggacgtagaggtcagagagcagcaactgctgaagccggcatagcatgggctaactgttgcctgtcttta

SEQ ID NO: 26726 - DNA, 990 bp, Zea mays
  Clone ID: MRT4577_124383C.1
ggccgccgccgccggcggcggcggcggctctggctcgggcgtcgcgagcggcctgaggttggcgctgagcaaggtgctgtgcggcaggggcatgcgccgggtgctgcgcctggacgacctctgtggcgggtgcttctccggcgccagcgcctgcggcgcccgcgagttccgccgcctgcgccgctccctcggcgacagcggcgagtgcgacccccgcgccatagtcttgcctggggctgatggggaggaggagcagatgggttggaaggccgacatggacgtcgactcgtcgcgccagcttagccctgtctccgtcctggagctgcactccgacgacgacgacgacgagtcgccggtgcattcgcactggggcgacgagaagccatccacctccgggaccgggagctcacctccgtccgagtctttcctcggtccgactccgacctccccatgcttcagctacgacctccaggacaagttctgcgagatggaggtggacgagaccgaggaggagccggcggtccgaaccggcaggtccatcgaggagcaggtctcgtcgtgggagaagatcgcgggggacatctcgaggatccccgcgatgatggagctggacctgtcgcgttccacgcggcagtggcgggagccggagcccgaggtcagggaggtcggcgccaggatagaggtcctcatcttcgacgacatcaggagggagaccgtgtgcgacatgctcgcctcgcattgtagattggcggcagcagcagcaacatcttgttgatcgagggaggactggactggaggagtggtgttgtgttcgtcagaagtaaggggaaaaaaaagagagagagtagaaacagtagaggaggaggatgtgtacaatctgaggcttgcttgatgtgaaattctttttgcccaaacgacgaagccttggactctttgccgcatcgagttccacgctgtttatgtgtttgcaaatatgatattggtggcaat

SEQ ID NO: 26727 - DNA, 143 bp, Zea mays
  unsure (1)..(143): unsure at all n locations
  Clone ID: MRT4577_124384C.1
caaacagcagtgaattgttcttcttctcaatgtatgcaacganctgcaactgacactgcccgagtctcccggtttgaagaccctgcggggggggccttttgattcgaagatgaccgcggcggtgctgcccggcgccgatacga

SEQ ID NO: 26728 - DNA, 211 bp, Zea mays
  Clone ID: MRT4577_124385C.1
ataatgcgacccgccctgtagcgcattattaaccgcggctgttgtggtgactacccgcatgaccactactatagtcagcagcgtactagcggccgcttctgttgttttccttcctttctttgtcaccacggtcggctgctttccccaagatgttttaagagggctgcttttttgagggctaccaattaatgttatgcagctcctccaccaa

SEQ ID NO: 26729 - DNA, 1486 bp, Zea mays
  Clone ID: MRT4577_124386C.1
aagtttttcatcccgtatccgtccttcgctcctagtgattgtggtgcacgacggtggaaactgagtcacgtaatccctactgttgtttctccgattctccttacgacccgccggcgttgggcaaaagcggccggtgctggtcctctcctcctgcagaaggcaaccggcggcgatccccatctacagcaaaaaaacgaccggcggggagcctcttccccggaaaataatttgacgagtgtatagaaaatgtcaaggttggagctagtgttcaaaagaccacatatacaatgaagagagacatgctcacgtagagaaggtcattcttcgtgcccttgaaattgagaaatcccggctgccacactcaaagggtatttgagtacctgtggatcttctgtatccataaaggatcagatcccaaaacccattggtcaaactactgaatgcagtaaacagggcatatcttatatctgagattgtagatccaagatgcagatcagcggctttgtcacccctattggtcctttatctgaagaaaatcacacgatcgacaagaatttgttgccgctggagtgtgaagggacaatggaatgccacacacgagacaacgatgctgttgggttggatgcaagagcggaaggtgttgtctgtgagctcacagaccttcagaataacatacaagtttatgatatcgagttgactgttctaggaaactacacaggtcacggcttgccccttgatttccttgagagtaaaacgactggtggacccatcaagggctaccctgttgttgtggatgttttagaggattgttcttcagtgagtattcatgatcacctcccagtggctaggagagttgggaagaagaggcagagacgcagacatgatggaaggtggacgaagaggaccccgctacgttttccggctgcgtccacggctgtgcgtgccatttccaccaccgtgcagacaaaaaagaactcaaacaaggacccggtactcgaggaatgctccctgctattggctctagctgcgaaagcctccctgctgcatacatgaagacccctaggtgacgcagttgactccagcggcatagaagtgtatcatgtttcatgtgagaacgactgctgatttctttctggttcgtgtggctcacctttgccccttacacctgacgcgaggtcgaccaggagcagcaaggactgcaatgctgcacttctttgtaatttatgttctgcctcccctctgtgtgctcctgtgcgcttggtttagtgcagtcgtgaggataagttggggctagttatggttggaagaacatgaaagatcgaattttatttaaaacccagctgttttgcagggaaaaaaaaaaaaaatggctagtttggtaactctattttttcaagatttttcttggaaaaataaaaatttctttaaaaaaatgaggttgttaaattagccctaaaaaaaaaaaaaaaaaaaaaaaaaaaagaaa

SEQ ID NO: 26730 - DNA, 306 bp, Zea mays
  Clone ID: MRT4577_124387C.1
agtggttttaatggtcatttctggggtttttgccacaaaccataaacaccattggagtttgacctaatccgaaggtgctgctggtgtatatgcctggggtcatggcattcggtcttaattatggcccattgacctggtcccaccaaatactgggacccggtatgggggccctttatagccccttttaacccaggggcttcggctcattggccatgaattttttgggaaacccaatttaacctggaaagatttttggaggaacttctattattctccggttattacctgggacccggggcccgccac

SEQ ID NO: 26731 - DNA, 524 bp, Zea mays
  Clone ID: MRT4577_124388C.1
tcgcctacgcgtccgcgctgtcccccaagaccgtgctccagggcgtgaggaggcggccgaggtgggcccggagaggcgcctctgccttccggacgacgccgagcgccggcggaggactcttctctcgaaactggagcaagctcacggctggggcaagcaacaagaacggatacggtgaccatgagcggcacgcggcgggccctgacgccccgtggtgctacccggagtactggtgctcccactcgtcctcattcgacttcacctgcttcgccgtgcacggccacggtacacggtcactgacgatagcgcgaggcccgccgacggacgggaggctctgcttgaggatgacgacggctacccgaggcgctcggtgaggaacaccgaggttatgctgaaccagagcctccgagcatgaccacgtctaacctgtggtcaaggatccggaggagcgtcaagcacatcactccatggagctagcacttagggcactgtcaccgccctactagaaataaatcccagcgccg

SEQ ID NO: 26732 - DNA, 277 bp, Zea mays
  Clone ID: MRT4577_124389C.1
aacgccggttttttttattgtattttttattgacaactaacgtttcggaatgtttaaccccccaccagagctaaaaaaaatccaacacaccgcccaaccggaccctacttattagcatcatacaatggggatatcaccccaaccgacccaaaaatcctctgcataacttaacaaggaaaaacggcgcggcccaccccacgtctaaacaaaagggactgagggatatgacccatccgagacaaccgatgaaaaaatcaattgtaacagaacaaaggcc

SEQ ID NO: 26733 - DNA, 344 bp, Zea mays
  Clone ID: MRT4577_12438C.1
aaaaaaaaaaaaaaaaaaaaaaaaaaaaaaaaaaaaaaaaaaaaaaaaaaaaaacaaaacaagggagggggaacaatctaatggggggttacactacatccaattcactctcctatattctaccctattttcactgtactagcacctttttattccaccgccgaggttgaaaaaacccaattcttacccaacttattcgccttgcataacatactcctttccccagcttgccttttatcaaataggccctctcaaatcaccttgccaaactgtctgtcatgccgaatataaccatgcccccgccctttaaccgctcattatgcccgttagtcttgatagttacc

SEQ ID NO: 26734 - DNA, 197 bp, Zea mays
  Clone ID: MRT4577_124390C.1
agcaagcgcaaagggtgtgaaaaacaccattggcgcgaaggcccaaatgggatgccaaaaaagggggaccaagccaaaaagggggttcacagacatggaaacggcccccaaaactaaaccaaacccccggaagtaatcaaacaaatgaagggcctaaaccaaaacctaaggccaaaaactaaccacgggcccctggg

SEQ ID NO: 26735 - DNA, 290 bp, Zea mays
  Clone ID: MRT4577_124391C.1
ccttgtattttgtcttctcttttatttttgttgtcgttgtcgtctgacgacggttccggccgttcctgaccgtcacatatgtctttctatcgtagcaacggacatgaccgctattgggcggacaaccacaattgttttaacgatggaaggggaacttgttttttcccccaccggcaaaattgtggattccgcgagggggccccaaagaatataaataaaaacccctcctggggaggctttttggctaaaaagggcggcccggtgggttgttaggaaaccagttctgccac

SEQ ID NO: 26736 - DNA, 330 bp, Zea mays
  Clone ID: MRT4577_124392C.1
aagataggattgatttatttcaatacaaatggaggaggaggaggatccaaatgttgttcccacacattgacattgcaggttggaagaaagaaaaaacagacacacaggcacactttaacaaaatacgtcactaaagctgggatgttctaatgacaaatttggctggcatttaaaggtgcctggggaatccttacgtacaaatgaaaaaactgcagccaaacaagaaaaaccagcgacatcgtcgtcttgatctcgtccgcgttgtacaagttgccgcggcgcaacccttccaacattttggtgaccgcggaaaagtcccgcgggcaagcc

SEQ ID NO: 26737 - DNA, 665 bp, Zea mays
  Clone ID: MRT4577_124393C.1
gcagtgaacaagtcgtcggccgggacgaagaagtcccggaagccgtacgtggtgagcaggccgcgggagaggtggaccgccgacgagcacggccgcttcctccacgcgctgctgctgttcggccgcgactggaagagggtccaggcgttcgtcgccaccaagacgggcacgcagatacgcagccacgcccagaagcactttctcagagcggacaagaagctgggcctcgccgtgccgccgccggacgtcgagacggttcagctcccgttgtctccggacgacctgcgcttcgctcaggtgtacaggttcgtcggcgacgtcttcggctgtggcgcgatgtggccggtcgaggcgcagctgcagaggctgctgggcgcggaccctgtagtcgtggacaccatcctacgggtgctggccaacctccaagacaacttccctccctgtagcttgtaggtcgacaatattttgtagccagttacgttatggcgggattggttttgaatcctgtgattacaaatttcctgctagataaaaaatagggatttttacgtcactagttctcaaagtcgatcggtacgagtaaaccgatctgtgctagacatgtcctcgtctaagggcctatgcaggaacttcatagaaattatgtgcaaattttagaagaatcc

SEQ ID NO: 26738 - DNA, 777 bp, Zea mays
  Clone ID: MRT4577_124394C.1
gccggccaggccgggagacggataaacagatgtcagctgcagtgaacaagtcgtcggccgggacgaagaagtcccggaagccgtacgtggtgagcaggccgcgggagaggtggaccgccgacgagcacggccgcttcctccacgcgctgctgctgttcggccgcgactggaagagggtccaggcgttcgtcgccaccaagacgggcacgcagatacgcagccacgcccagaagcactttctcagagcggacaagaagctgggcctcgccgtgccgccgccgcaccctcgccgctctgccgccgactatggtggtgccctggcgccggacgtcgagacggttcagctcccgttgtctcaggacgacctgcgcttcgctcaggtgtacaggttcgtcggcgacgtcttcggctgtggcgcgatgtggccggtcgaggcgcagctgcagaggctgctgggcgcggaccctgtagtcgtggacaccatcctacgggtgctggccaacctccaagacaaaacttccctccctgtagcttgtaggtcgacaatattttgtagccagttacgttatggcgggattggttttgaatcctgtgattacaaatttcctgctagataaaaaatagggatttttacgtcactagttctcaaagtcgatcggtacgagtaaaccgatctgtgctagacatgtcctcgtctaagggcctatgcaggaacttcatagaaattatgtgcaaattttagaaggatcccaaaaaaaaaaaaaaaaaaagccccta

SEQ ID NO: 26739 - DNA, 195 bp, Zea mays
  Clone ID: MRT4577_124395C.1
ataggaacggtgtgatttgcatagacatgaggagcagaggcacatgttcatagagaccaacgctgcgcctccactggcaccgagaaatttctgaaacatataacacctccatgtccacatatattgagatgaacccatgcatgtatatggcgcaccaccagccgctaggtgaattatctatatatgaagaagaag

SEQ ID NO: 26740 - DNA, 524 bp, Zea mays
  Clone ID: MRT4577_124396C.1
taccggttcggaattcgagccacgcgtccggctccatgtatggatgaattgttggtatcaagttcctcaacatattatagtttaaatcctctctatggaagaatgagccgacggatcttgagatcgacgaaatcactaaaccacgcggaggaggaggacgattatatatatggacataaattgggtctccttgctgcgtaaatgcttcaagaggctgctgatccaaaagaatgaagccatccatggtctgactgcaaatatcgacaacatgtttttggacaagacatttagcgatataggtcgtcattagttttaacatttacaaaagaacaatatttgttttcaattgaagtttaaacttgcagactgtatagttgtgattacaacaagtattgcggatcctgtcactttaaaccattgtttagttgccttaatcaaagtgagggtcagaattgtatggtgttctttgatattgcagtagatgctccactaagttcaatgaaaagttcatgttggtctttacg

SEQ ID NO: 26741 - DNA, 435 bp, Zea mays
  unsure (1)..(435): unsure at all n locations
  Clone ID: MRT4577_124397C.1
gttctcgtggtccaagacatatatagcaggagccaacngtntttatgtgcgtgtattttggaangccggcatgcatttttttttattggagagtttctgacatgcatttggagcaggagagtgacttatggatggcatctcatggctgttgtccaagctacctcgcagtggattggatctaaggctacccgcagtgagcaacggtacgcgaagcgctactgagatggagtcgttatacagtagatattttgctgcagcggacaactctcccagctacagtaaaatagggacgggctcaaaaaactccatttacagagttcctttccccttcactccatatctctctcctctctgttttcccaactatcgcacgcgcgcgccggtctgtgcgccgaacgtctccttcgtcgcccgcggcacaagaagcaaggagtt

SEQ ID NO: 26742 - DNA, 292 bp, Zea mays
  Clone ID: MRT4577_124398C.1
actaatctagatcctgcttagtattatatatttttcctagtggatcagtgaataataagtaccaaacactagactagaaggtaatttctacattgtttagacttggtgaaacaatttatcccctctggtattgttctagcataagctttagttatacatgattaagatagaaaacttcatatataaatttgattcgcaaacccacatttatagctgcagctaaaatatgtttccttagggcacagtaatcctttctgtgaatttagaccttgtttgtgattttgtgaatgaa

SEQ ID NO: 26743 - DNA, 248 bp, Zea mays
  unsure (1)..(248): unsure at all n locations
  Clone ID: MRT4577_124399C.1
caggaacagctgagaaggaggaacatggtggggtaagaacgagagtgcaaaccgagaagctgcacntgcacgaccaagcaacacatcgcagcatgactcatgaggacacctgagtaagatgacaaacgagcgtcactcggatagaaggcgacggaacacataagacaaacacgggacggatgcgtatcctaaaaaaccgattgtacgagcgaggcaggaaatgacagatgcgcagaatatgaggaaca

SEQ ID NO: 26744 - DNA, 241 bp, Zea mays
  Clone ID: MRT4577_12439C.1
tgaggatatctgagaatcgccctctctagccggcccgccgggcaggcacttgcttatcttgggaagcccaaacattacgacagaaacttagtaatgaaacatgactcataagaagtccaaatgaaggcaccaccaatgaagggttgcacggagaacgctcctgagcaagtcaaacaacaatgactgagtggcagcaatagcggcgcaggtacgagggggccacagctaggcgcagcagagc

SEQ ID NO: 26745 - DNA, 615 bp, Zea mays
  unsure (1)..(615): unsure at all n locations
  Clone ID: MRT4577_124400C.1
aacagtagcatatgaatacgatacaacaatactgcgaatctctcagcagtttcagtacagagtcgaaaaggggggaaaaagaaagaaagatatcggacgaccaaactagtaaaagataacagatcagcacataataatgctggctgctgccaagccaaattatacccaatcactaagccggcatggcatgggttgcagttgcagcggcgattgccaaagcccttcatcatccttctctccgttcatcttctatggagcagcagccagtcactgatcaaacacacacatccagcagcagcaatgcttgcaggtaacagcagagccagaggaaggtagtcctcatgtccacagtgacactcccaaccttaagccgatgaacctgttgccgcccttcttcaggtcgaggttgatgctgatcatcccgggcctgaagtcgaagttctccttcacgatcttgaggatctccttgtcggggatcgtgccggtgccgtacgagttgacgaacacggacaggggctccggcacgccgatggcgtacgacacctgcacgaggcagcggcggncgaggccgctggccacgatgctcttggcggcctgcctggccacgtaggcgcc

SEQ ID NO: 26746 - DNA, 643 bp, Zea mays
  Clone ID: MRT4577_124401C.1
cctcgtgcaggtgtcgtacgccatcggcgtgccggagcccctgtccgtgttcgtcgactcgtacggcaccggcacgatccccgacaaggagatcctcaagatcgtgaaggagaacttcgacttcaggcccgggatgatcagcatcaacctcgacctgaagaagggcggcaacaggttcatcaagaccgccgcttacggccatttcggccgtgacgacgccgacttcacctgggaggtggtgaagcccctcaagttcgacaaggcatcggcttaaggttgggagtgttcattgtggacatgaggactaccttcctctggctctgctgttacctgcaagcattgctgctgctggatgtgtgtgtttgatcagtgactggctgctgctccatagaagatgaacggagagaaggatgatgaagaagggctttggcaatcgccgctgcaactgcaacccatgccatgccggcttagtgattgggtataatttggcttagcagtagccagcattattatgtgctgatcttttatctttactagtttggtcgtccgatatcttcctttcttttccccacctttttcgactctgtactgaaactgctgagagattcgcagtattgttgtatcgtattcgtatgctactgtt

SEQ ID NO: 26747 - DNA, 1056 bp, Zea mays
  Clone ID: MRT4577_124402C.1
ggccgcttttttttttttttttttaaatacgatacaacaatactgcgaatctctcagcagtttcagtacagagtcgaaaaggggggaaaaagaaagaaagatatcggacgaccaaactagtaaaagataacagatcagcacataataatgctggctgctgccaagccaaattatacccaatcactaagccggcatggcatgggttgcagttgcagcggcgattgccaaagcccttcatcatccttctctccgttcatcttctatggagcagcagccagtcactgatcaaacacacacatccagcagcagcaatgcttgcaggtaacagcagagccagaggaaggtagtcctcatgtccacagtgacactcccaaccttaagccgatgccttgtcgaacttgaggggcttcaccacctcccaggtgaagtcggcgtcgtcacggccgaagtggccgtaggcggcggtcttgatgaacctgttgccgcccttcttcaggtcgaggttgatgctgatcatcccgggcctgaagtcgaagttctccggcgcgatccccgacaaggagatcctgaagatcgtgaaggagaacttcgacttcaggcccggcatgatcatcatcaacctcgacctcaagaaaggcggcaacgggcgctacctcaagacggcggcctacgggcactttgggagggacgaccccgacttcacctgggaggtggtgaagcccctcaaggcggagaagccgtcttctgcatgaggcgcctcctctgttttggaagaagcttttggtctggtctggtctggtgtgcctgcgctctatcatgcttttttatggctcctacttgtgattcttgatctgccccttgcttatcatttgtactgtactgtcactgtcctaataagtggtacgtgtgcggggtcgtattgtgtctgcttattcaactagaggattatttctggttttgctgcttatgtaatgcttttaaaaccatgaaagaagctacaggctcctacagctgctttgagaaaaaaaaaaaaaaaaaaaaaaaaaaaaagcggcc

SEQ ID NO: 26748 - DNA, 262 bp, Zea mays
  Clone ID: MRT4577_124403C.1
cttcacttgtctgccctcgcgtgctcccgggcctctgcatcctgagccagggcttctgcccttagctccgatccggtccgactactaacccacgccgcataagccgcgcgacctgatcgcgcggtggtcgaggataggggaaacgcggcgccgcggttgcctgccaccgaaccgactcaggatatggaagaggagccctgatcccttcgtcccggtgcccttcggaccgatggactccgagcactggatctcgcgcctggcc

SEQ ID NO: 26749 - DNA, 230 bp, Zea mays
  Clone ID: MRT4577_124404C.1
cttctatcctataaagcgaacaccctttttcattttctctatgtacgaaacccacttacttaaaaagggaaacgggtgaaactccatcaatatgcatcacccatcttcactctcttacaaaacaacaacaacctcattaattaattaaacaaaacatacaaacccttcactcctgcacacattaattaacactcgtacacattttcatgatccataacatcctctcaaca

SEQ ID NO: 26750 - DNA, 264 bp, Zea mays
  Clone ID: MRT4577_124405C.1
aggaacgcggcccaagctttttttttttttttgttttttctattttgtgcatcatatacattaagcggccgatctattcattaaaaccaaaactttattaagaccatgcttttattattggtcataccacacatgaaaaagtgctgtcggacactgactttttacatgtgtggtatgaccagagatgtatgcaggggaataactaagttttggatttaatgaatctgtggaacggttgctgtgtactctgggcggttggtgcgg

SEQ ID NO: 26751 - DNA, 417 bp, Zea mays
  Clone ID: MRT4577_124406C.1
agtacatggccatatcgataatatcgataaaagaacaaacttaatcctggcgccgggggaaaatgttcaaatgggcaaactgggttaacaaggccaaagaaaggagaatcccgttagaaacaaaaacaatttaaacttaacaagggaaaacgttccaaaattcaaggctaaactgagcaatatctgtaatggcatcctgaagctgcttgactcccacctagtgccttcttttactgctgctgaatcaaaggtcttctacctcaagatgaagggtgactatcacaggtatcttgcggaatttaagactggtcctgagaggaaggaatctgctgagagcacgatgatggcctacaaaggtgctcaaggaaattgcccgggttaacctggaacctacccatccgataaggcttgggcttg

SEQ ID NO: 26752 - DNA, 297 bp, Zea mays
  Clone ID: MRT4577_124407C.1
aaaaaaaaatagaaaatgctggccaaagttggttggctccgggtatgaaaaaaacagaagttttggccaattggggtgaaaaacatcattgggaggttagaagggtaacaaaatttacagggaacactgtggctaaaataaaaggccaaggccatacattattgggccggggatttttttggtttaaaacattgggttaaaaaacgcatgggttgggatttacaaaacttaaacggggggcttataaaagggcagcaaaagatttttttcccaactggtttaactttccaaggctta

SEQ ID NO: 26753 - DNA, 675 bp, Zea mays
  unsure (1)..(675): unsure at all n locations
  Clone ID: MRT4577_124408C.1
ggccgcttttttttttttttttttcttttttttttttttttttttttttgatcatgtagcacatcccaataacgatctcgtacaattatcatcatacaaatctcagtaaatgagacaaacactggctttatgactgctgagataattaaagaagaaaaggaaactgacatggccaagaagctggccggggggggtttagctcaattccactattggcaaagttacaaacttgttggctagcattctgtttagacctgtgatacatttgaaaagatgtggctgcacctaataagattaatatactacagatataaaagaattggtaaattaaaaattaacaacagaagaaaacaaaaggatgtgccggactctaaacgaagtaaatacataagtttagaatatttctcacgttatcccccttccaagcttggtacacccgctgctgtggctgcgccatgtgcaagtgcgaccaacaaccagcctcaatccctctgaagcagcatgagggttcagacttcagaccttactccgaaattttgaaacagtatatatgcagccgcacgtggagactgacagattagagtacaagtggtatcttatcaactgtgattgaccttgnccccaagcaagaagagaccaaaaacaaatagagatggatctccacgctagtgtaat

SEQ ID NO: 26754 - DNA, 494 bp, Zea mays
  unsure (1)..(494): unsure at all n locations
  Clone ID: MRT4577_124409C.1
cacgcccgatccgggctttaaccgtnnggatttaacaatatctnnntgtgttggagattatatgtgttaattcgtggccccctgtatttccggaccctttacgattcgtanntcaagccanngttgtcctcactttggcagctctccaggtacaacttctgttgccgagtatttcgctctcgggtctggcttgatcaaccaacaggtngactgtgtcttgcatcttaacacccattgatacctcgtctcgcagaagggattgatngatgacccttctcggtgaggcgtgtcanagtacaacgcagctcnnattggacgcattcttcagcatatcccttaagataggaagtgccccaatgtccctgttcaaggggtgctggtgctaaccattcttcgtgccattgctggcgctggtgtgctttctggctacgaccagctccagatcctcttcttcggaaagaagtacggctccggcggtgcttaaatggagaaaa

SEQ ID NO: 26755 - DNA, 872 bp, Zea mays
  Clone ID: MRT4577_12440C.1
ccggccgggctcatctcctccccgtcgccgacagaacacagcctcctcctcctctccgtctcagactcgtcttcgagctctaggccttgccgcctcgagtccggctcctgcagggagcacccgccaccaccgccgcagaagcgaaagcggcgttcgcctcaaggaggagacttccgccgctggattagagaccgggaaagggaggggttccctccgcgccgggatggacgacggcgatagtgtggtccggagcgtcgagaaggctggcgccggcccgggcgacgacggcagcacgacaccgctcccggagacggttcaaattggcaattcacccagttacagaattgacagaaagcttggaaagggagggtttgggcaagtatatgttggtcgtcgcatttcctctcctagtgttagtgacaggacgcccggtgcgaatgctttagaggttgcaatcaaatttgaacatcgaaccagcaaaggttgcaactatggtgctccttatgagtggcaagtttacaacactcttagcggaattcatggcgtaccaagagtacactacaaagggaagctgggagagtattatatcatgattatggacatgttggggccaagcctatgggatgtttggaataataactctcactctatgcctgttgaaatggtggcttgcattgctatagaagcaatttccatactggagaaatgcactcaaaagggtacgtccatggagatgtgaagcctgaaaatttttgcttggacctccaggcaccctacaagagaagaaactttttctcgttgaccttggtttagctaccagatggaaagacactggtacaggagagcatgttgaatatgatccagaggctgat

SEQ ID NO: 26756 - DNA, 490 bp, Zea mays
  Clone ID: MRT4577_124410C.1
gagctcactgtcggcggccgccctttggtgtacgccttgcgggacgtgtagcggatggtcttgtcgaaccggcggatctagcgcttataacggtaccgcatcagccgagcctcccgctactaccctttgctcaccaccaccaccaccggcaggccggccgcctgcgcgtccggtaccaccgacacctccgaggatgacgacaaaatgtggtacatggagtgttcggggtagcaaaagctgacggtaccgatgttcagctcgggcggtgcgaccggaacgccgatggccttgacgccgtacatgcaccgggcgaagtccaggtcggtgcccaggtacgcgaacgacttcgcgaagaacgtgatggcggcgctgtactcggggctgaagacgggctcggggagcagtcacgaacgccgcttggactagctgattccgtagtcttccgccaccgcttaaccctgagctggggccttggcccccgaagcgggag

SEQ ID NO: 26757 - DNA, 269 bp, Zea mays
  unsure (1)..(269): unsure at all n locations
  Clone ID: MRT4577_124411C.1
cagacagcagctggtctccataaacnccccaccccacttccctgtcctctgctgaggggctggtcagagtagctgtagtagttcagaaggggttggggagcatcaggacttgggttttctatgctgtgtgatacaaggagagaagtgacaatcgtgaagtccaagcatctgcagttccagagtaagcagagtgctgatctgtgtgcaaagatttggaatttttaaaaagtaccaagttcctgaaattcaataaaatatttttatatttt

SEQ ID NO: 26758 - DNA, 288 bp, Zea mays
  Clone ID: MRT4577_124412C.1
tcacgcgtgcgacgcgccggcgctccacggggcgttttttgacatcgtacggcgatttcgacgaacaccaagtcgccgaggctcgagcatcaacaagcaaagtccgcgcccgtgaggctggttgttggagaggcatgccgtcttaaatcaatagcgttgaaagcatagggctgggtaatgtcaatgagcaaaacaaggcactgagtctacacaacgcagctcatgcaatgcataagtttaatcttaagaagactgtggggcaatacgcactggatgctattgaaaaca

SEQ ID NO: 26759 - DNA, 406 bp, Zea mays
  Clone ID: MRT4577_124413C.1
ggctgggatccttatagagcggccgcccttttttttttttttttttttttttttttttttttttttttttttttttttttttttgggatcccaagtaaccctggaactaaggggccccccatatacaacaggaggggaataaacaggctccgaaggaacaaaaagaacgaaatttcaccaaccccttgaaacacaaaactttgccttttgtactttgccctaaaggacaaaaggataaggttggactttaactacacattacacctttaaaccaactccatcagaaggggggctcctatggacattagcccaatcacctttatgaaatcaattttattcataactttcacagggaaaacagcaggggcttgagctggataaaaagacgagaacgtggcatttggtg

SEQ ID NO: 26760 - DNA, 2706 bp, Zea mays
  Clone ID: MRT4577_124414C.1
atggggtccggcaccgtgggcttggccacgcaccacaacgtctgccccgcgcccggcgccagcggtggcgccagcggaggtgggtatatgatcggcggctggaacggaccgccgccggaacccgagccgccgcctcctgagccggagccgggatcagggccggatcctggtgggctcggcaccacgatgatggggctcggcggcaccgatccgaacggcgtgcccggaccgacctgtggcggcgagttcggcgtcgtgagagagggatgggtggagaactcgtcgtcgagtagaggggctcggggcatggctttggcagccagacagaccagatcgggagcgactgggcgttcacagctaaatttgatgaaggcttcgggtccgggaacacgcgtcagcgggagctcttctcccaaatcctccgccacccccatccccagcctgccgccccttgcctacacgcgcacccccgaggacgccgtcgccgccacgctccgcgccggcctcgacctcgactgcgggccgttcctcgcgctctacgccggctccgtcgtcgccgcgggcaaggtcgccgacgccgacgtcgacgtcgcgctcctcaacaccgtcaccgtgcagatgcggctcggcatgttcgacggggaccccgcggccgggccgttcgggcgcatgggccccgcggacgtgtgctccagggagcaccaagacctggcgctcgacgtggcgcgcaccgcgtcatgctcctcaagaactggcgcggcgccaagcacaacagggacggcatcgccgcgtaatccgcgcgggttgtgcagcaggccggctgcaccgacgtcgcgtgccgcgggaaccaacccatcaccgcggccatcgaggcggcgcgccaagctgaagccaccgtcgtcgtcgcgggcctcgaccagaatgtggaggccgagggcctggaccggacctgttagcgctctcgagatcctggattctcggtgtgccatcccgcgtcgtccacggtcggtggccatggagtatcacgactcgacgcataagctgctcgagcaaatgcagcaaatggaagattgcttgacgcagaagatcgagggacgctgtgtggggctggagcgcagattcgaagagcgttgtgccaacttccacaatcacttcaccgcccggtgcgaggaactgcagcatgcagtcgacaacacggcatcgcacgacgaagaacgactcatcgccttggaaatggcaagaacagagatggagcagttgaagccagattttgagaagcgcctgacggacatgacactggagatcacgtgtgtcaacaaatttcttgaacgcgaacgtcgttcacctgcaatgggtgaaccagggatctgcggtccctatgggtcgactactgggcgcgtaccggccgggctccagcaagtcgacgggcaatttggccaccgctctgaccagtgttaccgggatcgtgaatctgggtatgccaatacccagacgaacggccaggtcaagggtacgtatcttccttcgtttcatcgttgtactggattcgggaacgataccgattgcagtcgagaaatcaggcactcttctatgggtcggctgcctaaaatcaattttccacaatttgatggtagtcaaccgcagttatggaagaggcagtgtgagagttattttgagatgtatgaaacggaacctgcgatgtgggtcaaagtggcttcaatgcactttagtggccgcgcgtcgcgctggttgcagtcggtagaaaagcggttgcgccagttcggttgggaggaattttgtggattaattcatgatcggttcgggcgagaacaacatgagtccctgattcgtaagctttttcatatcaggcagaatggccctgtctctgaatatgtggaacaattcgcatctctggtggacgagttagctgcttatgagtcccataccgatccactttattatgcgatgcgttttgtagacggtctgagggacgaaatcaaaacaattgttatggaggaggctgtggaatccagtcggcgtcgacgctttgaaccatcagccagcaaggtttggaaatcgggatcagcatctgcagagacagcttggacagaacggctaccaattcaggcagcagtaatggacaaagcaacttctgatacagctcgacacacttcggtgcttgatcggatgtgctactacggtgcaattgcggaagtctgggaactattgggttcagaagaaataactgaagaagtttttgaacctgaacaacaaataatgatggttttatctatggctgcttgggaggttgtgcaaggctatgaacaagatgattcagctcaacagctgttgagtcaactggcggtgacttcacaaatagctaactcggatttcaccttaaaggatggagttatccgatataaaggtcgtatttggttgggcactaatgtgcagctgcaaaataaggtcatatcagccctccacgattcagctttgggtggacattcgggagctccagttacctacagaagaatcaaacaactgttctattggaagcgcatgaagcaagctattcatcgttttgtgcagacttgtagtatttgtcagcaagcaaagccagacagactaaaatctccgggtttattatcaccactgccagttccccctcatgcctggcacacagtgtctcttgatttcatagaatga

SEQ ID NO: 26761 - DNA, 260 bp, Zea mays
  unsure (1)..(260): unsure at all n locations
  Clone ID: MRT4577_124415C.1
ccccgggggggcaaccggcgggcacacccaaaacaccagnacaaggaagggacccaagggaacaaacacaggcccaagggccaagcaaccaggcaccggaaggaacacgacagcaaggacacacgggaccacccggcacaggagaaggaacaacccaacccaccacgaaggggaaaaaacaaacaggcgcaaaacnaaaccgccacccaaaaaggaccagaacaaccggggaaaacccggggaggcacaacccggccccc

SEQ ID NO: 26762 - DNA, 374 bp, Zea mays
  Clone ID: MRT4577_124416C.1
ctactattttcttgtgtctttttcatccgtcagtctcgtgtaaatctgtccaaccctttaatcgcagccatgtctctcaagaacgacaagtttcccgcctcagccgccttcgacgccatccaagcggccatcaacgccagtgatgccgatcgcaaggatgccatcaagcagggcaacggcgtctacgccttcaccctcaagaacgcgagcggcgatgaggccagctggcacatcgacctcaaggaaaccggcaaggtcggaactggcaccggcgcaaagcctgatgtcacactcatcctctccgaggagaactttggcaagcttgtcgctggcaaggccaacgctcagcgtctcttcatgggcggcaagctcaa

SEQ ID NO: 26763 - DNA, 373 bp, Zea mays
  Clone ID: MRT4577_124417C.1
gccacgcgtccgcccactcgtacgctctcgcgtgcggctgggcgaccaccgagaccagggcgggcattatcgcacttgctgaggatacactgacgaaccttgggtgtgctactgcgccagtgctagctctgacatgtactcctcattcactgaccaagtcattgtccaacttggactgtggaaggagtagagctctgacaagtatgagacgaacgtgtatgtactcccaatgcacattgatgagaatgacgctgctcttcaattgggcaagcttgatgccattctgaccaacctcaccaagtctcatgacgactacatcagcgtgcctatcgagggtacctacaagctctgcccactaccgagactaggcaca

SEQ ID NO: 26764 - DNA, 660 bp, Zea mays
  Clone ID: MRT4577_124418C.1
ctgtgggggtaccggccccccctctgcggatttttttttttttttttttttttttttttttttttttttttttttttttttttttttttttttttttttttttttttggaaggaaaattttgttccttatttttttcaaaggaggagtcctgccccactgtccttttttttttttttttgacacaaaaaaggggggttggggaaggtttttgttgacccaactcaactcctttgggggagtagtccggggggggattaacattttttttttggaaatccgggcggggaaatatataattaaattaatggggggcaaattaaaagaaactagggaccctgctgggggttccaattccaacgggcagggtaaaaagcagcgcagggcacgacatttagagcaaattgtcggacttggccggaacccttttgtaaaatttaaatggcccccacggttttttgttccgaaagcgcggttgggccaaaaggtacagccccaaaaccagggccaccacctggaggggggtaacgtacagaaccacggcccccaccagggaaagattgataaaaatggccgccccccttgggtccctccagttaaaaagcgcctgggttttttccccttggggggccgggcggcccaccaccgtttgcccccccccg

SEQ ID NO: 26765 - DNA, 358 bp, Zea mays
  Clone ID: MRT4577_124419C.1
tatatttatttgaaactcgtcacaccctcattatttattttttaacacatatataacactgaccaaaaaaactttttttttacaaaaaaacagccacacacctacttgacttaaccccacgcccaccaattgcaaaccaaacactcacactataactaaccacagacaaccaccttcccatgtccaaacagggccccctaaaaccaaaccaacacctttcactcgcatgcacaacaccaccaaaccagtataagaactttaacccctgacccaaactcatcaaaacaccaccagacccacaacaagaaacctaagtgcacaagatgcttctaaaaacatgacaccccctacaaaaacg

SEQ ID NO: 26766 - DNA, 341 bp, Zea mays
  Clone ID: MRT4577_12441C.1
cctcgagccggcgggaatttttacaagatacttagctatcttgtctctgtcgtctatcgattgcttcacaggctgcccgagggggcaagactcacgacccgtgaggcgagacctgcgtgagtgtacacgagaggtttagtcccgattccgtgtcgattggaggaacaaggctaaagctgctgcagcaaagggcggatgataaaaggcttcatcacgataccgccagtgagatgtccgaaatggaaatatgacggctccaccagcacgcaacctcgctcgaaaggcataggagaatcaccctctcgcgaccatgcattttgtggcacccgatcaggtggagg

SEQ ID NO: 26767 - DNA, 251 bp, Zea mays
  Clone ID: MRT4577_124420C.1
gtgcgcttcggcttcaggctgtgagaaaaaaagaagaagaagaaagaaaacctcagcctgagggaacgatgcctctgattctgtcgattgtttgcattctttttctgctggccatatctccagtggctctttcgatttccaacaccacaagctgtaagtaacgtgttcttcttgtgttctggagaaaatgtgtatagtgcaaccttgtgcgttgtctgttttttattcccgatcccggtagacatgggaga

SEQ ID NO: 26768 - DNA, 566 bp, Zea mays
  Clone ID: MRT4577_124421C.1
cccccccccccccccccccccccccccccctcttctccttctttttttttttatcggactaaaaaataacaacgtttacctgcagatacaaaacaacaatttttttgttttttgaacacacatgacctcctttgggaaaactgaaatcgaaccaccccggaaaaatacatagggctttaggcaaatgcaaaaggattcatttttcattggggggggggctaaaggaaaaaaactttgggtcatcctcctccagggacccaacctgggatgtcttctgggggccattctaaagctgggtgaagttccccttttccttgatcaactggatgggggggggcttgaaaaacaatttccccttgggcgcaatgtatttaaaagggctgatggggccccctccatggcaacacttgaagcagtttttggggaacttaggggggttaacagggaccctctcagttggataaactggtttggtgaatccaacaaatttttttttggggccaaaaaaggcgcttgaaactttagtagcattctcattcccaacgtttttttttgggttgaaacct

SEQ ID NO: 26769 - DNA, 862 bp, Zea mays
  unsure (1)..(862): unsure at all n locations
  Clone ID: MRT4577_124422C.1
ttgggtacctcgaggccgggccggtccgattcccgcaccgcgttccgctccgtacgcatttcggccgttccccaatctcctcccagcgatttgccttgccgaggtcgccttgccgctgttcccgagcccgacgccttgccgcccctgccctgctaggctgctacagaggaggagaacccccagattttcccacccccatggcaacgcgcgcgccgccgcagtcttcttcgaccggatccgtgacggtgacgatcgacccgtccccctcgtcgtcgtcctcctccgccccgcccgcgtcggcgccggccccggccccggctcctgagtcggtggtgctgcgcctgaagcgccgggctaagaagaaggtgtcgtggaaggaggggacggtggacaacgagggcctcggccgcaagagctctaagaagtgctgcatattccacaaggaggtccccttcgacgaggactgcagcgacgacgaggcccccggcggcggcggcggcggcgggcaccggtgccctcgccctcatggtgacgccggcgaggggaccagcggatgctcgtcttcttcccacgaccatggccaccactgatctccgtgcgtgttactcgttcttctctatcctccttaggtatcggaccacaatagatgcttatatgtttaattaatctggcatcatgtaattagttgagtgaatacaccaaatccgtgctctatggttgggagacacatgtttttatgggtacaattgttgtattggtgcttggcgagcaaacatggcaatcgttttgctgaattcaatgttgacacctatgttttgcttaatacgatttgaactttgaagccnaaaaaaaaaaagcggcc

SEQ ID NO: 26770 - DNA, 444 bp, Zea mays
  unsure (1)..(444): unsure at all n locations
  Clone ID: MRT4577_124423C.1
cactctgttatccagcaaaagagatccncagaggtaggagtcatggccaccgtcagcgccgccgtggtgaccaccatcgttgcccgcgccgcgatcgccaggaccaatgctctagggctgcctgcgttgatgtccaggatccagagggtgcgctgcagctactccaaggatgccaagaacgcggccccaaccacaccaaggccgcacgcgcgacactgctcaccgcagcgcgcgcgatgaccgcctcagcggcgtccgcgctggcgctctagcactagcacatgtccacgaaggccaccgcgctgagcctcgggttcaccaaccacctgcatggcgtgcctccctcctgagggatcttcccccctcatctggctccttctacaccatctacaccctctaacctcccacaaccacaaacaagcccgaacggccctctctcctcta

SEQ ID NO: 26771 - DNA, 366 bp, Zea mays
  unsure (1)..(366): unsure at all n locations
  Clone ID: MRT4577_124424C.1
nnnnnnnnnttttttttttttttttttttttttttttttttttttggaagagaagttatagaacatattttattcaactggcttaaactatcccatttttcaaacataggcttatccttccgggaacaaaattgaactccaggaaggccacccggccccaaaaatgaaaaaagaccgtcggttcagccgctaccgtggggataaaaaaccagacgcaggggggtctttcaccaccctcaaattaaaaaaaaaggcagggcccttccaaccatttgatcctgaagggccaaaaattaggtcccatcatgcatgagttaacagaaaacaattgcttcagggagttcactgtcttaaggacgtggggcc

SEQ ID NO: 26772 - DNA, 234 bp, Zea mays
  unsure (1)..(234): unsure at all n locations
  Clone ID: MRT4577_124425C.1
ccccacgcaggaagggngnnccnaccccncgggcgcgccgcgccgancgccgagaancgcggcgggcgcccccaacccaaacgcnggggcggccaagggccaagcncgccgcggagggggcgcaagaagaacggcgccagcgacgacgacgaggaccccanaccgcaggacgacgcggccgacccaggcangagnacgncagcgacagcagccgccgacaaagaaaagagcacg

SEQ ID NO: 26773 - DNA, 224 bp, Zea mays
  Clone ID: MRT4577_124426C.1
gaagaatgggaaccacatgataaacgggttccatatacccacattattaaggcaagattattgtaaaaactcgtacctcaacacaatggctgtcacccaacatgcaaaacaaacaagcaaactgaaaaacaaagattttctgtctttgacacactcaccacacagtgcctatgattggcagtcagttaaccctttgttatcattgatcaaccaccagcacatgg

SEQ ID NO: 26774 - DNA, 437 bp, Zea mays
  Clone ID: MRT4577_124427C.1
aatggctgggccgacgcgctcattatgtggcggccgccttcttcttcgttttgtacggtgaatagatgcttgctctgattactaagacttagaagcattagataatggtcgggtgcatttacaagacatgcatcagactcagaggcaaacgctggaacgttgggtggcgctgaacaatcagagacagtttcgacagacgacatgatcgatggttcttctttagattctgcggagacgggattaacccttaccttaacaagcaattcaccacctgcattacacagaactaccatccttatggaagaggctgcttaggaactgctccacaaccacagttgtacacttatagtaacagtcggttcctgtttgtacaagctggccacgaagggtaggtcactacagtaggtgtgaggtgatctcttctacacacagctgga

SEQ ID NO: 26775 - DNA, 1013 bp, Zea mays
  Clone ID: MRT4577_124428C.1
ccggccgggaccgcaacaccaccagcaatccttacttccattgatagacgatcgagtcgtgtgcgcaacaaccgagctagctaggatggcaggatgctgggcagtgttgctgccatcggcgctgctcgtgtggatcgtttgctgcaactgggtgctgatcatgagtgtggacgccgggtcaccgtacggcgcaaacatgactgatctgatgcgccatgtgcagttcttcgacgaggacagagacggccttcttactattccggagagtactaaaggttttattgcgatcggattgacccctgccttcgcactttctttggccacagcgacccatgctgctttcggccctttgacaacccctcctggaaagttaccgagcataaatatctacgtgtcccacatccacggagcagtccatccaagtgactcgggtgcctatgataagaagggaaactttgtccccaaaaagtttgaaagaatattccagaagttttcacacagtgaggaggacgccttgtcatggttggagatagaggcgatgctcgtcgcaaacagggactttcttagacctctatcatggcccgaggctgagacggagtggcagctgatccacatgctaggcaaggacaggcacgggtacctccacaaggacaccctcaggggcctctacgacggcaccgtcttccccaagatgcgcgaccacaccatcgaccctcatgcccgtcacagcgatgcctgatgatccgatgagctcagatccatggatgataacatgggttctcgtaaaacctacgtactactcatgcactcgtgcgtctactgccggtgcaataataaaacagtgtactgtacatcgtcgtatgtaatgtacagaacgctatatacaccacgtttatccaccaccagtgctttgccgagtatcgcaatcactcgttaatggctcgaaaacactcgacaaaggctttactgagtatgacactcggtaaataggactcagtgaattatacattgac

SEQ ID NO: 26776 - DNA, 432 bp, Zea mays
  Clone ID: MRT4577_124429C.1
gggcattcattcaggcttgaattcaaatagttatatgggggttcacatttgatcattcattcccacaaggggctacacttgctcaacgggggggctctcgttggagcccaaaaaacactggtttttgaactcgtaccccaccatgacccccgcgccgtccaagtaccaaccgcccataccatgccccaccgccgccgggaccttcgtccaaaacttcaacggggccttggccacccaggggctggggatgctaccaaagtaccgcaacaggcggtagtcctccaacgcgcctatatggacgtttcccaaaacctgttcccccgtgcctgcgtttgccacccccgagggggggtgcccaccttcattgatctcaacctccaaggacccgatgacccggtttaaccgggccacgtcctctggggggtggtcccc

SEQ ID NO: 26777 - DNA, 462 bp, Zea mays
  unsure (1)..(462): unsure at all n locations
  Clone ID: MRT4577_12442C.1
gttagcgcggaaaccaaaaaaatttgcaaagcccacagacacaacatcaggtcccaagctacaaaaatcactctcggcgctcaccacaaaacgcgtatgactctaataatctcaccactcactctccataaaacactttttaaaaacagggggggttctcnctctacacccctaagagcactgagagccccncacccctggtggccctctgcgtcacatacgccgcccctctcccacacatctgccccagcgccacaaaccggggngccccccacccaaagtccgcaaaatacatgggcatcccgagccagctgaccacccacaggtgagactgcggtatgatcttcccgcgccccccctgtctcctcttctgagactacacctacaggtagtccaccaccgagcgcacataggccttattcacgcggcacaccgngttcttgaacccctgccccacaaacc

SEQ ID NO: 26778 - DNA, 276 bp, Zea mays
  unsure (1)..(276): unsure at all n locations
  Clone ID: MRT4577_124430C.1
attttgtccaaaatgctattctgaatctgagatagtgttgtattctgatacacaaacagacaaaatcataaaaaggggtaaaaaaaaaactaaataaaaataaataaaactaaatattacaacaatttacagtggcaaaacccntggcttcacccaacttcttcgctttgctgctcctactcttttctctcttttcgtgcactagctaatattccctaaccggtctttttatccaactggtgggcagccttaatggcgtttcggaccttccctttc

SEQ ID NO: 26779 - DNA, 315 bp, Zea mays
  unsure (1)..(315): unsure at all n locations
  Clone ID: MRT4577_124431C.1
tattagcgagtagctcgaatcgctcgatgtcaaccangatctangagtgctactcnaacanctaaatcaatcagctagaggccctgatgcatggcctatcgtatgactcgactactagaatgtattactagtctatcgtgggctatcgatacgatattangatgtatatcgtctgatatgctctgcgtattctctccacgactaatctctgatgtagtgataactatgagagatcttcagtgactactatatgtctaccggtactgcatggcaactatgcggctatagagagatacagacgtgcaagtatcatgg

SEQ ID NO: 26780 - DNA, 650 bp, Zea mays
  unsure (1)..(650): unsure at all n locations
  Clone ID: MRT4577_124432C.1
ccggccgggatagtttcctcctccaatccactcccccccgcctctactacccctgtcacaggcgccgcacaggtgactccgtcggcgcgcgatgactacgtgcgttcaagaagaaccggaagaagcgcggccacgtgtccgccgcgtacggccgcatcgtgaaggaccggaagccatcgcggagcgtcgcgggaacgccggtgggatgcaccaccaccgcatcctcttcgacagtaccatcccggctacttcggtaaggtcggaatgcgctacttccacgagctccgcaacaaggtctactgccccgcggttaacattgatcgtctttggtctatggtggccgccgaaaaggcggcggaaggcggcggcgacaaagtcccgcagatcgacgtcacgcagctcggctacttcattgtgctcgggaagggggtgctgccgtccaagcccatcgtcgtcttagccaagctcatctcctaggtcggcgactagaagatcaaagacgccggtggcgccgttgtgctcaccgcctaggtttcaggacttattcgcctctaggtgttgagatctatatctggactagagnngctttcttgtctcacctagttgcgttatgaagacgtattatttagatccattgctccttcctgtta

SEQ ID NO: 26781 - DNA, 714 bp, Zea mays
  Clone ID: MRT4577_124433C.1
aaaaaaaagatccattcgagcttcacaaaactagtactccaacgtgtgctcctttctcaagtgtgtgtgtccgtgagctagctttagtattagtgcagtttagctactagctagttggaacttacgttgacactgctcttcttctgcgtgttgtgcactagtgtgtccgtgtgctagtagcctacagcaccgtttctctcgggaggcatttcatatacacgcgattaacacgtacagtacagacatccttcaacgacaatcatggtcggcgctcaagagcaagggctgaagctgctggtgccgcggagcggcgtgagcatatacgccatccgcgtccagatggcgcttgccatgaagggtctggcttacgactacctccccgaggaccccaggtgcaagagcgacctcctcctcgcgtccaatcccgtgcacaagacactgcccgtcctcatccacagcggcaggcccgtctgcgagtcgctcatcatcgtggagtaccttgacgatgcattccccggcaacggcgcgtccatcctccccgccgacccctaccgccgcgccgtcgcccgcttctgggccgcctatgtcgacaacaagatgttcccttcgtgcatcggcattctcaatacggcgaatcagcaggagagagctgacaaggtggaggagaccttggcagctttcgggctcctagaggccgccttggcggagtgctcc

SEQ ID NO: 26782 - DNA, 346 bp, Zea mays
  Clone ID: MRT4577_124434C.1
acgaggagcagcaccctggtacttttactattttctcctgcgaccaccataagcgccgctgggtaatacatcaatcatcacttgatcagcaccagatcatagatctcagcgtatgacgtggatatcgcgaatagcggcggctgcagacaaacgatcaccatgctactgtcgctgatcatcgttcagaacatggagccgtactaccaagatctgtggtaactgttcttcatgcagtcgagcgacagctactacacgcgcgccatcaaccggttggtggagacactgtactatatgaacttcctcaacaagacgtgcatcaacgtcctgctcgactacatcgaggtca

SEQ ID NO: 26783 - DNA, 370 bp, Zea mays
  Clone ID: MRT4577_124435C.1
gttattatcttttaattttttttttttttttggttttttttttttttttttttttttggaaccgagaaaatttatcttaaatgggtttttataggttcatgaatacccttaagagccttaccgggcatttttgggggaagggacaacgggggggtttgtaataactgaaaaaaatttaaggggaaataaaacatggattgggatgcatgcatgcttcctcccacggttagatatggggagggggggtgctttattttttgggaaaatttgacaagaacaatttgaaattcagcatgctttggttttttaggggcaagggacaaaagtcccggcactgtaaccagggaagcagttgagcccccaggccaaa

SEQ ID NO: 26784 - DNA, 342 bp, Zea mays
  Clone ID: MRT4577_124436C.1
cgcgtccgcacgtgctcatcgtcctcgcggctgccgttgcggtcctggccgcgcggcctgcgtctgcggtctgtttagccgctgccgtggccgatatctgcattaagactccgacccccgacctgtgcaccaggactgcagggaagcacgccaacaagtacaaggtggtggactcggagactgtgctagagatgcaagtcgactcgttcaagaagcgcgtgaaagcagcgcggatgctcgtcaaggaggaagtcaagactgccgcgactcccgaagcgcgtaaggcgctgaaccttttcaagacctactacctggactccgccgacaacctcggcgcctgca

SEQ ID NO: 26785 - DNA, 655 bp, Zea mays
  Clone ID: MRT4577_124437C.1
ttgttaatatattgtcaatctagataatgactctattaatataactattgagagacatagcgtaagccaaataacccgtttatatcagtcaactatattttgtgatcatttgcttatttatttcttcaggttttcatagcgaaagacatgcattcctcccttctcactcctcactttttttgtttggtttctcatattttttggctttttgtttagctgtatttgtgatagttggaacgggccttcaccgtgttatcatgcattactaatcctatttgtttatctagattgcatatgaagggcatcgcattgatagatttagtgtgttgtcccatggctgtagcacacttaactcgataccttgtttccctctccactcctttcagtatatccacatcaaaggtgaacaatgtaatggtcctcattgtaggggtaaaacattctgccatgcttttttgtctaagtattacgtgttgtacacaaaatcagatatctgatgcaatgcttgagtcgtagtttaagtaagtcaatctagcagcttcctacatgttttgctattacacatccatgattagattatatctcaattggtcataaaatggaattgctgataattttcaacgaaagcgaacaaaatagcgaacctgaacattgc

SEQ ID NO: 26786 - DNA, 1157 bp, Zea mays
  Clone ID: MRT4577_124438C.1
cctcgcggcgttggattgaatggcgacgacgatgaacgtcagggcgctgtgcctggccgtcgcgaccgtcttctgcgtgctctcacggcagagcctcgccgccggcgagggctccaaggaggcggacaggatcgccacgctgcctgcgcagccacccgattgtcgacgccgggccgacccactccggagggcgattgggatcctcgaggccggccggggcactttccatcgaaagcccccggcctctctctctctctcgcctcgcggcgttggattgaatggcgacgaccatgaacgtcagggcgctgtgcctggccgtcgcgaccgtcttctgcgtgctctcacggcagagcctcgccgccggcgagggctccaaggaggcggacaggatcgccgcgctgcctgggcagccaccggacgcggccgtccagcagtactccggctacgtcagcctcgatgacaaggccggcaagtcgctcttctactacttcgtggaggccaccgctgatccggctacgaaaccgcttcttctctggctcaatggagggcctggctgctcttcgtttggaatcggagcattccaggagataggtcctttccgcgtggacacggacggcaagaccctctgcaatttcaaatatgcctggaacacagtggcgaacgtgctgtacctggagagccccgtgggcgtgggcttctcgtacgccgccaacacgggcgtgtacaaggtgatgggcgacaacatgaccgcggacgactcgctccagttcctgctcaagtggctggaccgcttcccggagtacaagggccgcgacttcttcatcgccggcgagagctacgccggccactacgtcccggagctcgccgcctccatcctcgccgccaataacgcgcggcccaaggacatggcctccgtcaacctcaagggaatcgcgatcgggaacgccatcctggagttcgcggcggagcagagcgcgttgtacgagtacttgtggcagcacgcgttcctgtcggacacggggcacacgctcatcggctacgctgttcataatttggtatatttgccattccgctattgtgtactctttggcatacatacaataattaaaatggcgttgcgtggctctcatacgaaaaaaaaaaaaaaaaaagcggcc

SEQ ID NO: 26787 - DNA, 1815 bp, Zea mays
  Clone ID: MRT4577_124439C.1
aattcggcacgaggctcctccacttcttctccccgtcccatttcttaactccccgagcccccaaaatcacgcacccagagaggggagaggcggagtgacgggggagaggcggaggccacgccccaaacccaaaccctagccacacgcgacgccgatgggatgcgcgcagggcaagtgctgcctgccgcggcacccgaggaggggctccgccgccgtcggcgggcgcggcggcgccacgcttggccgcgccgcggtgcccggggccgggctggtgctggagtacgccgcgttggccgtggcggggctctacccagactccccggccagggagtcccaggacacgcacctcgtcgccacgcgcttcgcgggggatcctgacctccacctcttcgccgtcttcgacggccacggcgctgccggagcctcctgcgccgggttcgcgcgggacgcgctcccgcgcctcctcctcgcctcgctcgccgcgggcccagccgccgcgttccgggacgccatgctggccgccaacgccgagatgcatgcggcgcccggcgtcgacgactccatgagcgggaccaccgccgtggccgccctcgtcgccggcggcgcgctccacgttgccaacgtcggcgactcgcgcgccgtcgccggtgtctggcgcgccggccggctcgtcgccgaggacctctcctgggaccagaccccgttccgcgccgacgagcgcgcgcgcgtcaaagcctgtggcgcccgcgtcatgtccgtcgagcaggtggagggcatgcgcgatcccgaggacgtgggctggacgcccaacgagggggacccgccacgcgtctgggcgcgcgacgcactctacccaggcaccgccttcacccgcagcctcggggacctcgccgccgaggccgtcggggtcatcgccgagccggaggtgaagagcgtcgagatcactccatcgcacctcttcttcgttgtcgccagcgatggcgtgttcgagttcctctccagccaggaagttgttgacagggttgccatgtatcaagatcctcgggatgcctgctcagcaatcgctgctgagtcatacaaactatggcttgagcatgaaaacaggacagatgatataacaataatcattgtgcatattcgagacatggaaaatgcagggagtgacaaagcggactatggtagcatcggagcatcaatagctgggcagacaatacagtcagagatacctgtatttgtacaaccagaagcaagtaacatgaacagatctgctgctaccggaatgcgatcaccgtcttttggctctccaactgaacggagcctctcatgtgttgctccttctcctacggatcctttgttgatacatggcagagtatcagatgcttccaagcctgggcaaagtgagcagcgagctgcatcacaaccaccggtacaaacttggcatcaaatagacggggttactactgagctggagcggtctatgcagcaaagcatccttccaacctcctgctgaaagtagagaatgcgagttgaatgacaaaaagaggcctcgagataacccaccgccatcttggagctactaaccgtaccatggatgcgatgtttgccagcagcaaatctcgtgctgttgctcgtgttttggtagagcacctgctgctgccgacgatgcgaggttcctgatcctgtgtgggatcatctaaccatgggctgagtggaattgagttattctccgtttcatttgtactttgtttacttttcacaagatatagattaattctaagttgatgcctgtcgaggtatcagtatcatttgagacgc

SEQ ID NO: 26788 - DNA, 323 bp, Zea mays
  Clone ID: MRT4577_12443C.1
gatagatcaagcagctcttatttgagcccaagagagtgatggtgacatacattgccactatagctagctcaaggggagctagtgcgtgccaccccctgaccgccgtgcgccgggccctatgtgagatcagcaggccaacaatcttgaggcccaggttgttatgcgcgaactctatgaggccatcgacctccctggcgacgaagaacccacaaacggcagagtcggcataactgatgccctgcctgctcctgcaccccgagaaccgcgagcggctggaacgcacagcgcgccggagtttgtcgcggctaatgcgcccaccctgg

SEQ ID NO: 26789 - DNA, 523 bp, Zea mays
  Clone ID: MRT4577_124440C.1
agcgtccggcgtatccggcctctgtccctccggggtgacagtggtcggcaggcggtggcgcggtcgtcgggcgcctaggctggctgcaggactctggttagagacgagcaggcgggcaggccggcactagccgtgcgctccgccggggtcccggaacgggcctatctgggtgctcgtgagcacccctcattcggggctattcggcatgcttacctgagaattcagcatcaatccctgagtcctagcatctgacccggagagcctgcgaccgaacgtgcaggcggagatgatgcactgcctgtgggcgatgctccgcgcggagggcatgtcgatgccggagctcatgacgaagaacggagcgctcaacacgcccttctggtacacggacgaacagccgtaagacttgaccctcacgcatcacgcctgttcatgatcgagctaatcctaatctctgtggccctgcggccgacgatggactgacatgctcaagcccaactgtctcatcaccgtccccatattctgc

SEQ ID NO: 26790 - DNA, 427 bp, Zea mays
  Clone ID: MRT4577_124441C.1
ctactgagctggagcggtctatgcagcaaagcatccttccaacctcctgctgaaagtggaggtgaatcttcaaaatccttgctgatgaatgagaaattgcaaacaggctcacataagttcgcacattctattgcagaatgcgagttgaatgacaaaaagaggcctcgagataacccaccgccatcttggagctactaaccgtaccatggatgcgatgtttgccagcagcaaatctcgtgctgttgctcgtgttttggtagagcacctgctgctgccgacgatgcgaggttcctgatcctgtgttggatcatctaaccatgggctgagtggaattgagttattctccgtttcatttgtactttgtttccttttcacaagatatagattaattctaagttgatgcctgtcgaggtatcagtatcatttg

SEQ ID NO: 26791 - DNA, 172 bp, Zea mays
  unsure (1)..(172): unsure at all n locations
  Clone ID: MRT4577_124442C.1
ggtacctcgaggccggcctggccgggcatatcatcggcggccccagccccggcaccggtggatctgctcggggcccaccagcccctcaacctgcaaggcttcagcttctcttccatggtcggatcggagtccgacgaccagcccgaggacgnagntttgtagggagagaaag

SEQ ID NO: 26792 - DNA, 424 bp, Zea mays
  Clone ID: MRT4577_124443C.1
ggggaaaaaaaaaaaaaggggccaaaatcattgggaattgggaaaaaaaaggggggggaaaaaaaaaaaaaatcccttttccggggagggaaaacaaaaaaaaaggggcccccctggaaccttaaaaaaggggccccccttgaaccccctaaaaaaggggtaaaaaactttaaaaaaaactttttgaaacccttgagggaaagggggcccccaggggaccaaacagttttttcaggggcaaaagaaaaaaggcccgccaaaaagggcccccccccaaggaagggccccggggaaagccaaactggaaaggggaaaaagggtttaaccaccggggccgggttaacccagggggcttgaaagaaccacaaaggggcccagggggccccattctttttgggggggcgggaaaaaaaaaccctgtaaa

SEQ ID NO: 26793 - DNA, 406 bp, Zea mays
  Clone ID: MRT4577_124444C.1
aaagggcaaggaacacaattattcctggggggtggaacaaaagtttacatcaggggcacaaaccggaaaaccagggggggctcaaatgcatccgggacaccaaaaggggaccgggggggcctcccttacttgccggggaccaaattgggggggtaagcccaaacctttttgttgacggggtccgcaatgggggcaaggagggttttgagggggcccttcccggggacaaagggctggacaaaaaaaccgaacatggaaaacaaggggaggggggcggtcttgagcccctttaccctgggctcaaaaaaaggcccgggggtctcggggaggccccccggggtaaaactgccccccggaaaaaagaggggggaaaaccctccccagggggccccccgggaatgggtaa

SEQ ID NO: 26794 - DNA, 366 bp, Zea mays
  unsure (1)..(366): unsure at all n locations
  Clone ID: MRT4577_124445C.1
gactacccaacatctcagaagggagggagcgaccctcnncacctggtggcctcnncgctctcagggnnngtggcctgcccagattttctgtagaatgacaaattgacctgtgcaagacactatcacctttggagggtggaggaggctctgacanccattgaccaatgtgaagtgccaagtatccccaggacaaggagtgtgcattccctctcagaccccagcagcgtctggaaatctttgctggcatagcagctcggaaggatggtgcgcacctctcgcgcgactacgaacattcagaagtgagaagtacccttcacgcttgttctccgtcctcagggtgtggtatgcaagatctttgcgaagacc

SEQ ID NO: 26795 - DNA, 1208 bp, Zea mays
  Clone ID: MRT4577_124446C.1
ttgtaggccgaagttagggatacaagaagttaactcagggcagaaatctctccgatacaggcaaagaagagcttctctactgaagtctggacattgttttgtctcttttagtatgcgactctgcacttcgatggtccatggggtccaaaaggaaatacaagcttttgctcataggaggttcacagatcgagtcaacatttcaagtgaacccacatcttagccaacagcaggtagactctttaagaatctggagtagcttttgctggtgagccgaagtgatagactcaaagatgtttagatcagattgtcaagtgctccgaaattagtcagttctattctatcatctcaggccagagatgtttttccctttgctgctaaggctcttctgttgaagcagtatggtttccttcggcctttccctcgccagctgcaagcacagtggtcaaccctttgtacttgctgtgcgtccgacgatgccaatggctgccgccaagcaagaaggcagaaaagaaggatgctgccatggaggagggagaaaaggggactgaatcactgaactgagtttcaatctggtaatgtcgactaggtacccgcgatgaggatgatagcaggaagcagcccccatcttttacagcttggaacttcatgagcagctatcggatggctctgagcagttggcgtcttggcgagatgggttccgtaccagtggggttaaaaaaaaccaaaaatggaagcaagtatgatgtagcacggcagtgacggcacggcacggatgaaaagcgaacgtgggagagcagtagcaccaacaaggataacttggacagcaaactgccacatcacaggtgttgttcacacctcagccttcgccatcatcgtcatggatcacaatacaaagatacccgtaccatcacaaatcttgaaggacaaaagcgttacctgttcatgttctaaaccacgtgtattttcattagtaatcagcaatccacctagcaggtggtataaatagctgtgtaaaatactgttttataatgtggattacaatgtttgtagagttaagtttaaaacataacttagatgtttgtagagtgaagtttaaaacataacttaggagaggtggtgggatagcaagtctgctggatatagtgtaagactaacgggttgtttggtttgctacctaagacgccacaacgtgtctaacttttctatct

SEQ ID NO: 26796 - DNA, 1393 bp, Zea mays
  Clone ID: MRT4577_124447C.1
cctaaccatatgaatgctccatgtatgaaaaatggaatatgctcaaaaggttatccaaaagattttcaagaagaaacaacaatagatgggaatggtttcacagtttatagaagaagaaacaatggtcgtttcattgacaaaggaggtgttaggttcgataacagatcagtagtaccaactaaccttttgctgctgaaaagattccaagctcatataaatgttgaatggtgcaacaaaagtatttttataaaatatcttttcaaatatgtcactaagggaccggatcgtagcaaaatctttcttaaaagagtacaggctggcgaagatgttccatataatgaacaaacagatgcaaaggatgaaatcaaagagtatcttgatactagatatatttgtgacaaggatgcttgctggcgagtgtttggtttcgaaattcataggcattatcctgctgtggaaagaatgcctgttcacttgcccaatcaaaattacattacttatacctctcgatcaaatatggcacaagtgctatcagaggctttccttcgtcaaacaatgctaactgaatggttcgtttgcaactcaaataacccaaacgctagagatctaacatattgtgagttcccatcgaaatggaggtgggacgagaaaacacggagttggagaccaagactagctagagacagcaaaataggacgcctatattatgttcatccatcagcaggcgaaagatattacctaaggatgttattactggcagtaaaaggtgcatgtagctatgaatgtcttaggagttttaataatactgtatttccaagctttaaaaaggcatgtcaagcacgtggtcttcttggtgacgacaaagaatggtttgatgcttttgacgaagcagcaagttgggccacgggtccacaactacgccagttgtttgttacaatgctcctatattgtcaaattagcgacgaacgttcattttttgacaaaatttggaagttaatggtcgacgacattgaatataatatacaaaaagcaatgaattgtcctacctatcaaatggcagatgatgatctcagaaatgaattgctagagaggttaactgttctcttcaacaaaagtggtgggaatatacatgacttcaacttacctcaaaaggtacatacaacacaacaagacctaaatcgtttaattgaagaggaaacttcttatgatcctgaaattcttcacaatgaatctcaaagcctcatctcacagcttaatattgatcagttaaatgccttcaataaaattgttgaatgtgtcctttgtgatcgacctggattgtattttgtttctggatatggtggcactggaaaaacttacttatggaatgcaattgtagcatacttaagatctc

SEQ ID NO: 26797 - DNA, 546 bp, Zea mays
  Clone ID: MRT4577_124448C.1
accctaacaaaatcttttttgtttataaacatgccctggtatattacctttaggcgggcaaagaccgttacccaaggaggaaagaaaatacatctcaaaaccgggagggatcggacaaaaacggtacaaaaaagcacggcccaccaatgtccaacagagagagagcgaagccaaattgaacacgaaaagtagtaccccgggggcatagcacgagctctagaagtccagaacgaaacggagcctggtgtttctcggccggaaaaccaaaccaaaaccggctggaccgtctataaacactgtccgagacgggattgatccctcctataaccacccggtaccattaagccgacaacctttgcttttattgagtcaccaataaagatcggcatgaacatgttcataggaatttcctaccggaacatgaaagccgctcacattttcatataataaaccctcttaaagcttaaagtttaaagcgtggtgggtcttaactgtgagaaaattcactccaatcacaaagccctaactgtcctttttcaaaaccat

SEQ ID NO: 26798 - DNA, 417 bp, Zea mays
  Clone ID: MRT4577_124449C.1
cgttctttttttttttatataaacgatatacaggaaatgtatagacaattcactcaaccgacacaaccaaataatttttagctcttttacaacactcaacaactttttcatagcagacagatcacatcagctgtggttcaaaacaaacagctgtacaaaacacattctaaaaagaaagatcagggactgctgacacgcaaccttacccaggagggattaccctgttacggacgcctacatcttcccccggcgatgctcaacgccaagcgagggagagaccaacgtgagaaagtctccacactctggtagggcttcagttgtgttcccattcatggtaataaagagatgaggccataaggggtagggtatattttggtagtttccacgggctggaaataagagaggtaaaaggaaacc

SEQ ID NO: 26799 - DNA, 1053 bp, Zea mays
  Clone ID: MRT4577_12444C.1
aattcggcacgaggctcccccacccttcctctccctccatctctccgcggcagttcgagcttggcgggggaaccgtacccggcaagcgcgcggacgccccccgggtgggggcgacagccagcggcgcgatgcccgcgtggtggccccgcagcaagctgaggtctaggtcgaaggccaagccgggcgccgggtccgtctccgcagcttcgtccccgcgcaagtccgcggacctcgagtcgccctccccgtccccgtcgccgacgccgacgccgacgccgcgggacaggaaggcgcacagcctcgacttccctggcgcggccgccgcgcgcggccggccagccggcgccgcgccggggcatgggtcggtagggtacaagctcccgacgcccgtggaggcggtggagcctgtcgggactctgtacgaggtggtgctggcggcggcggcggccgccgctgccggtgacggctgctcgtcgcggaggagtccagcgtgtgctcgccggggtcgttggacgagccgcactaccaacatgggtttaggcccatggatccggttgcttttgcgagggaaagaaatatgacttctgattcagataggatcttaaatgaagacaagcgtttcatgtcttgtagtatgccacgggagaatcagaagttctttgatgttcctgcggctagtgttagagaacttcatttgcaaagtgatggaccttcaacgagtgaagccaattgttcacgtggaagaatgatatctggagatctttttgctccaagaacaaggagtctctctcctatcccaaaaggccatgcattcgctgtgagcaatggaaattctagagaatttggtttcagcccgaggtcaccagtaagaaagatggatggtttgaggagcccaccacatcccttgcctcttcctccagcttctggtgcatgctcgcctcttcatccagcttctggtgcatgctcgcctcttcatccagcttctggtgcttgctcacctcttcttccaacccacagtttttgctcgcctcttctttcgtctcccagttcctg

SEQ ID NO: 26800 - DNA, 393 bp, Zea mays
  unsure (1)..(393): unsure at all n locations
  Clone ID: MRT4577_124451C.1
tttnnnnnntttttttttttttttttttttttttttttttttttttttttttttttttttttttttttttttaaaacaaaaaaaacactccccgtgccattttttcaacccccccccaatacttttttttttggggcacatagaaaatgacaatggcgcccgactcataatggctcacccccaaaggcaagcgttggggttggcccacaattttacgacctaaattataatctccaggggccaaaggttttgctcctgctccggccccgggaagtttacggacaccgggccagggtcgattttggagctgaaccccacttccgccggggccaatagggacctcgccggctcccggggggggttagggccgaaccgaccgcacccgggaaccct

SEQ ID NO: 26801 - DNA, 760 bp, Zea mays
  Clone ID: MRT4577_124452C.1
gccggccgggctggggatactgcattttattccggctcagctcagtcaatcgaggttatgttgctttgggtttgttttccctgaaaaacatgctgggtttcagcaacctcacgcggtttcaaacaaacaaaggaaaacacaaccgattttaagtctctatatataggtggttcgaggtgatcagcagaaccacacaggcaaagatggcgagcgtacacaaggccaccacccttgttctcatgttctgcctgctagcgctggggagagcggagtacctcaagtacaaggacccgaagcagcccgtcgctgttcgcatcaaggacctgctgggtcggatgactctcgccgaaaagatcggccagatgacgcagatcgagagggaaaacgccacggccgacgcgctggccaaatacttcataggtagcgtgctcagcggcggaggcagcgtgcctgctcctcaggcgtctgcccaggcttgggccgccatggtgaccgagatgcagaagggcgctctttctacgcgtctgggtataccgatcatctacggtatcgatgcagtgcatgggcacaacaacgtctacaaagctactatcttccctcacaacgtcgggcttggagctaccagggaccctgacctcgttaagagaattggagaagcaactgctcttgaagttagagctactggaattccttacgcctttgctccctgtatagcgggttgtagagatccaagatggggaacgctgctatgagagctaca

SEQ ID NO: 26802 - DNA, 910 bp, Zea mays
  Clone ID: MRT4577_124453C.1
cctcgaggccggccggggaagagggtaaactgagaaggttcgcgagagcaggttacttgcgggctgcgccgcgccgcgccgcgccgcctttgccccttcccttccatcgcgacttgcgaggggagagtttgggactcgctgcccctcttcgcttcccaccaacctcctcttctccgtcgattccattcgattcgaattcgcgatcgcccaccaccgcaccaagcgccaaaccctgaccctgatcctaatcctgtgcgccacaatggcggagtcggagaagggcgccgccgcaaccaccaccgccgccgccgagcctgggtccggcccgccgcacgaggacgaggatgcgctgctcgcccgtgcccacactgtcatctccaggatcctcgaccgcgagctcgaccccaaccctcgcctcctccacaccctcgccaccatgtgcgagctccacgaagccagatatcttgagttacatgcagctgacccaacgttcaataacacgaacacaaggagcacatttacaattgggaagctggccaatttgctccgggtgcatagcctattctggagttctttatgcaccaatttagttttattttgcccgttaattgtatgactaagcgatgttacttcaaacctatcaacaggacaatgacgagttttatcatgtgagtggaagtaacttcgtaaaaataaacccatactctctgagatgctgagaacctgcgcgattgggttgcttgctatggcattgtgcagtggtgggcaattggtagaggatgtcttgactttgggggtgccagtaaagctcatgcactttctgcgcataagagtccttggtgatgcctcatcttctcaaagagatgctaatcatccacaagacaccaaatatcctcgagggggggcccgg

SEQ ID NO: 26803 - DNA, 598 bp, Zea mays
  unsure (1)..(598): unsure at all n locations
  Clone ID: MRT4577_124454C.1
gaggagggctttcacaaaaaacagggganggnaggagccgngaggaacgacggggnagacggcgctttcgcccaccagggagagnggagcancancacccggcccacgggccagagcaagaggagccaccgcggcgacagcgggggccagggcgcccncaacaccgacgacgccgncagcgaggccgccagcaaggnccccggccccggcaccaccggcgacgagcagacgcgcaggcgggagcncgccgccgncgccggccagacggcccacgaaaccaccggcggaggggcgacggctccggaaggattttttttggccaccccccccccgaaggaacagaaacagacggacccacccaacaaaggacgaggacccacacagcaaacgcagaaggacaactacaggcccgccgggcaagcgccgaaccagaaccgggcgggcgacccggacccgggggcgagagaccccgcggcagcccncaagacgggcatccggancgggaagacgccgcagncgcccaagcccncgggccacgccgggacgaccggcgactggaggccccccgccaacgaacgcggcgcggggaggctccccg

SEQ ID NO: 26804 - DNA, 573 bp, Zea mays
  Clone ID: MRT4577_124455C.1
cgggcccccccctcggccaacaaaaaaaaaaaaccaccacccaccgacaccaagcactacaaacagcacagcaccaacaccagaggcccggttgaagcatattgtcacacacactgtggcaccaacacatagacctggcaactaggtgatcactctaaaaaacacatagtggccgtaatacccatatggacatggatctgtaaaacatctagtttacgcttggcatgtttaagatccaaaaaaacaatctagcagatcaccgggtgtttaaaattcttataaacgattttttgttgtgagctctcttagggtttggtaaaaaaatttgcgattacatacttaaacccaaaccttgactattttacagcagcactgaatccccctttattatcccaacttgtaaactaactaacatttgatctaaaaggagtccttgaccttatttcttgaaccttctcccattttatcacgcaatagaatccttactgttccttgatcaggcaaggctattatttatgtcgagctttttcctttactgatctgaagctggatgatccatcataacaaacttga

SEQ ID NO: 26805 - DNA, 270 bp, Zea mays
  Clone ID: MRT4577_124456C.1
atgagccgactccgcctcaacgtcacagtcgatcgtgcggccctaagcgagggataccccttcagcgtaaccgttttgcatattagcccctgggaaatccaagttggtatacacttttacttagtaattgctaataaaattttgaccaacttattaaaagcaaagctccttggtaagccttacacttcacatgagcccccaccgtgtgacattaaagaaacggatgctgtcggatttacttacattggtggtcaaaggcgaaggcagtag

SEQ ID NO: 26806 - DNA, 359 bp, Zea mays
  Clone ID: MRT4577_124457C.1
agcgcacacacacacaaccagatgtgcggcaaatgcacccgacgacaccgtgcccttcaagatgcagatctttatgaaaaccacgactggctagactatcaccctcctagtggtggcgattgacaccattgacaaccctaagggcaagcatccatggcacggagcgcattggcggagaccatcagggtctcatctttggtggcaaacatcatgaggtcggccgcacgctcgctgtctacaacatccataaggagagtaccctacaccttgtgctccgtgttaagtcatgcatgcatatctttttgcaaaccctgacctggaagtgtatcaccctcgatggggccgagtactgcgccatt

SEQ ID NO: 26807 - DNA, 2059 bp, Zea mays
  Clone ID: MRT4577_124458C.1
aattaaaaaatgaggtcccagttccacacttccacccacctccagagccaaaagagccggcggtggccggcagccaaaacccacgtcggatttcgccgccgccgccaggagctaggggacaaggcaacgccggcaggtgcaacatttatgcgtgtaccgcccggcagccacgcgtacacttctgccgcagagctaaacgcgccactccgcggcaagctgatctgctgctcccaagtcccaccagccaccgcaccgagtgccaatggcgactgcagcgacttctacgccggcggcgtggcagtctactctggtctactctggtctacgccatgcagggacctgcccgtgcttctcgcccagccccgctcgctccccgtcatcgtcacctacaggccgaattgggagggaggccagtacgcaggcgaagatgagccacggtttgaggcgcttctactggcaatggagctgggagctgaatatgtcgatgtcgagttcaaggtcgccgacaaatttatgaagtatttgtctgggaagaaacctcaaaactgtaagctcatcatttcagcatacgactacaagaccactccatcggtacatgaacttctgaatttagtagctcagatacgagcaacgggggctgacattgtgaaaattgaaaccactgctgctgacattgtagacacatcaagaatgtttcaagtacttgcacattgccatgaaaagcaggtgcctatcattgggctggtgaggaaagaacatggttttatttctcgtattatttgcgcaaaatatggcggataccttacttttgcatctcttgaaaatggaaaagaatctaccactgagcagccgacagtagcagacttgataaataagtacaaaatacggcagataggcccagatactaaggtctttggtattattggaaatccagttagccacagtaaaagcccaattgtgcaaaatcaagctttcagatcagtgggtttcgatgctgtgtttttgccatttttgtcagatgacttggttcagtttctttataccttctcagcaccagattatgccggcttcagttgcacaatgccccataaagaaactgcacttaggtgctgtgacgatgtcgaccctatcgccagggacatcggagctattaatacaatcattagaagacctgatggaaaacttgtaggctacaatacagattattctggtgctatttctgctattgaggatggaataagagcatcacaaccaacagattcgatcacttcaccactggctggaagactttttgttgttattggggctggtggtgcaggaaaagcactagcatatggtgcaaaagagaagggagcaagagttgtgattgcaaaccgtacatttgcacgagctcaagaactcgcccacatcattggcgggactgctttgaccctgtcagagttggaaagctaccatccggagaaagggatgattcttgcaaacgcgacatctgtggggatgcatccaaacgtcgatgaaacccctttatctaagcacgcgctaaaatcctatgccgttgtcttcgacgcggtcttcgtgccgagagagaccagacttctccgagaagctgcagtgtgtggagccacagtcatcgacggtttggagatgctaatcaggctagtgatggttcagtttaagcttttcacggggggcatgacagctccagaaaggttgatgcgtgaggctatcctgacgaagacacattgagggtttgttcaaataacaagatctctacactacagatgtccctgcaaaaaaaaaggtcccagttgtacatgtcctccttcttgcttcttcctcggcgtctgggaagcaccgtatctcattttcaacccaagcaaggagaggaggtgcaggttcgggcctcgtcctgcttctcctgctgcctgccatgatgcagtgtcgtttgttgttcagtagacggtatgctctagttcaacagagtaaagatgttttgttttctcaggttgcaaaacaacgaatggtcatgttcaataaggaatggaatgtgatttggatc

SEQ ID NO: 26808 - DNA, 968 bp, Zea mays
  Clone ID: MRT4577_124459C.1
cattgggaacctcgaggccggccggggttcttcttccgctgcagatagcacgagacacaggcgaggatcccaagacccgagccgtgtaggctgctgcagtctcttcctccccggcaagccgcggcggtcgttgccccggcccctcatataatatagtcgccgcctccttgtcaccgccgattcgattaggttgatacagggaggagtcgcgaggggacgtagatgccgacgctgacaaagctgtacagcatgaaggaggctgccctccacaacacgcccgacgactgctgggtcgtcgtcgacggcaagatttatgatgtgaccaagtatttggaggaccatcctgggggcgccgatgttctgctcgaagcaaccggtaaggatgctacagaagaatttgacgatgcagggcacagcaagagtgccaaggagctaatgcaggactacttcgttggggagttggactcggacccaactcctgagattcctgagatggaggttttcagaaaggaacaggacacgggatttgccaggaagcttatggacgacgtggtgcaatattggtcgatcccagccgctgtaattgggatatcagctgttgttgccatattgtatgcgcgaaggaagtgaaagccgatgtgcatgtgccgagcttgggcagatgaccccttttagagggatcagcccatggtgcatggatatatcatatatcatatctcctgtccagaaccaaattacattatgatgttcgattcttaaacacttaatggcaaacatttgccggattgatggcattattttgtcgacacgacaatcaattgatggatttattacaattagaaaaaaaaaaaaaaaaaaaaaaaaaaaaaatgttccattttacctttgattcgggtgaacgccatggattggcattcaatctttaacttttatctcaactgaattcggtgttaaaaaaaaaaaaaaaa

SEQ ID NO: 26809 - DNA, 624 bp, Zea mays
  unsure (1)..(624): unsure at all n locations
  Clone ID: MRT4577_12445C.1
ccggccgggaaggattgttccagacctatagtcgccctcgtcaccgatgcatgcatacactctgctcttggtgtcattcttccttccctgtgagcgatctcaccagccggaggcggtctgctcgactctatcatcaccactcatctctcccacgtcttacgaagcccacatcgtataatgtcgcctgcgtacactgtgcggataaccggacatcttcccgtctcttccgtgacattcggctcctccaccgcatcacagtcggatgggaccttccactcgctggatgtctcataaatcaccccctcggactacgcgcacccctatgctgaaaatatcacagaacttcacagcgatattgaaggatctgtagacccatccataccaatatggactactcactacatcgagctgaagaggtcatcagcgcatcagcagccacacacttctcgacatttattacttccgtgacatgtagacgctgcaacgctttcgcccacggagaaatcgcaccgcaaaagtgtggcgactatatgaacaagacgaacccgcagcacattgggatctcgcatgagacttattctgttcctgcgcgggcgtacgngaacatctacgtcattgccaccc

SEQ ID NO: 26810 - DNA, 1205 bp, Zea mays
  Clone ID: MRT4577_124460C.1
aattcggcacgaggatcgtgctgcgggggtcggccgggctcctctcccagtccggcaaaatacacctcccgctctcgcgtcccgttcctgtcccgtcgtgacaagcacaaacacgtagtaggcagcaaaccgaagcggcgcgtgcccgtcccgcgatggccacggcggccgcggccaggcgccaccaccagcacctttttctgcagcgccggggtgcccagcgggggcggcgccgcgggagcgggatacggtgctcgtcgccggcgcaggagttcgcgtcgctggccgcggtgttccggcggcggctggtggtcggggccacgccggcggccaccgcggcggtggcggctgggttcggcggcgtcaccagcttcctgctgggcctgtcgccggagctcggccgctcgctccgcctcgacgtgctctaccccgtcggcggcttcacgcgctgcctcgactccgacaatgggttcgaattcatctatccatcaagttgggttggagaccagacgctactgtacagagaagcgaagaaggcagaattgcaaagatcgctagacccaccgccactgccaaacggaggatctccatctgggcctcggaacatcagtgaacctgtggcagcatttggcccccctggatccaatggggagctcaacgtcagtgtcatcgtctccactgtgccacgagacttctcgatcgagacgttcggcagcccaaaagacgtgggggaagtggtgctcagaaggatcgcgaggacgaggcgaagcccggacatcaacgctacccttatcgacgccgccgtgagagaggacgcgggcagggtgaagtactacaagctggagttccgagtcgagagcccttctttccggcggcacaacgtcgcggtctgctgcgtgagggacggcaggctctacaccatgaacgcgcaggcaccggagtcggcgtggaaggcggtccagaaggagttcttggcaatggcggactcgttcggcttagttagcgacgcttgattgacatgcagttaggcacgcagttttggttttgtacccctgaccctgagcgttttgtcccctagtttgcaaggtctcggtaacgagatgccgtggtttggtgtagagaaactaggacatgatgtttctgtttctgttagactaccttacaatcatgtctgaagtttttttttgaatccgttggatttgaaa

SEQ ID NO: 26811 - DNA, 225 bp, Zea mays
  Clone ID: MRT4577_124461C.1
gcaacatctactagggttcaaccagctaggtggtgtgagccctgctctcttggggatgcaacacacaggtggtgtcgatgtaccagcacgctgcgcctaacactgggaccctcttacaagtgcaacaatcggtgccattcaaccaacttgctgtgtcaaacccaggagcgttgtgccaacaccccatcattggtggagccctcttttagatgttttatgagatat

SEQ ID NO: 26812 - DNA, 274 bp, Zea mays
  Clone ID: MRT4577_124462C.1
caattgacaccatgcatttttattgcttgaccacaagaaccatattctattatatggtccaaccggaacacgagaccgcactagtgtgcctcacgacacatagcagacagcgtggggtccttgctgactggtgctacacgaacacgacacactaacgaccacagattaaagctaaccggtcgaagggatgtgattagtgcagctataacacagtcccttattaaaagaaaaaaccctgacaaagaatccgaccatataaaacactgctagcatg

SEQ ID NO: 26813 - DNA, 353 bp, Zea mays
  unsure (1)..(353): unsure at all n locations
  Clone ID: MRT4577_124463C.1
acccnntgnccttatacccctttttttttttttttttttttgggtgatttttgagggatcatcccggggtattcccccacaaaggcagacacaaacaaaaccaagggtcaaaaacccttaaggacccaaacacggcaaccaccaatcaatcaaaaacttaattgaaagaattttcagggttcagagaagggaaccatttcaggaacccggccccaggggaaccaccgggggggggaaaccaccaagaaagcgggagggtttgcactgttaacccgggaggaacaaaatcacgggacaaacaaaactgccgggccacaagctggcccaaattaaacccaaataaacgggagacc

SEQ ID NO: 26814 - DNA, 319 bp, Zea mays
  Clone ID: MRT4577_124464C.1
tagactgactccactgagcgccgataaggtgcgggcggcagtagagaaccacgtggctctcagttacttcggccctatcaagccggacgacatgaagacacgcatcgccatcctccccacgcgtgctctcagtcatcgacaggggcatgcaggtcctcaactacaccagggccgacgacgggcagatgtacttcgtcgctcccggagcgccctgcgtggcgaacctcgtcaaggtcgtcgcaacgcggcgctagtctgtgtccatcatggaagatgagcgagcgcattttcccggcctgcgttgccctccaccgtcgcg

SEQ ID NO: 26815 - DNA, 321 bp, Zea mays
  Clone ID: MRT4577_124465C.1
ctcgaggccggccgggaattatttcaagcgaggaacgcgcccgagaatttccctgagattggctccggcaagggcgggcgctcctacgtcttccgcctcccgacaggcaactacgctcgcacccgcctgtgccctcccctctcccaaccccatttctatgtactctctccactctgctaccaaaatcctgctcgcgccaccacgacacccgcctgctccacaaccgcacagcatcacggtgtgcttgatggtaccggcagcaacacctcgctagagcaatatgcatgactcacaatcccccaaacaagaaaaggccacgtt

SEQ ID NO: 26816 - DNA, 344 bp, Zea mays
  Clone ID: MRT4577_124466C.1
gagtcttctagtcggcggccgccctttatctataactgggattttttcatgtttttttttttttttgctttacatttttttgcccaacggaacagggacagttcaatcacacacattcctataaaggtgtgggttgacaaaacatacgacaaccaaattttaatttgggggaacaaaaccaaaagtattagccaaaatgcctggtcccacaaaggaacaaaaaaatttggcgaaccgacacactcctgggataaattggctactgacgatcagcgatgtttcacatcgccactgccaattcaagggctgtttggagacataaaagcgctcgtaaggaggggacg

SEQ ID NO: 26817 - DNA, 123 bp, Zea mays
  Clone ID: MRT4577_124467C.1
accgtgggtgaattagagagactatatcaaaagatgagaggtacatgttgaggaaagttggattgaaaatgaaacattttctgctgcaaggtcgaagggaagttttgggggcaacaattaaaa

SEQ ID NO: 26818 - DNA, 263 bp, Zea mays
  Clone ID: MRT4577_124468C.1
ccggccggggtagtaaagttccgaccatccctgcaaattaccgcgatggctcccaagatcctagtcatccttgtgttcctcgccgtggcctcaccggaggcattggcgggaatcgatgaaagagagaggcaggtcacgaaatcaacgtacacatcctgacggagcacaaggacgacaaggatgtggacgacctgaaggtgacgctacgcacgctcgccggcaccaccaacggactgagcatcaagtagtataaagaatccaag

SEQ ID NO: 26819 - DNA, 297 bp, Zea mays
  Clone ID: MRT4577_124469C.1
ttcacgtaccaaccatatgaccctacacacatctagtgaactgaagaaagacacaagaggggatagcgaacattcctactgcctatggtatacctacatatatatatctgaacaagtcccaccggcgagcacacacactgccacccgttcacagcaggcgaacctatcaatatattccgattccatactactgataccgaactaggcttacactacctcaagaaaaaatctagctccactcctttttcggatgcaatcatagctgacgttgatatgtacaagtttgatccatgcaaa

SEQ ID NO: 26820 - DNA, 572 bp, Zea mays
  unsure (1)..(572): unsure at all n locations
  Clone ID: MRT4577_12446C.1
acgacttagtatagggaaagctggcccttctttcggtcgctctataactagagganccnccngcttgatttgagcaagggnnccacacgcgggngctttgaattctttttttgccatcactntctgcctcatttgccacttcactccgggaggaggaagagagccaagataaccccttctacttcaactctgacaactcctggaacactctattcaaaaaccaatatggtcacattcgtgtcctccagaggttcgaccaacaatccaaacgacttcagaatcttgaagactaccgtcttgtggagttcaggtccaaacctgaaaccctccttcttcctcagcaggctgatgctgagttactcctagttgtccgtagtgggagcgccatactcgtcttggtgaaacctgatgatcgcagagagtacttcttccttactagcgataacccgatattctctgatcaccagaaaatccctgcaggaaccattttctatttggttaaccctgatcccaaagaggatctcagaataatccaactcgccatgcccgttaacaaccctcagattcatgac

SEQ ID NO: 26821 - DNA, 285 bp, Zea mays
  Clone ID: MRT4577_124470C.1
attttcttttttgcgcccgtgcatgacctcgcgtcagcactgaacaaccgggttggaacgaatctaaacacgggctcattgacagcaaaatggaagacggttcaaaaaaacacaacacgagcgcacagacgctcaccggttatatcccggcaaactacaggggaaaaagaaatattgggtgctttacgagaaacgcagggcggactgattggccagggacgttttgcctggcctcccccccgccctgggaattggagcccatgatgccacctccccagttatgac

SEQ ID NO: 26822 - DNA, 459 bp, Zea mays
  Clone ID: MRT4577_124471C.1
gccggccgggtcgggaaccttatcggtctatctatccttctatccccattcccatcccgaggcaggagaaggcaaggatgctgctcctgagctcccgtcccatctccaagaccaagcacttcctcgccatcccgctcccgccccgcgacactcgccgcaagtctcagctcctaccgccgctccagtccgacgacgaccaggagccgtcctcgcgagagtgattgattgtgattgattgctgcctgtctatggcttcgtcgtaagctcctctccatcagaggtgctgcttcccaattccaaatgcgaatccatgtgtgtttttgtcagactatttcctttttcttttcgatcaaaggctttagcccaatttcatccgaaatagctgttgcccttgttggaactgatccatggatatagctgcatattcccattcaaaaaaaaaaaaaaaaaaggccccta

SEQ ID NO: 26823 - DNA, 542 bp, Zea mays
  Clone ID: MRT4577_124472C.1
ctgacgcgtgggctcgaagcagcgagcggaagacccattgagagagagctcgaataagctgcagaagagagtgactgctctgaacagagacctgcctccccgtgatgagcagttcatttcagattatgagcagttgcgcatgcagtttcctgacgctgagcagttgcaggcaatcacagaatcagttctcatctcctttgtgctgcagtgcagtagccacgcaccacaatctgagttcttgctctttgctacacggtgcctatgtgctcgaggccatcttagatgggatagcctccttccatctctgcttaatactgtttcctccatagaggcacctatggtgcaaggagtttctgtgactggtggtggttctgtaaccccttcgtcagctattacaatgccaaatgctccaaactttcaccaatcaaacccagcctcacctttgtcagtaatgaacaccataggatctcctactcagtctggtattgaccaacctgtaggtgcatatgtgtcgccaatcaaggcagctgaattctccagct

SEQ ID NO: 26824 - DNA, 1078 bp, Zea mays
  Clone ID: MRT4577_124473C.1
gggtacctcgaggccggccgggatattggttagagaatcattctatggtttttttaatccagtctcacctcatgtcgtccatgtcttctaaataccctggcacaaatattcaatgcagaacattgacagacaacatcatcgttggtgtgtcgaaaggattcgataagaagcttcagctagtgggcgtcgggtatcgtgcggcggtggagggcaacgatctcgtgatgaacctgggattctcccaccctgttcggatggccattcctgaaggcctggcggtcaaggtggaggagaacacaaggatcaccgtgagcggctatgacaagagcgcgatcggtcagtttgctgctaccataaagaagtggaggccacctgagccatacaagggaaagggtatcagatatatatcggtttatctatccttctatccccattcccatcccgagacaggagagggcaaggatgctgctcctgagctcccccttcgtgtccgtgtcgccgccgccgccgccgctcagctcccatggcgctcgcccggcgctgcggatcgaggcggccaggcagctgacggggcgggtggtgacgaccaaggcgaacaagacggtcggggtggaggtggtgcccctgcctccacaccccaagtacaagcgccgggagcgcatcaagaagaagtaccaggcgcacgaccccgacaaccagttcaagatcggcgacgtcgtcgagctccaaccctcccgtcccatctccaagaccaagccttcctcgccatcccgctcccgccccgacactcgccagtctcagctcctaccgccgctccagtccgacgacgaccaggagccgtcctcgcgattgattattgattgctgcctgtctatggcttcgtcgaagctcctctccatcgctgcttcccaattccaaatgcgaatccattttttctatttcctttttcttttcgatcaaaggctttagcccaatttcatccgagtgttgcccggaactgatccagattgctgcatattcccaaaaaaaaaaaaaaaaaagatgctgcgcgagctggactgcgtgttcccggagatcc

SEQ ID NO: 26825 - DNA, 246 bp, Zea mays
  Clone ID: MRT4577_124474C.1
ccggatttatctccccttttcctttgctgcataacaacagtagcgccgccttactgccgtgagagagcgatagtgggccttcgccgagactatgagccacacgggacaagttggtcaggggtctgcaccaagctagtgcgaaaccaaccgcggtagttgctggcggaatcgatggctggccaacccttaattgctcgtcggagccacaaaaccgccgtggatccgcctggcaccgaggccgacctc

SEQ ID NO: 26826 - DNA, 1140 bp, Zea mays
  Clone ID: MRT4577_124475C.1
cattgggtacctcgaggccggccgggctcgaccgggcgagcatggccctggcattgggtacctcgaggccggccgggaaccttatcggtttatctatccttctatccccattcccatcccgagacaggagagggcaaggatgctgctcctgagctcccccttcgtgtccgtgtcgccgccgccgccgccgctcagctcccatggcgctcgcccggcgctgcggatcgaggcggccaggcagctgacggggcgggtggtgacgaccaaggcgaacaagacggtcggggtggaggtggtgcgcctggctccacaccccaagtacaagcgccgggagcgcatcaagaagaagtaccaggcgcacgaccccgacaaccagttcaaggtcggcgacgtcgtcgagctccaaccctcccgtcccatctccaagaccaagcacttcctcgccatcccgctcccgccccgcgacactcgccgcaagtctcagctcctaccgccgctccagtccgacgacgaccaggagccgtcctcgcgagagtgattgattgtgattgattgctgcctgtctatggcttcgtcgtaagctcctctccatcagaggtgctgcttcccaattccaaatgcgaatccatgtgtgtttttgtcagactatttcctttttcttttcgatcaaaggctttagcccaatttcatccgaaatagctgttgcccttgttggaactgatccatggatatagctgcatattcccattctgatgtcgagaaaactattgaaatgcttattttgcctaatatacttaatttatattttttgaaaaaaaaaaaaaaaaagcggcccctagctacttctcggttgcgctcgaaatatttgagcagttggctagtttggactggctgcggagggacctgagcgtcatcggcttcgggctcatcggctggatggggccgtccagcgtcccggccatcaacggcaacagcctcacggggctcttcttctccagcatcttttttttgctgccccacttccccacgcccccgcccgtcacctcccagttctggctgtggctagtgacgaggcacctgggcctgctcatcgtgctcaccttcggtcagatcgcattcaaggtctggatcgaggactac

SEQ ID NO: 26827 - DNA, 346 bp, Zea mays
  Clone ID: MRT4577_124476C.1
accattcttaatcaatttagggttgggacattaactttttttttttgatattcaacaacaatttaccaccataaatcaaatactcccccattcttctgccgtaaataaagaacaattcttcaaaacaaaacaaggacattacaaaatttcccttgccattcaaaaaatgaccaacccaatattacaaacacttcacaaaatgcaccaggctctaccaatactcccaaaaaaaacgtccttgcacctaacctcacaaatatcaagccccccgcacccgaaaatccccctaaaaccattgcactccgatttccagccggcacaaaaaacgaacaattacgtaaacatg

SEQ ID NO: 26828 - DNA, 478 bp, Zea mays
  Clone ID: MRT4577_124477C.1
ggggaaaaaaccgggggctttccattggtaatagccgggaaaatattaccccaaaggggctaaaaactggaaccccctgaaacgaaaatcccgaacaaacttccggggaccgggcaaataaacacacaaccgaccacgggcggaaaataaaaacattaaaagggggggggggctaaccccccaaacccaaaagggggcggccctggggcttgagcccctaaaccaaatccatgggggggacggttttggggggggcgttctcggtgtaggggaccgggtcccggatgaccttttcaaggaaaaatttgaaccccccccgggtctcctcttaaatgaacccaaaaatgcccttgaccccccccctcctgggcaacctacggatcgccgggtttgggaagccctggatggtggcccccaacaccttgggggggggcttggggccccccttgcccaaccccttggcgcccttggcgggccc

SEQ ID NO: 26829 - DNA, 547 bp, Zea mays
  Clone ID: MRT4577_124478C.1
gaactaaaacccgcgcatctgtttcggccacgccgaggcggcggcggcggcggcgtcgaattgggcctgcgaggtggagcccgggccggtgaggcgctggaccagcgccatgaagtcccccggcttggtgtggatcaccttgggcgaggcgtcgtagatgatgaccggctgccgcgcctgctgctgctgctgctggtggtggtactggtgctgctgctgcgcggccggctgctgctgctggtggtgccgctgcggcgcgacgggcggcttcctgaccttgtgcgagtccttgctgacggcgagccgcggcgggcgcgggccctggagctgccggctccgcggcgacgagcggtcgcccgaggacgcatccatgtgcggggtttgcagcaggagggcggaagttgaggggagcgggaggaaacggcgagccggagctagaggacgctaagccgtacggcctttgtagctgcggcccggcgcaggaggggagagaggcgggtggaatggttcaactcgaggaggaagagagcgaggagcaggtctccat

SEQ ID NO: 26830 - DNA, 759 bp, Zea mays
  unsure (1)..(759): unsure at all n locations
  Clone ID: MRT4577_124479C.1
aattcgaattcaggacgaggggaaagccaaccaacaaacacaggtgagtggggcacgagcgcgctgagtggagcaagagagttggagcttggagcccctccagtgctaagctagggttccatccccaccagcgccgcccgctcccttcctccgtccgcatccggctgccatggtgaggaagaaaaggactggccctggagagagttctggggagacttctggagcgcctggtcagggctcctcacagcgtcctcaggcaacacaacagggtgcccgaggtggaggacaacaccaggtgcgtggtggatatccgggccatggagtgccgccttcagagcacccaggtggtgggccgcctgagtatcaaccacgtggctatcagggacgtggcgttccacctttacttcctggtggtgggccgcctgagcctcaaccgcgtggctaccagggacgcggtggataccagggccgtggcgggccaccttcacagcatcctggtggtgggccatcacctgggtctcagcctcgtggctaccagggacgtggtggtctgcgtcccagagggggagtgccgcagccataccgtggcgggcatgtgggagggtagtgttggaccaattgttccttcaggtccgtctagaccagttcccgagctgcaccaagccccagatgtccaacatcaagccccctgtggtggcagcaccatcaccaccgggagctggnctcgtnctcgcagcctgggatggggcgagtgagcac

SEQ ID NO: 26831 - DNA, 766 bp, Zea mays
  Clone ID: MRT4577_124480C.1
attctttattttattaaaaagtcaaacatattataatttgaaacacaaggaataatagtttataggaattgagctagtacaggcacttctgcagagcatggtattagcaaagtatgtgtgtggacgtataacaaaaaagaaaagaaaatagagaaaagctacatcatcatcctctctagatctttacacttgatatccacgatcatcacaaatttttcgtcatcgtcaacagctagatgcatcgtcctcccaccccggcccatgtctctctcgccacacagaaacgggagagatccggagagggaggacgagccaaaccaaaggctggttaatcaagtagtaaaacaagcagcagcgaccgcctcgacggacggaccgtaccgtgtcgtcaggcgcggaagcagccaacgaagcgcggcaggtggaggtggtgctggtgctggtgctgcgcggcggagctctcgatcggtgtcgcttgcttggttggtcgctgctcggttgcaagaagaacaaggggaagggacggactcgaggggctggtggttagaggcaggaagagaagggccacgggtcggagctggagatggcgaggcggaagacggtgaggggggagtcgcgtagggaggtgggcacgttggacatggccgcctactcctccactagtatgtctcttcgcaacaacgacgacgaagacgattcgggtctgccttgccttgtgtggactggagtcagtcggtttgctgttgtgaggagagctaggagcggt

SEQ ID NO: 26832 - DNA, 140 bp, Zea mays
  Clone ID: MRT4577_124481C.1
agccctggcgcaccgacctcggcggtcgcaccgtcggtgatcgcgagtactgccacgccatatttaccaagtacttcaccagccggttctggtcggaccagcggtttgccgggacgttcgtggtgcggcggccgtgctac

SEQ ID NO: 26833 - DNA, 1081 bp, Zea mays
  Clone ID: MRT4577_124482C.1
ctgtacagccaggtattagcaaagtgtatattggcgtacgtatagtacaagcaaagggaaaaaagaaaagctaaggttaattaaatgatgatgaacatcatcctctctagatctttacacttgagatcgaccatcatcacaaattttccgtcatcgtcaacacctggatgtcccatcccatgtctctcgccaccaaaccaagctagcttcaaaccaatacgtattcgtatcgatcaaccctcacaaataaagcatgcaacggcgggagagagaagggggaaaaggacgacgagccaaaccaaagtgctagttaatcaaccaaagcaagcaaccacctcgctcgacgcgcggcccgccgtcgatcaggcgcggaagcagccgacgaagcgcggcaggtgcaggtggtggtgctggtggtggtggtgcgcgccgccgccgccgccgccgccgcttgccagggcgccgtcgaggtccacgaggtgctgggcgcagctggtcccgcggaggtcctggccgatgaggtgctccacctggacgaagcggtcgacgcggcaggggatggcgagggcgccctggtgccggaagccgtactcgcgctcggcctcctccagcagcgcgccgaagagcgggtgcttgaggtggcccagcgggaccgcgaaccggcgctgctcctcgccctccaggcccacgcgcaccgtcacgcaccccttgggcgccaccgccgccagctgctgctgctgctgatgatgatgatgcctgccgggcatgatggtcaccaggaaggagctcggtgttctttttgcttgcttgtggtggttgctcgatcaggaaggaggacgaagaagccggccggccgggggctgatggtggttacaggcaggaagagaagggccaggggtcggagctggagatggcgaggcggaagacggtgagggaggaatcgcggagggaggtgggcacgttggacatggcctactcctccactttgtctcttctcaacgacgacgacggcggtgattcgggtcgggtctgcctctgcctcccttgtggattctgtttgtttgcggcgctcgagccgaat

SEQ ID NO: 26834 - DNA, 455 bp, Zea mays
  Clone ID: MRT4577_124483C.1
cctcctttttttttttttatagataaaaaaagtcaaacaaattatattttgaaaccgaaggagtaatagtttacaagaatagagctagcacaagtacttctgcagagcatggtattagcagagtaagtgttgacgtataaggaaatgaaaagaaaatagagaaaagctacatcatcatcctctctagatctttacacttgatatccacgatcatcacaaatttttcgccatcgtcaacagctagatgcatcgtcctcccaccctggcccatgtctctctcgccacagagcttcaagcagaaacgggagagatccggagagggaggacgagccacaccaaaggctggttaatcaagtagtaaaacaagcagcagcgaccgcctcgacggacggacggacggaccgtgtcgtaaggcgcggaagcagccaacctcgagccgaattccgagcttacgg

SEQ ID NO: 26835 - DNA, 1154 bp, Zea mays
  Clone ID: MRT4577_124484C.1
agcagtggtaacaacgcagagtacttttttttttttttttttttttttttttggaacacagggtataatagtttagtttataggaattgagctagtacaggcacttctgcagagcatggtattagcaaagtatgtgtgtggacgtataacaaaaaagaaaagaaaatagagaaaagctacatcatcatcctctctagatctttacacttgatatccacgatccccgcaaattttgcgtcatcaccaacagcttgatgcatcgtcctcccacccccacgtctctctcgccacagagcttcaaaccgatcgatcagccctcagaaacaggagagatccggagagggaggacgagccacaccaaaggctggttaatcaagtagtaaaacaagcagcagcgaccgcctcgacggacggaccgtaccgtgtcgtcaggcgcggaagcagccaacgaagcgcggcaggtggaggtggtgctggtgctggtgctgcgcggcggcgacggcggcgccgtcgaggtcgacgaggtggtgggcgcaggcgccgtggaggtcccggccgatgaggcgctcgagctggacgaagcggtcgacgcggcaggggatggcgagggcgccctggtgccggaagccgtactcgcgctcggcctcctccagcagcgcgccgaagagcgggtgcttgaggtggcccagcggcaccgcgaaccggcgctgctcctccccctccaggcccacgcgcaccgtcacgcaccccttgggcgctgctgccgccgccgccgccgttgccgttgccgtcatgtgctgctggtgctttccgggcatgacaaggggagctctcgatctgtgtcccttgcttggctggtcgcttgctcggttgcaagaagaacaaggggaagggacggacttagcttgatcaggggctggtggtggttagaggcaggaagagaagggccacgggtcggagctggagatggcgaggcggaagacggtgaggggggagtcgcgtagggaggtgggcacgttggacatggccgcctactcctccactagtatgtctcttcacaacaacgacgacgaagacgattcgggtctgccttgccctgtgtggagtcggtcggtttgctgtttgtgaattgtgaggagagctaactggatcgc

SEQ ID NO: 26836 - DNA, 287 bp, Zea mays
  Clone ID: MRT4577_124485C.1
caggaaaaaaaaaactttgatgttacagtcggatataaagttttctctggggaaccaaccaagtcgatggcaatggccggtgcggggacgttctcgatcttgccggcctggaggtccttggggtattcggtatatgaggggatggcctcctcctcgaggtccccaacgacacggtgcgcgaacttgggggagatgaggtagccgaggcagtccgccttggggaagacgccctgcacggcgaggacaagcgcgcgctggtaccacttgggctcggccaccttcaggaa

SEQ ID NO: 26837 - DNA, 371 bp, Zea mays
  Clone ID: MRT4577_124486C.1
gtgggcatcccccatttgttgattaataaggacaagtcaaacgatgaaaggagaaccagtaacaagtttttggggtccaataaaaaaaaaaagaaggatgctgccggtaatcccacaaaaatacaacaagggcagagcacggggcactagcttttatggaaataacagggattattcaaaaaaaagggagaagcagtccttggcattagcactgaacaatcacaaaatatttttagccggggggccaaatcatttgcctgcctccgaggagatgaacggggaggggggaaacagatggacacccacttgggccgtctttgatgacgacgcgatagccatctgaaagtccttcctggtttccaacaacgtgg

SEQ ID NO: 26838 - DNA, 1114 bp, Zea mays
  Clone ID: MRT4577_124487C.1
ggccgcttttttttttttttttttcttttttttttttttttagcaaagtgtatattggcgtacgtagtacaagcaaaggaaaagaaaagttaaggttaattaaatgatgatgaacatcatcctctctagatctttacacttgcttgagatcgaccatcatcacaaattttccgtcatcgtcaacacctggatagatgtcccatcccatgtctctcgccaccaaactagcttcaaaccaatacgtattcgtatcgatcaaccctcacaaataaagcatgcaacggcgggagaaaagggggaaaggacgacgagccaaaccaaagtgctagttaatcaaccaaagcaagcaaccacctcgctcgacgcgcggcccgccgtcgatcaggcgcggaagcagccgacgaagcgcggcaggtgcaggtggtggtgctggtggtggtgcgcgccgccgcttgccagggcaccgtcgaggtccacgaggtgctgggcgcagctggtcccgtggaggtcctggccgatgaggtgctccacctggacgaagcggtcgacgcggcaggggatggcgagggcgccctggcgccggaagccgtactcgcgctcggcctcctccagcagcgcgccgaagagcgggtgcttgaggtggcccagcgggaccgcgaaccgccgctgctcctcgccctccaggcccacgcgcaccgttacgcaccccttgggcgccaccgccgccagctgctgctgctgctgatgattgctgatgcctgccgggcatgacaagcaccaggaaggagctcgctgttctttttgcttgcttggctggtcgcttgctcggtgaaagaagaacaaagggaagggacggacttagcttgatcaggggctggtggtggttagaggcaggaagagaagggccacgggtcggagctggagatggcgaggcggaagacggtgaggggggagtcgcgtagggaggtgggcacgttggacatggccgcctactcctccactagtatgtctcttcacaacaacgacgacgaagacgattcgggtctgccttgtgcccagtcggtttgctgtttatgaggagaagaaggagctaactgtgccgagccccggccgg

SEQ ID NO: 26839 - DNA, 643 bp, Zea mays
  Clone ID: MRT4577_124488C.1
gtcgaggtcgacgaggtggtgggcgcaggcgccgtggaggtcccggccgatgaggcgctcgagctggacgaagcggtcgacgcggcaggggatggcgagggcgccctggtgccggaagccgtactcgcgctcggcctcctccagcagcgcgccgaagagcgggtgcttgaggtggcccagcggcaccgcgaaccggcgctgctcctccccctccaggcccacgcgcaccgtcacgcaccccttgggcgctgccgctgccgccgccgccgccgtcgccgtcgtcatgtgctgctggtgctttccgggcatgacggtcgccagatcggtggagctctcgatcggtgtcgcttgcttggctggtcgctgctcggttgcaagaagaacaaggggaacggacggacttagtttgaggggctggtggtggttagaggcaggaagagaagggccacgggtcggagctggagatggcgaggcggaagacggtgaggggggagtcgcgtagggaggtgggcacgttggacatggccgcctactcctccactagtatgtctcttcacaacaacgacgacgaagacgattcgggtctgcctttgcccagtcggtttgctgtttgtaggagaagaagctagctgcggtgccgagc

SEQ ID NO: 26840 - DNA, 361 bp, Zea mays
  unsure (1)..(361): unsure at all n locations
  Clone ID: MRT4577_124489C.1
catcattaagtcaaagaacactgaacctgaanagggccactattgcagcatcaggatactcaacggtgtagcaatagctgcattgcgttattggggtagtagtgtggcattgttcgactgctgctcataaggtcatgtcttcttcttattttacttccttgtcagcgatggtgctcttgtgcctaccggcgggggcagtggcctcagcgcaactgtccacgacattctactccaggtcgtgtcccacagctctggccaccatcaagggcgacgtgacggtcgacgatgcacaggatgctcgcatggacaccttcctgctcaggctccactttcatgactgctttgtccaacgttgccatgg

SEQ ID NO: 26841 - DNA, 593 bp, Zea mays
  Clone ID: MRT4577_12448C.1
gggaggcgcagcacgaggaactcgttggtggcatcgagcgagcggtgcgagtggcacgagtgcgtgcgcgagcaagatcggagcttttccttcgtcgcagttgtggggaacgcggcgagcgcttccgtgatgggcgccggcgcccaggaggatgaggaggagataaccacggtggccgagggaggagtcggagaggaggagcaagcggcggctgagagaacaatggatggtgctgcatatcatgatcactggaacactctggctgggctatcagatggccgacgaccctgggcgtactatcctcaacccaacagtgataatggtatagctgagcagcaaggactccctctgggggcaatggcggttggaggggttgatagtgaaagccaacaacgaggatctctctccttattttatggaaacgggtctggaagacaaaggatcccaggtgttcctcctatggcaccacaatttacaagagcgcatggcaacataaacgatcagttccagcagacagctagcttatttgctgggtcacagcaatcaggaggtatgcgtccattgggagcagtagggccttccgtgccaccacc

SEQ ID NO: 26842 - DNA, 732 bp, Zea mays
  unsure (1)..(732): unsure at all n locations
  Clone ID: MRT4577_124490C.1
cattgggtacctcgaggccggccggggctcggcaccgcagctagctctcctcacaaacagcaaaccgactgactccagtccacacaaggcaaggcagacccgaatcgtcttcgtcgtcgttgttgcgaagagacatactagtggaggagtaggcggccatgtccaacgtgcccacctccctacgcgactcccccctcaccgtcttccgcctcgccatctccagctccgacccgtggcccttctcttcctgcctctaaccaccagcccctcgagtccgtcccttccccttgttcttcttgcaaccgagcagcgaccaaccaagcaagcgacaccgatcgagagctccaccgatctggcgaccgtcatgcccggaaagcaccagcagcacatgacggcacgganacgcgcgggcggcggcggcagcagcgcccaaggggtgcgtgacggtgcgcgtgggcctggagggggaggagcagcgccggttcgcggtgccgctgggccacctcaagcacccgctcttcggcgcgctgctggaggaggccgagcgcgagtacggcttccggcaccagggcgccctcgccatcccctgccgcgtcgaccgcttcgtccagctcgagcgcctcatcggccgggacctccacggngcctgcgcccaccacctcgtcgacctcgacgnnggcgccgcagccgccgggaagnaccaggaccaggaccacctccaactggcgagat

SEQ ID NO: 26843 - DNA, 452 bp, Zea mays
  Clone ID: MRT4577_124491C.1
taccgatgtggcctgaagggaatccgacaactgccgctatgcaggaaatcctctattggcaggttcgctcgtcatcatggtcgcattttcattgaaaatattctattggcctgaagggaatccgacaactgcctccatgcaggaaatcctctattggcaggggcataccatgtccatgatgtacaagattgtcgcagatgctctacgaaaggagggtttacatgaaaggcatccacaggagtatctgaacttctattgccttggcaaacgtgaagtctcgaatgaagttccgacgacaggcaattctaatgagaactctgcagtgcgtttgtcccagaaattcaagaggttcatgatctatgtgcactcaaaagggatgattgtggacgacgagtatgttctcatcggatcggccaacataaaccagagatccatggacggctcacgggaca

SEQ ID NO: 26844 - DNA, 266 bp, Zea mays
  Clone ID: MRT4577_124492C.1
gccaatcacaccaattatacattagtgacgacgcaggaatggagagtattttacagaactccgggggtctgagcacagctaaacttgcaactgctaggtgccacacagttaaaacttgcaacgtaatggggaaaacccatgctgtcagaaggtcaccacaatctttaccacctactctacgatcctactactgagcgctacaacctcatccgaagcatcttagaatggggaaaaaatggcaatagcgcccatcaaggagatctatg

SEQ ID NO: 26845 - DNA, 296 bp, Zea mays
  Clone ID: MRT4577_124493C.1
ccggccgggacaaggccgaaaggcgggcagctcgatacgatggcgcttgcccacgctgcccttcgctactcctcttggcgtagaccgtggccgccttcgtcataggtgagcatcagtctcatcgacacattcatctgtacgtgcacgagaggtacatcgcgacgacacagccagggccggcgggcgggctagagtcacctgtggcggccaactcgggagtcggtagcatggacgtggggcgccacgagagatggagagcatcccatcggttggggcaaggtgctcgactggatcgg

SEQ ID NO: 26846 - DNA, 281 bp, Zea mays
  Clone ID: MRT4577_124494C.1
tcgcggaatccgaccccgagcaagaagccaggaaccagctcaaagttattcgtccaagaaccccaccccacccccacaacacatagaaatttcgtcttggagagccaccaatggcttgttccactgcatctttagcggcgatgctgctggcgttcgcgctgatgttccaggcctgcgtcgcggggaggaggaggctcaccgcgctcgcgtacgtgtgggtgggcaacccggcgtcgcagagcacccggacactgggtgcgacagggggagcgtggaggacc

SEQ ID NO: 26847 - DNA, 177 bp, Zea mays
  Clone ID: MRT4577_124495C.1
actaccattgtgaacaaaccacgaaggcgtgccttatcagctgaaagttcaacagcgggactttattggtggttttgctgcataaaggctgaagcggccactgtaactgatgggtgcccaggcttcaaacactgtatcagcggccaatggactgctagcggccacaattggcttccc

SEQ ID NO: 26848 - DNA, 151 bp, Zea mays
  Clone ID: MRT4577_124496C.1
caacgcgctctgttatggcacattaagtgcgtagggcgtgtggttctccaaagattcgagctttaactactacaacaacttttgcttcctacaatcaattttgttgttttaagtatccttgctgcttatcttcatcaccatctattttttt

SEQ ID NO: 26849 - DNA, 183 bp, Zea mays
  Clone ID: MRT4577_124497C.1
ctcacgcgtgcgcccactggtacgttcacgcgtacgcccactcgttcgtcgaccggtggctcggcgaggagggcagctatctagcttagtacgtgtactggtccaacggccgtgagacctagaaccccatcgtctacaacaagcatttctctttgaagaacttattgaagctgtgcggcaggc

SEQ ID NO: 26850 - DNA, 303 bp, Zea mays
  Clone ID: MRT4577_124498C.1
aggagaaccactgaggcttggtcactgagtggagggaagtgtggcacctgagtgtctgtcttgggagctgcaggctctcagcaggtagtagtgggtggttagcaggtggtggtgccaggatggagagccaagcctagctctccagtgcctgtgctctctgctagtaccccacaccacctcctacaggccaaagtggaacagtagtgggcctttgctcctcgattccctagcctccagcgccagcctttcctaatccctcaatgtactattcctattagtcaatgtgtggcagagagatgttca

SEQ ID NO: 26851 - DNA, 607 bp, Zea mays
  Clone ID: MRT4577_124499C.1
tttccgcccgttttttcccctcccggggttttttttattaagccccaacaccctttatttttttggcaaaaaaaagtttttgtccttccctggaaaaagtttttccccccgggatttgcgggttccccccgggggcttttatcccccttccccctaaaatttttggtgcccaaagcaaaaaaggggggggtaacccaaaacggtgggtttctcctcccccccgttaatggggcttaaaacccggccctggggaaagccttccaaggggccccttttttaacccccccttcccggaaccctggggtttccccgggtttttcgggccggttccctggagggccccacctttcccctttggggggggtttttaattttggcccattcatgggccaaggtgtttcctgggggaaaaattttttccctttcatttccccccatttttagccggttatttaatttttaaccccggggttccctttgggggggcccccccttattattttgggcccccttccctttttcattggtgtatcccgctgtccctttttttttatatctccccccccggtggggggtttttttttttccccccggtgttttttttccc

SEQ ID NO: 26852 - DNA, 588 bp, Zea mays
  unsure (1)..(588): unsure at all n locations
  Clone ID: MRT4577_1244C.1
caccagcgggttcaggggnagggagggggggggaggggggggggttaanatcaccacaccctcccctcacccctcctcctcatcggcctctctccctctctctctctccattgcactcgctctatactagggcctagggaactagcaattgagctatgaaattgttgcttgaggtgcagcgggggggggcactgctacaaacaagctgatcagctgatgcccgggggcttcaggactttgccaagagcgtatagttagtggggcttggattcttgggccggggctgccgccgccatgttcctgagatcgaagatccaggagatgatcctgcggaggagatcgaggtcgatgaacagcgccggcgcgcagaggggccacgtccccgatcaagccccgagctcgtcgaccggtccgtgcgacgatgacagtggccggcgccggcggcagcaggagcgcgggtgcgcgtgccctgttcgcctccccgaggctgctgcactcgtcctccctgcccgccggcgccggcgccggcgtcntggccttcgccaggagccccgcgggggagcccgagcccgagacgggctcctccct

SEQ ID NO: 26853 - DNA, 248 bp, Zea mays
  unsure (1)..(248): unsure at all n locations
  Clone ID: MRT4577_124500C.1
gcggatcttactagacacaacgagttctagcatcttggtcattcagcaataatgatggtcggccggttgataaattatgngggcagaaatataatgccacccttcatgctgatggttcgattcttgggccgcttacaaatcttcactatgctgggcttaacttgccagtttggcttataccatctttagttcacgctatagagttatcaaccacagactcaattcattttctgaagcaatggttgact

SEQ ID NO: 26854 - DNA, 323 bp, Zea mays
  Clone ID: MRT4577_124501C.1
cacgcctgcgtgtaccgggcccctaattacacggtcgacctagtcgttctttaaaaaaaaaaaacttggcccatagcttgagattttgtatactgttcagctgttttatcataaaccaagcttaatctactggtttatagctcgagggaacttgatcgaccacctctaacatatgttggtacctatgcttcggctctactttctgtggggtgagccttaaccctcatctggagaagggaccgaagacatactgccttagacttgaccattccatctggatccacatacctggcaatgctgtccaatggatgctgcatgcgatc

SEQ ID NO: 26855 - DNA, 395 bp, Zea mays
  unsure (1)..(395): unsure at all n locations
  Clone ID: MRT4577_124502C.1
ggggggggggggtgtttaatttttttttggggggtttttttttttttttaaccaaaaggatccacaacttataggatgacccaagcaagaatcagagtatcttcttacagagattgcgaaagaaaaaaaaaacaaaagcccattgggggggggggggggggtttttttaacccaaaaaaccacctnanattttttccaaccaaaaaaaatccaaaaaacacaaaccatccatttttnnaattcaaatnaaacttttcatcaaacaannaaattcttcccccaaaaactctttttttcaacaaactttncttccctaaaaattttcccccccatctcattttttccattacccataccccttcaaaacanncttcaacattnccctatcctcttcc

SEQ ID NO: 26856 - DNA, 353 bp, Zea mays
  Clone ID: MRT4577_124503C.1
tgatgaacttggacgctgttggcgtgcgatctgtacgccaatcactagtgtggtaccgtcttgtggtgctctctgtgaaggtgatctggacgcaggaatgacaccttgttacgtgctggccgagtcaatctgatcgcgaggccgcggaccgtccgagcccaaaactggaccgcccgtcacttttagtgttcaactgacgccttttaggagtgtttggttgaggagccaagtagaacggagctgttctattcctgattctaggaacggagccgctctgttctgtgtttggtaatctggaacggagcggctctgttttttgtttggttgcagagtgaacggaacggagcgtgact

SEQ ID NO: 26857 - DNA, 164 bp, Zea mays
  unsure (1)..(164): unsure at all n locations
  Clone ID: MRT4577_124504C.1
tataagccggcgccccttnnnttttttttttttttaaacgaatttgttgttttttgtggcaactttttagccaaagtgttccatttctgatagaagacggggccaaccatgttttcagtcattcacccacgtcttacaaacaggggttatccacacgctccaaa

SEQ ID NO: 26858 - DNA, 1195 bp, Zea mays
  Clone ID: MRT4577_124505C.1
aacaagtcaagctgctagacagtcagcgtcatactgattattacaagaacaacattggcgcgagacggaaacgcttcctgtttcagaagatataaacagctcagggcttgcaatcaactgttcagaatttttttttttggaattttgccacttgaaacatctgccgtccaacgctacttatgcacggaaacaagtgactggacgcgtacatttccaccttgcaataccaaaggcaagcgcgtgcgacaggcttcaccttcaccaacctgcagctgggtccacgggctggcggcgcgcgtcgtttgcctcgcgtcgccgagctgcggccaggcccgaccggttggactccacggcgctgtcgggtagtggtcggtcgagcgggagcggggacaggacctggccgcgccagccttcttcccgcggcgccggccggacaccgagcctacgggacgcctggcgcacgtcggtgccgccgagcacctgctggacgaaggagagctccaggcggtcgaggaacgtcgcgtgccgctcctccgtccacccctcgccgcgcgccagcgccgccagatcgtccatcgggtagatcggcaccctcaacggcctgccgaggggttgatgtcggcaatcatacacatctgccgtccaacgctacttatgcacggaaacaagtgactggacgcgtacatttccaccttgcaataccaaaggcaagcgcgtgcgacaggcttcaccttcaccaacctgcagggctgggtcgacgggctggcggcgcgcgtcgtttgcctcgcgtcgccgagctgcggccgggcccgaccggttggactcaacggcgctgtcgggtagtggtcggtcgagcgggagcgggagcgggagcggggacaggacctggccgcgccagacttcttcccgcggcgccggccggcggccgagcctacgggacgcctggcgcacgtcggtgccgccgagcacctgctggacgaaggagagctccaggcggtcgaggaacgtcgcgtgccgctcctccgtccccccctcgccgcgcgccagcgccgccagatcgtccatcgggtagatcggctcgcacaccggcctgccgagggtgtggatgacgcacggttccgccgcttgtacttaccttgccgctggagaatgtgtaccacggcaggcgggatatccggccggcctcgaggtaccc

SEQ ID NO: 26859 - DNA, 130 bp, Zea mays
  Clone ID: MRT4577_124506C.1
agatatattaaattcaaaaggcgaacattcaaggggtaattggaactctattataaactaggccttatatgattactgtctatttcagggctgaaacagataaaggcttgagtcttaggcatgatgaaaa

SEQ ID NO: 26860 - DNA, 461 bp, Zea mays
  Clone ID: MRT4577_124507C.1
ataaaaaaaaaaaaaaaaaaaaaaaaaaaaaaaaaaaaaaaaaaaaaattaaacctaaaaacaaaaacaaaactaagggcaagtttgtgcctaaatccgtttcccctcttgggggggaacccccttggggtcgattcccctggtttccctttccggcgggcgtctttcgggcccttttccccctgggcccaattgcccttctggggagtgcctggcatttcccggcgccgtgcttttcaaacccctgccgttttcaacctttggggtcttcccgtttttgcccttttcgcccgtccctttttcccctgtgggcccattccggaggggcttccccccttggccctgcccttatgggccaaggctgttgggttttggggccccctttgcggtgggcttttaggggcccttcccgcggggccccccccctttttcccttccttattggccggttttttaggttt

SEQ ID NO: 26861 - DNA, 294 bp, Zea mays
  Clone ID: MRT4577_124508C.1
cacaaggtagatggcgaggcaacggcaaactggcggtctgctgcttcttggctgcagcaagtgctagcgctaaaagcctgcttcccagaagctttacactcagtcatggagcagtacatactagaacccgaatcaggtagagaagctacctctctgaactgaagcgtgcatttcttgcattgtgtgcctgactgcctgtccaggaccggaggtgctctctgatctgtagccaacaaagcaacaacctcgcgccgtcgcaagcagcatgaccaggccttgggcggggatgggaat

SEQ ID NO: 26862 - DNA, 199 bp, Zea mays
  Clone ID: MRT4577_124509C.1
aacaaagctcattacctaattaatatgttgtaaaaggcgcttacctgatcggttttgaaacttctgccccccctgcaaacaacatactgcacccagggttggcatagctttttaagagtactcatatctgagtaccatcacattgatggagcctattacatctaagtgctcacctgcatgcatcgtgaaagtataggca

SEQ ID NO: 26863 - DNA, 490 bp, Zea mays
  Clone ID: MRT4577_12450C.1
ccggccggcacacatgtatgacctctaattctcctcattctccaaggctgagcagcggacgacccattctgcgggtcaatcaccgcccacgcagaacccctgcgccctcccctgcttgcagactcggtctcctaactgcaccagcactcgctcgctcctttgcctgcgcggcgccagctgggagctggaaagctcaatggcaaagcccactgcaccgccgcatcttgtgcacactagtacagatgcgctgatcatgcttcacagtgtgatagtacaagaagccgcacggccatctaagactagagctgagatagatacctaccactatgtgcatacctgggaacccattatacaaatgtgccggaaccaccatatccccctcattgtattattggtacgggggaggagctctttggaccagatctgcagaggtcggaaaaggcgccaaatgtgactatcaagaggaaaacttccatcgacggttataaca

SEQ ID NO: 26864 - DNA, 795 bp, Zea mays
  Clone ID: MRT4577_124510C.1
acttgcgatcccctctcccgtctccaccccctactcctcccttccgccccgaaaatcccaaccatttctccgcctccgcctcggcacgcggccgccggcacacgctgcgcaggaagtgggaaagggcgcgatggaggatgactcgccagcgacgaagacggtgaagggcgccgtaacgggcctggccgcgggcaccatctggggcaccatcgtcgccacctggtacgacgtgccccgggtggagcgccacgtcgcgctcccgggcctcgtccggacgctcaagatgtgcggcagctacggggtcactttcgccgccgtcggagggctctacatcggcgtggagcagattgtgcagagccagcgcaagaagcgcgacttcgtcaacggagccatcggcgccttcgtctccggcgccaccgtttatggctacagaggaaagagcattaagtctgccctcatcggtggttctagcctggcattcacatctgccatcctggacgttggtggtaatactaccagagtggacaatggaaaagcgtaccatgcatacacaacggaaaagaagcccgagcctgcgcattgaccaaggttgtctacttgtagcacaaatcatgcaaaccagctcggtgaatttttgagctgatgcgtgctgttatgtctgttttgctgatgcacctagttcctttgcaaagctgtagtaacttgttttgctcgagggcaatgcaacagacctggaataaatatcttgctttattttgcttcatcgttgggtatgataataatcacatgtgacag

SEQ ID NO: 26865 - DNA, 395 bp, Zea mays
  Clone ID: MRT4577_124511C.1
ccggccggggtccgcgctggcccgggtgggagtgggacggttccacggcctttaaaaacgcgcgcgccgccttcaccgccgccgcgtatcaagtgagacagtaaccgcgtttaccttttgcattgcacgccctcgaatccattagcctccgtgcagccatggcgcgcctcatcagcctcgccgtcgccgtggcggtggccgtcctcgcgctagcgtccggcgcggcgtcgcaggcgccgggtccggcttcgtaggtggactgaacgttgacgctgcacgggctcgcgggctgatctgccttacgtgtaatactggagcaggttgtgctaacctacctgatacagctattgcacgtataatgtggttacaaggaggtcttttaaaaccatccggtt

SEQ ID NO: 26866 - DNA, 745 bp, Zea mays
  Clone ID: MRT4577_124512C.1
aggacaaaagggcactttggtcgtgctttattgaagcataatcattaaccaaagaatggatcataacacgtacggatctacggtactctattgcggcgcgtcgtgcacggtacacgtacacccaaatcagaccggccgctgcggctggctctggctgctccgcgcgcgctggcgttgctctgagcgcgcgcgcagcacggccagctgggactcccacacgtgcctcgcgaacgcgacgccgccggggctcgccacctccccgcctgtgcctccggctcccctcaggtcggcgttgtaccgaaccctccgcgccgggtcggagagcgtctcgtacgcgcgccgcagctcgaggaagagctccgtggactcggcgcacacgtccgggtggtgccgcagcgccagccgccggtacgcgcgcttgatctcctccgcgcccacgtcctccgcggccgggtgctgctccagggacagcaccgtgtagtagtccctccttgtgctgcccggagcccgtccggccgccgacgacgacgttgccgtcgcccttgctgtcacgttgcagcagcggcgcttccggccagggatgcaggcggtgttgttaaccgtggcagcgcatctcgcgatggggatggtgccggtgctcatggctaggtagctagctatatatatctgcctgaaatctgggcgcaacgacaattatgtttgcagctgattgatcaagagccggtcgaggtctctggtggagatc

SEQ ID NO: 26867 - DNA, 1029 bp, Zea mays
  Clone ID: MRT4577_124513C.1
tgggtacctcgaggccggccgggaaagatctactacccatcgagagatatcgggaatctgttgagctcagcagatctgatattaaatgtcttgatcctggagtatatttgtcatcaccagtgataaacttctacatccagtacgttaaaaggaacagactgtctagtgaagattttagagacaaattttacatatttaacacatatttttatggaaagcttgaagaagcattgtgtcggcaggatgagttctcaaagttgagaagatggtggaaaggtgtcaatatattaaataaagcatacataatcttgccgatccatgggatggcgcactggagcttggtaatcatttgcattcctgcaaaagagagtatttcaggaccaatcatacttcatctggactccctagcgatgcatcccagtactaagatcttgaacacagttgagatgtttaatcggagttggttcaaacctgaagaagcatctggtctaaggcggagaataagagagcttctgctggaagaatttgaaagtgccaagctggatgatgctttaccaggagcggatgcatctgagcgtgatgacagcataaatgatggagaattgaaaccagatgcatcttctgacagttcagaaatggtcgtagaggtggtaggagggttgggaggcactgacaagagcaatgaaggcatcaaggttgtagcatcagaagaggcaagtggagagtcaggagatgctggtaagagtaccgaaggtactgttgcagcatcagaagaaaagagtattgaaggcatcaatgttgcagaaccagaagatgcttgtgagagtataggaggcatctatgttgcagaatcagatgaagcaagtggggagtttggagagattggtaagaccaacaaaggcaccaaagttgcagtgtcagaaggagcaagtgtgtctggatacactgataagaatatggaagacatctctgactctgagggtgcagtattagacaaagctcccactagcagcttcagacgtggagaga

SEQ ID NO: 26868 - DNA, 830 bp, Zea mays
  Clone ID: MRT4577_124514C.1
ccacgcgtccttcctcgcgtccgcccacgcgtccgcggacgcgtgggtcgggattgtgggcgagtgcgtgcgttcgtgcagccacagacaggcgtccgggcaccatgtctttcaccggcacgcaggacaagtgcacggcgtgcgacaagaccgtccacttcatcgacctcctcacggccgacggcgccatctaccataagacatgcttcaagtgcagccactgcaaaggggtcctctcgatgtgcagctcttcaaggagaccgggagcttctccaagaacttcacgccaggtgacaagtcatcagacaagggtgaactgacaagggccccaagcaagctgtcgtctgcattttctggtacccaggataagtgcgcagcatgccagaaaacagtgtacccgctggagaagttaactctggaaggcgagtcctaccacaagagctgcttcaagtgctcgcacggcggctgcatcctgaccacctcctcttatgccgcgctcaacggcgtcttgtactacaagatccacttcgcgcagctgttcatggagaaggggagctacaaccacatgaacaagaagagcccgtcccaggaggttctgccggacgtggctgacgaggagcaaccgccggaaccagcgccaccgcaagatgagaaagaagaggacaactaggatcggagcgaccaacaaccacccatgcatatatatcacgcagactgaagtctacacgtttgccatatttctttacgacgacgacgcttctttattccctcctccttttttttcctcttatctctctgtgaaacccggtttatcatcacgctgcaatcaa

SEQ ID NO: 26869 - DNA, 480 bp, Zea mays
  Clone ID: MRT4577_124515C.1
gggactcgtggttcgtcgcaatactctatagtgagtcgtatcacacacgcacaccaaaacgtatacacacagcacacacacacaccctctctcttctctctgcttattctctggcaaccaaccagaccaacaatccatttctcagaaccctcctatcttcattctcattatcaaaccatgactacactcgccccactccggacgtccttcggaccccatgctcagcccacggcgaccaaggccgtccagtcgctcttcaacaccctccaccataccacctatgcctctcataagcgcttcctggcatcctcgtaccactcgacggccacgaccggctttgcgcgaccctgctcgatcctcaccccggcctcgacgatccgataccgtcaagagtccagcagcatgcagcttcatcagcaacagcaacaacaacaacaacaacaacgtcaacagagccaacgacgagccctctcgttgttt

SEQ ID NO: 26870 - DNA, 334 bp, Zea mays
  Clone ID: MRT4577_124516C.1
atctggagcttaccacctcactcgctctcgctcccaccctcgagttctcgctcgctcgagctgtggcggcgagatgcggaaacagatccctcccgtctcctgcctcgtactcctcgcggcggctttcgcgctgctcgccaaggcgtctgcagcgtcaccggcgcaggccgccgtcgcggtcaacgtcacgggcgtcctctcggcgttcccggacctcagcgacttcacgcggctgctggcgtccagccccgtgctggcggagctcgcagggcggtcatcgctgacgctgctggccgtgccaaacggcaacctcccgcagtcgccgtcggcgttc

SEQ ID NO: 26871 - DNA, 787 bp, Zea mays
  Clone ID: MRT4577_124517C.1
actcctatgggcgattggggccctcgaggccggccggcaggggaagcgatcgggattgtgggcgagtgcgtgcgttcgtgcagccacagacaggcgtccgggcaccatgtctttcaccggcacgcaggacaagtgcacggcgtgcgacaagaccgtccacttcatcgacctcctcacggccgacggcgccatctaccataagacatgcttcaagtgctcgcacggcggctgcatcctgaccacctcctcttatgccgcgctcaacggcgtcttgtactgcaagatccacttcgcgcagctgttcatggagaaggggagctacaaccacatgaacaagaagagcccgtcccaggaggttctgccggacgtggctgacgaggagcaaccgccggaaccagcgccaccgcaagatgagaaagaagaggacaactaggatcggagcgaccaacaaccacccatgcatatatatcacgcagactgaagtctacacgtttgccatatttctttacgacgacgacgcttctttattccctcctcccttttttttcctcttaatctctctgtgaacccggtttatcatcacgctgcaatcaagtgtgccagatgccttcgttacgtctgaggctcacgacaatggaaaatctgacatggacctgtcttagcctcgcggaaaaaaattgtaactttgtaagcagagccacttctttgaatatatgatcctaacaacgctgcccttaataccaaaaaaaaaaaaaaaaaataaaaaaaaataaaaaaatttgcggcc

SEQ ID NO: 26872 - DNA, 422 bp, Zea mays
  Clone ID: MRT4577_124518C.1
ccgctaaattttttttgatccaaaatatccgtgattttttgttaaagaaattaaaaagaaaaatcaaaaaaaatatcacaggatcctcatcctttcgccgccctttacctaggatatttctacgcagcagcttcttattttttggccgcacattgtcttcttccacacacggcagactccagctccctctgccgaccggaactccctgctcggcgttcctctgcttgtccatcttccctgtgcctagacatggcgcctccttttccttgctcctgctcggttccatccatggccggaaccctttcctaacgagctccccatggcgcccccgctcctggattgccccagttcgcggtgcccccttattccttgctccagatcgatggtccttgtttcccctggccaacgttcttcccagccat

SEQ ID NO: 26873 - DNA, 1652 bp, Zea mays
  unsure (1)..(1652): unsure at all n locations
  Clone ID: MRT4577_124519C.1
gaattgcgagcgagcgttcctctccgtccgcttccgccgtttgcccgtcgatcagttgttggctgccggccgggtactaccgcctgcacgagcagcggctagccacagcccacagacagacgacgtcaggtcttggcaggtgtgcaagcagacagagctcgctcggtcgcgtccgcccacgcgtccgcccacgcgtccgcccacgcgccgcccactcctcagggcgattgggttcctcgaggccggccggggagaagcgatcgggattgtgggcgagtgcgtgcgttcgtgcagccacagacaggcgtccgggcaccatgtctttcaccggcacgcaggacaagtgcacggcgtgcgacaagaccgtccacttcatcgacctcctcacggccgacggcgccatctaccataagacatgcttcaagtgcagccactgcaaaggggtcctctcgatgtgcagctactcctccatggacggtgtgctgtactgcaagacccacttcgagcagctcttcaaggagaccgggagcttctccaagaacttcacgccaggtggcaagtcatcagacaagggtgaactgacaagggccccaagcaagctgtcgtctgcattttctggtacccaggataagtgcgcagcatgccagaaaacagtgtacccgctggagaagttaactctggaaggcgagtcctaccacaagagctgcttcaagtgctcgcacggcggctgcatcctgaccacctcctcttatgccgcgctcaacggcgtcttgtactgcaagatccacttcgcgcagctgttcatggagaaggggagctacaaccacatgaacaagaagagcccgtcccaggaggttctgccggacgtggctgacgaggagcaaccgccggaaccagcgccaccgcaagatgagaaagaagaggacaactaggatcggagcgaccaacaaccacccatgcatatatatcacgcagactgaagtctacacgtttgccatatttctttacgacgacgacgcttctttattccctcctcccttttttttcctcttaatctctctgtgaacccggtttatcatcacgctgcaatcaagtgtgccagatgccttcgttacgtctgaggctcacgacaatggaaaatctgacatggacctgtcttagcctcgcggaaaaaaattgtaactttgtaagcagagccacttctttgaatatatgatcctaacaacgctgcccttaatacttaaaaaaaaaaaaaaaaaaaaaacccgcggccnnncatggggatcttggccaatgctaggcgcatactaaaagccttgccttgacaaccttttatggnnnnnnngccagatccctannnnnacaagccgcaggcgcggcttaaccgaaaagacccgcgcaatcggcgtagaacgtacaaaaattacccgccccccaaaaaaaaaaaaagccgtacgtgtctatctcccctaaaaaaacgaaccctgccccagtaagtagtcgtcccaagaaaatgttctttttttgtaaccttggcagcttggttcagtctgggattgtaacaagggcatgttgaattccctgttatgtattaaaaggctttggattcattcccattaaataagtaaatgggtgtaaacatttggcttccc

SEQ ID NO: 26874 - DNA, 2444 bp, Zea mays
  Clone ID: MRT4577_12451C.1
aattcggcacgagggtgggctacacatgtgaaactgctgcatatttttggctattacatgtttatgcccgttgggaacaattcttagctgcctgtgctcaaaatcaagacaaaccctcttttgtcaaagaccgcttccccttttcagagttcttttcagatactccgcagcctatttttaccggcgagtcatttgagatggatatgcatgcagcgaaaggttgtttcaaacatctttctacgatattccaagagttggaggagtgtagggcttttgagctacttaagtcaacagtggagcgagcaaactatctaatgactaaacaggccaagatagttgctatgacttgtactcatgcagcattgaagaggagggactttcttcaattaggtttcaaatttgacaatttgctgatggaagaaagtgcacaaatattggaaatagaaacttttataccgatgctgctgcagcggcaggaagatggccatgctcgtcttaaacgttgcattttaattggtgaccaccatcagttaccccctgttgttaagaacatggcttttcagaagtatagccacatggaccagagtctctttacaaggtttgttcgacttggtgtcccttatattgagctcaatgcccagggtcgtgcaagacctagtattgctgaactttataactggagatacagggagctgggagatctgccttatgtccgtgagcaagcaatcttccataaagctaacgccggattctcttttgagtatcagttagttgatgttcctgattataagggaaaaggtgagtcagcgccttctccttggttttaccagaatgaaggggaggctgagtatattgttagtgtgtatatctatatgcgcctgattggctaccctgccaataagatttcaatattgaccacctacaatggtcagaagcttcttattcgtgatgttatcaacaaaagatgcaaaccatggaatattgagccccctaacaaggttaccactgtggacaagttccagggccagcaaaatgatttcattttactttctcttgtccgtacccgttttgtgggtcatcttcgtgatgtcagaagacttattgtagctatgtcccgtgctcgtctgggcttgtacgtgttctgccgtcgttcactgtttgaacaatgttacgaattgcaaccaacattccagctgctcctccaaagatctgataagcttgccttgaatcttgaggagtgcactccttttaccgagcgacctttggaggaaactggaaacatccattacattactggtattgaagacattaatcatctagtaaagttcaggctggaacatcttcgtcaagtgcaatacatgcagtattatgctcctccggcaaatgaactgcctcaagcagcaccagaaaatattgctgatgcaatcccttctgaaaatggcaatgctggaagggctctgaatgatggaaacgaggacatgacccgggaagaaaatggtggtgcaactgacacagtgatcagtaataggatagaggaagacagcgttgaggcaaaggatgacatgacacaggaaggggacaagggtgaagtgagtggcaagggtcacatggctacagaggataggaaaggggaagcacaaggtggcgcagatggcaagctggaggaagcaaatgtgatgtcggcggacaagatgatggaggaagcaaatgcgacgtcggcagacaagatggaggaagcaaatgccacgtcggcggataagatggaagaagcagatgccacgtcgtcggacaagatggaagaagcagatgccacattgccggacaagatggaagaagcagatgccacattgccggacaagatggaagaagcagatgccacattgccggacaagatggaggaagcaaatgccatgtcgccggacaagatggaggagaaaaattctgatccgaaggacaagatggatgaggagtgacgtggtggtgtaaccagttttgaaatagcggtagacttgttctgtcagccgcatatctttatttggaacatcatgtattcacctgtgttaccgcagatgaagactgatacgtgctccccaagaggtgtagccttgtgggcagaatcaagatcgacatatgatgaccatgttcctgcggttaatggtggtgaaggttgttttcgctaccatcttggccaggctatgctggaaaatgttccttctcttccagccaagggtatccatgtttccgcatgtgtttaatcgtgtaaactgtagaggattttttgggtagtttttttctgaaacacccgttccatctatcgttgtctccgtaacataacacagctggaacgttgcttttgtatacttgactgactactataattttggcacaagcattagatttttgcagaaaaaaaaaatgctttgataggccttgtcggcccttcc

SEQ ID NO: 26875 - DNA, 1166 bp, Zea mays
  Clone ID: MRT4577_124520C.1
ggcgattgggttcctcgcggccgggactcgctcgcccgagcggcgccggggagcgattgggatcgggaggcgagagtgcgtgcgtgcagccacaggcaggcgtcggcaccatgtcttctttcaccggcacgcaggacaagtgcgcggagtgcgacaagaccgtccacttcatcgacctcctcacggccgacggcgtcacctaccataagacatgcttcaagtgcagccactgcaaagggatcctctcgatgtgcagctactcttccatggacggtgtgctgtactgcaagacccacttcgagcagctcttcaaggagaccgggagcttctccaagaacttcacgccaggtggcaagtcttcagacaagggtgaactgacaagggcccccagcaagctatcatctgcgttttctggtactcaggataagtgtgcagcttgccagaaaacagtgtacccgctggagaagttaactctggaaggcgagtcctaccacaagagctgcttcaagtgctcgcacgggggctgcatcctcaccacctcctcctacgccgcgctcaacggcgttctgtactgcaagatccacttcgcgcagctgttcatggagaaggggagctacagccacatgatgaagaagagcccgtcccaggatacgctgccggacatggcagccgacgagcaaccgccggaaccggcgccaccgcaagacggggaaggagaggacaactaggaggaagggaccgccaccaatatatatcacacacacacacacacactcacacattctcacactcaagtctgcgtttgccatttttcttttctttttctctacgacgcttcgttattccctcctttcatctatctctccgtgaactcggtttgtcgtccagctggctgtaagtgtaccagatgccttcgttacgtctgatgaggctcatgacaatggcgattttggcatggagctgtgttagcctcgcggaaaaactgtaactgtgtaagcagaactgctatatattgttccgaaaaaaaaaaaaaaaaaagcggccgcttttttttttttttttttaatttaatttaatttgaatttcttatatataatggggaaatacaatataataacaagcatcgatcgatctctcgatcgagtggacacgattacaaatccgtc

SEQ ID NO: 26876 - DNA, 2013 bp, Zea mays
  Clone ID: MRT4577_124521C.1
tgatgggacaggtcacttcaaggagattttggatgagataaggtggatcagtcacttctcatcacaggttttggatatgaacatgatgatgctaggatgaccaatataaatttgtttaaggaatttactgccctaagcagggtaagtgtttcctgaactacaattgttttttttggctttttgcagatctgcacatctgaatttcctattatcctgttgggctgcctcttttttggagtgactgtagcaaccacttctaattcattttcaattgtattgaactggatgttgaccttcctagcataattagctctattttttaaaaaaatagttcattatgtatgtttctattttttatggtaccgcctatgtttatataaatttagcctagcactgcttgaataacaagtgattgaatgaggctcatatgcaaccattaaatcaatatttatgaaccaatgtttgttaaagtaataaaacatttacaaggaccatcgatgacctcaagaagctggtggtggcgtagatgggaacgcaccccgagaagatttgcatctagaggtggtgaccccacctctgtcctcaaccgccacctcgtacctcgtcttcggcgccgccggctcctgccccccttggcacgccttcggggtcctcgctggcggcaagcacctccgtcccggaggcatctgccgctgcagcatagaccaccgcgtcctcgctcagcagcaccgatgtcgatgatggcaacaaggaggacggctccgcgagcacccccgagatctgctgctgccactcccacgcagctcttgcttgtgagatctgtgtgcaggttgatgtcctcgtggcgccacgccgacctcaccgccaccaagcgcgccacccatgtcctcaccgacctcgccaaaaactataagaataggtgtagtcactgtcggggtgtacatccaattgagttttgagttggtgtttagctttcccttaccagggacggatcaaagcaccgtaataagtgtcgatatagctctttcaattgcgcctattgttttgtgcgggctatatggatcaaggaaccctctttgcagcagaggtttgttttgtgttctgctgctagtagtcgcatgtcagtttaatcttttgagttctggaagctgttggtcccttaggtgtttgggagatccttttgaatcgaagcacacacactcaggtgctatgacctttggcatttcatagttgcatatttaactggtgtgcgaagagcaccaggatagcacccttgcagcaggaacttacttttggttgcttttctgttgcctgtcatatcccgatatttgtttcctgcaaatttgctttgtttaattgtattctattgattttacagcttttgtacttgtacagttacattgtcatctggtttctattgcacgtgtagctgattagttgtagtcactatcttgcaagcatagatattagggaggtattatgtccagtcaagttttgtgttggctatgtgtagcgaattaggattgcttttcctgggatggatcagagcacatgtactgtggcgatatagttgtttcaatagtatagttgccaaattttatgtgtgtgctatatagaccagggaacccacttagaagcagaaaattttctgtgtgcgcgcgaaattttctgtgtgtgctaacaaattgcaggcaaccatcttaacaacaaaagaggctcgtacaatagcagagatgatgctaaaccacttgtgcatgcaaagtatcaaaaaggagaccagacacatgttgatgaaacatctaaaaaggtcctggaatctgaatgcacaaatgtggagaccttatagaaaagggcacaagcacacatgcatcttgctgatcttgatttggcggaggcagacatcaagaaagctctagataaactacagatccagacatgttaatcatatgtactactgaaattggcttaatgaaatcttttgagaataagaaaaaaaaaaaaaaaaaagcggcc

SEQ ID NO: 26877 - DNA, 271 bp, Zea mays
  Clone ID: MRT4577_124522C.1
cccactcgtccgcccacgcttccgcccacgttttcgtttactcttaggctgactcattttctagtgcagttcaccacccttcccaattccccatcttctccacgatccaacacaaccccaccttcacatcaagcaatacaccgtcgtgtacccaatccagccacacaagtccacactctacacagtccctcgatcccctccccctcttccttctcccaattctcctcgatctatccttctgctgtcctcgcatctatagcctttcaaaacc

SEQ ID NO: 26878 - DNA, 356 bp, Zea mays
  Clone ID: MRT4577_124523C.1
catatacgcagtcgcgtagcatgttttcttatggtaatgcatatgcatgataggaagaggtccagaatcgcgacagagttgcagaggtcacgaatgaagctgatgaactaaataatatcaacaaaagtaacaataattatctaagaaagacaagccaattgcaagcacaaatagagatgccactgttgaatatcaagctgattaccaaactattggattgccaaatatcattgagaatatttcaaaaactggtcacattcttgctgagatgcttagcgaagaacaagggctaaatctagagatagattaaaacatacctgatattggtttgacaatctttaaaggacagatggagc

SEQ ID NO: 26879 - DNA, 810 bp, Zea mays
  Clone ID: MRT4577_124524C.1
gcgcgtcgcctcctttcctctcctcccctcgccgccgccgccgccgccgccagcgcctcctccaccgccgctcgtcctcctatacacaggtgcggaggagatgttggtgctcttcgagacgcccgcggggttcgccctcttcaaggtgctggacgaggggaagctcagcaaagtcgaggatctgtggcaggacttcgcctcgtcggacaaagcaagaaaggtggttgagctgaaggctttcaacaagtttgaaaacacctccgatgctctttcagcggctactttgctaattgatagcaagcccagcaagggtctgcgcaagttcctgcagaagcactgtgatggtgaaacattggctgttgctgattctaaacttgggaatgctatcaaagaaaagctgaaaattgattgccttcacaacagtgctgtcatggagctgatgagagggctgaggaaccagcttaccgaacttatgtctggaccagctgaacatgatctaggtccaatgagcctaggattgtcccacagcttgtctaggtataagctgaagttcagccctgaaaaggttgatactatgatcattcaggccattggcttgttgaatgatcttgacaaggagcttaacacttatgctatgagggtccgcgaatggtacggttggcactttccggagctcacgaaaattgttgcagataatatccattacgcgaaagctgtgaagatgatgggcaatcgtgttaatgcagtgaaccttgacttctctgagatactgccagaagatgtggaagcagagctgaaagaggcagctgt

SEQ ID NO: 26880 - DNA, 365 bp, Zea mays
  Clone ID: MRT4577_124525C.1
atggcgccctacaacggccgctggcgcaatggagtgaatttagactgattcgcgcacgattatcagctgcagacaaacaacattgagaggccacatgatgcatgatggaaagtattcaaggtgaacacgaagcgatcagcaactgttcaaagaacggtaggggccttggcttgctggtgcaatgacgacacgaggggcatggtgccaaatctacaatcacctaagcaggcggcgcaccatcagtgctacaacgtgatgtgcgcgaagctaccacataactacagctaccttgcgaaggcggagctctacagccaccaccggcttgcccaggagctcttcatgcaatatttgggtcgaatggagag

SEQ ID NO: 26881 - DNA, 715 bp, Zea mays
  Clone ID: MRT4577_124526C.1
actcaccccgcgcgccgcctcctttcctctcttcccctcccccctcgccgccgccgccgccaccgctcgtcttccctcctatacacaggtgcggaggaggagatgttggtgctcttcgagacgcccgcggggttcgccctcttcaaggtgctggacgaggggaagctcagcagcgtcgaggatctgtggaaggactttgcttcctcggacaaagcaagaaaggtggttgagctcaaggctttcaacaagtttgaaaatacctcggatgctctttcagcggctactttgctaattgatagcaagcccagcaagggtctgcgcaagttcctgcagaagcactgtgatggtgaaacattggctgttgctgattctaaacttgggaatgccatcaaagaaaagctgcaaattgattgccttcacaactctgctgttatggaactgatgagagggctgaggaaccagctcactgaacttatgtctggactagctgagcatgatctaggtccagtgagcctaggattgtcccacagcttgtctaggtataaactcaagttcagccctgaaaaggttgatactatgatcattcaggccattgggcttgttggatgatcttgacaaggagcttaacacttatgctatgagggtccgtgaaatggtacggttggcactttccggagctcacaaaaattgttgcagataatatccattacgcgaa

SEQ ID NO: 26882 - DNA, 368 bp, Zea mays
  unsure (1)..(368): unsure at all n locations
  Clone ID: MRT4577_124527C.1
ggctcactgagaaccgcagatcaggcgtcttcgtacttgcctatctccgcgacgcaggtgcgtggggggttctcccaatcttctctcattgggaccaccgccgccgctaccccctttcgacaacaccatgagggagtgcatctcgatccaatcggccggccggatccaggtcggaaacgcgcgctggagctgactgcctcagcatggtatgangctgatggtcagatgcccggtgacaagaccattgnnggaggagaagaagctttcaacaccttcttcagtgagactggcgctgggaagcacgtcccccgtgctgttttgggggaccttgagcccactggcatctatgaggcgaggactgggggggg

SEQ ID NO: 26883 - DNA, 1584 bp, Zea mays
  Clone ID: MRT4577_124528C.1
cattgggtacctcgaggccgtcgggggcggcgagggtcgatctggctctgcgaagatctcgacagcaccgttccgtttccatccccatcgtcgtcgtcgccgccgccgccgccggagatgggccatgcgccagcgaacggcaagcgctcgccgcctccgcctcctctcggacgttgccacttctggctccccaacaagcgccgccactgcgccaactcccccctcccgtcctctcagtattgcggaaaccacctccccgagtccgcccccggggctggccgccgcgtcccctgccccgtcgacccctcccacacggtgctcgaggagaacctggaggcgcacgtcggcaagtgccccctgaagaagcaggtcgccgcgctcaccgcgcagccgtactactccaagggcatcaactccggtacacctgaggcgggctgcggtgtgacgtcggcggagaagcgtgcggccgtgtacaggcttaccgaggaggagttccgccttctgctcgggaagatccggtcggtgcacgcggcggtcgcagcgccgatacgggagtccaacctgatcaccgctgcttgcgacaagtggatgagcggccaggttgataggaagatgccgtaccaagagaggcatgtcgcgcagcaggcgtccattgttggaaacatggaggcatttggcttgctgcagaaggctagccatgaggtggttgatggggagaatgcggcggtgagtgctcaggcagttgtggagtttggagctggaagagggtacttgactcaggtgctggtggactgttatgggattagaaatgtcttcttggttgagaggcggtcctacaaacttaaggctgatcgaagcttgcgtcaaaatgaagatgttaccttggagcgtttgagaattgatattgaggatttgaaactgcacggaattgaggcattgagggggctccaatatctagcaattggaaagcatttgtgtggacctgccacagatatgaccatgatgtgctgtcttcctgaacgatatgaccaaaccgaagaaaacggcaaacgtagtcttcaaggccttgctctagctacctgctgccaccatctttgccagtggaagcattacacgaataaatctttcctctcgggactaggtatcacagaagaagattttcatgccatgacatggtttagcagctgggctgtggatggtgatcatagctacccagatgctcctgtggaggttgaagacacgccctctgaagtcagaggacgagagaagcttgatcaggaggccgtcggaattgagagagtaatccgaagtataccagcaggggagagggccactctgggatccatgtgtaaagatatcattgatacggggaggctactatggcttgggcagaagggtctggttgctgatcttgtaagctatgttccatccagcatttcaccagaaaaccgtctgcttatcgcaaaatgtacatcttgattataggctgaaaagcaagtgcacgcatttcagccctgcaaatttgcaggagcttggattgtataagatactttcaactaataaaatcttgagtttttcagtgtc

SEQ ID NO: 26884 - DNA, 295 bp, Zea mays
  Clone ID: MRT4577_124529C.1
agaggaatcagctgctgacgctcctccgatggcgggtcgcatggtctatccagatcatctgcgtcatctcgacacggcacgccgccaactacgagctgtcatttcaataatcggatgagcacctatcatgctacgcatcgcatggcaagagactggtacttagaacctgagcacacgtattggtggtacacatggttcgattagatatgatgaagagtatactcacggttcacatcatcgttgacagattgctaacgatatccgagaacctatcactgtacagaatccacacatt

SEQ ID NO: 26885 - DNA, 287 bp, Zea mays
  Clone ID: MRT4577_12452C.1
aagcaaagcggcataaactatcccattttattgggcaaacatatgcctatcctttccttggaccaaaaaaaaaacttcggggggacaaacaaaccacaaaaatgcgaaggggctatcggttcaaccactaaacttttaattcaacattaacaataacccaaacaccatgcttttttacgctcgggtcgacttttaataaaatgcaatgaatcaagtcccagcctgcattagttcacagcagccactttctttagggactccactggtttaaaaactttctcccccat

SEQ ID NO: 26886 - DNA, 435 bp, Zea mays
  Clone ID: MRT4577_124530C.1
cccaaaggaacccaaaaggggtcaggggcctcccccggaaaaccaaatttcaaaacctttttttggaaattgggggggtttcccccccccaagaaaccaaaaccccctttaaaggggggccacccaaaaaaatcaaaattttgccaaaaaaacaaaagggcaaccggggggccttttttccaaacggcccaaaaaaccaaaaaacttggaacttggtgaaccaaaaatttgggggggcagggaaaaaaaaatggaaaattttttggggaatggtttaatgaaaggttgcaaacaaacccccttgggggccccccccaccggagggggggccgggcattttccaacaaaaaccctactgggagccccaaaccggaaggggaagaacggttcatgggtaaattcccccacattgggggccaattatggcacacccaa

SEQ ID NO: 26887 - DNA, 362 bp, Zea mays
  Clone ID: MRT4577_124531C.1
ctcctgagcagcttgcttctgctttgtggtggtttatgagtccactgaagcatatcggtgtgccagtgcctgagataatacttacattactactctcattgaggtttatcaatttagtatttgatgaggttcgcaactcagctctagcgattgtagcacgccggataagttggaaaaagctgacagctatggaaactatagatattttcttcagctatgtccaacggatatttaaaaatatatttgatcatgcggagcaaatatccaaggcaatggtagctcgaggatttcgtggtaatccaatcaatcacaagatctactttctcacagaatcatcatttggaattgcggatttcttttca

SEQ ID NO: 26888 - DNA, 929 bp, Zea mays
  unsure (1)..(929): unsure at all n locations
  Clone ID: MRT4577_124532C.1
agtttttttttttttttttttttttttaatgtaattaagctctatttggggaagcttctgcttctccaaaaagctattgaaaggccaaaagctccgccccagcaggtagggtctctgcttcttcaaagttcaaattgacaaataaaaactacattttgtactacaagtaggtaagctcacttagaacagcttctcaagtttttcgaaagagagctttctaaagatatgcttcccctttttgataagctacggctctcgacgacagacacagtgcctaagaattcttcggaggtcctaagaatcctgggacagacacggcattattattattgtatcatctcggaggatgtatccttctcttccatattattattctcatgtaataagcggtgaagggtttcactgtttcagagcctgagcgcgagccacgaggcatcgtcgggcacgtctcccgcgggggtgccgccggcgccggcggcggagtctctcttcttccacggcgaagcatcctcgttgcggtcagcgtcgtcggtgcctgcgatcctgttcttccttttcctgagaaagttctgcagcgtcagcttccttgcgatgggcggcatgcctgcccctgcaggcgatggctggtcatcgctggtctgcgccttctttggcacggcggtcgccaccgccacccctttctccggcgtgttcccggtcacagaacttgccatttgcatcaggaccttggctctgtctgctgggaagtggtggaacgtggacacctgcccctggtagaagatggtcagggtggccttgccctcctctggcctggtgatctcggcggtgccagcagtgcggacggggaacagcggcaaggtcgtcctgctcgtgccggtctcccaggccgccgccgccgccggccccgtggctacagggaccggtgncag

SEQ ID NO: 26889 - DNA, 181 bp, Zea mays
  Clone ID: MRT4577_124533C.1
ccgaggaacaacaccattccgattaacatgtatcaccacatagccactgactgcgacacggggactgccttaatgaaccaagagtacaacctcaagcgcgccaagaccaaagacaactatctaccttgctagctcgagcttttctgaatccctactgctccccgcagtccaacccatatca

SEQ ID NO: 26890 - DNA, 423 bp, Zea mays
  Clone ID: MRT4577_124534C.1
tctatagcgcgcgccccctttttttatttttttttctttttattaaaaaaactgggggattgtgacatggtagcatcgggaaacaaatggaaaagacgagcataagataatacggcctagctagcaatgttactggtaaaattttgacccttttggggccaatggtgaccccgaccttgttagcaagcgactagaggggtcgaccccataaaaggcgaacacaatggataatgagctgatccacgtccacggcaccaatgtcaggggcgcacctctatcatacacatggtcttgagctggtcatgctcctgagagtccttgtcatcctcgggattaaagtctgccatggaaagggctgccttgaaatgcggtggctcattttgtagggcatcattgcgatcattcgccacccttgggggattc

SEQ ID NO: 26891 - DNA, 493 bp, Zea mays
  Clone ID: MRT4577_124535C.1
ggaaaagcaaaccaaacccgggggtttaatgggggggggaaaacaaacacgggttccttagtaaaaaacaaaaaaaaaatccccccggttaaaacccaaacccgaaaaaaaacccaccgggggcaaccccccccgaaaaaaaacggggggaaacccaaaatccccctttgggccccggggcgggacccccctagggggaaatcccaaaacacggggggccgttcctaggggacccgagccgggacccaacctgggggaaaccaggggaaaaggggttcccgggggaaaagggtaatccggcccaaatcccccacaaaaaacgaggcgggaagaaaaaagggaaaacccgggggggcctaaggggggaccaaaccacaaataatgggggggggcccacggcccgttttccagggggaaaaccggggggcccctcggatttaaagaattcggccacccgcgcgggaaaggggcggtggcgaaaggggggcttttc

SEQ ID NO: 26892 - DNA, 432 bp, Zea mays
  Clone ID: MRT4577_124536C.1
ttgtcccgtactgtgcccgcgggctccgccatggcgcacagcggggtatccggctgatgcacctcagcgatgttcgggactaggcgcactatggatcgcatgatcgctctgccttggggcgcacttatgcggtctaccttgaccggcgccttgagatctatctgcctgagcgcaagcacgtgttaaatgccggcaggatcgccagcagggctaatggcccatctccacttgaccgcgatcgctggtgttcgtctggtgcctatggtcggcgctctcgctattactcgtcaccgcttgggtatagaggatatgatgattactgcgagtggaacgatgagaacaaggatgactagatgccaccggacctcgagagggatatgaagcctgagcgtgtcctggcttgtgtgctccacctacaacagctgcgtgaca

SEQ ID NO: 26893 - DNA, 498 bp, Zea mays
  Clone ID: MRT4577_124537C.1
agcagtggtaacaacgcagagtacttttttttttttttttttttttttttttttgggtgtgtgtctgattgtatagagcatgtgcctacgaaatcaacaaaagactagctaccagcttcaagaatatatgtaccagtagtaccaaacaggcaaccttttgaatttacttttggcacaatgaatgaactgatttaaaatccaaacctggagactatcagacactattccgttttttccataatcaataataagagcgcctccaccgtccgaactaattctatctgcaatttgttcggtaagctccattgctttggggcagacttcaatgtgctcaatcttctcaagctcctcggagctagcccaaccacaacgctttgcgaggtagattaaagaggctgtgggatggggagacaaaacaaaccgaaacctgctgcaaagtaagcattacacatttccttatggttaagatcccgcgtactctgcgttgttaccactgct

SEQ ID NO: 26894 - DNA, 690 bp, Zea mays
  Clone ID: MRT4577_124538C.1
cattgggtacctcgaggccggccgggaaaagtctctcgaacaggactccctctccacgtctctccggcttgctcttccaggcccagcgtagcgagatcagccgccccgtgtgggcgcctaccatcccgatgccctcgcgccgccgtgccctgctcaaggtcatcatcctcgcttatagagtctatgcgaatacttccttgatgaaccaatatgtgaacaagaagttcagcaatcagtacaaggctacgatcggtgcgtatttcctcttcaatgacgcgcatatctaggacaggctcttcactctgcaaatatgttacaccgctggccactaaaggattcacagtcttgccgttgcattctaccgcagagcaaattgctgagtcctagtctatgatgttatattctatgaaatcatttgacaacctgaacaactggagagaagactttctaattcacgctacgccatcagatcctgataatttcccttttgatctgctgggtaacaaaactgatgtagatggcgagaacatccgcgtgccatctgagaaatacgcaaaggcatggtgtgcttgcaaagggaacatcccgtactttgacacgtctgctaaagatacaacctatgtgcaagacgacttccagtgtatcgtgaagaacgctctgaagaatgattcagaggaacaactgtatgtg

SEQ ID NO: 26895 - DNA, 286 bp, Zea mays
  Clone ID: MRT4577_124539C.1
attccttatataagatagataataaaacgtgggggggggggagtggaaaaattgattcaaaatatgtataaatagtttgtataaatgtaaagtacaaattgtaaattgttgagataaaaattttatttaatttatataatatattgtaaaggaatgcttgagtgtaggtggaatggtgggatttggtactttgttttattgtttgataataaaagggaggtgtatgtaggtaatttgagtaaagagagattttttaaaaataagggtatgggatatatgtttttgt

SEQ ID NO: 26896 - DNA, 357 bp, Zea mays
  Clone ID: MRT4577_12453C.1
agcgtccatgtacatcggcaaggactggttcacccctacctccatcgaattgagggtggtcaacgccgagacgtctttcacgggcttgattaacacgtacggggtccacaccgatcgcacttattacgagctcttcatcctgagtgctgacttgaacaccttctgtgagtgcatatgacgccttctgactctggtcaagacgaacatggcgtggattaccatctccatcgcgctgttcgaggatcctgtgggtcagaagtgctacctgttgctgaggtgcaagtgctttggcggtatcgattacaataacttgcagttttacgggtaccgatacagcactgaactggacatgtacgt

SEQ ID NO: 26897 - DNA, 444 bp, Zea mays
  Clone ID: MRT4577_124540C.1
aaacccggccaagcccataagaaaaaggccctttttttaaaaaagggggggggggcacaagtcccattcccggggaaagggacattaccaagggaaacacccgctgggttcgggaatttggggggagggcaagcataacccccaattaaaatccgttccaaaaattggccccaacccaacgggaaaaaaaatttttaacgggaggcaaaaccccaagcaaatgcaaaagcccacattttaaaaaaccaaagggggggcaaacttaagggcccaaggcccaaaaaacctttaggacaaacttaaaacccctgttcgaccagggaatcgccgggcctttccaccaccatattgtattggccgggggaaatgggcttaaaaaaaaacccgaaaatcaaggccctcccagttttttggatagaaatgcccccagggcccttttttcct

SEQ ID NO: 26898 - DNA, 375 bp, Zea mays
  Clone ID: MRT4577_124541C.1
gagcctaaaaacttgggacttttcatcaggggtactaaatacaagggggtattaatagaaccccaccattttgatttcatttataataaccaaacagttttttacaaattttacgggggtatttagcttatagcatattaatatggggaaggggtcattttttacatgcaacttatgcacaattctttctaaaaacttgccctcaaggaaaccccccaagccattgatttttaagaatttcttgaacacaagggccataatagcaagagttagcccaaatgcggccaagggcaacagcctgtcatgatttggcttttggaacgcaacaacaggattttggtgagacaaacaaacttttggaaagttctttttggg

SEQ ID NO: 26899 - DNA, 354 bp, Zea mays
  Clone ID: MRT4577_124542C.1
gttcggctcgagaaaggaaccaaccactttttgctttcaccgatcatacatacaatgtgcgcttacatagacgaccatgcgcgtcttcatgacatccctactaaaagtggtgtagaacctaatttcaccaaacctggaattgcagctcagagtttcattgtaggatctcccattgctatggcaataagagcagcgctagtaccattgacgaagccattaaacattgcctgtcaaagttactctctaagagtatattctggaatatcgaagacactgacttgacatgcatgttggagccagtgaacctggtgagcgtgctttaaaggttgatgatttgattgccactgctggaac

SEQ ID NO: 26900 - DNA, 794 bp, Zea mays
  unsure (1)..(794): unsure at all n locations
  Clone ID: MRT4577_124543C.1
gggttctacagtttatccacctatatgtccagaacagagtgttggaaccattgccaatctcagtgaccatgactgcagagaagaaggatttggctttaggagggacttgaattgggagctctgcccaaggcttgataggatcagtatgttttctcagtgaccattgctccaggactgttggccacaatccttaaaagaataattaacaagagaactgttcaagaggccatgataaacagaaggtggatttcatatattaagggcgctctgacaatgggagccctggtagattatttatatctatgggattctctttctagcttgtgtctgcagccgaatagggaagatagacacatcttcaccagggcctctgatggcaaatactcagcaaaagctgcctataatggcctcttcttaggctctagctccttcggtcatcacaaaagaattggagaacttgggcccctccaaatgtcggctttttatgtggctggtggctcataacaaatgttggactgcagacagattggcgaaaagaggcatgaatcatcctgctgctgtcccctctgtgaccaacatcctgaatccatcaaccacctgctggtgtcctatgtattcacaagagttttctggtatactatgctaagaagatttggacttcatagtctagcccctcaaccggatgctacctccttcttggactggtgggagatatcttcagacattgttcctaggatgattaagaagggcctgaattccctcatcatattgngagcctgggatggtttgggagc

SEQ ID NO: 26901 - DNA, 1220 bp, Zea mays
  Clone ID: MRT4577_124544C.1
cactcgaggccgcgagggaggccgggagacagagacaggagacggcgcttggcttctgccttctccttccctcacgctctcggtctctccctctctctccccaaaacctaaaccctagagccgccagacgccactgtccgtggagcagagcaggctgcagcaccgccgcgccggtgtgcggcgtgccggcgtgtgccctccgtcgtctgcccgtctgcccgtctgttcttcgctgtctgctcaagacacggtgaacagtctgttcttcgccgtctgctcgtcttccccgacggcgccctagccctgttcggctgtccggcctccggcgcccacttgcccatcgccggtcggcggctcgcctccatggaagcccaagaaccggatgggcacgaaggtcattcacgtccgccaataccatgaatttctggatcaatgatcaagcgcacgagcacgaggaagaagcttgtgccagcagctaagaagatttcagcggctgctagcactgcaccttcatcatccacatcttgttgtggtgctgtctctgtatctatagaaagctccaaatctgagttgctcatttatctagatgaatcaaatgtgtccataaatgagaaacactttgatctgcttaactattagaaggtgaatagtcatagatttcctatggtatcttctatggcaaagaggttcttggatgttccagctagcagtgtgtcatcagaatccacttttagcactaggggtaggatccttgatgattacaggagttcattgaagccagcaacaattcaggctttggtgtgtgcttctagttggatacgcgggtctcgaagttcacctattcttttaactggagaaggtgatgatggtgacatcgagtccgtggaatttccaaagtgtgtggtggcaagtaattaggcacatggtcacatactcacatggaggagatggaggagagggagagataggacccgagagaggagacatgagaggcacatggtcaatatattttgttggctgtaattgtaagcctgtaattgttggttgcaaccgttgctaacctggcatattttgttggctccctacaactttgtcctgaactcctgaacctgaagtcctgatctataattgttggctacatcactgcgtgtattttggttctagaactgaaactctgaaagtatgaaattatggattatggaatggaactattatgaact

SEQ ID NO: 26902 - DNA, 406 bp, Zea mays
  Clone ID: MRT4577_124545C.1
gaggaaaaagggtgccatgtccccccccagctgggctcgaaaaaagggctaccccattagccccgggcccgggagccctttacccttttcctttggtgccaagggcgaaccgggtttttttcccccttcaggggacagcccggaacggaaaccacaaaaaaaatgggggggggggggaatcccaaaagcgaaaggggaaaaaaagggaaaaaaacccttgacttataataatactggtcctacacctttttttttttttggtggggttgccccccccccccggaagggcccacggaatttttttcacacaacccaagccccccccaaggggggggccccccctccccggggggggggggggggaacccgggggggtttttacccgatactccaactccgggggggg

SEQ ID NO: 26903 - DNA, 313 bp, Zea mays
  Clone ID: MRT4577_124546C.1
cccactcgtgcgccggagcacgcgacggctgtggaccctaagaatggcagtctgagcgccattgtctccatcggcatcggcttcatccagggggccaacatcatggtgggcggctccttctacggagctttcattaaccgctgcttgtccttctgccgagacgttgtcagatgggagtggggctaccagtgggcgtactgctttggaccactcatcggcggctgactggacgacgttatctaccagctgctactcatctgccacacccacgagcagcatccctgcagcgactactaaaagccgcagccgaccg

SEQ ID NO: 26904 - DNA, 1300 bp, Zea mays
  Clone ID: MRT4577_124547C.1
gtcggacatggatccaagcgtcgcggcgctccagagcgaggaggcggcggaggccttcttccgcgcggcgccgccgctccgtgaccgcgaccgtctcgccgccagcctcgccgatttcctcgcccgccactccgccggcaagtgatccccgatcccccgcttctcttccctccctgctcccatctctgtccggctccgggctgggtagctgaaagactgaaacgaaaatcagatttctgacgcggctgctcctgtcgccaccgatcgcgtgctgcagggggtggtgcagtggtgcgcgtcacctccggcggcactacggtgcctctggagcagcgttgtgtgcgctacatcgacaattttagctccggccagcgcggtgccgcctccaccgagtattttcttaaggccggctacgctgtcatcttcatccatcgccgtgggagcaagcacccttactgtaggtttcttccagaggattcctttctcgatctttttgagctcggggaagactcagagatccaagttccacagtctcattcatcggtggtcaaggcagcaattagcaattaccggaaggcaatcgatgaatgccttcttctcaaactgcctttcacaacaattttttgagtaccttcagttactacaaatggtggctacttctatgaattgcttggggcaccgtggaatgttttatcttgctgctgcagtttccgacttctatgttccatgggaaagtatggctaaacataaaattgagtcagcaggcggccctttgaacatgcaactcaaccaagtccctaagatgcttttcgtcctcaggaaaaactgggctcctgctgcattttgtgtatccttcaagctcgaaacagatcctaacattctcctacagaaggcagagatggctttgaagaagtacggtatgaacgtcgtggtggcaaatgaactcgcaaactacaaagatgtagtggtgatggtcacaagcaacggggggcggacgaccgtgagcaggaggagcaaggcggaagacctggaagcgcagctaaccgacctcctggtgaagatgcactcggagcacattgcacagcccaattcgtaggaccatcgagcgagcgagatggttaaattaaatcagacatgccggcggcaagtatgagcgattctacttctactcgcctagcaaattgtgatatacagagttcaccgggtttgtcataaagacgctcatcaatgtgctgcagcagattaattcaaaaaattatagctgaatagctcacaccaaaaaaaaaaaaaaaaagcggcc

SEQ ID NO: 26905 - DNA, 268 bp, Zea mays
  Clone ID: MRT4577_124548C.1
gcgaagcatgctctgaatttattcatcagaaatgcatacctcattgatcgagctctgcaggcagtacgagcacgcaccagacctacacttacgtgctgttcacggcactatagcaggacgacacctaggcggttggggaggtggaagtagattctggaccccatgacgctactgggacacccgctctgggaggggacactaccctacgccggagttgatccgatgggcgcaagcgcaccggtgcacccgctggtgccatgcgcatcag

SEQ ID NO: 26906 - DNA, 291 bp, Zea mays
  Clone ID: MRT4577_124549C.1
tttgatttttttctttgtacccaagaaaaatggatgcatatatacgatacggggtggcgcttgcacttgggaataaatacaggagcaatggccagcagaaatctacagaggaacagggacgtgacagtaaaaaaaaacaaaggcacgatacggagtacacgggatatgcagctcagcaatactacatattcccaacgaatagtgagccaaggagctctcagttgaaaactacaggaatgtatggggaaaaatcccatcaacaccctcgatcataggaaggcaggggggggc

SEQ ID NO: 26907 - DNA, 247 bp, Zea mays
  unsure (1)..(247): unsure at all n locations
  Clone ID: MRT4577_12454C.1
ctcgggtgtaagccacctaccaacctatgacattctctgcgagtgcggccatggatagatgtggattggggcaagaattgaagctggccggccccgacgggccctgtgcgcgcccgtacaagtctcctacgacgagcacatccaggaccgcgagcgcgtcttacgcgccatgttccccgaacatcgcatgngacagcgagtcggcgacggggaatggcgggtccacatactgccgctgcagttcctc

SEQ ID NO: 26908 - DNA, 448 bp, Zea mays
  Clone ID: MRT4577_124550C.1
tttttctccaagggcgaactagtagttgcttggagacttgcagagaaaagggcacgcagaaaagcgagcgtccggccacccgcacgccacgagcgatcgacaaatcggccgatgcggagctagcacttagcagtcgcccgacgagacctaaacctgcaccggcgccgcacgacaagggcggagacgccagatgatgaaggatgcgaagtggcctcacgcggtgtcgagcgccggtggaaggcgagggccccctgccacatcatacaccgagggggcgtcgtacaccctcctcgcgtcctgcccgcccagcagcgtcagaaacgacggctgctcgccgcactaccctcccgcccctgcgtgcgacgacgacgggctcttctcgttcgacgcgtacgtcgctgccgcgaagctgccgttccagcagctgcacaggaacaggccccaactc

SEQ ID NO: 26909 - DNA, 791 bp, Zea mays
  unsure (1)..(791): unsure at all n locations
  Clone ID: MRT4577_124551C.1
ccggccgggatatactcgctgatctcctggcgcattgtgattctctcaagcattgcacacgaccgcttacttcttacccaaccgcttctaatactgtctaattcacaatgtctacaacaactaccacaaccaaccagcctatcacggccgcatctatgcttcgtctcttcccggacattgatactagctcagcgcctctctccggtcacgatgaggagcagattcgtcttatggacgaggtttgcattgtcctcgacgaggacgacaagcccattggaacagccagcaagaagatttgccatctcatgaccaacattgacaagggcctccttcaccgtgccttctccgtcttcctctttaacgacaagaacgagctcctcctccaacagcgcgccaccgagaagatcaccttccccgacatgtggaccaacacttgctgctctcaccctcttcacatccctaccgagactggttccactctcgagngactctatcgcgggtgtcaagcgagctgcccagcgcaagcttgagcatgaattgggtatcaagaaggagcaggtcccccttcgaggactttcacttcctgacccgtattcactacaaggctcccagtgacggaatgtggggtgagcatgagattgactacattctttttatcaaggccaacgtcgaccttgactcaacaagaacgaggtccgagataccccatacgttactcccgagagcctcagcaacaattcgacatccccagnctgggtttcactccttggttcaagctcatctgcaaactc

SEQ ID NO: 26910 - DNA, 435 bp, Zea mays
  Clone ID: MRT4577_124552C.1
accttaagggcttccttctacctttgagttggacataaccaaaagtttcatgtgcctgaggagtacagatgggataatggcaaactaaaaaaaaagactgtttgggggggggttctttgcctgggacctttaaactaagggaaacctattactattgcctggggtcttggggccggaacccctgaaaataattaatagttttgatatgcccctggtgccataaagcccctagctaggcatgggagactttccatacttgatgaagaatctaccacccactcttccagggggggggatccacaacttgggccaaaacaaaaacaaaaattttggtgtacattgcatttgcaacactattctccattgaataaggcaccattggcccaagcccctgcctatgggtacccctaaagagaattaaacaatccggcaagc

SEQ ID NO: 26911 - DNA, 695 bp, Zea mays
  Clone ID: MRT4577_124553C.1
ccgcttgtgcaagcgatgtccatttcatgctcatctctctctctgtctctcattggcagggactgtgggaaacaggtgtacttgggtgagttcccgtccaatcgaaaagaactgagactcgaattacgtactacactagcatcatttcatggcatttaatcaggtgtccgaattgctctttttctaggtggattcgacacggcgcaggccgctgcgaggttcatagatttcttcttcctcgcgcgcatctgttccatcttctcgtcttatcttatatatctatatatctatgaatctatctgcagggcctacgaccaagccgcgatcaagttccgcggcgtgaacgcggacatcaacttcaccctggacgactacaaggacgagatgaagaaggtgattccccccctgttgcaattgcgaatcgaacgaccaacaccggtagaagaaggagcccacacacaccgccatgaatggagtgtgaatagaacaaattaagaacactgcagctgctctgttcatcgactaataataacgtctctctcttagtctctttcactggttgatgcctggattcttggcttcctgccgtgtgccgcgtcaaatccctcagatgagagacttgagcagggaagagttcgtgctggtgctccggcggcagggcgccggcttcgtcaggggaagcttcaggttccggg

SEQ ID NO: 26912 - DNA, 164 bp, Zea mays
  Clone ID: MRT4577_124554C.1
atcgtaatgatgtaagaggtagaagtgctacctgcttaatgtacctcaaaagccctgagggctttacttgttttagccgtggctacggagaagctaattctgggttatggcttttaaaatgctggttctatatttggatttgattatggctgaagtagctcccc

SEQ ID NO: 26913 - DNA, 383 bp, Zea mays
  Clone ID: MRT4577_124555C.1
attcggctcgagccgaaccagaggcggttcatttcctgcacgcagtatacaccagtctccctgggaggaaccagcgagagagcattctgggccctggcagcatggggttcgagccctaccagggcactgcggcgggacccgacaatacgatgtggagggtcatcgtgtgcctgtcaatcctgtccataaccatcttcctgcctataggttactttcgcgctgtacaccgggaggaaggggtgaagcccaagttgcctggccaatacaacgggcacgtggtcagcggcgggacgtgctgctcctgcggaggactcgaatcagaacccgggtgatgagaaacctacctattctgaccgaccactgattacggtcagaataagaac

SEQ ID NO: 26914 - DNA, 336 bp, Zea mays
  Clone ID: MRT4577_124556C.1
taccctcgaggccttgccggacgatctccatcccccaatcctgcgcctccgcctttactccgccgcacgttctggtccccgtgccgccggtgcgctcctgggctctggcacgcggatcgcctcaaccaaatcgacactagcgctgacgcgcgatcccgctccctctagttaaactctggatcgactcgcccccgtcgccgccctcatggcactggttcgccccgagcatccaaaggggggagcccgtcgcccgcggctcgtcgtgctcctcctgctcgccttcttcgcccttcagctcctcgtctttgtcgccttccgcgcagggcgcccccctcc

SEQ ID NO: 26915 - DNA, 285 bp, Zea mays
  unsure (1)..(285): unsure at all n locations
  Clone ID: MRT4577_124557C.1
cctccctcatgtacgancccataatccctacatcgactaacggttataatatctcttgcagattctggtactgaacaacttcacttcatagctctttcagagaggaggggggatcccaattaccaacataacgtctaaaaacatcattaaacagcctcaataaatatatcccagtgatagtttacttcttatttacataaatcctcattcctgggacagcatcatactcatctatcacattttgtgctatgtcacacagcttctaccaaaatttactcaacgtct

SEQ ID NO: 26916 - DNA, 499 bp, Zea mays
  Clone ID: MRT4577_124558C.1
ctgatctgagacgagacgagtcccctcccgggacctcgcctcactcaaccggaacgaacaagttaccatctcatcccaaccccgcctcgaccggatctcgtcggactcggatccgcccgaccaccccgtgccgccgcagatcaaagaatatggcagctctcgacaccttcctcttcacctcggagtctgtgaacgagggacaccctgacaagctctgcgaccaggtctcagatgccgttcttgacgcttgccttgctgaggaccctgacagcaaggttgcttgtgagacctgcaccaagaccaacatggtcatggtctttggtgagatcaccaccaaggccaatgtcgactacgagaagattgtcagggagacctgccgcaacattggagctggtgaccagggacacatgttcgggtatgcgaccgatgagacccctgagttgatgcccctcagccatgtacttgccaccaagctaggtgctcgtctcactgaggtccg

SEQ ID NO: 26917 - DNA, 324 bp, Zea mays
  Clone ID: MRT4577_124559C.1
tggttggaacctttgggctgatttatgtgcttgtttatgtgcttggggacgtcccgacgcgcatacggggccctcaaaaaattccgacataaggacgggggaatcctcccaagaagtatatacattaaactttacgactaggccctaacctctcccctagggagtgttaacgccggattctcccaaaaaatttgggcttacgaacacgaccatattcgccggctacgtagcgccgtaaggtccggccacctaggaatcgtcgccacactatgggcataattaactctagcctaacacgggtccggtacattagagtacgactag

SEQ ID NO: 26918 - DNA, 836 bp, Zea mays
  Clone ID: MRT4577_12455C.1
gggctgataagcttgccttgaatcttgaggagtgcactccttttaccgagcgacctttggaggaaactggaaacatccattacattactggtattgaagacattaatcatctagtaaagttcaggctggaacatcttcgtcaagtgcaatacatgcagtattatgctcctccggcaaatgaactgcctcaagcagcaccagaaaatattgctgatgcaatcccttctgaaaatggcaatgctggaagggctctgaatgatggaaacgagggcatgacccgggaagaaaatggtggtacaactgacacagtgatcagtaataggatagaggaagacagcgttgaggcaaaggatgacatgacacaggaaggggacaagagtgaagtgagtggcaagggtcccatgcgtccgcaggagcggaaaggggaagcacaaggtggcgcagatggcaagctggaggaagcaaatgtgatgtcggcggacaagatgatggaggaagcaaatgtgacgtcggcagacaagatggaggaagcaaatgccatgtcggcggacaagatggaggaagcaaatgccacgtcggcggataagatggaggaagcagatgccacgtcggcggacaagatggaagaagcagatgccacgacgtcggacaagatggaagaagtagatgccacattgccggaaaagatggaagaaacaaatgtcacgttgccagacaagatggaggaagcaaatgccatgtcgccggacaagatggaggagaaaaattctgatccgaaagacaagatggatgaagagtgacgtggtggtgtaaccagttttgaaatagcgttagac

SEQ ID NO: 26919 - DNA, 670 bp, Zea mays
  Clone ID: MRT4577_124560C.1
cttccacctcaacccgtctggccgcttcgtcatcggcggacctcacggcgacgctggcctcactggccggaagatcatcgtccaggtctcctacgccatcggcgtgcccgagcccctgtcggtgttcgtggacacgtacggcaccggcgcgatccccgacaaggagatcctgaagatcgtgaaggagaacttcgacttcaggcccggcatgatcatcatcaacctcgacctcaagaaaggcggcaacgggcgctacctcaagacggcggcctacgggcactttgggagggacgaccccgacttcacctgggaggtggtgaagcccctcaaggcggagaagccgtcttctgcatgaggcgcctcctctgttttggaagaagcttttggtctggtctggtctggtctggtgtgcctgcgctctatcatgcttttttatggctcctacttgtgattcttgatctgccccttgcttatcatttgtactgtactgtcactgtcctaataagtggtacgtgtgcggggtcgtattgtgtctgcttattcacctagaggattatttctggttttgctgcttatgtaatgcttttaaaaccatgaaagaagctacaggctcctacagctgctttgagaaaaaaaaaaaaaaaaaaaaaaaaaaaaaaaaaaaaaacaa

SEQ ID NO: 26920 - DNA, 468 bp, Zea mays
  Clone ID: MRT4577_124561C.1
gctgttcctgagacgagacgagacgatcccccctgtgtttaaccggaacttgttttaccccatctcatcccactgactccacccgcgccttctccggcaaggacccgaccaaggtggaccgcagcggggcctacgtcgcgaggcaggctgccaagagcatcgtcgccgccggcctcgcccgccgcgccatcgtccaggtcttctacgccatcggcgtgcccgagcccctgtcggtgttcgtggacactgacgggaccggcgcgatccccgacatggagatcctgaagatcgtgaaggagaactccgacttcaggcccggcatgatcatcatcaacctagacctcaagaaaggcggcaacgggcgctacctcaagacggcggcctacgggcactttgggagggacgaccccgacttcacctgtgaggcggtgaagccccttaaggcggagaagccgtcttctgcatgag

SEQ ID NO: 26921 - DNA, 1721 bp, Zea mays
  unsure (1)..(1721): unsure at all n locations
  Clone ID: MRT4577_124562C.1
gggctgtatggaattcggcacgaggatgtcggatctgagacgagacgagttaccatctcatcccaactccggaacgaacaagttacaatctcatcccaaccccgcctcgaccggatctcgtcggactcggataaagagcagcagcgcaagaggtcggtagtcaaagaagatggcatggctgtcgacacattcctcttcacctcggagtctgtgaacgagggacaccctgacaagctctgtgaccaggtctcagatgccgttcttgacgcttgccttgctgaggaccctgacagcaaggttgcttgtgagacctgcaccaagaccaacatggtcatggtgttcggcgagatcacgaccaaggcgaccgtggactacgagaagattgtcagggagacctgccgcaacattggttttgtgtcaaacgatgttgggcttgacgccgaccactgcaaggtgctcgtgaacattgagcagcagtcccctgatattgctcagggtgtgcatggccacttcaccaagcgccccgaggagattggagctggtgaccagggacacatgttcgggtatgcgaccgacgagacccctgagctgatgcccctcagccatgtccttgccaccaagctgggcgcgcgtctcaccgaggtgcgcaagaacggaacctgcccctggctcaggcccgatgggaagacccaggtgacagtcgagtaccgcaatgagggtggcgccatggtccccatccgtgtgcacaccgtcctcatctccacccagcacgacgagacagtgaccaacgatgagatcgctgctgacctgaaggagcatgtcatcaagcctgtcatccctgagcagtacctcgacgagaagaccatcttccacctcaacccgtccgggcgcttcgtcatcggcgggccccacggcgatgccggcctcaccggccgcaacaacgacacgtacggcggctggggagcccacggcggtggcgccttctccggcaaggaccccaccaaggtggaccgcagcggcgcctacgtggccaaggcaggccgcaagagcatcgtggccnnnnnnnnnnnnnnnnnnnnnnnnnngcaggtgtcgtacgccatcggcgtgccggagcccctgtccgtgttcgtcaactcgtacggcaccggcacgatccccgacaaggagatcctcaagatcgtgaaggagaacttcgacttcaggcccgggatgatcagcatcaacctcgacctgaagaagggcggcaacaggttcatcaagaccgccgcatacggccactttggccgtgacgacgccgacttcacctgggaggtggtcaagcccctaaagaaggcatccgcttaagaatgtattgggaagttcactggacatgaggttcatcttcgtctggctctgctgatacctgcaaggattgctgctgctgctgcccctggatgtgtgtttgatcagtgactggctgctctgctccatagaagatgaatgaagagacagatggtgaagaaggctttggcaaatggcaattgccgcagcaagccatgtcggcgccaccgaccggcttagtgattggtataatttggtgtggcagcagccaggattaatgcgctggtcttttatctgtactagtttggtcgtccggtatcttatttttctttccccttttcgagtctgtactgaaactgctgagtgatttgcagttttgatccatcatatcctttggt

SEQ ID NO: 26922 - DNA, 402 bp, Zea mays
  Clone ID: MRT4577_124563C.1
gcatgtacgtatgcaaagcaataaaggaccgtccaaaacggacaaacaaaaaaagccgggaggccaaaaccccagcaaactctaaacctactatgggagtcaaacacgccactaaagataaaaaaccgggaaataaaaaaaaaagcccactcaaacggaaacagaatgcggcaggtggccgttgggtgccctgttaaaagtcttgccgtcggccttgcgccgcctgaagaaaaacccccaagtgaaggcctccaacgccgagggggggaaaaacaacaaccaaacggggggaaagaaagctgacctccaacgctgctccaagcccaaaaagctcatgcccttgaaaatgttcacgaagcccaacacgatgacggggtaccccaccgagggggggaacgtgtt

SEQ ID NO: 26923 - DNA, 1737 bp, Zea mays
  Clone ID: MRT4577_124564C.1
cctcgaggccggccggggtgcgctgcggacgggtcggatctgagacgagacgagacgatcccccctcccctcaaccggaacttgttttaccccatctcatcccactgactccacccgcccgctgcctccgccggatctcgtcggactcggatccgcccgcccgaccacgaccaccccgcgccgccgccgcgcagcagcagcagagaagatggccggactcgacaccttcctcttcacctcggagtccgtgaacgagggacaccctgacaagctctgcgaccaggtctcagatgctgttctggacgcttgccttgctgaggaccctgacagcaaggttgcttgcgagacccgcaccaagaccaacatggtcatggtctttggtgagatcaccaccaaggccaatgtcgactacgagaagattgtcagggagacctgccgcaacattggtttcgtgtcgaacgatgtcgggcttgacgctgaccactgcaaggtgcttgtgaacattgagcagcagtcccctgatattgctcagggtgtgcacggccacttcaccaagcgccccgaggagattggagctggtgaccaggggcacatgtttgggtatgcgactgacgagacacctgagctgatgcccctcagccatgtccttgccaccaagcttggtgctcgtctcacggaggttcgcaagaatggaacctgcccctggctcaggccccgatgggaagacccaggtgacagtggagtaccgcaacgagggtggcgccatggttcccatccgtgtgcacacagtcctcatctctacccagcacgacgagacagtcaccaacgacgagattgctgctgacctgaaggagcacgtcatcaagccagtcatccccgagcagtacctcgacgagaagacaatcttccacctcaacccgtctggccgcttcgtcatcggcggacctcacggcgacgctggcctcactggccggaagatcatcatcgacacctacggtggctggggagcccacggcgggggcgccttctccggcaaggacccgaccaaggtggaccgcagcggggcctacgtcgcgaggcaggctgccaagagcatcgtcgccgccggcctcgcccgccgtgccatcgtccaggtctcctacgccatcggcgtgcccgagcccctgtcggtgttcgtggacacgtacggcaccggcgcgatccccgacaaggagatcctgaagatcgtgaaggagaacttcgacttcaggcccggcatgatcatcatcaacctcgacctcaagaaaggcggcaacgggcgctacctcaagacggcggcctacgggcactttgggagggacgaccccgacttcacctgggaggtggtgaagcccctcaaggcggagaagccgtcttctgcatgaggcgcctcctctgttttggaagaagcttttggtctggtctggtctggtctggtgtgcctgcgctctatcatgcttttttatggctcctacttgtgattcttgatctgccccttgcttatcatttgtactgtactgtcactgtcctaataagtggtacgtgtgcggggtcgtattgtgtctgcttattcacctagaggattatttctggttttgctgcttatgtaatgcttttaaaaccatgaaagaagctacaggctcctacagctgctttgagaagtaacggaacctcgtgcattttgggttatatatagatatgttgcagtgctgtgctgtc

SEQ ID NO: 26924 - DNA, 1832 bp, Zea mays
  Clone ID: MRT4577_124565C.1
cgattgggtacctcgaggccggccggggtgcgctgcggacgggtcggatctgagacgagacgagacgaccccccctcccctcaaccggaacttgttttaccccatctcatcccactgactccacccacccgcccgctgcctccgccggatctcgtcggactcggatccgcccgcccgaccacgaccaccccgcgccgccgccgcgcagcagcagcagcagatcagagaagatggccggactcgacaccttcctcttcacctcggagtccgtgaacgagggacaccctgacaagctctgcgaccaggtctcagatgctgttctggacgcttgccttgctgaggaccctgacagcaaggttgcttgcgagacctgcaccaagaccaacatggtcatggtctttggtgagatcaccaccaaggccaatgtcgactacgagaagattgtcagggagacatgccgcaacattggtttcgtgtcgaacgatgtcgggcttgacgctgaccactgcaaggtgcttgtgaacattgagcagcagtcccctgatattgctcagggtgtgcacggccacttcaccaagcgccccgaggagattggagctggtgaccaggggcacatgtttgggtatgcgactgacgagacacctgagctgatgcccctcagccatgtccttgccaccaagcttggtgctcgtctcacagaggttcgcaagaatggaacctgcccctggctcaggcccgatgggaagacccaggtgacagtggagtaccgcaacgagggtggcgccatggttcccatccgtgtgcacacagtcctcatctctacccagcacgacgagacagtcaccaacgacgagattgctgctgacctgaaggagcacgtcatcaagccagtcatccccgagcagtacctcgacgagaagacaatcttccacctcaacccgtctggccgcttcgtcatcggcggacctcacggcgacgccggcctcactggccgggaagatcatcatcgacacctacggtggctggggagcccacggcgggggcgccttctccggcaaggacccgaccaaggtggaccgcagcggggcctacgtcgcgaggcaggctgccaagagcatcgtcgccgccggcctcgcccgccgcgccatcgtccaggtctcctacgccatcggcgtgcccgagcccctatcggtgttcgtggacacgtacggcaccggcgcgatccccgacaaggagatcctgaagatcgtgaaggagaacttcgacttcaggcccggcatgatcatcatcaacctcgacctcaagaaaggcggcaacgggcgctacctcaagacggcggcctacgggcactttgggagggacgaccccgacttcacctgggaggtggtgaagcccctcaaggcggagaagccgtcttctgcatgaggcgcctcctctgtttcggaagaagcttttggtctggtctggtctggtctggtctgcctgcgctctatcatgcttttttatggctcctacgtgttgtgattcttgatctgccccttgcttatcatttgtactgtactgtcactgtcctaataagtggtacgtgtgcggggtcgtattgtgtctgcttattcacctagaggattatttctggttttgctgcttatgtaatgcttttgaaacgatgaaggaagctacatgctctacagctgctttgagaagtaacggaacctcgtgcattttggtcagtgtttgtgtatgtggctggtgaaatggtctgcaatagctaatgactggtgaaaagcccgagtgcttgtgtttgtcgaagctgcaacctggctggtcccccc

SEQ ID NO: 26925 - DNA, 1685 bp, Zea mays
  Clone ID: MRT4577_124566C.1
ccggccgggaaaagtgcgctgcggccgggtcggatctgagacgagacgagttaccatctcatcccaactccggaacgaacaagttaccatctcatcccaactccgcctcgaccggatctcgtcggactcggatccgcccgaccaccccgcgccgccgcagatcaaagaagatggcagctgtcgacacattcctcttcacctcggagtctgtgaacgagggacaccctgacaagctctgtgaccaggtctcagatgccgttcttgacgcttgccttgctgaggaccctgacagcaaggttgcttgtgagacctgcaccaagaccaacatggtcatggtctttggtgagatcaccaccaaggccaatgttgactacgagaagattgtcagggagacctgccgcaacattggttttgtgtcaaacgatgttgggcttgacgccgaccactgcaaggtgctcgtgaacattgagcagcagtcccctgatattgctcagggtgtgcatggccacttcaccaagcgccccgaggagattggagctggtgaccagggacacatgttcgggtatgcgaccgatgagacccctgagttgatgcccctcagccatgtccttgccaccaagctaggtgctcgtctcaccgaggtccgcaagaacggaacctgcccctggctcaggcctgatgggaagacccaggtgacagtcgagtaccgcaatgagggtggtgccatggtccccatccgtgtccacaccgtcctcatctccacccagcacgacgagacagtgaccaatgatgagatcgctgctgacctgaaggagcatgtcatcaagcctgtcatccctgagcagtaccttgacgagaagaccatcttccaccttaacccatctggccgctttgtcattggtggacctcacggcgatgctggcctcactggccgcaagatcatcattgacacctacggtggctggggagcccatggtggtggcgctttctccggcaaggacccaaccaaggttgaccgcagcggagcctatgtcgcaaggcaggctgccaagagcatcgtcgccagcggccttgctcgccgcgccatcgtccaggtgtcttacgccatcggcgtgcccgagcctctctccgtgttcgtcgacacgtacggcaccggcgcgatccccgacaaggagatcctcaagattgtcaaggagaacttcgatttcaggcctggcatgatcatcatcaaccttgacctcaagaaaggcggcaacgggcgctacctcaagacggcggcctacggccactttggaagggacgaccctgacttcacctgggaggtggtgaagccactcaagtcggagaaaccttctgcctaaggcggccttttttttcagtaagaagcttttggtggtctgctgtgcttaatcatgcttttatatggcttctacatgttgtggttctttcttgatctgcaccgcgcttatcgtttgtgttgtactgccctaataagtggtgcttatgaggactgtttctggttttgctgcttatgttgtaatgctttgaaacaatgaaagaagctacaggccacagctattttgagaagtaatggaacctcgtgccgttttgattaaaaaaaaaaaaaaaaaaaaaaaaaaaaaaaaaaaaaaaaaaaaaaaaaaactcgaaaggggcgcggtacc

SEQ ID NO: 26926 - DNA, 805 bp, Zea mays
  Clone ID: MRT4577_124567C.1
gcagttgcgggggcaaatcggatttcccttcagcaaccgctagagcctcctcaccccgcccttccctcgtcttctccacccgctgccgcctgccatggggaactgcgccagcgccatcgacgccttcgtccagcgcggcaacagggcgtcgccggccgctactgctggaatgtccgcgtcgaggaggactagtagctctgccaccacggggaagctgtcaacgcttagcagcgccagcaccttcatgccatccacggttagtggcggcgacgacgacgacgatgacccagtgggccagatcctcgagtccccaaacctcaagatatacaccttcgcggagctcaagagcgccaccaggaacttcaggccggagacggtgctcggggagggcgggttcggcaaggtgtacaagggctgggtcgatgagaagaccatgaacccatccaaggctagcactggcgtcatggtcgccgtcaagaagctcaatcctgagagtgtgcaggggatggaacaatggcagtctgaagtcaatttcctcgggaggatttcgcaccccaatctcgtcagactcctgggctactccatggacgacaacgagctactgctcgtgtacgagttcatggcgaaggggagcttggagaaccacctgttccgaagaggggcggtctacgagccgctgccctggagcctgaggctgaagatcctcatcggtgcagctcgtggcctcgcgttccttcattcgtcagagaggcagatcatctacagggacttcaaggcttccaacatcttactggattcgcacttc

SEQ ID NO: 26927 - DNA, 1762 bp, Zea mays
  Clone ID: MRT4577_124568C.1
cattgggtacctcgaggccggccggggtgcgctgcggacgggtcggatctgagacgagacgagacgatcccccctcccctcaaccggaacttgttttaccccatctcatcccactgactccacccacccacccgcccgctgcctccgccggatctcgtcggactcggatccgcccgaccacgaccaccccgcgtcgccgccgcgcagcagcagcagatcagagaagatggccggactcgacaccttcctcttcacctcggagtccgtgaacgagggacaccctgacaagctctgcgaccaggtctcagatgctgttctggacgcttgccttgctgaggaccctgacagcaaggttgcttgcgagacctgcaccaagaccaacatggtcatggtctttggtgagatcaccaccaaggccaatgtcgactacgagaagattgtcagggagacatgccgcaacattggtttcgtgtcgaacgatgtcgggcttgacgctgaccactgcaaggtgcttgtgaacattgagcagcagtcccctgatattgctcagggtgtgcacggccacttcaccaagcgccccgaggagattggagctggtgaccaggggcacatgtttgggtatgcgactgacgagacccctgagctgatgcccctcagccatgtccttgccaccaagcttggtgctcgtctcacggaggttcgcaagaatggaacctgcccctggctcaggcccgatgggaagacccaggtgacagtggagtaccgcaacgagggtggcgccatggttcccatccgtgtgcacacagtcctcatctctacccagcacgacgagacagtcaccaacgacgagattgctgctgacctgaaggagcacgtcatcaagccagtcatccccgagcagtacctcgacgagaagacaatcttccacctcaacccgtctggccgcttcgtcatcggcggacctcacggcgacgctggcctcactggccggaagatcatcatcgacacctacggtggctggggagcccacggcgggggcgccttctccggcaaggacccgaccaaggtggaccgcagcggggcctacgtcgcgaggcaggctgccaagagcatcgtcgccgccggcctcgcccgccgcgccattgtccaggtctcctacgccatcggcgtgcccgagcccctttcggtgttcgtggacacgtacggcaccggcgcgatccccgacaaggagatcctgaagatcgtgaaggagaacttcgacttcaggcccggcatgatcatcatcaacctcgacctcaagaaaggcggcaacgggcgctacctcaagacggcggcctacgggcactttgggagggacgaccccgacttcacctgggaggtggtgaagcccctcaaggcggagaagccgtcttctgcatgaggcgcctcctctgttttggaagaagcttttggtctggtctggtgtctggtctggtctggtgtgcctgcgctctatcatgcttttttatggctcctacttgtgattcttgatctgccccttgcttatcatttgtactgtactgtcactgtcctaataagtggtacgtgtgcggggtcgtattgtgtctgcttattcacctactagaggattatttctggttttgctgcttatgtaatgcttttaaaaccatgaaagaagctacaggctcctacagctgctttgagaagtaaaaaaaaaaaaaaaaaaaaaaaaaaaaaaaaaaaaaaaaaaaaaaactcgagg

SEQ ID NO: 26928 - DNA, 470 bp, Zea mays
  Clone ID: MRT4577_124569C.1
aaaaaaacccgggttttccttttcccttgggaaggacaaaagggggcgggggggaagcaaatcccccgccaatcacattggccggttacaacccacccatggcaacatggggtccccccccaaaccctttgccttttgggggggctggggggcctttttgggggaatgggcccccttgttccccccggggggccccttttcccccgtttttttgggcaaaaggacccggtttattttgggcaacccccccccgggggggaggggcaccccgggaaaaaatttccccagctcctttttgttggggatcccccacaacacggggggggggacaaagcccgttttttttttttccttgggagggttgccggggagctccaaaaccccaggggggaggtcctccaaaacggccccaaggtaaacgggggccccctttcccacccccttcgcgtaagggcccttcttgggggagc

SEQ ID NO: 26929 - DNA, 362 bp, Zea mays
  Clone ID: MRT4577_12456C.1
gaaggggacaagggtgaagtgagtggcaagggtcacatggctacagaggataggaaaggggaagcacaaggtggcgcagatggcaagctggaggaagcaaatgtgatgtcggcggacaagatgatggaggaagcaaatgcgacgtcggcagacaagatggaggaagcaaatgccacgtcggcggataagatggaagaagcagatgccacgtcgtcggacaagatggaagaagcagatgccacattgccggacaagatggaggaagcaaatgccatgtcgccggacaggatggaggagaaaaattctgatccgaaggacaagatggatgaagagtgacgtggtggtgtaaccagttttgaaat

SEQ ID NO: 26930 - DNA, 2779 bp, Zea mays
  Clone ID: MRT4577_124570C.1
ttgggtacctcgaggccggccgggaaaaccaatccgacggcggtggcctccgctgcgcccgtgcccgctgccgacgggtgctataaatggggcagcgcgcggccgggaccggggtgcgctgcggccgggtcggatctgagacgagacgagtcccctccccccacctcgcgtcacccaaccggaacgaacaagttacaatctcatcccaaccccgcctcgaccggatctcgtcggactcggatccgcccgaccaccccgcgccgccgcagatcaaagaagatggcagctgtcgacacattcctcttcacctcggagtctgtgaacgagggacaccctgacaagctctgtgaccaggtctcagatgccgttcttgacgcttgccttgctgaggaccctgacagcaaggttgcttgtgagacctgcaccaagaccaacatggtcatggtctttggtgagatcaccaccaaggccaatgttgactacgagaagattgtcagggagacctgccgcaacattggttttgtgtcaaacgatgttgggcttgacgccgaccactgcaaggtgctcgtgaacattgagcagcagtcccctgatattgctcagggtgtgcatggccacttcaccaagcgtcccgaggagattggagctggtgaccagggacacatgttcgggtatgcgaccgatgagacccctgagttgatgcccctcagccatgtccttgccaccaagctaggtgctcgtctcactgaggtccgcaagaacggaacctgcccctggctcaggcctgatgggaagacccaggtgacagtcgagtaccgcaatgagggtggtgcccatggtccccatccgtgtccacaccgtcctcatttccacccagcacgacgagacagtgaccaatgatgagatcgctgctgacctgaaggagcatgtcatcaagcctgtcatccctgagcagtaccttgacgagaagaccatcttccaccttaacccatccggccgctttgtcattggtggacctcacggcgatgctggtctcactggccgcaagatcatcattgacacctacggtggctggggagcccatggtggtggcgctttctccggcaaggacccaaccaaggttgaccgcagcggagcctatgtcgcgaggcaggctgccaagagcatcgtcgccagcggccttgctcgccgcgccatcgtccaggtgtcctacgccatcggtgtgcccgagcctctctccgtgttcgtcgacacgtacggcaccggcgcgatccccgacaaggagatcctcaagattgtcaaggagaacttcgatttcaggcctggcatgatcatcattaaccttgacctcaagaaaggcggcaatgggcgctacctcaagacagcggcctacggccacttcggaagggacgaccctgacttcacctgggaggtggtgaagccatataaaagcatgattaagcacagcagaccaccaaaagcttcttactgaaaaaaaggccgccttaggcagaaggtttctccgacttgagtggcttcaccacctcccaggtgaagtcagggtcgtcccttccaaagtggccgtaggccgccgtcttgaggtagcgcccgttgccgcctttcttgaggtcaaggttgatgatgatcatgccaggcctgaaatcgaagttctccttgacaatcttgaggatctccttgtcggggatcgcgccggtgccgtacgtgtcgacgaacacggagagaggctcgggcacgccgatggcgtaagacacctggacgatggcgcggcgagcaaggccgctggcgacgatgctcttggcagcctgccttgcgacataggctccgctgcggtcaaccttggttgggtccttgccggagaaagcgccaccaccatgggctccccagccaccgtaggtgtcaatgatggcctcactggccgcaagatcatcattgacacctacggtggctggggagcccatggtggtggcgctttctccggcaaggacccaaccaaggttgaccgcagcggagcctatgtcgcaaggcaggctgccaagagcatcgtcgccagcggccttgctcgccgcgccatcgtccaggtgtcttacgccatcggcgtgcccgagcctctctccgtgttcgtcgacacgtacggcaccggcgcggtccccgacaaggagatcctcaagattgtcaaggagaacttcgatttcaggcctggcatgatcatcatcaaccttgacctcaagaaaggcggcaacgggcgctacctcaagacggcggcctacggccactttggaagggacgaccctgacttcacctgggaggtggtgaagccactcaagtcggagaaaccttctgcctaaggcggcctttttttcagtaagaagcttttggtggtctgctgtgcttaatcatgcttttatatggcttctacatgttgtggttctttcttgatctgcaccgcgcttatcgtttgtgttgtactgccctaataagtggtgcttatgaggactgtttctggttttgctgcttatgttgtaatgctttgaaacaatgaaagaagctacaggccacagctattttgagaaaaaaaaaaaaaaaaaaaaaaaaaaaaaaaaaaaaaaaaaaaaaaaaaaaaaaaaaaaaaaaaaaaaaaaaaaaaaaaaaaaaaaaaaaaaaaaaaaaaaaaaaaaaaaaaaagggggggccccttttaaaggacccaattttacttccccgtgcttgcaacgtaatagtttttttttggggcccccaa

SEQ ID NO: 26931 - DNA, 841 bp, Zea mays
  unsure (1)..(841): unsure at all n locations
  Clone ID: MRT4577_124571C.1
ccggccgggttcgttaataaagggagaaaatgggcagtcccctttacccaaaagaaggggagaaaaactagtctgttcagggaacatggatatgtttttctttcttcgttgtttgtagtactgcatccttcaaaaggagtaacgtaaattccgtcaaaggatgctaatgtgccatcatctttttatatatcccccaaaggctacatgggcctctaccgcaaccacttctgcaaacaaacatcaagttgatttcgaaacccggagctgcactataccagcaaatgtgtgtggcaacaggagatccgatcactggaaccggtagaaaggcagattgttctatgctaccccgaattcccaatcgagttctacgcttccaagccacagatcgcggctccatggaacttcgggaggtccccaaatcagagcccgggacttagcggcacaggcagacggaaaaaggagaggggtacgagggctggaggaggaggaaggaggaggaggtttacgcagcagtagtctcgggagcggacgaccgggaagaggtcgagcatgcgccggaactcctcctcgtccatggtgggcgcagccgcgcaggcgtgacgtctcctcctcctcctcagtcctccggttctctgtagtcagggaggcttcgcttcgagctttcgagtcttaccacatgngccggatatgacctgtgangncagtgngcccaatacatctaaggncagcgnggcgtcagcttcttgccgggagatcaccagtgctgntagtaacaatggtcgcgtttcactcgatgtaatgtaactanggatgtatcgtgaacaatcgattattttacatg

SEQ ID NO: 26932 - DNA, 273 bp, Zea mays
  Clone ID: MRT4577_124573C.1
cttaatttctctcttcttttaatcttttctttcttctaatctcatatcatcattcacttttttttcatctactcttttaaataagttcattatttcatttaaaatggccgctgttgttcatccaaataacactttcgaacctaacgatgaagaccgtaaattatttgttggtggtttgagctggaacactaccgaagatgatctatttcaatatttcaatcaatttggatctattgctaatgttaacattaaatataacccagagggtaaatc

SEQ ID NO: 26933 - DNA, 446 bp, Zea mays
  Clone ID: MRT4577_124574C.1
gttaattgttttttgttatttatggttaaggttgattcatcatatagagagacttgttgctgttcttttattgctattcaacttaaaacatggtactactctggacgggaagctggtagaacactggttgaactgtcaaaacaagactgagaagacggagcagtgtatgccgaagaggcagggggccatatgagcgaagattgcgcagggggaatgcagacggctggtggaggggccagaaagcaagaaggcttagatcagggagcaggggcaatggccgtagaagctgatgctgtaaataagcgagggaactgaatgctgctagagggtggaaagggaaaagatgtcggtggtgagcagaagctaattggcagaatgcgtgaggccgagcgctaataaggatccgagcttaaaggagccagttggtggagtggaagaaactggag

SEQ ID NO: 26934 - DNA, 514 bp, Zea mays
  Clone ID: MRT4577_124575C.1
gtatataccaaaaacaaaaagaaagaagagtccaagcacaagcactactactatcatcatcatctatggcttcatcatcctgctcccccgtcttcaagatccttatcgtcgtcgctctcgtcgctgctgccctttcgtcctacggagcggcggagtacatctgcatccagccgtgctgggagctgccgcactgcgacgcctggtgcagggacgccaagttcgccaagggcggcgactgcgtcgacttcggcagcggcctcacctgctgctgccgtcggtagctagggtagctgcgcggagaatggagccatcctggagcgtcggtctctctctcgtctcgatcgtgtaagataaaatcgatcgacagtgagtgggtcgtccatttatatggcagatgataatgcacaatacaaataaacgggtgtggttcagagaagaaaaaaaaaaccaaggatctcgcatgcgttgtttcgatacacggcatccctgccgaccgattatattattaagtacg

SEQ ID NO: 26935 - DNA, 140 bp, Zea mays
  Clone ID: MRT4577_124576C.1
gcgtccggccgagtgcaacgttatctgcgaggagggctttgaccacgaccttacccgctacagcgggcggttccgtcgctgccagatggtactcggcttcctcaccttcgtcctccttttcaccgtcttctgtctcatta

SEQ ID NO: 26936 - DNA, 294 bp, Zea mays
  Clone ID: MRT4577_124577C.1
gccacgcgatgcgtgtactgatgtagctctacgattgaaacttcatctttgggcgggtcacatgtttcaagcaccacataaggattagtaagtgtttgtggaagagacccgcattgatgatattgcaggtccttatgttagcgagtggtgtaggagaaggtactgtggggctacgtgggcaccgactatcaattcatgctggttgtctaccccagtgaaggctaacatacagcgcgctgttcaccaagccatatcatctagcacaaacagtactcctcttaagagggtccacgt

SEQ ID NO: 26937 - DNA, 370 bp, Zea mays
  Clone ID: MRT4577_124578C.1
tcgaggcacgcatcacgcgacacacgacgcgaagctacctagcaacgacttaacaacattgggtaccaagatcgtatctggtcttgcgctaagtgccctatgtctacatgcacacagtgccttcatgattccacaatgctcacttgctcgtagtgccattctaccagagcttgtccgactagatacttaaatgggcttctaacacctagctgtgcaagactacaggctacaacaagcgcttgccgcgagcgtgttacaacaaccagttaagcaattgctgcgaccattattggcacatttaaccatagaagccatcgcagcacaacagcaacaacagttcctaccagtactgagccaactagatgtggtg

SEQ ID NO: 26938 - DNA, 458 bp, Zea mays
  unsure (1)..(458): unsure at all n locations
  Clone ID: MRT4577_124579C.1
tttttttttttttttttttggcgncggcgtcgacaatgaagagtaacagcaactgctagagccccagtggccagtgccatcctcttccccctcgtcgttgccgccgccacgaatcccatccccctcccccacaaacgccgtcgttgtgcccatgtcgaccatcctccgcctgcacgcgccgtctcctgcagcggagcgctggctctcctccagctgccctgaaccacgggctcagaaccgcgtcaccactcgacgcgtcttggtctctcgcccgtccgtatggtcacaacaataggtttttgcagttccgtctacctcaccatgtctacctcaccatgcagtcacagcagcaggctccagcagcttcaccagattggtcgcccacttgtctgcgcttatttgtttgtgttctctccctgaagacctcatcatgcagtcacaacaggtgctagctacag

SEQ ID NO: 26939 - DNA, 712 bp, Zea mays
  Clone ID: MRT4577_12457C.1
tctctctcctcccattcggtcctccccgcgactcgctccagccacatgccactgccccgtgctcgcctcgccgctgccattcctccccacgagctgccgtgctgatgatggacgacccgccgccctcgctccaccggcttctcctgccgccgctgcttctagtgctgctggtgctggtatccgtctcctgcccgctcgcccacggcagcccagcgactggaggaggactcggtgccgaggaatggaccgcgaggacggatgccgcttccgttcaactcagaaattcgcatccgagaagacggctgcaggtaggcggtggaaaccaccttccaccacagttcctgcagccgaggcacaggcaccacagaagaacacactcgcccgctccatcgcccgcgccgttcaccgctccatcaccatcgccttcagcatttcgcccatcgctagcccctccacaattggcctggcctctgccttccaccccacagccaagccatgatcctcaagttggtgccccagtcaaccctttgcataagcattcctggagagcctacggtttggtctcggcaggtggcgctgctttccttgtcatggcagcggtgtttgctgtgtactgccgggcgaagaaagtgagtactgtgaggccttgggtgacaggcttaagcgggcaactgcagcgagcatttgtgacaggtgtgcccttcctgaaacg

SEQ ID NO: 26940 - DNA, 413 bp, Zea mays
  Clone ID: MRT4577_124580C.1
caaaggagatcggttggtcgcacgcatcggcagggcgggggcgaggttggcaatggcgaacaagggcgtctcgggggcgcggagcccgctgaacctggtggtggccatggcgctgtgctgcttcttctacgtgctcggcgcgtggcagcgcagcggctacggcaagggcgaccgcatcgccgccgcggtgagccggcagacggcctgcggcgacgtcgccgcggggctcagcttcgagacgcaccacggcggcgccggggccatcaacgcgtcgtcgtcgttgcccttcggtgccgacgcggcgccgccggcgttcgcgccgtgcgcggcggcgctagcggaccacacgccgtgccacgaccaggaccgcgccatgaagttcccccgcaagaacatggtgtaccgggagcggc

SEQ ID NO: 26941 - DNA, 1430 bp, Zea mays
  Clone ID: MRT4577_124581C.1
cggagagcctcgacaccggccgtcatcagtccattcatatcccagcacgaagagccgccgcaatcctcctccccgtcccctaccttcgtcggtgctctcacccgccgctggtcgccattcctccagatcggcgcccagctcgcagcccactaggcgttgcgctccctctccaaacccaacgaaaccccaggggaaccctcatccccctgtcgtctcccttattgggggccagacatggagagcaagcaatgggggaagacgccccaggaggcggtgggcgcaggcggcggtcgccaagtggatctagatgaagaggatgacctggaggagttccggctgcccatgggccaccgccccaccgagaacctcgacacggatgggctccagcaagcctctgtctacacccagctcaccgcgtccaacgtcggtttcaggctactgcagaagatgggctggaagaccggcaaggggctcggcaagaacgagcaaggtatactagagccaataagagctgacatgagagatgcaaaattaggtgttgggaagcaagaggaagatgacttcttcacatctgaagagaatgtgcaacgaaagaaattgaatattgaacttgaggagactgaggaacatataaagaaacgggaggtcatagcagagcgtgagcacaaaatccgcagtgaagtcaaggagatacagaaggtgttcttttgcaacctctgcaataagcagtacaagctggctcatgaatttgagagtcacttgagctcatatgaccacaatcataggaagaggtttaaggaaatgagagaaatgcagagcagcagtggtagtcgagatgacagacagaaacgtgaacaacaacgagaagagaaggagctggcaaaaattgctcaacttgcggatgctcataggaagcagcagaaggataagcaagaaaagtcagagacggaggatgcggcacccaaaaacatggcagcctctagcaaccaggatcagaggcaaaccttgaagttcggattctctaaaatggctccttccaaggttctagttggtagtgccagcaagaagccaaaggttgccacgaaagtttcttctgtctttggcaacgagagtgatgaggactcgtgacctttgccagagggtggcagactggcagttgcttcttctgtcgtgcattggtctggggacttgataacagcaccgagaattgtatgaacttttgagggtacactgtataaggaaatctgtactgttgttgctggattttggaagctgtttattaaccattcgcccttgtaggcaggcaatacccttcagtttgggacacacctttgtattgtaggctgtattatcgttgttggcttttaatgttaaaaaaaacctttgtattggatgctaaaaaaaaaaaaaagggcggtcacattttgtct

SEQ ID NO: 26942 - DNA, 486 bp, Zea mays
  Clone ID: MRT4577_124582C.1
atgaaggacaagccgaatatacttgtcccaattgctacgttgaggagtttcgtcctcaccgttcgcccgacattgaggaaacgagaagagggtagcctcaccgattgcgagagaagagtctcgccggtcgccgtgcagctatggatgaagacgcattgccacctctcgtctacatcgcttgcttctgctccaacaggagcacttgctaccaccgccggtgcagttgtgaaggttgtcctgtatctttcagccgacgtcgccattgtcgcagaggctgaggtacgtgaggcgccgcaaccggccgatgctggacggtatgctcccggagagctggtttcggttgaggctaagctcgaggaacctgaggttatcgatggccggagagatcgtcatgtcgaggccgagggaggagagccacagggacgtgacgtgccagcgggtgcagctcacgcggatgtcatgggggaagagttgaagaatgaataa

SEQ ID NO: 26943 - DNA, 186 bp, Zea mays
  Clone ID: MRT4577_124583C.1
agtttatctctcgggcggccgcctgggtcataatcggatagtgtcgacggagcctgcacatcatgaggattcgagatcttgggtacattcttattttaatggctgatcctgcttgcggtcttttgggtgttcttactaaagaagcagacagaatgatccttgctggttatggcacagattagttga

SEQ ID NO: 26944 - DNA, 225 bp, Zea mays
  Clone ID: MRT4577_124584C.1
gagcaaccaccaatgttgcacttctacaaaaatttccaacttgcaggggccatgaaaaaacccatttccactacttctagtacaattttcaacggccagttgccgtaaaaaattagagggatttttgtttcaacttctagggattcgttcgggggtgcacaacgggtggtcctgggggactcttaatgattggcgtcgattaccgggagcggacccttggtgtgt

SEQ ID NO: 26945 - DNA, 267 bp, Zea mays
  Clone ID: MRT4577_124585C.1
ccgggagcgcctggccgcgctgctggagcaggagaacgcgcgggacaacgtcgacgtcgcgtgcctggtcggcgacgcgcacctgctgacgctgctggaggtggcgcgggggctcggcgtgcccacaatggtgctgcgaaccaccagcgccgcgtgcttccgctgcttcttggcttatcccatgcttcaccgaatgggttatctgcctccccaagagtcgaagctgtacatgccggtgaaggagttgacaccgctacgggtaaggga

SEQ ID NO: 26946 - DNA, 596 bp, Zea mays
  Clone ID: MRT4577_124586C.1
gaacattgaacagccggccttcttttgttttttggattttaggtggcgtacaagatgacactgaattgacgcccttttattcatccattataaaggagagcttgcgaaaaaaaaaaatactgattcagaatatattacaaatgcacgacgcttatgctgatctaagatggatgggttttctgcccctgtacttgacatccttagactacaaaatgatgctcctgctatgtccaccacgttggagagtccattcaccacgtgtccccgatctaacacagctgatgacgccattccagagccacttcacatggggacaccaccaatgctgcactctatgccgcggtgctcaattttattaagaagagtagccacacaccggacacctgttgcacccagagggtgtccaactgcaatccagcctccattcaaattcactttggaacggtccagcgccggcttgcctcaaccctagactaactgaaaggcgaacgcctcattctgttcagacagatcagtggcgccaatctcaaggcctgcatacttcgcagggttcctgaatggtcacagattggcgcacacccataacacctggatcc

SEQ ID NO: 26947 - DNA, 522 bp, Zea mays
  unsure (1)..(522): unsure at all n locations
  Clone ID: MRT4577_124587C.1
acaatgctgtcatcgatgcttaggactggatcggcatggacgcgttcccctacttccaaagctctttcgcgaacagcgtaggtaacggcggagaccttttcttcgacgcctacaacatgacaaaggctgctaccaaaggtaagcctgtctgggtcacagagaccggatggcccgtttgaggcgagaccgtcaaccaggccgttcccagcgccgacaatgctcgcgtttactgggaggatgtcgcgtgcaagctggtcaacgacaacgtcaacctttactactacatcctccaggacgttcagaggggtaaccccagcccgtctttcggtatcatgcctggaggcgatctcgcccaggtctctcccctgttcgacctgtcgagccccggagcggncaaaaactaaacaacccctcctcgacaaccgaaccgatcgacgtcactgctcctggatttccatctgacaattcaccatcgnncaaactagcaccagcccctgggtcccacccggcaattgcaccact

SEQ ID NO: 26948 - DNA, 1649 bp, Zea mays
  Clone ID: MRT4577_124588C.1
ttgggaccctcgaggccggccgggagcgacttcgaggtcgcacggcacctacccccgccccattctgcaagccttgctccatttgcgactcgcgagctcaccttccacaccctacctactcctccactctgagctcacaccaaacagcccgtgcaccaaggccaccattcaccgccaccaagaacaaacgggaactcttcacagcttctcacctcgcgtcacaacaccaagacgcacgtaggagggaacctcaagcttcagtcgtccatggctcagcagcaaacaaatcccgaagaggtggtcctcgggcaggaggtcggggccgcgagggtggccactctcaaccgcccgcgccagctcaacggcatctccgacagagtggtgtacctcctcgcacagttcctggagaaatgggagaaggatgagaacgccaaattcgtcatctttaagggtgctgggcgtgcattttctgctggtggggacctaaagatgttttatgaagggaaatcaaatgattcctgcctcgaggttgtgtatagaatgtattggctttgctaccacattcacacgtacaagaaaaccatggttgctcttgttaatgggcttgtcatgggtggtggcgctgcaatggttgcgccactaaagtttgcagttgtcacagagaaaacaatctttgctactcctgaggctagtgttggattgcacacagattgtagcttttcctacatccattcccggctccctggatatttaggcgagtatctggctttaactggtgctagactgaatgcgaaggaaatgatttctgctggtcttgctactcattttgtcagttctgaaaaattggaagaacttgaaaaacgtctactggatttggacacaggtgctgagtctgcagtccgagctgttattgaagaattttcaacagatgttcaaactgatgaagatagtatattgaataagctttcaactatcaacaaatgcttctctgcagagactgttgaagatatcataaaagcatttgaatcagaagcgagcatagacggaaaccaatggatagctccagtcctaaagggtctgagaagatcatctccaactgcactgaagatcaccctgagatcgatcagagaaggtcgaaaacagagtttgcctgaatgtttgactaaggaatttaggcttacaatgaatatactgcggtctgttgtcaatggggatgtttatgagggcattagagctcttagcatcgataaagacaatgcccctaagtggaatcccactacccttgaggaggtgaagtacgaggacatcgaccgtctgttccagccgttcagtccggagctggaacttcaggtcccatctgatgattccaacaggtggagcggcaaatacgagaacacggtctatggcagagcttcccagtgactgtatacaagatcccccagccttttgttattttcatccgaaccactgcattacggaatattcagtttgcggcacgtgtgtatttcgagtgtttgtgtagcgcgacgttccaatgtatgaactgttgcaaaggttacacgatgacatgaagtttgatccaacaccaaaaccatctattagatgggaaagttctgcactttggatgttaaaacgccggccagaagctc

SEQ ID NO: 26949 - DNA, 1121 bp, Zea mays
  Clone ID: MRT4577_124589C.1
cgaggcggccgggctctctctctcggcacggggaaacaaagggggcaggagccactgccaacgacttcgaggtcgcacctacccccgccccattctgcaagccttgctccatttgcgactcgcgagctcaccttccacaccctacctactcctccactctgagctcacaccaaacagcccgtgcaccaaggccaccattcacctccaccaacaacaaacgggaactcttcacagcttcgcacctcgcgtcacaacaccaagacgcacgtaggagggaacctcaagcttcagtcgtccatggctcagcagcaaacaaatcctgaagaggtggtcctcgggcaggaggtcggggccgcgagggtggccactctcaaccgcccgcgccagctcaacggcatctccgacagagtggtgtacctcctcgcacagtttctggagaaatgggagaaggatgagaacgccaaattcgtcatctttaagggtgctgggcgtgcattttctgctggtggggacctaaagatgttttatgaagggaaatcaaatgattcctgcctcgagtatagaatgtattggctttgctaccacattcacacgtacaagaaaccatggttgctcttgttaatgggcttgtcatgggtggtggcgctgcaatggttgcgccactaaagtttgcagttgtcacagagaaaacaatctttgctactcctgaggctagtgttggattgcacacaaaaattgaagaacttgaaaaacgattgtagcttttcctacatccattcccggctccctggatatttaggcgagtatctggctttaactggtgctagactgaatgcgaaggaaatgatttctgctggtcttgctactcattttgtcagttctgatctactggatttggacacaggtgctgagtctgcagtccgagctgttattgaagaattttcaacagatgttcaaactgatgaagatagtatattgaataagctttcaactatcaacaaatgcttctctgcagagactgttgaagatatcataaaagcatttgaatcagaagcgagcatagacggaaaccaatggatagctccagtcctaaagggtctgaaaagatcatctccaactgc

SEQ ID NO: 26950 - DNA, 108 bp, Zea mays
  Clone ID: MRT4577_12458C.1
tgcctttctggaatgttcagagatgatgtgtcatggaaccttcaaacaagtctcttgttcggatgataatatctagtgtccttatagcatgctggttgatctttcata

SEQ ID NO: 26951 - DNA, 535 bp, Zea mays
  Clone ID: MRT4577_124590C.1
cgaaaacagagtttgcctgaatgtttgactaaggaatttaggcttacaatgaatatactgcggtctgttgtcaatggggatgtttatgaggtatggatgtcgtaccaatgagctgctgttgccttaaaaatgactcttcaacttggtgattgacattttcagtttgattttacgacagggcattagagctcttagcatcgataaagacaatgcccctaagtggaatcccactacccttgaggaggtgaagtacgaggacatcgaccgtctgttccagccgttcagtccggagctggaacttcaggtcccatctgatgattccaacaggtggagcggcaaatacgagaacacggtctatggcagagcttcccagtgactgtatacaagatcccccagccttttgttattttcatccgaaccactgcattacggaatattcagtttgcggcacgtgtgtatttcgagtgtttgtgtagcgcgacgttccaatgtatgaactgttgcaaaggttacacgatgacatgaagtttgatcc

SEQ ID NO: 26952 - DNA, 366 bp, Zea mays
  unsure (1)..(366): unsure at all n locations
  Clone ID: MRT4577_124591C.1
gtttctttttctcctccgnctcgncgtcggccatggcacccgttggtggcgccaaccacttcccggcgccgcgtagcctggtattcgccttctacctcaccgggcatggcttcggccacgccacccgcgccatcgaggtggtgcggcacctgatcgcggacgggcacgaggtgcacgtggcgacggccgtgccggagttcgtcttcaccgccgaggtgcggtccccgcgcctccgcatccgcagggttatcctcgactgcggcgccgtccaggcagatgccctcaccgtcgaccctctcgccacgctggataagtaccgtgaggcggcagtgttaccccgcgagttcatcctcagggccgaggctg

SEQ ID NO: 26953 - DNA, 337 bp, Zea mays
  Clone ID: MRT4577_124592C.1
gatccctcgagtcttgtggggtgcgatccgcgatgctggcgcgggggcaaggggggtctcggtttgaattagttgatttcgcagttcagggtgcgcatctggtgagtagggatccagagaacgggcgttttgagccggatctaggggtagtggccactgggctagcttagccttccgctaatgacagtatagtgacgccccgtgcttttctggttctagaagggtgcgccaggtgctcttgctgtgtgatctttgtcgccttgtgacgctggggaccgggttattggcgggagtttgtcagaataatacataaagaactggtgccacgaaatcgggg

SEQ ID NO: 26954 - DNA, 286 bp, Zea mays
  unsure (1)..(286): unsure at all n locations
  Clone ID: MRT4577_124593C.1
cnaaacctagaacaagtactggnntaccgnccgataaaganncggcggcttganaacgaagnctngncgngggccacaaagccaggcggaaaattggggaacaaaaaccaangncttcccgngaagggccaaangacaggganatnccaacggggaaacccttaancttacgcccaaccataaaggtggnaccttnccatcncccatttaagngcccgcccnggggccttgagggcnagcncccaancncaaaggttnnattggggaangccaaaaggattgngtt

SEQ ID NO: 26955 - DNA, 130 bp, Zea mays
  Clone ID: MRT4577_124594C.1
acactgctctctctcagccatgctatttacctccactacggggagcatgatcaggcacaaaagcttacatcaataccacctcgtagtgaaacacactctaatcaacattgatgacgatacatgttctact

SEQ ID NO: 26956 - DNA, 225 bp, Zea mays
  Clone ID: MRT4577_124595C.1
gtactacaaaatgttggaacaaatagtttgaaggaacttgtatacaaaacttcttatcacaagagtatattgttaacggcaggatcatattgatctcttcaaccagattagacaattattctttgggataggatattggccgtttgaggggttacgtgtaaaaattgacccagttgggcaagattttatttcttttagagaattttccattcatgtgattaattc

SEQ ID NO: 26957 - DNA, 627 bp, Zea mays
  unsure (1)..(627): unsure at all n locations
  Clone ID: MRT4577_124596C.1
ggtatacagctagctagctctaataagggtacagattattgtgtttggctatgccaaattaaagatcctttacctgctgcacattcacagattgacgaggttagaataatactcgattggctagctaggctcatacacgccgggttagccggttaggtgaaacactcggacctgagtacctcctgagaatgagatcatgtacaatcacggaccggtcacacatgcacgccactttaattgcatccatatagctcaatcgtttaattggcagatggcgatgggtattaggtttgcaccctttgttagttgtagcagcagatgaagtctttctcaatcgtatgtatctttcagtagaaaaaagatgaggtttttttattgctggacgccgtccattgggcacggcccggcctgatgtactagcatgcccctgtctttgtttagacgtacagtacgtatgcagtgcagggacgggtaggtaaaaacgacaggtgttctagtctgcaggtcgccataatacaagtatgttatctggagagggcagatgccggccgattcctgttaactaaaacaaaaacagcnccgatcggcttatgaaacaacagtaaagtctacgactctggctgcgtg

SEQ ID NO: 26958 - DNA, 238 bp, Zea mays
  Clone ID: MRT4577_124597C.1
aacggatttagctcgccccacgtggtcaagggagctacctggcggccccccgctccacgatgaccgtacagtctgagccaatgtcacggtctcttggggcgcgaacgcactaacgagggtcacggcgggcggcgagcagacgctcctgctgctagctcgtattctgactgataggctgctactcataatccggcacacggtaccttcagcccaatatcttttcaaccaagcgcgatga

SEQ ID NO: 26959 - DNA, 141 bp, Zea mays
  Clone ID: MRT4577_124598C.1
cggtggtgaaatggaacgattgggcagtttgctacatacaatttcatccatttcacaaggagaaaaaaggatgcatcataagagacgtcaggtacttacgtctgctgatagcttgccctcataaaaagtggcatgaacaac

SEQ ID NO: 26960 - DNA, 425 bp, Zea mays
  Clone ID: MRT4577_124599C.1
acttcacaatacacgaatatgaagataaccgttattcacatacgaagcttgatatcttcatgtctctaaatttaaatctctaacaagcaaacagcactctacatacctactctcttgcatgaaatgcaaaacagcgggacccctgagaggagccactcatttcttgcattcccactcaatattgctttaggactactcgccaacatcacccttgtaggtgcctgaggtctcctcccataatggcttgcacctttcgaggaatgccgttctacccttttccacggtctccaccttgccacaccagatcttgagggtgctcacatgcaagtctcttactattgcaaaagaccgggacccatggcttattggagctgacctcggtcatagaaccactatctaaggcctacttctccttgctctcctca

SEQ ID NO: 26961 - DNA, 730 bp, Zea mays
  Clone ID: MRT4577_12459C.1
ttttgaaatgtcaccggaggatgtgttcccccaaatttattttatttcaaaatttgaagggcctgattacatttgagctggcacaaaatgttttgtcggcgtggaggagagaggctttgctttggcagagttgcattacatagttaaacaaattgcaccagagatctgctatggctctggaggctactggcattctgagacgccaaagttgagcctcaattttacaagctgctaagacctgctgcagggattgagtttcattcctggagacgataccattccaacgcttccaaagctgccagcagcataatgcaatgaaagttccaaactgctcctcagggatggaactccgtccggtataactcgctgatcggttgatcagtaggccatgaaaaaacaattgcctccaagaaggccacagcaaaaccacagcggaagatgatttgatcagaagtttcatcttcaatattacacacttcacaaattggagaatagacaatgttcttgaacaggttgtgacgacactggatcctgccatctatttcaactttaacatgctaagggacccttcacggcggtgggcctctccagacagtatatctcgggcgcggcactgcttcgtttcggtgatatctccgcccccttggaccattgcgcctctcctagtgttgagcctctcacctgcactttgttttgctcctgctatgatgaatgcttctagagcccactt

SEQ ID NO: 26962 - DNA, 376 bp, Zea mays
  Clone ID: MRT4577_1245C.1
gagctcacttgttggcggccgccctttctttttttttttttttttttttttttttatgtagccaggcgctttaatactgttaattaaacaagaatgctcaccaacaaggatatatgctagccgccaaaccggatgtttcacaaatttcgacgacaatgggtgtttaaaattaagacgtcaggcaactttaaacaccggggtacaaacttatttccaacagaccccttgtttccacacacaaaaaggttagacaattctaacacacttcatgactaacatgaagctggaagtgcgagaagggacccgcggggattcacgactactccatccataagggcattcaccatggcatggtcgcacttaaaaaggaccgggg

SEQ ID NO: 26963 - DNA, 713 bp, Zea mays
  Clone ID: MRT4577_124600C.1
aattcggcacgagggaattttcaaatgaatggcttgaaacaatcacctcgtttctaattgccaaataacatatcgagacaagtgtcgaggatatgatacccggtccctggggcccatcggtcagcgaccacactggggaaaggcctctaacaattggggctcgctagtcagtcagaggaggtaggtaacgtctaccctgcaagaactcgtccctggacaaacctcgtggcaccgagcctggggtcgggcatggcggaaccggacagggggtggcatgccgaaggaaaaccactcgagtggatctcgctcctggcccgataccgacccatcataaatgaccaaccgcattaattgtgcctggcgctgagccacaacggaggcgccggtctgccttccactcatgacatacgaatccctcgggccacagagcactcatgacctacgagcccctcgtactgcggtgcatttgtggcccacacgtcccctggccggtggcacactcatgatctatcggggctaggcctgagcgcacaggccgttagcagggcgcaacacgacgagccccatgctacgaaggccaagggttggcatagcccaaatgatagcgctcgagcccacattgcctgcaccgtgcataataaaaaatacgggacagtcatgcgaccgcaagcacgcgtggctttaccccatggtaagacgcccaattttacatc

SEQ ID NO: 26964 - DNA, 320 bp, Zea mays
  unsure (1)..(320): unsure at all n locations
  Clone ID: MRT4577_124602C.1
gaaagggagngatggaaatgaagcagaggngaacgggagaaaaanggagaagaccagacgagagatactagccttgctgaggtgggatgcggctgaggacagaccgacagaggaaggtgaattgtcgggaaaagagcgacagatgaaataggggactaggagatgggatcttcaaaatgggcgaccaggcaacacggtgcatagaggagataacgaggatgagaaccacaccacttcttcgagtcaaggtggaggaggaccgaggggtttcatgagttcaatggagcttcaatctcctggggcaatgttcaatctgtcga

SEQ ID NO: 26965 - DNA, 621 bp, Zea mays
  Clone ID: MRT4577_124604C.1
ctcgaggcggctctgtctgttcgtaagacgtcgtcgcttttctctcactctcccttcccctcctctcctgcggatgctacctccctctccggatctacgccactctccccccccccagggctgaatcaccgtcacctcggcccacagcaccgggtgcgtgggaggggggaccaaggaacgaatgaggggaggcgcctggcgccagaaatgaccgactcctactgcccccactgcaataagcatacggaggtggcgagtcgaccattctcgcgggggacaccgagcgcaccgaggagcgcctcgtccttgaggagcactccgtcgacgagactctccgagtggcgtaccttcgctaaccagcccaatgacatcgaccgcggacgcctccaaggcccctccaacccgctcctcagcgaccctggcctctccagcgacctccccattctcaagggagcccaaggcgacttcctctcctccccccacggtaggcggcagaaccgcggctccaatcccgaccgatacctccatcctggactacctgacgataaccgacatggatgaccggctacggcttgtggctactattaaggggcgacccaatgtgaacctttaagaaaattg

SEQ ID NO: 26966 - DNA, 639 bp, Zea mays
  Clone ID: MRT4577_124605C.1
ccgctcgagcggcgggcgggaacgtcacttggctcggctccgctctcctctctctccttcatcctcctccggtttctgatcgcgaccatgggaacccgcggactcgccgtgctgctcctagcggcggtgctgctgcaggccctcctcccggcgtcggaggcggagggcctggtgcggatcgcgctgaagaagcgccacatcgaccggaacagccgcgtcgccgcgagcctctccggccgcgaggaggggcagcaccacctcatcggcggcgccaacaccctccgctccgaggaggagggcgacatcgtgtccctcaagaactacatgaacgcccagtacttcggggagatcggcgtcggcacgccgccgcagaagttcaccgtcatcttcgacaccggcagctccaacctctgggtgccctccgccaagtgctacttctcgattgcgtgctacctccacgcacgatacaaggcgggtgcgtccagcacctacaagaagaatggaaagcctgctgccattcagtacggcactggttcaattgctggatatttcagtgaggatagtgttacagcgggtgatctagctgcgaaagatcaggaattcattgaagctacaaaggagcccagtgttactttcttg

SEQ ID NO: 26967 - DNA, 395 bp, Zea mays
  Clone ID: MRT4577_124606C.1
cgttgctgcacgcgtccgttacctaggctcctctccagcggccggcccgcccttttttttttttttttttttttttttttttttttggttttttttttttttttttttgttttttaaaaaaaaaaataggggcaaacaggggtaaactccccaagagcttcactcccagaaagcatgtccttagggtgctaaccttaggcaaaaaaaccttccttggtttgccgcggggtcccattttgtttaaactaaaaaaaaaaagctttttgcaaatgaaaccaccctgccccaaaattttgaaaaatattttttttttttgtttcccctggcaattttgaatcactagtccccaaacaaggcggcactggcatcgggtgaattcatgtttaaattcatgc

SEQ ID NO: 26968 - DNA, 317 bp, Zea mays
  unsure (1)..(317): unsure at all n locations
  Clone ID: MRT4577_124607C.1
cggggccggcccacgcgtccgaggaacttccccgacaatggcatctttttttttttgagccacagcacgtacaactgggccgggtcgaaacggagcgcggggatgtgtgcctcttccgatncctggccgaaagaccccgcttcctataccatacacgttgcgtccgacgcttataacaccgcctttcttggggagtgtattgcatccatactgggacatgttccatactgttcatcccatggctgattaccattctgcgtctctgagcggttggtgtttgtcccatatatgtcatcaacaagcctggtatccataac

SEQ ID NO: 26969 - DNA, 419 bp, Zea mays
  Clone ID: MRT4577_124608C.1
gggggacaaccaaaagcccaaaaacctgggggggggggaaaaaaaattcacgggtaccaccatttttgaaaaatgcagggagaagggttggcggaaccagttttggtaaaaaaaggggtgaagggattatgggccaccccaaccgaggaaaaacgggggagggggccattgggctcaaagccgggctcgggggaaaaaaactcccaaaaggggttgcccacctggaacccggcctggcccaggggggagccaaaaaaccccctaattttggtcccccggttggggttgccctttttcccttttggggggcgggggttttttttggcttggggaggggccccccccaaaaatcccccttggggtttttttttttttccttcaaaaaagggggaaaaacgggcccccgggaaattccgggc

SEQ ID NO: 26970 - DNA, 355 bp, Zea mays
  Clone ID: MRT4577_124609C.1
caagcgacatttaaagagcactacaggcgcttcactctagcaacaatggcggacaagagggggcccatacttatgctccttgctctctctgcatgcgttgctaacgcgaccatttttcctcaatactcacaagctgctatagctgtcctatttcccccataccttacatcaatgaaccgtttaactatgtgattattcattccttcaaccctacaggctccaacacgcaatcgcaacaagcaacttacctttatcacccctgttctttcaacaatcgccagccctatctttggtgcagtcattggtacagacctatcaggcacaccagctgcagcaactcgtgctaccagtgatc

SEQ ID NO: 26971 - DNA, 216 bp, Zea mays
  Clone ID: MRT4577_12460C.1
attatatatttatcgggccaaatccttttattttggcccaatcccaaaggcgaaaccatacactccctagacaacaccttccagcacccaaaaaaacaaaaaggggcgcgggcattgaaaacaaccccgccccctgtgatggcccacaacaaaactctaaaaaaaagggggggaaaggcgcaccacacaagaacccctggatgagaaaacaccccc

SEQ ID NO: 26972 - DNA, 1263 bp, Zea mays
  Clone ID: MRT4577_124610C.1
gtgccttgaaaaaaactcaaacattcggccaacgaagatcaatatacaaagtagtagcaactaacttgttggtatacttacagaaatacttggttcagatcttttttcagtagcaacaaacgaaagcactgcatctatgtcattcctcgtcagacttctgctgcttatgttgcttcatgggatcctaccggtatcaacttcgttcaattaggcgccaacaatagcgttctgcagtgagacgagccgacaagccttgctggaactgaaggccatcctaggctagctatcgagcaggttgtcctcttagaacagtagtggtagcctatgcctctggccaggtgtgacatgcagccgtaggcacgagggcacgatctcagtgcttgatctcagctctgtcggccttgcgggcaccatacccacgtccgggaccaacttgacatttctaacgagcctcaaccctgcaatgcattattgccatcggttgcatgtagttgcttccttcatccagcttcagcttcctatcctttagcaaccactctctttccatttgacatagctaactcccctaattactttcacttggattcactttgcacctcagtagcaatttcctgttgggtcaacatccacaaatctttcttatcaagatcacatagacagctccacatgcaagaagcatgtacatggcaatctcctagagcaaaatcagatcatccctttcaatacttgggtctgccttcatcataacaacaacactccagaacttcatcattgcgatcagtcaagacgacctctttgcagaaacagcagatactcggagcgccagcaatgggatgtactcaaatatcgcaagtcaaactctccagtgcctatcctctgcaagttcaacaatgacgggtcgcagcgtttgagataaaaggtcaatgccaataatctaaaagatcaaaacagaattcaccagtcatcagataattttaaagaaagaggcaatgcttgcaaggccgatgacttaaaaacaatgtattaatagctagtaaataagacttcaaatatccaaaacagaaaagaaaaggcaaataaatccagtaaaaaaacgggacctcatttgtccaacacacttacacaccaagctaaccgtaaccttcttaatagataatgagtactgatcttgcaggatggccacaatggtgaggagatcttaggggtgacggaggttgcgctcgtgctcctctggtctcaccaatcatgtcgtaaggcttggcc

SEQ ID NO: 26973 - DNA, 2990 bp, Zea mays
  Clone ID: MRT4577_124611C.1
gagatcttaggggtgacggaggttgcgctcgtgctcctctggtctcaaaataaagtgtttgtgccttgaaaaaaactcaaacattcggccaacgaagatcaatatacaaagtagtagcaactaacttgttggtatacttacagaaatacttggttcagatcttttttcagtagcaacaaacgaaagcactgcatctatgtcattcctcgtcagacttctgctgcttatgttgcttcatgggatcctaccggtatcaacttcgttcaattaggcgccaacaatagcgttctgcagtgagacgagccgacaagccttgctggaactgaaggccatcctaggctagctatcgagcaggttgtcctcttagaacagtagtggtagcctatgcctctggccaggtgtgacatgcagccgtaggcacgagggcacgatctcagtgcttgatctcagctctgtcggccttgcgggcaccatacccacgtccgggaccaacttgacatttctaacgagcctcaaccctgcaatgcattattgccatcggttgcatgtagttgcttccttcatccagcttcagcttcctatcctttagcaaccactctctttccatttgacatagctaactcccctaattactttcacttggattcactttgcacctcagtagcaatttcctgttgggtcaacatccacaaatctttcttatcaagatcacatagacagctccacatgcaagaagcatgtacatggcaatctcctagagcaaaatcagatcatccctttcaatacttgggtctgccttcatcataacaacaacacttgcctccagaacttcatcattgcgatcagtcaagatgacctctttgcagaaacagtttttaagtagcaggtcaccaaatttgcttgtacaggtatcaccaaacaagaaacaccaagccagatgccctgagcaaaagacatttgtcgagcaaaactttaatgtttctttcaaacaccatcaataacatgagctaatttcagcaaacaatgtgtgcagtgttgataaaaacatctatgagtcgttgatcctggaatgagattgtgcaaacctcttttgtgcccatcattgagtttgtcgcagttctgttatattagtatacaaattttaagtacaagatattttttgtttgttaatattcaatttctattccaaataaattttggtagttacttatatatgttgagtcaacattaattggaaaaggtaatgtaaacttttcttggaaatgatataaacttctaaagttcacttaaagcatcaaatagattgtagactaccaatttcaaatagtggttatagattaagaaatttaccttgtggattatattgatgtctttcacaaagtgacaaaattcaactatgtttatgttatcgatgtcaagggaaaacaagaattggtttgtggtcatagaagacacagtgctaccatcttgattgttgatcagaacatgtgtggaagaccttgttaaaactaccaaggtctggatgtatcatcaattcctagctcccaaaacattgtaaaatctattaaggtattcatctaggtgggaaaggactgctttcagctacaatccaaaaggaaaatgaatacatgtaaatgcagttaggagaatgagaaacggatgccaaagtttgtttctgaacaacacaatttcacctgtaaacagcacatggcagaaaaatgcaagaatcctagtttttagcccaagtaaacaccaaaaatgtcaatttagaaagcatgctcaagtcatgtatagactgaatgtgagagcttcaatcttaaatttagctggtatgtgaatcaatagtatggccagatactcggagcgccagcaatgggatgtactcaaatatcgcaagtcaaactctccagtgcctatcaatcatgtcgtaaggcttggcctccttgcggcgcatgagcatggggatggagcggtcgacgcagaggacgacgacgggagcgctgtgtaggggacgttgcagacgaggccgggcatatggaggagcgaggcaacaacggagagcaggcgtgggtgggagacgagcgcgtggaggtcccggtagatgggggagttgatgccagacttgagcacgattgcacgaatgagcccagcttcactgcctcgatggcgtggaggtccaggatgagcgaccgtgggtttaattagaggtcatctgtaattagtgtcagtatcagggcttcctccattccccgtgattagaaacgcgccacactgtcatattgttcctttggtatagatgataaaacatcattcgcgcgatcaaaatccccacgcattacaagtgttttatattcgattaaggagtaaagtatacccactgcaataataaggtacattagccgtgtacaaactacaagtggaatttaggtaacaaagatgaactaacttaaattgcttatcaataagatagacacggctttggtttgcaagatatcctagtaatggccgatccaagtgaaacaaagacggcttttaagcagcaggtcaccaaatttgcttgtacaggtatcaccaaacaagaaacaccaagccagaagcctttcaataaccaacttcacgttgtaatgtgcagtttgtaggcctcagagtagtcatttctcaaatgcaacatccttcatgtctcgatgaagaatgtgattttcatgcagataatcaagagccattaggagtcgcacacttacacaagccgcttgcaaagtttctagatatgaaaaacactgtccagtagatacatacatgtctcttccctcacaatttccaataacaatgcaaatgtagcaaccctggaagagatgccctctgtatgtcaaggaggatgagtgtctcctccatccttgtgtgctccaacatcaactacattacgtcctcgtgccacttgccgagactcctgttcttagcaacctccctcgtgccgaattcctgcagcccgg

SEQ ID NO: 26974 - DNA, 378 bp, Zea mays
  unsure (1)..(378): unsure at all n locations
  Clone ID: MRT4577_124612C.1
aaaccgggccgaaccaagccgtcgcttcggactttttaattaacacacacatgttgttgataagccttggcgccgccgggtacgcgggggccaccgngccgcctcgtccccgaagatgcaccctgccgtttcgcgccgncgcctcccctgcggcactggaccgccggcgacggccgcataatgtggctggcgacttcttcgtcgaccaccgctgcatcgactgccagacctgccgatggatggcgccggtacgcaggcagctttctcccatcctccaccttcaatcgctcgcttggctaaccatcattcatggcgtgaggcgtgccggcatctatgcaggaggtgttcaagagggtggatggcaaaggccgccgtagc

SEQ ID NO: 26975 - DNA, 357 bp, Zea mays
  unsure (1)..(357): unsure at all n locations
  Clone ID: MRT4577_124613C.1
atgtggcaggaagcggcctaagcgtgttttttttctttgtttttgttttattaaactccaactgtattatgaccatgcgtatattattggtaataccacacatgaaaatgtgtgtgcgatttacgtggttgtacgcatatatagatagtgagagaggggtagaggagaatatgcatggtcataataaagttgtggggttggtgaggaagaaaaaataggacgaagaaaggttgtgggtgggttgtgacgatgctaagggcgatttcgggcgcactggcgggcgtttctaggggataagaggtcgtgaagagggttggagtnaaaatgagtgtaggtggtttttgtgggaaatggttg

SEQ ID NO: 26976 - DNA, 211 bp, Zea mays
  Clone ID: MRT4577_124614C.1
cccacgcgtccgaggaacatatactagtaccagtatatataaattataaaacaatttattcatacgaattgtttgatcaatttcttgcttcaaaaattatgttcattcaagatttatgggatatgttgtttcatttatccgtacttgtgttccaacatgaaattcttgcttcatactacattattacataaattccgtgtgtttttatact

SEQ ID NO: 26977 - DNA, 232 bp, Zea mays
  unsure (1)..(232): unsure at all n locations
  Clone ID: MRT4577_124615C.1
atttcngcacnagggttacggggcggccggggggcctcatatgactcttacgcttattcattccactgtgctgactcccatgtagggctgtaacattttccttcacccatgtgcttggggaatactcacataaaaattggggccactgtacatgtctactcttgccaatgcagcgggggggggcaccttatctattttctttctggtaatggcaagcgcgtgattaagaggg

SEQ ID NO: 26978 - DNA, 323 bp, Zea mays
  Clone ID: MRT4577_124616C.1
aacaagccaaccccaacactagagggggaaatattatttgccagctttttccaaaaatagaaaacccccgggggccttaaaaaagcatccaacggcatgggctcaaaaccatggccatccatgaaaaccggaagcccccccaccctttttatttatgaaattatcaccccaagccacgcaatgcccccccacacatacatatttttatggttggaaaaatatatggataggccaggggcaatttcacggatacactttgaagggaacacgagctccaaattccttgaggatcttgtattcgctgaaccctgctttggggaaaa

SEQ ID NO: 26979 - DNA, 281 bp, Zea mays
  Clone ID: MRT4577_124617C.1
gggaggggtgacacagtgttccctcctggcagcaattaagggtcttcaagttcgtatgttaggagaggccaaattgtctcctgtcattggcgtgcacacgtgtgtatgtatgtgtgtgcgtgtataaggtgtcttacaatcttaaatctatgtcagacaagtgctagaagactggcctgactatatgaaaactggtctgtgtaacatatcgtatatactctaaggagtttgaccgcacacttgtgcacagagataaaaagcaactgatttggggcatgagg

SEQ ID NO: 26980 - DNA, 529 bp, Zea mays
  Clone ID: MRT4577_124618C.1
ggggcaaaaattttttttttttgggggcccccaaaattttttagggggggggggcccccccccgggaaaaaacaaacaggaaaaaccgggggaaacccttggggggcccaatttttttttggggggaaacccaacccgaaacgggaccgaacgatgggtggttttttccccccttcccggaagggggggaaacgggggggggaaaacgggaaacaaaaagggggtgggggcccccccggggctaaaaggggacccaaattttttgcccttggggggggaaccccccctggaagggccaaaaccggtttggaccccccccccccggggttggaaggatttttccccgccaatttaagggaaaccccgggggggtttttgcccccccggggggcccccggggaaaaaaaaaccccggggccggccattaacccccctggggggaaacaccctgggggccgggttgccctgccccaaaaaaccgggtttgacggggagaaaggccaccccctgccccgggggaaaggggccc

SEQ ID NO: 26981 - DNA, 379 bp, Zea mays
  Clone ID: MRT4577_124619C.1
cttcaaaagcaaaggggcaaatagtcttttacataacacccgcccaaaatgatttgtgagcattttggctacgggcatagctcatgggtaaaccaaaaaaggagcgggggggggttggtttacaacccggtaatgacacgagattccgtcacctaaaacattacagctttgaccccaaaacggtaatattgacctgacactagcaaaacggcactagattgggaagggaatggccacttaaacctttaagccactgatgttcctccttactgtagccttgtgaaacttactacccttaaaaccaacataatggttggtgtggctataaagcactcttggtgcaggcccgcaaatgactgacaggttccttagcgttctt

SEQ ID NO: 26982 - DNA, 320 bp, Zea mays
  Clone ID: MRT4577_12461C.1
gggaccaatggacgggttatttcaaaaacaaaagatagccccctcagcacaacaaaagttccagactacataccccctttgggtgcaacgaaagcacatgattcccccaccttttttctatacccgccgccttattggcctttcaacttccaaccggggactttttgaatggttttacagtttctgacttcagtattcaaccgggggtcaagggtaaaaaattcttatttccagccaggggcataactgttcggaaatatcccttgttatacggacgaacgtttcttgccacgaaatatcttgaggaaaaggtgaaaact

SEQ ID NO: 26983 - DNA, 250 bp, Zea mays
  Clone ID: MRT4577_124620C.1
cacacatcaagaaagcgggagcgaaaatactggtgatagagaccgggcgcacgattagtgtagttagactgcactcacgttcaaaacaaacacagagcgtgctgtgtgatctctgaccgcgacgacacctacggagacctgcagcaccaagaggtggatgggggccaccgtatccttgctgactgagcctaggccccaccgtgcacgcacagggtcggcgggcacgacactgtggcactgacgaacacgc

SEQ ID NO: 26984 - DNA, 137 bp, Zea mays
  unsure (1)..(137): unsure at all n locations
  Clone ID: MRT4577_124621C.1
acattaaatcaaaaaacccatctcaccataacattcttatccnacacccttcattcgccgtcgcttttttaaaacgataaactcacaacaaaatattcgccctctaaacacaactaattgactcgcaaaaccacctt

SEQ ID NO: 26985 - DNA, 121 bp, Zea mays
  Clone ID: MRT4577_124622C.1
tagctcttttttttatttagagaaaaggatgcatacttgcctaccactaaatggacaaagtcttttttatttttgtaaaagtctccctactcctgtgctattatgccattattgcttgctt

SEQ ID NO: 26986 - DNA, 392 bp, Zea mays
  unsure (1)..(392): unsure at all n locations
  Clone ID: MRT4577_124623C.1
cccacgcgnccgacgttgntttttttagagagatgagaagacggggggtgttagggagctcgggcaccgcgcgcactgggcatctaaggggtcctcgcgtgtccgtcgacgcgagggctgggtttcctcgccgctgggtggcaaagatgtccgcccgccgtcgtggacctgcgtgtctgatgacattgaagcatcggcaaccatcctgggatgttccctgggacacaaggacggggtacgctgtagccagaccaactttggggccggtgcctaaccaatttctcgtcggcgtgggaacatcaccgcggatctgcagagcacgtggaccgatgtctcctcaccatcattctcgcgcgaggacacgtatcatctgaaaagcaagttggtacctg

SEQ ID NO: 26987 - DNA, 170 bp, Zea mays
  Clone ID: MRT4577_124624C.1
aactcgggctgcttcatctgagcgaccgggagggcatatcatgccgtgaggcccaggatggcagttgtgcggaaggaggcagtggacacgatgcatagcacaaggctgagctgcatgcggtcgagcagcaccatgaccatcactgggtcagggcgtgggggtgcgagagg

SEQ ID NO: 26988 - DNA, 177 bp, Zea mays
  Clone ID: MRT4577_124625C.1
tttttttgggccattttttgctgtttatcctgttttaatcgcacaaaagcttggtggctgagtatgattcatgttaataattttcaacagaaaatggactgtggaagggaagggacaaaaatacacatgtggaggctgatttctaagctctaaatggaagaacaaaaagaagggcac

SEQ ID NO: 26989 - DNA, 2037 bp, Zea mays
  Clone ID: MRT4577_124626C.1
aattcggcacgaggggaagggtcgcgcgagagctcgagctccccgtctctgcaccagacaccagcgcaccaccaaatccgagccgaatcttctcgaccccgctcctccccctccctccgacccatcgccattttcacgatcctaaggtccttgcccgaccaaacgacccgtgacctccgccacagctgctgcagagctaaccaatggacgtgctgaagcgcgagctgcagcgcaagcgccagctcctcaacgccgatttcggcggccgcaagatcatccgccgcgccgaaatcgaggcacgcgagctccagcgcatccgcgaggtcgagcgccagctcctcctccaaaagcagcacaggcattcccgcccgctgtcctccccctccagttcctcctcaagctcctcgcccacctccgcagccgctgacgccgacgccgacgcgtcgcgggcagagagcggctccaaggagtcgctcccgagggaggaggtcatccggcgcctgcgcgtgctgcggcagccggccacgctcttcggcgaggacgacatcgcgcgcctccgccgcctccaggtcctgatcgaggaccccggcgcgctcgccgacatcgacgcggcggagatcggggagggccagaccaacgacttcctccgcgatatccaggcgatgcgtgctaaggctgcgactgtcacgaagcccaaggcggccggcgcggagaccgagcgcggggagggcgacagcgtatcgatagatgtgccgttcgaggagctctgtgacgaggacaagatcaccgcgttcttcaggaggctgttgaacgagtggacccaggaggtggacggtatgcctgaggcggaacggaggacggcaaaagggaaggccgcgatagccacctgcaagcagtgcacgcgatacctcgaccctctgttcaagcagtgcaagaagaaggctctcccttctgatgtccgacaagcattgctggaggtggtcaagtgctgtaggagacgagactacttggctgcagtggacaactatatcaagctagcgataggtaactcgccctggccaattggtgtgaccatggttggtattcatgagcgatcggctcgcgaaaagatctacacgaacagcgtggctcacatcatgaatgatgagacgaccagaaagtacctgcagtctgtgaagaggctcataacattctgccagagaaagtaccccactgatccatcaaggtcggtagagttcaacagcctggcaaatggtagcgatctgcagtctctcctggcgcagcaaaacgcgaagaattcagaagaaacgcttcggttagtggcagcgtcatgaaaggttggattatatctgtcctcggaattttaggcaagttcgattcttgtgtgatttatttgtgatacgaattagtacttgtaagaacctgaattgtatgttcggtcgttactcgttactgccttactgaaccgtggaacaggaacctaatttaactggagcatattgatactgtttgtggacattgctagactacttggctgcagtggacaactatatcaagctagcgataggtaactcgccctggccaattggtgtgaccatggttggtattcatgagcgatcggctcgcgaaaagatctacacgaacagcgtggctcacatcatgaatgatgagacgaccagaaagtacctgcagtctgtgaagaggctcataacattctgccagaggaagtaccccactgatccatcaaggtcggtagagttcaacagcctggcaaatggtagcgatctgcagtctctcctggcgcagcaaaacgcgaagaattcagaagaaacgcttcggttagtggcagcgtcatgaaaggttggattatatctgtcatcggaattctaggcaagttcgattcttgtgtgatttatttgtgatacgaattagtacttgtaagaacctgaattgtatgttcggtcgttactcgttactgccttactgaaccgtggaacaggaacctaatttaactggagcaaaaaaaaaaaaaatagg

SEQ ID NO: 26990 - DNA, 244 bp, Zea mays
  unsure (1)..(244): unsure at all n locations
  Clone ID: MRT4577_124627C.1
gggtacccttcgtgtccggccggggcccacccgccctcccaccctgncgccgcgccgcacgcacgtccctacgcacttcgggcggtgcggcgtccctgcatcttggctgttcgtgcgcgggggacgatcgctatctcggatcgcagggggccggctctatggaaggcttacttcccgccactcccggacaggtgtgggcttttgctaggcctcttccctgatctcatggccgcgggtctactct

SEQ ID NO: 26991 - DNA, 372 bp, Zea mays
  unsure (1)..(372): unsure at all n locations
  Clone ID: MRT4577_124628C.1
ggggtggggggggtttttcatctaaacaaactactggtactgtactgtcgttatactttcatcacccacactagatagacaccataagcatcgactgttcacatgcacaactcaactccctaaaataaataaataaacggaatccacggggcacaaacaagaacaagacgacacgcgggaaaaaatagaagttcctttctccccgactccggcactggccatggtagtgtgactgtgaccacacactgattgctctgtctgtttgtccatccaatgcacgggctggcgggcatcgccatgacatgacgctgcacccgggattggggtgctgggaggagtgctggtgatgttgatgttgntgtgggtagtacg

SEQ ID NO: 26992 - DNA, 447 bp, Zea mays
  unsure (1)..(447): unsure at all n locations
  Clone ID: MRT4577_124629C.1
cattgggaccctcgaggccggcctacaatccccgaacggctatcggcctctatctcaagtcaggacgctactcctagctcgctccttccggcgcccccgtctacctctgtgtcgatgtcgagcacctcgctgcgagttcctcgactgggggaacgcaccgagagacaaccaaaaaccgcatcatcccctgctagccactgctggccatccgcagccacgaagagctcggcaacctacaggccggccgacccatcgcacccggcgngacgttctagacgacatcaaccctgatgctcgctccccaagagaaacgatgtcgctgctgacatataaggttgacagaataaggcaccacaaaaagacggcgacgctcacgcccccattaaggaggccgcctcacaggcacctgaaaatgctgatgcactgtctctctctgacctctctgaa

SEQ ID NO: 26993 - DNA, 180 bp, Zea mays
  Clone ID: MRT4577_12462C.1
cacccatgataaacttccccagatacttagtgagttttggaaaagtctcccacaaaaacttatgagcacttggtgtgcgactatgcccggatcaggcgagcaatactctcctttggagattcacatccgctgatacgtgctgcgagaacacgcgggggagggaaccgaaccacactctgg

SEQ ID NO: 26994 - DNA, 442 bp, Zea mays
  Clone ID: MRT4577_124630C.1
ttattatttttttttttttttttttttttttttttttttttttttttaacggaaaaaaaatcctgcatagacaaacaaacacctggcaacaggaatgctgaagttatacaagtgcaactaactacataggtgtggtgagcagcacatggcctaactcataaacaatttaggtaacggggggacttcaaatcataccatgggcttcgggagcttgttatttagctcatctatctaacaagatacagttcaatgggtatcatatttcaagggacattcagcattcgcctttatgttaggcactgaaggcctgctgttgtaccattatgctgtcggagcaaaacacgcactttattgacaacagcaataccgcaaaaatgtttttggttgactcagaggaatgttttggaaaagaataagttggataaactgttgatgcctttta

SEQ ID NO: 26995 - DNA, 398 bp, Zea mays
  Clone ID: MRT4577_124631C.1
ccggccgggacactgacagccgtcagaaggcgtctttttactcgtctatctctgcgactcaaagctttctagaattggcccccttgtcccatttcataccaccggggctggtcccgccgtctaacaacagcattgagggagtgcctctcgctccacatcaggcaggctggtgtccaggacataaacgctggctgggagctgaactgtctcgaacatgctattcacgctgatggccatatgccctgtgacatgatcatagtgggacgggatgatgctttcaacaccttcttgagagataccgccgctgcaatgcacgttccgcagactgcttatgatgaccttaaacccactgtcatctatgagagtcatgactgagccctaccgacacctcttccatc

SEQ ID NO: 26996 - DNA, 214 bp, Zea mays
  Clone ID: MRT4577_124632C.1
gttatgagcaagattacattcttattccatcaaaaaaaattgaatgatttttttatgtgtcagaaaaaatggacttttttatgtgctgccgcggcttacgatcggtgtaaatggtgtatcacagcacatattagagaagtatacttgtgtacaattgtatgcgtttgacattttgtacaagtcagtaattccaggccgtaaaggctacgcatag

SEQ ID NO: 26997 - DNA, 546 bp, Zea mays
  unsure (1)..(546): unsure at all n locations
  Clone ID: MRT4577_124633C.1
ccgacggacacggatggaatcgatggacggagccagacaacacacacacacacacscacmaaavgcgacaacaacaagaagaagaagcgacakacaaccacacccagccaggcckkggkcagcccccgacagcgacagcgacaggcatgcagtcggcgcccsccccccgagcagtkggggccccagcacacgagggggtaggccttgcgcatcckgtccgcgtcccgcgcgccggcgggggcggtggccgccacgcccgcrggggcgcgtccbccggcacggacacggagtccgararcncsgcggacagcscgccgnatccggggcgcggcggcggcgcggtggtagaacgagcccaccgtnagtcccagcggcacargcccccctggtccttgagcgcctccaccgcgcccatrctcgcsgccaccaccagcgacggcgccttcscgctcgcsgccgccgccatcctkctgctgggctcggctcgtkcggttcttgctcggttcgtgtcgttatctccgtkgggacagtacaggtcaagcgacc

SEQ ID NO: 26998 - DNA, 333 bp, Zea mays
  Clone ID: MRT4577_124634C.1
gtcccaaccaaccaaaggttaaaactgcctggcgtgcataaataaggggtccttgctcgttttttggcctgggaatgattttacaaacaggctctttatgcatgaatagggaaactgaagaaagtatgtggtttttacgggatacgggaagtacgttcttgggcccccgcggtgttggggggcatctcgcctcaggggctgaaaaaccccggttcttttgggcagagggggtcccggtctacagggaatctctttttgcccccccaccgtttgggtccgatcaccttggggccgggggctcttccggaaccctccaatgccacaggcccttgg

SEQ ID NO: 26999 - DNA, 1207 bp, Zea mays
  Clone ID: MRT4577_124635C.1
agtgaagttgattaaaaaattagaaaaaaatgggaagtgaacaaaagaaaccggcatatatcaagtacttgtttggtggtttatcagggatgggtgccactctcttcgttcagccattggatttggtaaaaaatcgtatgcaattatcaggcgctggcggcggtaaaaaagaatacaaaaataccttcgatgcattaagtaaaattttgagaactgaaggtataactggaatttataaggggcttggtgctggttttttgcgacaagcaacgtacacaacaacacggttgggcgtatacaccggtcttaatgattcatataaaattaaatttggaggatcaccaaatctgttagcttcaatgttaatgggagttatcgctggtgcttcaggagcatttgttggaacaccagccgaggtggcgttaattcgtatgacagctgatggacggttgcctttgaatgaacgccgaaattatgcgagtgtgttcaatgcattgacacgaattacacgcgaagaaggtgtactgacattatggcgtggttgtataccaacgatgggccgtgcaatggttgtaaatgccgctcaattagcatcatacagtcaagctaaacaatatttgattcgcagtggatactttacggaaggcattaaattacatttcgtggccagcatgatgtcaggttttattacaacggttgcatcaatgccggttgacattgcaaaaactcgtctacaaaatatgaaagtatcggccgatggtaaggccgaataccgtggtacagttgatgttttaagtcgcgttattcgccaagaaggtttatttgcgctatggaaaggttttacgccatatttttgtcgtttaggaccgcacactgtactcacattcatattccttgaacaaatgaacagcatgtataataaattcgtgcttggtgactcaggaagtggctcaggactataaagaacaataaactattcaagttaatcaataagtctcgaattgttgaattattcaaatttttttaaaagcaaaaatggcattaattttattgcatattttgaaaaaaaaaatttgctactgactaaaggaagaaaaacacaaatatttagatgtttttgtccgaacagtaaattccgttacgcagcattgaagacaatatgacgcacactattataataaaagaattgtattcaactaaaaatgag

SEQ ID NO: 27000 - DNA, 329 bp, Zea mays
  Clone ID: MRT4577_124636C.1
tccgttgaaatcttccccgagccctaagattctctcgccggattcgcctgatccgacccgacacgcgatctctcggctcgccgcaatggccgacaaggagaagccggaggtgagagaggaggagtacgagagcgacctcgacgacgcgcccctctccgcgttgtggcgccgcgacgctgcgagcgacgacgagggcgaggacgaggatgaggacggagggacgcccttgaggcggaggaaagccggattcgatgcagattccgacgggcagggcgccgccgaggtttacgacgaggaaggcgaggaggagtacggggggttcgaagcag

SEQ ID NO: 27001 - DNA, 259 bp, Zea mays
  Clone ID: MRT4577_124637C.1
cgtgaaaccccgaggtgaaggaacaggggggcgagtgctagcagcagcggcgactccttcgccataccgttcgtcgtgctcgctcactcggatcgaaccctccctagggtttcgcatcggcctcccgccaactcctatcccttccccctcccttcgccacgcgcgcgcggggagctaccaaaccctacgacggcaaattcggtgcgatcgcccacggtggatgccttgtctgccgacgagaggagccgttcggggcttg

SEQ ID NO: 27002 - DNA, 648 bp, Zea mays
  Clone ID: MRT4577_124638C.1
atgggcgggatttaaacgaacctgttatgttggggtaaaaaataataaaaaaaaaaaaaaaaaaaatagaaaaaagaaggaaaaaaaaaaaaaaaaaaaaaaaaccaaaaaaaaaccctcgtgttcgttcggagcgcacacacacacaaccagatctcccccaaatccacccgtgggcacctccgtttaaagatgcaaatctttgtgaaaaccctgaccggaaaaactatagaccttggaggtggttttttttgacaccattgacaacgttaaggccaaaatccaggacagggagggcatccccccaaaccagaaggggttaattttctttggcaaacagtttgaggacgggcgcacgcttgctgactacaacatccagaaggagagccccctccaccttgggctccgcctaaggggaggcatgcaaatttttgtgaaaaccctgaccggaaagactatcaccttagggggggagtcttctgacaccattgacaacgtcaaggccaagatccaggacaaggagggaatccttccaaaccagcaggggttaatttttgctggaaagaattttgaggacgggcgcacgcttgccgattacaacatccagaaggagagcaccctccatttggtgctgcgcctaaggggagg

SEQ ID NO: 27003 - DNA, 173 bp, Zea mays
  Clone ID: MRT4577_124639C.1
attggtcacgtacgtcgaagctatttgtgaacacaccattacacgtttatcgagcactgtagccaccacaggaaacagaaacactaaccttccccgtggctgcaggagagggaacacactgatgtgacgatccaatattccaaacgccatgatgtgaggcaacctgctatagc

SEQ ID NO: 27004 - DNA, 464 bp, Zea mays
  Clone ID: MRT4577_12463C.1
aaagacatcgattaaaacatgagggacaactgggacgaacatctaagcccgtaacgtccttgattgacccacatcagacccatcgactcggggcctgatgcacagatggcttaaacaacaattccaatgtcacaggaggcgtttagggaacacaaccgtgagctatgataacccgcgactgactctgagggaacatacttgcaccctcattaaccagcagctctttatgcatcaattcaatactgctggccccgcgccgtgtgaacccatgattgtgacacaaccaaaaacatggtccaggggaccactgaccagtttaaaaaacgcgggactctacttgacttggttcaggttttgctttactgggagcggagcccccatgtttggctcagtaagctctctcagcttgaaccattgctctaccacgccaaacacgttattaaccgaacaacacagcctggtca

SEQ ID NO: 27005 - DNA, 855 bp, Zea mays
  Clone ID: MRT4577_124640C.1
ccggccgggagtcccgtcccgtcccaccctatcagttgcgggcgcgcgtccctgtttcgctcgtgccgttgcgctgcgccaagcctccccacctctctcgtctcttctccacccgccgccctcgtgggagtgaaaccctagctagggttctgcccgccgccgccttcgatcaagacgcctgcagccttagcgcgagcccgccatggacacaggacgcaagcgcatcgcgccggggggcgccaacggcgcgggcggcccgaagcgcgcgagagcactgcgggttgtccctttggttcaaattgccattttctccataacttcccgggtggctacctggcggtttcaaagatgaccaacttgggtgggccacctgttccggctcccccaggaaggatgcctatgggacctggtggtcctgatgggccaccttcacctgctctgaagactcgcttgtgtaacaagtacaacactgcagaaggatgtaaatgggggagcaaatgccactttgctcatggagagagggagcttggaaagcccctgcagatggacaactcgatgggagctcctccaatgggtccagggccaaacggtcacttcatgccacctccaatgcctatcccagacatggttcctcactccacattcggtgcttcggccacagccaagatcagtgtcgatgcatcccttgctggcgccatcattgggaagagtggtatcaacacaaagcatatatcccgagtgactggggccaagttagccatccgggaaaatgaggctgatcccaccataaaacatcgagctcgaggggacgtttgaccagatcagcacgctagcgcaatggtcacagagttgatt

SEQ ID NO: 27006 - DNA, 576 bp, Zea mays
  Clone ID: MRT4577_124641C.1
gtaccggcgccccttctcgagttttttttttttttttttttttttttttttttttttttttttttttttttttttttttttttttttttttttttttttttggaaggggggataagccctttactcgacggttaaaccaattcagccccttttaattccaaaaaggcccttgggagggaccacccccctaaacgggtaaaaatctgaagggaggagggctgcaggaaataaaaagggaactttggcaacccccccggaaggggccccccttaccccctgggaaccggggaaaatttgaaggaaggcctttgccctccaaaaagggcccttttgttgcccctgaaaagaaaggctggggttccagttgcaggcaggggccaaagtttgggaccccgggtcaagcaggatacccaatttgatggggaaccccaaaaagggggggaaccacttccccctcccaacaaaaaagtttttagccttgaaaaccgccgggaaaacccacccagggggcaaaccctttgtttccaaaaaagcgtaaggcagcctaaatttttgcaagtttggatgaacctgaaa

SEQ ID NO: 27007 - DNA, 2671 bp, Zea mays
  Clone ID: MRT4577_124642C.1
attcggctcgagcagcgcccctcctctccggtttgcttgctgggactcgcgatcttcctggtcctcggctgtgccttctggggcggcggccgcggcaactacgtaaggggagggaagggaagggaaagaccccaccacgggatgagattggacctctacttctaataaaaaaaaaaaaaaaaaaaaaaaaaaaggggggaaaaaaaaaaaaaaaaaaaaaaaaaaaaaaaaaaaaaaaaaaaaaaaaaaaaagcgcgcgtccctgtttcgctcgccgttgcgctgcggcaaagcctccccccacacctctctcctccacccgccgcccccgcgggaccgaaaccctagctagggttctgcccgccgccgccgccgccttcgatccagacgcggccaggcttcccgcaacaccgccatggacacgggccgcaagcggaccgcaccggagggcgccaacggcgcgggcggccccaagcgcgcgagagaatcggagacaactggtgtaggaagcaaatccaagccgtgcaccaaatttttcaggttctaatctagcttaaaatgaacagtcatccggtaacatctactatcgttattatgctcttcttttttttaaattaaaatttgttatgttactaaatgctgtgcttgatgctaacaaatgggtcggtctagattctgctacaggatggttttatctaatcattgcttaagaacactcaacggagtaaaaaattggaatctactgctgtttatcactgtgaaaattggtgcaacaagggaacgtactgctgtttatcactgtgaaaaccgatgcaacaagggaacctactgctgtatatcactgaaaatctgaaccatgcaacaatgttttcaaggaagcaaaacttcctctcaaaaggaacaatcagtcaataacaccatggaacaggttcacttgaagaaatcaagaagattagattgaacatggggactgtaattcaattccttgtgaattgtaccagttatttgttcaattgcatttccttatcaatatgttgcagtagtagttctgaacaccttgaagcttgattatgaatggcatttctatataaagcatgatttctaaaagattagtttgtatcatttacttcagcttttattctttgcatatatatttttagcagtcatctagtgaggttgcattatccagctgcatgtaacttaatctcttccatcaacattgtttgcatttgtgtatcaactaaaatcatctgtaggttgtcagatatattagcatgttctgttgcttatattatgttttcaatgtgcagcactgcgggttgcccctttggtgcaagttgccattttctccataacttcccgggtggctaccaggccgtttcaaagatgaccaacttgggtggaccgcctgttccggctccaccaggaagaatgcctatgggacctggtggtcctgatgggccaccttcacctgctgtgaagactcgcatgtgtaacaagtacaacactgccgaaggatgtaaatgggggagcaagtgccactttgctcatggagagagggagcttggaaagcccctgcagatggacaacccgatgggacctcctccaatggggccagggcccaacgggcacttcatgccaccgccaatgcctttcccagacatggttcctccctccacattcggtgcttccgccacagccaagatcagcgtcgatgcatcccttgctggtgccatcattgggaagggtggtaccaacacaaagcatatatcccgagtgactggggccaagttagccatccgggacaacgaggctgatcccaaccataaaaacatcgagctcgagggaacatttgaccagatcaagcacgctagcgcaatggtcacagagttgattgtccgcatcagtggtaagccgcctccacaagccaagaacaacccaggtagggggcctggttctcatgccgggggtcctggaagcaacttcaaaaccaaattgtgcgagaacttcaacaaaggctcctgcacctttggagacaggtgccacttcgcccatggcgaaggtgagctgcgcaaacctgctgctgcttgacaggcatgcttattgtggcctgtggtgattaatctgcctgtatggctgaataacaccatgaccaaggacagtggcgccagcgccatggtgaagtgtgctgagccacatgctgcctgagagagagcatttccctgtggctcgtatttgatcttaatgctgtaacaaactctcctcgatggagattaagcaatggccgtttatttaggatttgtaggattgccgtattggtcacccttttatctatcctgtttttggcctgtggtgattaatctgcctgtatggctgaataacaccatgaccaaggacagtggcgccagcgccatggtgaagtgtgctgagccacatgctgcctgagagagagcatttccctgtggctcgtatttgatcttaatgctgtaacaaactctcctcgatggagattaagcaatggccgtttatttaggatttgtaggaaaaaaaaaaaaaaaggggcggaaaatttcttgtgtcgagatacggatttattttgctatatatttttcgtctatctggttgttgtcgtagtattgttgacacagcatgattgtgttaaagaattatt

SEQ ID NO: 27008 - DNA, 242 bp, Zea mays
  Clone ID: MRT4577_124643C.1
gggccaccaaaaaaatcctccttttacttggccagaaaagaaacataaaacctgctggtaacaaacacggatagggtctcactttttttttttctagaaaagaaaaagggttgagaaaaggggcccaacacaaagaagggcgggggctgcaatttatttttgagcggaaaaaaaaacagtcttggtctaaatacattgggcacaacgcaacattttgtgttccaaccgtatggaacaaccct

SEQ ID NO: 27009 - DNA, 373 bp, Zea mays
  Clone ID: MRT4577_124644C.1
atataccaccattttaaaaacaaaaattaaaacaaattaaaaaccaaaacaatataaaaacaaaagaaacaccatactaacggtgcgaggcgcgcacaaattactaccacattttcttccaccttcattgtatccgtcttttcatgagctcctcttaattatggccatcttcttctacatcctttctctgatattccgctttttttttaacttcccctttttttatttatttttaacacatatataaccttctttacctattttacattaatttataccatctgcttttctttcttaaatttttcatatttacccaccctttatattccattttattttctttttttattatcaatcctcttttttttaattt

SEQ ID NO: 27010 - DNA, 334 bp, Zea mays
  Clone ID: MRT4577_124645C.1
cccactcattctgcacgcgtcctcataactagttgtgctcactatttagataaagagcaaggagctctaatttatttttggttttttgaatattcctaattattaaattaattcttgtctatgccagaatatttatatgtctcatttcatttccttgtgaagggatattatcttaaagctggaatatggtatattcatcatattatgtttaatctaggttgacccttgatatgaaataaatcatattgtcaggagaatacttgtgtgcacccccatcctctgacctagatgtgttactcatttctgaccttgctcagaataaaaaattcttacc

SEQ ID NO: 27011 - DNA, 524 bp, Zea mays
  unsure (1)..(524): unsure at all n locations
  Clone ID: MRT4577_124646C.1
gagcagatcaaacgagagactgatccagccaaaaagaaattccaaacactacatggggctcagtaattacacatgggtagctgaatgacagcagcaacagcagccgccgccgcaaatctaaaaccaacctaatcaaggctagaatgagcacagcaatttagcaatcactttagaactggtccctgcaccagtgctacttttgacaatcaggttacccgttaaatcatgtacgctaaaagatgaaaaaagagtctgactcggtccaagatcgattggatgcaggctagagttatagctgattctcttttaggtcgactgagatcaagaagcgaacggattggtcggcgcctccgattcagccttggaagattgatcatcaacttcttccgccatggttgtggtcacgcttgacttcctgatctcctctatccgcgcaacaacatggcccattgagggccgggcctttgggacttgggctccgcggggcagagcangctgcccaagctgggccctnggttcctcgc

SEQ ID NO: 27012 - DNA, 2468 bp, Zea mays
  Clone ID: MRT4577_124647C.1
aacggacgagaccactctcaacctcggctcgttccggaccgggcccgctctcgccacctcagccgccgccgcgatgcggtcgccttcgccgccgccgtggcggctccggcgcatccgtttcgcgttccccatgctcctcgtcgtcgcgtcgctggcgggggccgacgacctcgcgagcgacgcgcgggcgctcgtggcgttccgtgacgccgtggggcggcgcctggcgtggaacgcctcggacgtcgcgggcgcgtgctcgtggacgggggtcacctgcgagcacggccgcgtggcggtgctgcggcttcccggggcgacgctctcggggacagtccccgcggggacgctcgggaacctcacggcgctgcacacgctcagcctccgcctcaacgggctctccggcgcgctcccagccgacctgtcttccgccgccgcgcttcgtaacgtcttcctcaacgggaacaggctgtcgggcgggttcccgcaggcgattctcgctctcccggggctcgtcaggctctcgctcggcgggaacgacctgtccgggcccattccgacggagctcggcaacctcacacgcctcagggtcctgctccttgagaataatcgcttttccggcgagatttccgatgtgaagctaccgccgttgcagcagttcaatgtctcgttcaaccagctgaacggatccatcccggcctcacttcggtcgcaaccgcgctccgcgttcctggggacgggcttgtgcggcggacccttggggccttgccctggtgaggttcccccgtcccctgctccagcggggcagacaccgtcgccgacgcctgttcccagtggcagcggcggcggcggcggcaccaacggtggaagcggcgtagaaaatggccataagggcaagaagctctccggtggcgccattgccggaatcgccataggctctgccttgggcgccgcacttctcctcttcctccttgtctgcctctgtcgcaggtcggggggcatcagaacgcggtctctggagatgccgccttcttccccagcgcctgccggcggcaggaaacctcccgagatgactagcgctgccgctgtagcgccgttgaccacgataggccaccccaacgctcctattgtccagtcgacgtccggtaagaagctggtcttctttgggtcagcggccgccgaggcgtctttcaagctggaggacctgctgcgcgcgtcggctgaccccagccaggctgctctcaacgacgagggtgtcgacctgcccagatgggtgcagtcagctttggccgtgaagcgcctcaaggacgtgactctgtctgaacctgagttccgtgaacgcatttctgagattggcgagcttcagcacgagttcattgtgccactccgtgcttactactacagcaaagatgagaagctacttgtttacgacttcatgcccaaggggagcctgtctgcagtcctggacggcaacatcattgaacaaaagacaccacttaactgggatttaagaatcggcattgctctagctgcagcccgtggtgttgagtacatccactcaacgagatcaacggcttcccacggtaacatcaagtcatccaatgtcctcctgggcgaatcgtatcaagcacacgtatcagacaatcgccttaccgctcttgttggtccatcgtcttcaccgtctcgcgccactggataccgcgcacccgagcagaacgtgtgttcggcagtcgcaccctgtgctgcggaaggtgattggtggtgtgtttaggggccagttttaaagtgtgagattgcttaattgctgtgctcattctagccttgatcaggttggttttagcttgtagctgttgctgctgcttgtctttcggctatccatggtgtaaatattgagctcatgagacaagaggctggcgaggagccgatggctcagcttgtgctgcttgctctggactgcgtagcgcaagtcccagaggcccggccctcaatggggcatgttgttacgcggatagaggagatcaggaagtcaagcgtgaccacaaacatggaggaagaagttgatgatcaatcttccaaggctgaatcggaggcgccgaccaatccgttcgcttcttgatctcagttgacctaaaagagaatcggctataactctagcttgcatccaatcgatcttggaccgagtcagactctttttttcatcttttagcgtacatgatttaacgggtaacctgattgtcaaaagtagcacgggtgcacgtcatccggtgatgcggaaggtgactggtggcggtgtgcttagggaccagttctaaagtgattgctaaattgctgtgctcattctagccttgattagtgctgctgctggctgctgctgtcactcagctacccatgtgtaattactgagccccatgtagtgtttggaatttctttttggctggatcaaaaaaaagtttgatctgcaaaaaaag

SEQ ID NO: 27013 - DNA, 581 bp, Zea mays
  Clone ID: MRT4577_124648C.1
aattcggcacgaggtctcgctccgctccgctccggcccgttccggctctcgccaccccagccgagatgcggtcgccgccgcccccaccgtggcgcgcccggcgcctccattccccgctccccatgctcctgctcttcgtcgcggcgctggcggcgcgggcgggggccgacgacctcgcgagcgacgcgcgggcgctcctggcgttccgcgacgccgtggggcggcgcctgacgtggaacgcctcggacgtcgcgggggcgtgctcgtggacgggggtctcttgcgagaacggccgcgtggcggtgctgcggctccccggggcgacgctctcgggggcagtccccgcggggacgctcgggaacctgacggcgctccacacgctcagcctccgcctcaacgggctctccggcgcgctcccggccgacctcgcctccgccgccgcgcttcggaacgtcttcctcaacgggaacaggctgtccggcgggttcccgcaggcgattctcgcgctcccggcgctcgtcaggctctcgctcggcgggaacgacctgtcggggcccatccctgcggagctcggcagcctc

SEQ ID NO: 27014 - DNA, 1476 bp, Zea mays
  Clone ID: MRT4577_124649C.1
cattgggtacctcgaggccggccgggcaagggtgacatcgtaacttcactgcacaccctatcctccctcgccttcgcctagattcctatctccaccgcgttcgggttcctcccaacacctgcaccgcagaaccaaaccctagctgcgcttcctcctccagatcccggcgccccggccccatggccgccctcgtttctagctccagcttctccgcccgccgtccctccgctctctagctccggatcgcacgcgcacgtaaagacatggagcccgcagccgaggacgccgcagccgctgcgccggactcgtgggagacggccgacatagacgggcccatgagtcggctcatcctctccgcgcgacgcgtgtcctcttcgccggacttcgctgacgaccaggacccgccccagccgccgcccacactgcagccgcagggcgcgccttcggctccctcagatgcgcgcgaggatgtggtagcccaggtcgatcagttcctacgagaggccctcgagaagccaagggagaggctttctgtgctaagaatggagcaagaaattttgaagttcattcatgaccctagtcgtacagagtatgaattcaatggccttccaacttcgtatctgcgtcttgctgcacatcgcctggcgcagcattacttcctgcagtccattgccataccagacaacagtttgcctgatggaactggttcacgtatcatccttcgtaagacaacattcgactgccgactgcctgctgtccgccttgcagatattccagttaacctgccacaagaagacatctctgtggcgaaagtagctattaagcagaggcctcaaaagaatctccatggcatgaacagctcaagtgctcactcttctagagacaatcaccaaaaaagcgtcgaagaaagaaaagaggaatacaacaaggcacgagcgcggatatttaacaacagcaatagcagtactgctactgatgagagatcagctgaggaagtgactttacccagtactcttcacaggtccacttccttggagttgaactcaagcaatagaataggtcaaggggctgaaattactcttgagaggagcttgactaccacttcagctagcagcaggtcaaatagaagcaagattgacaaggagcctgcagtcagtagaaacaagcagaacaatagggttgcaattttcagagatcgtgagtcagagcgcaaggatcctgattatgacagaagctatgacaggtatatgcaaagatttgatcctggatttggatttagtggcggcccatacacaattcaacccctctatacccctgctgttaactacaacactgaattcccccagcttgggtcagcacaccgatcacctgttgctgtcgaacagcaacctcgtccaatagctcagcacatgcctgcatcatggtcggtggctcaagcatctaatgcaattggctatgggccaaatggtgtcatgg

SEQ ID NO: 27015 - DNA, 138 bp, Zea mays
  unsure (1)..(138): unsure at all n locations
  Clone ID: MRT4577_12464C.1
ggcaagttcggcttcgaggtgctgctctctgtctttccattcaacccatcactttaccattatacagagacccaagcaagcacggagctagcaactaatattagcacatgtttgaggatatnattaaacggctgtcat

SEQ ID NO: 27016 - DNA, 538 bp, Zea mays
  Clone ID: MRT4577_124650C.1
gttccagcaacccgttcccagagaagcgacccccgccctatctcctctgactgggcgacctcgcctattcctcgcaaaccatgccgtggtgagcgtgcggtgcgataaaggcaattgccacgacggcacggccgcagaagcggaccagaccctcatccggtggcggcacgagcgcgcatcgcagtagcagcagccacagcgacgacggggcggagggtaaaagaggcaaggcttctccagtttttcgaggttggagaccgtatgctcgagggtgccgttctcgatggtctcctcctccaacagcgcggatgtgtagatattagccacgacctcggtcgcggcgtggagcgaagcctggagaggtccccgcggtagcggggcgtgagcagacgaagggaaggcagcccctgcgccgcgtgggaggaggaggcagatcggggagctgcgcttccagctagagctgatttggtggacatggcattagagtggatctatgtgggagcaatccttccctatttaatttgaatagagaggggat

SEQ ID NO: 27017 - DNA, 515 bp, Zea mays
  Clone ID: MRT4577_124651C.1
ggagaaacggaacaactaaccatgtaaataatataaacattgcatacatttattgcggacctcggcccacgatcatacgcaagggcaggccttcacacacgtatactatacgatagattaccatcccacgctaattggtgcatcacaccagcgcatacttacgaacgcccccacaacacggtagacgctgcaaggtcacatctcacaggcaacgcgtaaaactggtgatgggtcgtccttactgggggaataatcgatcctaaggaaaggggtttgttgttgctgcaggacgcttaggtctatgcgggggctgtatagtcatggtggtggtaactgaaggaggattaagagcaaccgattgaacaaagcgaaggttacctatcaccagccattttgcttgcgaggtacactaaaggttcttcaaagttttaggttcttttggcagaaatatagtaccactgcagattgttcttgctgtggaaaggaacctgcttgggcttgacctgcctgttctt

SEQ ID NO: 27018 - DNA, 336 bp, Zea mays
  Clone ID: MRT4577_124652C.1
agcacaagttgagcagccttttatgcttggtatttcctttttacataagttttgaacaacatgtcgtcacataaaacaagagaactgacatccttatcactcattgatgctcgttcatctacttctgcaacatttatatgacattcattcttagctacagagaaaatttgttgctttcgaacaagcatctgcccgtagggagtgaaaaaaaaatcaatctgtctgccaagctgcgcaatcgacatttgaggcaaggctacagccagtaaataaagaacctaagggcttgttcggttatatcccaatccatatggattgagggggattgagggggtt

SEQ ID NO: 27019 - DNA, 319 bp, Zea mays
  Clone ID: MRT4577_124653C.1
ttatctccacgtggtggcctctgcacgtgatgttgatcttttacaacatgaagggccttaacgcgataacgaacccgtggttcacgccgactgtctccgtgagcgccggatccgacatcatgctcgcgttctgggccagcaggatcgagtaggcgtgccaaacggacctcgatgaatggaaggcactaactactattgcaatctgtgacactatcgggcactattcagctacggtgaccgtgggcaatgcggccacgtagcccacacacatcattaagagcggagagccgtcatacagagtgctcgtatccagcttctt

SEQ ID NO: 27020 - DNA, 743 bp, Zea mays
  Clone ID: MRT4577_124654C.1
cctcgagggccggccgggaactgacctcgtctaaaacaatataagacgagcgattcctgacacccacatatcgaaagtgagagctaaaacgaaccgatgtgtcacacattaaccaccggagggcggagaggtggacccaccataaattgatgctctctccatgagaagtgctcatctggaattcccccaaatatctcagccactgctgccagtgacaacaaagtggcaaaccatgccgagaggacagatcacaactgctcccgacatattcacctccacctcaaggctctcctgcagaaggaaggctccgaacaacctttcctaccaatccgggcggtcccgtcgcaactcgagtgttgtcgcacgtggcgaagtcacctgataatcagtagcgtactcaggaatccaccgccgagagagaacaggcgagcgccacaagagaccgataggtcactcccgcacatcttgtccgagagaagataactcatgaccaacacggtactacatgtccacaagagatgactccacccaagtaggacgtgcgggatggaccactctgatctgtcccatctgctacatggaggatacaccacataaggaccttgaagacatgccgccacctagtaaatcatcaatgtgtacaggttaactgatgattagtatcctacatgggcggcttaacctgcgtaagtgggaggccatgtggctatgtgaacatcgatactatgccatgcctctacata

SEQ ID NO: 27021 - DNA, 323 bp, Zea mays
  Clone ID: MRT4577_124655C.1
ggacatagacagtggaatccaatatcatcaatctatcaaccaaggcgaccgatataggccttcttcttatgctccttgctatttctatgtgtattactctcgcgacaatgtatcttcaatgcgctcaagctactatcactgtgctctgaactccatacacttcatcacttacagcacctttatgagaaaacccatctcttaaaccctatatgttctaacaatcacttgcacccagatgcttacgttaataaccctcggatcgacaatctgcagccctatatttcgtgcagtcattgttacactccaagactgcacagatatat

SEQ ID NO: 27022 - DNA, 316 bp, Zea mays
  unsure (1)..(316): unsure at all n locations
  Clone ID: MRT4577_124656C.1
ccccacaaccaggaanccaangcngcnngaagngngccgggaaaaacggcgcaacaagcggaggggggggacagagaacccaggccggcgaanccgggggccaangcngancgggagggggggggggagaccaagttttttgtgggccgaancgccggccacagaaaaggcaggngagggggagaaagtcgnttcaggtagtggagaggtatcagggggaaagacatcgtgagangctcnttctnaacagagcctgcatggcaaattttactcagtttcattgtgaagtcggggcacgncggtttaggtccttccc

SEQ ID NO: 27023 - DNA, 655 bp, Zea mays
  Clone ID: MRT4577_124657C.1
gaatgtagcgcttctcttctacaatgttgtcatgattgacaccaccacggctttccacatcatgaccgaattgggtgctgaagagcaaccaattgagcctgctcctctcctgccactccgttctcgactcctacgttgcatccggttctatcaaaacttcggcaacggacacaccccagctgtcgatctcgctggagactgccacccccgatccggatggtgaacggcgccaaagacaggacgtcctgacctgcgcacggctatgctatgaggtgctcctctccatcagaagaggcagcggtcatgtacgacctctgcttcaccgacgatcttcaacactgtggtcgagtacctgagctactacttcctgtataacagcaggtagtcccggcctctcggtaccgtagagatctacggcatcgacttcgacatcgagaacctgcagtcggtgcactactacgacctggtgaacgcactcaaaggcaagggaagcgtgctgctgactgtggagcctcagtgcctctacccagacgcgtcactggggccagcgctgcagacgggtcagttctacaacatgtggatacagttctacaacaaccccgggtgcgcgtacgccaacggtgacgacaacaacctggtgaacgcatggaacacg

SEQ ID NO: 27024 - DNA, 262 bp, Zea mays
  Clone ID: MRT4577_124658C.1
caccgggtagcagaggcccgaaaggaacgagacgcaccgcagcgccaccacgagagggtcaacacgcgaacaccaagggcgacaaggcgagcaggcaggcccccgaccagagcaagcaaaacgacggcgacataaaggggcaccaaggcgccggagcgcgaaagggccaggaggacacggaggccaacaccacggacgccacgaacggacggagcaaccaggacacaatgccgataagaaactacaccacaaccccgaacag

SEQ ID NO: 27025 - DNA, 482 bp, Zea mays
  Clone ID: MRT4577_124659C.1
acacattagttacatcacatttttttaaaaaaagcttgccttatgaatttataatttttatgccctagaaaagtcttaggactgcaaacgtataaaaaattcaactttcacaagtcgagatgccggtcactccttcaccaaaagctcctgccattcctccattgaagttcgtcaagaacactccctttgagctttttccgcaaaaaaaaacagggggaaggggctcctaagagtctcaggaaccaccaaaagcatggacatcgggggagaaacacccctagcaagcatgaccggaatagaaccatgcttggccctaaaatgccccactctacactcaatgtgaggccttggactaaaaccacaccctgggggccttggttgggagcccactttctagaacagaacaagacccagtcttaaaacctccctcacttttccaccggggacctaaccatatcttatataaccctttaattaactcc

SEQ ID NO: 27026 - DNA, 654 bp, Zea mays
  Clone ID: MRT4577_12465C.1
gtcccacacggtggcggacgcgggcgtgctagggttgagcggctacacgagcgtgctagggttgagcggggctccgcgggcgtgctaaggtttcgcgagcatggcggtggccggcgagcaggtgagggctcccgcctctaattccctcccgagctcctcgagcggccaagcgtctgtgtgtggccgtgtgggcgaaccacatgcgccagccaccgtgcgccctgggtgagcacgtgaggccagaggagaagcgcatgtacaagcagctgcgccagtttagcgcgagactgcagggtagtaggcaagccgcgagcgtgtgactgcagctgctagccaagtgagcgtgccactacaggacagcaaacaacgacgacagcaagcaaggatcatgtccagactcacactgggctcgttgctcggccttgttgagctagagatcctccaacacagcggcaccgacaccaaggctcaggctagtacgatctgaatccctatccattccctgttgttacctcgttgtgctcgatctggttactgtcctatgtgcgggtttgttatattggtagtagggatcacattggtgtggctggttacatgaaggaatggagatgagaacgtcatatactctatcgtattctcaagtacctctgtaat

SEQ ID NO: 27027 - DNA, 266 bp, Zea mays
  Clone ID: MRT4577_124660C.1
aacgggcaaggcaaaacctttcctctgaatttctttgttctatattttgacaacacaaaatgtactagatttgaaatcctaaaaatacatttcccagtgaataatggccaaccccattgaaacaaattccacagtaaccactttacgaactggaaaaaataattaccatgatccctcatgggcaaaaaaactaatttttcgttcccggcccaaaaatttaaaaccacttcggcctaactttttaacttcgccattcgggctttttt

SEQ ID NO: 27028 - DNA, 698 bp, Zea mays
  Clone ID: MRT4577_124661C.1
ccggccgggtcttcctctccttccattgatccgctagcatcagacaccatactttcgtagatctcttatccgctgaagaaccgccataacgttccaccacagaacttgtcaagcttggcatctcccatattgttgggtacgttcacgaacactaatatccaaggcactgataatgaggatactacgaatagcttctcactcttatgtacctcactgggtaccaagcttccaaggatctgttgagtggccacatatccctctcccctgcatccctcggccgatgtatgaagatacccaggaggtttaatcacactgaagcattcgagtatgattacctgaatgactgcgctctcacgaggatgggacaagaacaataagcttgatatcattcttgcccagatccacattgttttcttgcacatcgcaccacatgatgaagaagactacccctatccttgtgaccgttctcaacgagagaccgaagatgccaacactgctgactcaccacgaattcgctcctgcccaaggttctggagacaaaagaaaacctgaaaatccatcttattaacttgatttgcatgcatgttaccattagactgttgtggacgagatcgaagaagatgctacaaaagctccgaaggaacggctgctccgttgcgtctcctctgtagaaccactggcatatggtatcatgactc

SEQ ID NO: 27029 - DNA, 175 bp, Zea mays
  Clone ID: MRT4577_124662C.1
tataccgccgtcggcccaccgattaagttggcagatgctaggggctccaacaatcggagcgtattaacccatcgcgtcgccaccgaagacccgtaccctcttcgccggagagcgagggcgacagaagctgacgggggcacatctgtgcacgtacgacggcaccgacctgtgcaat

SEQ ID NO: 27030 - DNA, 341 bp, Zea mays
  Clone ID: MRT4577_124663C.1
tgtttttttggaacgaaaacaagagaggcatagagttgcagggtcaagtcggagcgccgaagacaagtagtttcacgaaaggctggtaaatgcgaagcgcccagaatgtgacgaccaagctggacggcaaaactcaaagcacacggtggatgaaagaaacgcaataatggatgaaaggaaacaagaatccagagaaataaaatgcgcctagcaatctaacccgttaaacaaaacagcgaaggaggcacgaccccgacagaggagggcacgaggacagcgcaggcagaaggaaagagccagtagactgtcggctagaggcagaacaaacggcccagggcaag

SEQ ID NO: 27031 - DNA, 682 bp, Zea mays
  Clone ID: MRT4577_124664C.1
ttgggtacctcgaggccggccgggcaagatctctgctcggttgtgctctgtcttgatttcctggtactcggtctccctccattaaccctagcgcgagcagcgatctgttgatccccgcggaggtcccgcgcgcggccagggagagcgaggcatgacgtagtccctggtgccggaacaagctcgaggcatgtccagcatcaagagagatggcgaggctgccttacgcgccggccccggcgggctgctcgcccgtgcgctacacgtgtcggagttccgcctcggcgcccaccggctctgccttcttcctcaccgccttcagctccttcacgtatgcgatgcaccaagtctgccagggacaattggtgcgccgggcactccaagaatagaagttgctgctcgcactgctatactgacgatgctcccagctgaagaggatgacagattggtcacctagtgctgaaagtatctggaggtagatgacaggattatcaaagatgctcgattgtggaaggtcgtgaagagtgaggactattccagctgatgcatgtgcccgaacaccgtcgatctccgccctgaggcgtggtatcgacctggtgtcggcacttggaaggtcatctggacatgctgtcatgaatagagctatcgtacatggacatccttctttgtcttctaaggatactgt

SEQ ID NO: 27032 - DNA, 309 bp, Zea mays
  Clone ID: MRT4577_124665C.1
ctcgagccgatttgaatgaattttctagtgttatagtgagtcccatgtgttggcaaaatctaccgggtgatgttttttgattgaccactgcattgcatgttttttatgtacaaatgtaattcatgcatttctattttcttaataaaataatttaggtttacacccataagctacagttagatactcactggagaaagaaacaaaaaaaaactatctatatcatgccacaagtttaccacaatgctgtcttatctgttttgtacatcaggcatctccagtagagttaaatggccgttttgttcatgttga

SEQ ID NO: 27033 - DNA, 197 bp, Zea mays
  Clone ID: MRT4577_124666C.1
gcagccgccctgccttttttttttataataaaactcagcggatgaaaacaacatcaccacgggtcaatggtagcctactatcaccccgccattcccgctagggaaagatcacaaaggcctactgtgcccctattcctgggccacgcgaaatcttctcctcgaaaaggggcccgagcccggaaaaaaccgtaaaatat

SEQ ID NO: 27034 - DNA, 332 bp, Zea mays
  Clone ID: MRT4577_124667C.1
gctcttgactcgccggccgatacatctgctcctccctctgttcgctcgcgtgaagccgcgcctctgcgctcgcctagtcttcgcgcggtagctttaccaggaagactgtcctaaagagccagcgactgaagcagtacctactgtcaatccaccgagttcccacgcgagccggagtgcctgcggaagatatgtgtcaaaggcgccagcgcaccaatggcgcgcatgtctgtgacacccgaccagaagaacgcgctgcagctcctgatcgagatccattggcacctagaaagccagccaggttggatgcttcaacggctactccctgctcgaca

SEQ ID NO: 27035 - DNA, 281 bp, Zea mays
  Clone ID: MRT4577_124668C.1
tccgcactatcttaagggaaagtgcgtgctctcactcgagatgtgctgtccccagtgggagtgacttgcattacacaaatgcctatgaagggagaggtcatggttgggcacgtcgacagtatcctaaagcatggtgtgttgctcaaatgcgtacccggcgagagcatcttcctgtctgagaagtcagtgagtgattacaagtacataggtgcggagactgcgatgtgcatgaacgaccactccaagctggagaaggacaccgtcgtgcgcttcaaggtcct

SEQ ID NO: 27036 - DNA, 273 bp, Zea mays
  Clone ID: MRT4577_124669C.1
gccgaaagcgaagaaggaagctcctgcccctcctaaagctgaagccaaagcgaaggctttaaaggccaagaaggcagtgttgaaaggtgtccacagccacaaaaagaagaagatccgcacgtcacccaccttctggcggccgaagacactgcgactccggagacagcccaaatatcctcggaagagcgctcccaggagaaacaagcttgaccactatgctatcataagtttccgctgaccactgagtctgccatgaagaagatagaagacaac

SEQ ID NO: 27037 - DNA, 651 bp, Zea mays
  Clone ID: MRT4577_12466C.1
cgtgagggccagaggtgaagcgcatgtacaagcagctgcgccagtttagcgcgagactgtagggtagtaggcaagccgcgagcgcgtgactgcagctgctagccaagtgagcgtgccactacaggacatcaaacaacgacgacagcaagcaattattttgggggataactttggctgccgatgattcgttcagcatgtcctcgtgctcttcacagggatcatgtccagactcacactgggctcgttgctcggccttattgagctagagatcctccaacacagcggcaccgacaccaaggctcaggctaaagtgtttgaaaaggaaagagaacaaacaaaaatgggtatagtcaggaataaggaaaagcattgtggatgggattcattcttttctatggttcacctcgttctggtgatatatgaaatgatacatcagataagtgggaagaggaagtataatgcaatggataatcataaaaagtgatcactctggagtatcctgtatctaccatttttatttactagggtagaatgcactttcagttttgtcttacctagtaatctttacagcgtgaaaggatctctagctagttgattagctggtctaagtagcactcctttagtttttagtttgactccccgtggtaaaaa

SEQ ID NO: 27038 - DNA, 392 bp, Zea mays
  Clone ID: MRT4577_124670C.1
acacaagtatcagtgccacttgaattttctgcatccatacaaatgccaactacttcgtttgctgacaatcaatctgggctaatgggcacacttacaatggttactcaattcagggaatctttcccaacccaatactctcagctgcgactttaatatttgtcatgcgttatataccatgtagcttaatcttccgtgcatgatcacattgcaatattgctgatagctcacacactcatctcatgattactcgctacactatcttatatcgcactctacatgtgctaacacacttcaaaatcagcttcataggtcagtaccctgataactatcatagaacagacctatatagacaatatctacacgttacacaggttactacttatggaaatttc

SEQ ID NO: 27039 - DNA, 126 bp, Zea mays
  Clone ID: MRT4577_124671C.1
aatgcgacccactcatacgtatatccacccgaaccaaaccatccgtgggtgttttctacaaacgagggcgtcgcaacaaaaatacctatatcaataacgccaccaaagattccccaaataccccaa

SEQ ID NO: 27040 - DNA, 231 bp, Zea mays
  Clone ID: MRT4577_124672C.1
ttttaaaatgagaggaaccatgtatcaagagattcggtgcccaaagttccaaaacgacgaggtcgttctctttttacggaagagcaagagaggctcataagagacctttatgaaaaatataaggatggtcctaaatgcagtcatctaatagctgagtctttagaccccagcgggaagatatcttctgctcaagtttctcgtaagcttacacagttaggtctcaggaatgtc

SEQ ID NO: 27041 - DNA, 250 bp, Zea mays
  unsure (1)..(250): unsure at all n locations
  Clone ID: MRT4577_124673C.1
tcgtgcgacttgcgagtcttcctgcgactagcgagcacatcgtattggtggcgagagagaaaccctttcttgcccgttaaccggggcctacgactatcgtgttacttcccgggtgctcgttctacttggtgatagaccccctagtggggatcgacctgatttctnctgtgctggctttccagggagaaaagaagacttttgttccatcatgggcttaccaactccaacgcctattttggttgacgagaac

SEQ ID NO: 27042 - DNA, 264 bp, Zea mays
  Clone ID: MRT4577_124674C.1
ccatgccatatactgcaagaaatatatattacatcaatataaacatgatatatataaattttaaatggtacattgatatgttaaagcttacctaaacaataacgacatagtacttttaaattctttggattgatgcaatcaatctgcagcagcttgggtgttcaccaaataaaagatggacataattcatgtggtcgctaaataagtttctaaagcttgagtaaaacatgaaaatggagaacacggaggcattagattaactgg

SEQ ID NO: 27043 - DNA, 444 bp, Zea mays
  Clone ID: MRT4577_124675C.1
ggagagcctcttgcaacagacgggctatccttctgcaattaggcacgtgccatctgttgagcagtcactagcggaggtgtcagctcagatagaggctgtgacggagaagatgataatggaggaagagaaggtgaagacgtggaagacggagaacttgagaaggaagcataattacgttcccttcctgttcaatttcctcaagattcttgaggagaagcagcaattgaatcccctgatagagaaggcaaaggcgaagcataagtcgcactgccccagtcctaggtgaaagatgcaatgatgccatttcattcacatattagtaacgtaatgggtaatcaacaacattaaattatgtttgtttaagtaacgtaatgggtaatgcaatgattcgtagttgggtccttgttttcttgaccagtatttgaccttatgtttatctctact

SEQ ID NO: 27044 - DNA, 445 bp, Zea mays
  Clone ID: MRT4577_124676C.1
ggacctttgggctgatttagtgcttggaagccgcggatataatcgcggacaagtacgacgaactgaaggagtaagaggaaggcgccctggtcgagtaagacgagaagtaaggagaggaagtagaagaaaaaggaaaagaaacggacgttgacgagaagtaagaagaggaagtagaagaaaaaggcctcgtcgacgagaaagacgaagacgaaggcgattagaagacggaagagaacaaggaggagatcttgaagaacaagaaagtaaggagcgttagggacagaagttagggaaacgacaacaaatacgacggactaaaactcagggaagttaaaagcccgtcgaatattttaagtttacacggcattgactgcttctaatgcgagaggaaaacagcggaaaagccggccgaagcgaccgagaaagagttaaataggaaccctgc

SEQ ID NO: 27045 - DNA, 244 bp, Zea mays
  Clone ID: MRT4577_124677C.1
tcggtggcgcgaggacctattcgagcaggtgatgtacgcggccgggacggtgggcttattctggctggtgaaccacggagtgccggaggagctgatgggccgcatgctccgcggggtgcgccagtttaacgagggccccttggaggcaaaacaggcgctctactttagggacctcgctagaaacctgcgcttatcctccaacttacacctcttgaaagctgttgctgtcgactggcccgacacg

SEQ ID NO: 27046 - DNA, 840 bp, Zea mays
  unsure (1)..(840): unsure at all n locations
  Clone ID: MRT4577_124678C.1
cattgggtacctcgaggccggccgggctactaacgttgcagcttccgcacgccgtcgagacgccgcagtcaagatgaagctcaacatctcctaccccaacaatggcacccagaagctgattgagattgacgatgagcgcaagctccgcgtcttcatggagcgccgcatgggtcacgaagtccctggcgacagcgtcggcgacgagttcaaaggctacatcttcaggatcaccggtggaaacgacaagcaaggtttcccgatgaagcagggcgtcatgcaccctacccgtgtccgactcctgctctctgacggccactcctgctaccgcccccgccgcactggtgagcgcaagaggaagtccgttcgtggctgcatcgtcggcatggacctttccgtcctggctctcagcatcgtcaagaagggtgacgaggacattcccggcctgaccgacattgtccaccccaagcgcctcggtcccaagcgcgcgaccaagatccgccgcttcttcggtctcagcaaggaagatgatgtccgcaagttcgtcatccgtcgtgaggttcagcccaagaaggagggctccaagccctacaccaaggcccccaagatccagcgtctggttactcctcagcgtctccagcacaagcgtcacaggctcgcacttaagcgccgccgggcggaggcttccaaggatgctgccaacgagtacgctcagatcctgtccaagcgtatcaacgacgctaaggctgctcatgacgaggcccgcaagaggagggcgtcttccatgaagcactagaggatcatcatgaattcatgattgngtcgtgaaatggttacattggc

SEQ ID NO: 27047 - DNA, 377 bp, Zea mays
  Clone ID: MRT4577_124679C.1
aaagaggaacaaagctctaaatgagcaagctatttccttactgatgcctcattaccacatggtaattccacactacaagggtagaagcaaagaaacaaatgatgaggctgagggtaaacaatacaatgataaggatgttgatattggaaagccagtcttgacatcacgcacatcatgtcaggatgttccattgctcttacctcaagagcttgaacctcgtgaattatccagttcagatttaagggtgaatgatttagatattaaccattcagatcgtttaaacaagaagaactttaatcagcctttgctcaaccgaaaggcaaaactggattcttctcattaggatttacctattataatgtttgtagacaatttta

SEQ ID NO: 27048 - DNA, 2445 bp, Zea mays
  Clone ID: MRT4577_12467C.1
cttactttgtggcggacgcaggcgtgctagggttgagcggctacacgagcgtgctagggttgagcggggctccgcgggcgtgctaaggtttcgcgagcatggcggtggccggcgagcaggtgagggctcccgcctctaattccctcccgagctcctcgagcggccaagcgtctgtgtgtggccgtgtgggcgaaccacatgcgccagccaccgtgcgccctgggtgagcacgtgaggccagaggagaagcgcatgtacaagcagctgcgtcagtttagcgcgagtcttcaaggtagtaggcaagccgcgagcttgtgactgcagctgctagccaagtgagcgtgccactacaggacagcaaacaacgacgacagcaattgaatgatccgttcagtatgtgctcccgattcgatgtctcctgtgacattttttttcctaaaattgccagattcctaatcagtcggtaattttgtgtggaaggattagaatctttggctgttgagtatactctaactactcttgttctttactttgggttatattgcggtgagagtttttgagaatgttcttcttttttggttctctcgaactggatgttaatttctgattcaaattctcctgtgttatgcatgtgctccttgtgcagagttggtacatttcctacattatatacctacttattcatttcaagttatctttactgaatatttgtttgtttgtttgtttatgaaactgttgtatcattgtggccataagttattttgggggataactttggttgcggatgattcgttcagcatgtcctcgtgctcttcacagggatcatgtccagactcacactgggctcgttgctcggccttgttgagctagagatcctccaacacagcggcaccgacaccaaggctcaggctagtacgatctgaatccctatccattccctgttgttacctcgttgtgctcgatctggttactgtcctatgtgcgggtttgttatattggtagtagggatcacattggtgtggctggttacatgaaggaatggagatgagaacgtcatatactctatcgtattctcaagtacctctgtaattttgaacattagagcgtctttggtgtatggtggtgaatttttttctcgctcgtatcggaagtctgctagattttgtaagtggcaataatgatagtgaggataaaatgtgatggtaacactaacattgacatattttttacatgcagaagtgtttgaaaaggaaagagaacaaacaaaaatgggtatagtcaggaataaggaaaagcattgtggatgggattcattcttttctatggttcacctcgttctggtgatatatgaaatggtacatcagataagtgggaagaggaagtataatgcaatggataatcataaaaagtgatcactctggagtatcctgtatctaccatttttatttactagggtagaatgcactttcagttttgtcttacctagtaatctttacagcgtgaaaggatctctagctagttgattagctggtctaagtagcactccttaggtttttagtttgactccccgtataaaaaaatttaggctgggttaaaaaatctcctgatttgtcccatgacaaaccattgttctaagcctcgaccccggtaatgtcttggtcattctcaaatgggctacgatgtcgctgctacgccaaagcataggtctaagactcgaccctggtgcggtattttagcatcccctttttagtttcaatagtgtattgttgttgtccctcaagtgttgtttattatttactttgtttgttgcagctgtcggccttccagttgttcaaaagcaacaccagcttcatgtcaccctattgttgtgtaatgttgctgccatggaggcacttcctatatttttgatagaatgtttcatcatgttctttttgtattattgtcagcgacatttgttcttgcctttggagagggatcatgtctaggctcacaacggggctcatgttgctcggcctcgtcgagctggagatcctcaaatgtagcagcaaaagcatctcaggagaccattaatagtatgaagagatcgatcgaagaaaataacctccttcatcaactattaagcttcaatcgaggccaagtgcctccatcttaagtctaactaaccactatagggcctacaaccttatagctgttatagtagcttgttacagtagctctagatttgaagttatatgattatttcaattatgcttaatgtataatactttgagttgaagttataggatttgatttggattttaagttaaagaatttgcagatatatgttttgaagttatataattctctcatggatgaaatatttgtgttcaacatattcatatgatattttggttgtgatgtgtaatattccatggtatgaattcatatgatgtgatcattctcatg

SEQ ID NO: 27049 - DNA, 1401 bp, Zea mays
  Clone ID: MRT4577_124680C.1
tctgccgtccgtcaccatggggtgttcgtgtcctccgctcgccgacgccgcgtgcctggccctgcttcttctggccttgtcgttggcgtgtcgccaccaccacgggtgcgcggcggccacgctgtcgacggcgtcgcggtgggtgctggacgagagcgggagccgggtgaagctggcgtgcgtgaactggccgtcgcacctggagccggtgctggcggaggggctgggcaagcggcccgtcggcgccatcgccgcggacgtggccgccatggggttcaactgcgtcaggttcacgtggcccacgttcctggtcaccgacgcctcctactccgacaggggctggcccgtcatcctcagcgagttcggggtcgacaaccgcggcgtcaacaccaacgacaaccgctactacggctgcgccgccgccgccgcggccgacctggacctggactgggcgctctgggcgctgcaggggagctactacctccgcgagggcgtcctggggctcgacgaggtctacggcgtcctcgactgggcctggtgcaggccgcgcaacgacaccgcgctgcgcagggtccaggccctccagcgcccgctcagggggcccggcctcgcggaggcggcgccgtacaccgtgctgttccacccggtgtccgggatgtgcgtggtgcgccggtcgccgacgccgtcgctgacgcagccctttcagctgagcctgggcccctgcaacgagacggaggcgtgggagtacagcgcgcagcagcagcgactggcgctgcgggacgctgcgctgctgtgcctccgcgccgagggcgccggcaggcccgcgagcctcgccgtgagctgcggcgacgccatggcaaggtggggcttcgtgtctgactccaagctgcacgtcgccgtcaacgccacgtcgtcggccgggagcgtcggcgacggcttgctctgcctggacgtgggcgcggacggccggagcgtcgtgaccaacccgtgccgctgcctgagcgcggacaacagctgcgacccgcagggacagtggttcaagctcgtgagcagcacgaggagcgtggtcaccaagcagaccatgctcgcgcagctgccgctcaagctcaaagactggaagatcaggtcgttttgagcgtttccccggtagaatatagtgcgtcagctaggctcaacacgtacgtaagctgtagcacgtgacgtcgtgtggaacggcgggaatagaggagcactgacctagaacttgaacaatgttctcgaggagactgatcagcattcagcagcatgtccatacctttctctgcgagactttctaaaagaatataattcttaaatacatgtataagatatgctgtaaactttggggaaatgataataaaaaatatattatgtagaattatg

SEQ ID NO: 27050 - DNA, 350 bp, Zea mays
  Clone ID: MRT4577_124681C.1
cggacgcgtgggctgttcattggtgcaccagacgctaaatggaaaatacacaacatgttagaggagcatttttacgcgagctgcactctactaactaattcccgtgctgttcatggcctacgtcgccgcggtccacgttcagaagctcgtcccagcgcagatgcgtcacattaccaaatagcaatggatagcttgccattccatcacacacaatacgacgacctctacaaacgcaccatcatatctgtcatctgacacgctatcatgttcaacatattacattccctgtgcagttctctacagctgtccagggatatgcaccttttatatctaccacaacctctccatgt

SEQ ID NO: 27051 - DNA, 370 bp, Zea mays
  unsure (1)..(370): unsure at all n locations
  Clone ID: MRT4577_124682C.1
ttgngtttattttttccanatttttatgcaaacagcactgtgtatttttaaagtgaccgagcccatagtctgcaaagggacgaaagaacatgctggcatgcggccacgggcattcgtgctggccggccataaccttttgtagccacaccaccataatgggaccagcccgcacccaatactcaggatggaacccaaaccaaacttagacaccgaacatgaccaggataaggacttcgaccacacccaggcaatcgagccacggcaaccacatctgcaagggccacaaccccgactgggacaggacacttacagtataacggcaggaaccagatccaactgcagcagaagcacaaacaggtcactcttgacc

SEQ ID NO: 27052 - DNA, 399 bp, Zea mays
  Clone ID: MRT4577_124683C.1
accaccaaaattatataggaggggtttttttgactaattccctgtttttttcccccttctgggcgattgatgccaacacaaaccaaagcaaaggtagaagtgcataattgaactagtgtgcataatgtaagctcaaaggttgcttggaattgagccaatataaatgcttacaagatatgcatggattgtttcttcatttttaacattttggaccacgcttgcaccacatgttttgtttttgcaaaagcttttgtaaaatcttttcaaagttttttttgctaatagacaaaggcaaatgaattaaattttgagaagcatttgtaagatttgaaaatatatccccctatttgaaatgctttctctttgactaaacaaaactccccctaaatgagattcttc

SEQ ID NO: 27053 - DNA, 175 bp, Zea mays
  Clone ID: MRT4577_124684C.1
accataactgaacaagcctaaaggtgatgaaaaatgttcttcctccacagagatgtaaacggggaaaaaattatctcggcggataaagagagatggagaagcattcctcattatcgtttcccgcgggtccaatttatatatgatgatgttttcatatacacaaaatgatttctta

SEQ ID NO: 27054 - DNA, 682 bp, Zea mays
  Clone ID: MRT4577_124685C.1
cggctaggtgtaagcctaattccctttcaatctccccctttttggtgattgatgccaacacaaaccaaagcaaatataaaagtgcataattgaactagtttgcataatgtaagtgcaaaggttgcttgaatttgagccaatataaatacttacaagatatgcatggattgtttctttattattaacattttggaccatacttgcaccacaagttttgtttttgcaaattcttttgtaaattcttttcaaagtcattttgcaagatagtcaaaggtaaatgaataagatttttgaaaagcattttcaagatttgaaattttctccctttgtttcaaatgcttttccttaaacaaaactccccctaaatgagatcctcctcttagtgttcaagagggttttgatatatcatttttgaaatactacttcctcccccttttgaacatagtaagataccaatttgaaattgacaaattgaaaatctccaattttaaaattagggtggtgggtgcggtccttttcctttgggctcatactttctccccctttggcatgaatcgccaaaagcggaatcattagaacccatcttctaactactttctccctttggcaaataaaacatataagtgaagagtataccaaagatggagagtgaagtgaagcgacggcgaaggatgattagtag

SEQ ID NO: 27055 - DNA, 396 bp, Zea mays
  Clone ID: MRT4577_124686C.1
caaaactagtcagtccagttgtttgtgttgggcaattcaaccaccaaaattatataggaactaggtgtaagcctaatgccgtttcaatctccccctttttggtgattgatgccaacacaaaccaaagcaaatgtagaagtgcataattgaactagtttgcataatgtaagtgcaaaggttgcttggaattgagccaatataaatgcttacaagatatgcatggattgtttcttcatttttaacattttggaccacgcttgcaccacatgttttgtttttgcaaaatcttttgtaaatcttttcaaagttcttttgcaaatagtcaaaggcaaatgaataagattttgagaagcattttcaagatttgaaattttttccccctattttaaatgcttt

SEQ ID NO: 27056 - DNA, 343 bp, Zea mays
  Clone ID: MRT4577_124687C.1
tcgcccactcgttcgcccacgcgtccgttcactcgtccgccaaatattaactttgagagtctaggcaaaataaaatataacttatactttgagtggtagaaagtaattatttaagagtaaataaattctaatagttatgtgtatatcatctattgatttgtctaccttcattaattacagtgtgtactttctttgctaagctaaaattttcttgtcaacatgaatattaagtagtttacttgattgaagagttaaattatttttgaattgcataaattaatatcagaaattattaagtcatttggcagactttttctgagatcaacaaggctatgatatttcc

SEQ ID NO: 27057 - DNA, 134 bp, Zea mays
  Clone ID: MRT4577_124688C.1
gaatacttgacaattgcagacttgccagctccagcggcagacctctcacgtactttgaaagaagataaccccactggctctctgccatctttggcaagctctccttggactcgtttaagtgcctcactataggg

SEQ ID NO: 27058 - DNA, 744 bp, Zea mays
  Clone ID: MRT4577_124689C.1
ttattaacggatgacaagtggccccaacttacaaattaccagcataggataataagagttagcattgtttttatctttagaaacaatgcaaggacagtagtaagaaattagaaagcaaagccatgaactgaaatccatatttgggtagttcatcgcatatgaaaatgatatccaaattttgtttgtacacggtggctcaggcattattttgtagaaccacaatccattaattttgtcagaatatgcaaatagagtattatcatattgctttggtccttttttcttttatttttggcacattcttcttttcccactaaatgatcaacttaagattcatctgtcggactgtggccgttaagcactgctacaagttatattgctacctccagggagatatggccaaccagaggaagttgcagggttggtcgagttcctggcccttaaccccgcagctagctatatgactggacaggtgcttacaattgacggagggatggtaatgtaagatttgagttagcttgatgcacttctacttttgctgagcatttaatgttgaacacccttgttgtgcacgggcgattttggacaacaaattagtgttgtctctttctttgtaatactctctggtaataaatctagcatgtggaatggaagttgaaaaaaaaaaaaaaaaaaaaaagggcggccgccgactagtgagctcgtcgacccgggaattaattccggaccggtacctgcaggcgt

SEQ ID NO: 27059 - DNA, 675 bp, Zea mays
  unsure (1)..(675): unsure at all n locations
  Clone ID: MRT4577_12468C.1
ccggccgggacttccattctccattgtacaagcctccggttgccccttccacccncatctgcttttctggctctcaatctctagtagcaaacaacttttcctacctagacatgaccgccgcgatcgacgtgcttgatgttgcctcatggatgaccacacgaacaccacaacatccccgtaggtcaccacgtctcaccaccatctagcgatcaatatcgaacaaaccacttttcactgttccgcacctcgtgaacgccatcaccgccctagctgcttgcagcgctcgctcatcaggtgctgatcctacctcgcccacgaactcaccatctccagcggactcactgatacattggctctgggcaggtatccctgacctcccggcggtactcctccgaggcggcggctggcctctctactgagcggcccacggcagtataatgttcggcgtgtgtgtgatacctcacgagtgtttacatcggcagcttctcccgctacggtctcctcaacgaacgcctcggcctggtgctggaatcgtgactcctcgcgccctacttctcgtgacaagatagcaccagcgncaacagggcaacatctctgccctgtcatggagacgaagtgctcgtgcacaagcatagagccgagatggcactgtactccccgctcttgtacaagcga

SEQ ID NO: 27060 - DNA, 1567 bp, Zea mays
  Clone ID: MRT4577_124690C.1
tcttgatttggtgcctaattcttttaagaaactaacctcaaaaacaggcaagctatatctttctgagtctactgctggtgtcaaggtacattcaaatatttttcttcaagagtttgcaatgtgtctatctgtttatggcaagaatggaggcagtgattcagcaatgtgcagtgcagttggaccattttctatggatacacaaaagaagcaccttgaaagcactgcaaagttaacacacattgaaggtccagactctggtgttttcccgtcccacggatcattgacttgtataagttatactgcttcccttgtgacgaaggataaagcaaaaacatatttgttggagagccacaatgagtttgagtttgagattgggacgggtgctgttagtaatcagcttgaatcatgtgtaactcagctgtcagtgaatcaaactgcacgttttgtagctgaactgcctcctagggatttaatcatggctgcatcttgtgagttctcacatgacctctccaatgtatctagtgagagctgcttcctggagttctctgtaaaggttctgcaggtaactgaaccattagaagatagaatggagaaagccctgttcagtcctccattatctaaacaaagagtcgaatttgctgtacggcacatcaacgagctgcatgctaccacacttgttgattttggctgtggatctggtagccttcttgattcgttgttagagcatccaaccacgctggaaaagcttgttggcgttgatatttctcgaaaaggcctcacacgtgcagcaaagagccttcatcagaagctgagcaaaaaatcaacgacgcagacaaatgttccaactgctgtgctgtatgacggatcaataacggactacgattctcgcttatatgggtttgatattggcacttgtcttgaggtgatcgagcacgtcgaggaggaccaggcgactttatttggcaacgtcgtcttgagctcattccgcccgaccgtgctcattgtttccacacccaactacgaatacaaccctatcctccaggggtctgctatgcccaacaaggacgacgaggcagacgaaagcgctggtccctgcaagttccgcaatcacgaccacaagttcgagtggaccaggctacagttccagtgctgggctactggcctcgcggtgaagcatagctacagcgtggaattctccggcgtcggtggctcaggcgaggagccaggctacgcttcccagatcgctgttttcagaagactggtgcagggccaggaagcgatgtgcctggacgaggatggcgatcagccttacgaggttctctgggagtggcctaacgcgtgtgtgaactaggtagattgcacgtctaatctctctagggcttggaactttgaatcgtgcccccggtttggaactgagtaatatatgtgtcaggaaagtgggcatccgacttgtggcaagaacacaaaaaattaacattgctgcatgcaagtgcagaaattcaggtctgcttctaggttctgagatgtacggtaggttactcccctcgtatatgatacactggtatat

SEQ ID NO: 27061 - DNA, 180 bp, Zea mays
  Clone ID: MRT4577_124691C.1
ctttttgtgagcgctacatacgcgttttttattccacattgctcactcgctcggggtgccattattccactgttgctccgaccaggctctttaatgggcttggatcacctagatgtgcttgcctactagcctcttcttgcgcttgccgagtgcgtgtttctactaccattctaccaattg

SEQ ID NO: 27062 - DNA, 256 bp, Zea mays
  Clone ID: MRT4577_124692C.1
gggcccaatatcatgtcattttttctctttttaacaaaaacgcttaagcacgcttaagcacgattaatcacgcttaagctttttcaccaccctagcgcgcgatcagggctttcttgaaccttgcttttacaacacctaatggttgttggcaactcatctgaactggtctgcagcataaatgatagtgagtatgacacctccacaacactggaagacacagcggacgcgtgggcggacgcgtgggcggacgcgtggg

SEQ ID NO: 27063 - DNA, 366 bp, Zea mays
  unsure (1)..(366): unsure at all n locations
  Clone ID: MRT4577_124693C.1
gnaatcttcaccctgaacatcctattatggtactcagcaaattcattgagccacttaatgcagcctgtttgttcctcatagtaaccctccttttggctctgaaagattgcaagatataatgggacacaccctattgggaagttccctggaacaactaacttctttgctccaagatttataaggtccgtgatgcccgagcctacatggacgcctcactcccttgatgagcagatgcaatggttcaagaagcttctcccattcattgcaccatctgagacagagctaaatgaaataatgtccaagtcacttttgttcgngggagagattggcggaaatgattacaaccatctactcgttagggacaaa

SEQ ID NO: 27064 - DNA, 258 bp, Zea mays
  Clone ID: MRT4577_124694C.1
gcaacaactactaccattcaaccagctagctggtgtgagccctgctaccttcttgacacaaccacaggtgttgccggtctaccaacacgttgcgcctaacctggaccctttacaacggaaattgtgcattaaccaacttgctttgacaacccagcagggctacaacaacccatatgggggccctttttgatttttagaggatagtcaatataagtttttattgagttgggcttccaaaataaaaaggcatttctgtaa

SEQ ID NO: 27065 - DNA, 273 bp, Zea mays
  unsure (1)..(273): unsure at all n locations
  Clone ID: MRT4577_124695C.1
tcggtatctagttactaaaatctaacttgttttttttgttgtcttgattacattggggggtgaatcttacaagtgtggggtatatgaaaatcgtgttnnnngtcagactcgaactgccaagttttgagatacaatttcgattagtgtttgtggattaatttcaagaagatgctttttaattaattttacagagtttcatacgatggcaagctagtgtaagcttatatggcgtatttattttgggacacctacaagaaggcattctccaagagt

SEQ ID NO: 27066 - DNA, 852 bp, Zea mays
  unsure (1)..(852): unsure at all n locations
  Clone ID: MRT4577_124696C.1
cattgggaccctcgaggccggccgggctgcgctaaattcccacagaacccgccggatctgacggagctcccctcggttggttgttgctccggccgatatcttcgcaggaattacctataagacccggccacctcccgctcgtccaagacatcaaggcaaacccaacaaacagagatggtagccgccgccatcgagctcgtggttggtcgccgctaggacctcggcagctgctcgcggttctgctcaattgctgcgacgtcgagctgatgcagccgcgggggctccaagacccctggtcctcgtcggaattcgtcgacgatggtcatcctccgcctcgaaaacatgttgcgccgtggccagggaacctgaggacatgattcacggtaggaaccttcacaatagcttcataccatattcaatttgatcttgcatcaccagggagtcgagctttgcgctaggatcgtgttcctaggggaaatccgggcatggcgccaccgcgcccgtacgcgccaccgcttcccctcggccgtgggtaggagacacgcctgggccgtagatcagtgaaccgacggccacgattagaccaacggataccggttcacataagggaacatatgatctgggccatcggtttgtgatcgcgcggcctcagtttgatcatacncccttcgtcgtggtcattatacagaagagcccctgcgcttagttgaaataaacccgccgtcctggtctggtgagatcctgagtcttaggaacattttgcgtaatagccccgaatctctctagattttgaaccgcagcccagcagcaaatataagggaataaatagtgtagaanatgatttttagtatc

SEQ ID NO: 27067 - DNA, 418 bp, Zea mays
  Clone ID: MRT4577_124697C.1
aagggggggggggtcccccttgggggtgggaaaatttttttttccgggggaaagcgaaaaaaaggcgaagggggggccccccagcgggggggtttgtcccaaaaggggggggggttcccaaaaggcggttgtgttaaaggcaacctttggtttttgtggaaaaaggggaaaattttccccccccctcggggggagaaggggcccattcttgtttgggtaaaaaaggcctttatttttccccacccccgggggtaaaaggggccttttctttgggcccccgtgggccccccggtttttccggcccgggtcctgggagcttccccattttctttttaaaggggcattccaaggctgggggaaaaatgagccaacgccttttcctgggggaaaattttttgccccccaaataccccccaaa

SEQ ID NO: 27068 - DNA, 388 bp, Zea mays
  unsure (1)..(388): unsure at all n locations
  Clone ID: MRT4577_124698C.1
cgagtacaaactggagtaatacctgcttcactccattcagcnactgaaatcaattgattcctttagagacttgacaagccttgttaaggatccaatgacaaacatgcggagagccttttctcaaatatctcccaggacaagaggaaacttaaatattgggcagaagcagtcgagccccatcattcaccatacgagaagctgatgtgatatacttgggagcacgtgtaagaacagtatttaagtttcctcttgtcctgggagatatttgagaaaaggctctccgcatgtttgtcattggatccttaacaaggcttgtcaagtctctaaaggaatcaattgatttcagtgctgaatggagtgaagcaggtattactccagtttgttctcg

SEQ ID NO: 27069 - DNA, 545 bp, Zea mays
  Clone ID: MRT4577_124699C.1
gtattgaacacattctcatggttgttatcatgcctgacgctgctgttcgtaaggcattgaacgacatatatgcatgccaaagcttcaactggtaagttcttaaagggaggaagcataaataataccttctggtgaagaaagcaggagcagaaccagaagcaaagtatctttttggtgtaggaatctgtaatcaaaggctggcgataaccttacgtccttatagagaacatcctgatcttcttacactggttgtactgcaccatagctaatgaggtcattgacctgatcatgttcactcactacttcgacaccatcaaggtagctaagcgacgtcttcaagaacaccattatcttcatacccaccctaccagaccacgtcaacgacatcagcaatcagatcctgcacgtcatgatgcatgcctcaagcatatacacgtaaatcatctactgtgtctgtactattggagacagctaggctcacgatgacgactggagtaccatgttcataatgctaggttgttgttagtaggaaaataatgattgct

SEQ ID NO: 27070 - DNA, 648 bp, Zea mays
  Clone ID: MRT4577_12469C.1
tcgtttaaatattaatagagctcctgcagagatctggggggggggggggggggggcccccccgtggtactgctagtactacgagatgacggaccagtctagctggaggccgcaccttaatgctctaactgtgaccaagatccccccctagaccgttcgcaccccccccacatcgaccctccacagcatgactaacaactactagtcctcggacacctggccggcgctgtggcacacccgagtagaaacggccgattccccccccccactagctctaatacgttgaccgtacaacagtatgttcacctgccccgttccagggttagttccaccccccccacaaacagtacggggcggtacgtacggagtcgggtaatgccctctcctcaggtaccaacgtgggctaactaccgggctttcctatggagagttgctctgttcctttagaaactgtaggacatagactatggggaagggggacaactctaaccacgtgacagacccgcgaagagtccgtttcaagtagtgtaagttcttgaagattttcttgcagtcgtaggacgttctcttgaacgttatataggtcttatagttcgtatttacgatcaacaagaaagcttactaagaaatctataagaaggtcgtaact

SEQ ID NO: 27071 - DNA, 2662 bp, Zea mays
  Clone ID: MRT4577_1246C.1
agagatgggcagtgcagtgacgaagataaggaccccccctttggaagtgcacacacacaaaccaacactgacatcacagcgggttcaggggaggaggagagggagagacttctttaagatcaccacaccctcccctcacccctcctcctcatcgtcctctctccctctctctctctctctctccattgcactcgctctatactaggtcctaggtaactagcaattgagctattaaattgttgcttgaggtgcagcagcaaggcacactgctacaaacaagctgatcagctgatgcccggtggcttcaggactttgccaaggttagcgaggtcccgccccattttgcttctcccctgggcttgcggttgcgtttgagtgcacttctgaggctttgattgggccctcccgctccgcacttaagctctccgcctcgtccatggcgtcgcagccctcaagacttgctgtctcttggtagctgccgcttctagctactccaccacctaactgaaagagcgtatagttagttggtcttggattcttggtccggtgctgccgccatgttcctgagatcgaagatccaggagatgatcctgcggaggagatcgaggtcgatgaacagcgccggcgcgcagaggggccacgtccccgatcaagccccgagctcgtcgaccgttccgtgcgacgatgacagtgccggcgccggcggcagcaggagcgcgggtgcgcgtgccctgttcgcctccccgaggctgctgcactcgtcctccctgcccgccggcgccggcgccggcgtcgtggccttcgccaggagccccgcggcggagcccgagcccgagacggcctcctccctgagcccgacctccgtgctggacgcggcggcggccttcgtgccacgcacgggaggcgccgcgggcaagcggcgccagcgccgcccgtggcgcgcgcgggacaacaacggcggcctcgcggacgtgctggactgcaccgatgaccagcagcaggagcggatcgtcctcgcggctacgtcgtcctcgcgctctctgctcaggtcgtgctccctggaccgccgcgtcgagttcggcgtcaagaacaagagctcgtggctgcccctccggccgacgccgcggcggacagggaggacagctcgccgcggcagatcaatcggccggcgcgcggcgaccggggcttcttcagcctgtgaatgatcccatacacatccacccacgagcgtgcgcgtagactgatgcctaaagaaacaggtaaagagaccgagtttgctgagtgctagtattaagttcagccttaatgttgcggtattgaatcggatgctccgtttccacatctgatcagatgatcatagttgtttccctgatcagatgatgtgcactagacgttttgttcaggttgagctgaagctgtgatataaaatttcattacgttgttattaaaaaacctgcttctcagctcaacctgcgcgttaatcagtttgagattgtaaatttttatgttgttggagcttctgggctaaatatcacaatggatatagctccctatactggaattagctttgctgctgatcaagtcaaggcaatgaattattcacttactctgcatacagttcggattgatcctgtgttggtcggggactataatcttcttaatttaacttggttcaggtcattggctccagcggcagctccagcattcacaatggcacctagggcctctccatctacagcatctacctttccaagacagagtgagggtccaagcaaaaatagacatgcaagcctgatcacagtggttattatatgtgttggttctctaattggagtcttgctgattgttttaacaatatgcttctgcacatttaggaaagggaaaaagagagggcctcatgttgaaactcccaagcaaaggacagcagatgcagtttctacagtggagtcccttcctcgccccaccagcacaaggttcctttcatacgaagaactgaaagtggcaacaaataacttcgagccttcaagtgtgcttggagaaggtggttttggccgtgtcttcaagggggtactgggtgatggcactgctgtcgctataaagaagcttactaacggagggcaccaaggagataaggagtttttagttgaagtggaaatgctgagcaggttgcaccaccggaatcttgtgaaactgattggttattacagcagccgtgaatcatcacagaaccttctttgttatgagcttgttcccaatggaagcctagaggcttggcttcatggtacacaaggtgctagccgccccttggactgggacgccaggatgaggatagcacttgatgctgccaggggattagcatacctccatgaggattcgcagccttgcgtaatccacagggatttcaaagcatctaatatattgcttgagaatgatttccatgctaaagtgtccgattttggtctggcaaaacaggcgccggaaggtcggacgaactatctttctactcgtgttatgggaactttcgggtatgttgcaccggagtacgccatgacaggacacttgcttgtaaaaagtgatgtatatagctatggagttgttctacttgaactactaactgggaggaggcccgttgataattgtacagtcctcttggcaggaaaac

SEQ ID NO: 27072 - DNA, 372 bp, Zea mays
  Clone ID: MRT4577_124700C.1
aattcggcacgaggtttttttttgggaaaaaaaattggttttggaaaagttggttctaacgttgcggcggcatggcacggtttggccgccaacgggggccgccggccgggggccgggtccttgcccggggaagtttcaaaagaagaagaagggccgtggggtaaggttccggggcttggccatcaaacttcccaagccggggcggggggcccggtggtggccgccgccaggggaagggccgccaggtccacgggggcgggggccgggcacaccaacgggggtggttgaaaaccataagcccaaaggggccgccagggtggttgaaaacaataaacccaaaggtttgaaagggtaatttgccagccggggaaa

SEQ ID NO: 27073 - DNA, 355 bp, Zea mays
  Clone ID: MRT4577_124701C.1
aaaaacaaaggtagataaagtttgtggggggggcagcagttttggtacgtacggtccatcacacagaaaacttgaaatgcagacattcagaaccactcatcagagttttttagaacaccaaacagacaggtggcattagcagttgtagcagccagaaagatgtcattcagacatggtcgttggcgtacgtacatgcatgctatatattattcgtccattcaggacgcgaagccacagacggttaacagttagagcgggggaggacgaattaggcgggggggggagcagctaggtaagagtccttggattaatttagcttgtctctaccagggcaggatttttcagggctggttgt

SEQ ID NO: 27074 - DNA, 422 bp, Zea mays
  unsure (1)..(422): unsure at all n locations
  Clone ID: MRT4577_124702C.1
ggggggtttggttttgtgggcgggacacgtgggggggggccgggggattccggcaccgggacctcgctggcgttccgagcttgctcctctggagagccggaatccgnagcttgggcgtcatcatggtgcatagcatgtgatcctgagaggaaacccatatggcgggggggggggcggcacggcatacggagccggagggcctccagcgatacaagcctgggggtgcctgagtggggggtggctaactccacacttaattggccgttgtggctcacttgctccgctttgacagctcgggaaaagcctcgtcgggcacagcttgcttctaattcaagttggacagacgctcgcgtgaggaggcggacagggtttttgggttcgcctatggcgggtcttcccattttcacacaggtgagaacagg

SEQ ID NO: 27075 - DNA, 366 bp, Zea mays
  Clone ID: MRT4577_124703C.1
gggtccttggggtttttttctttttttttttcggcccccaccgttttttggggggggggggggggggccaagggccccccacccttcctggttccctggcccccgttgttttccgtgtttcccccggtgggctctttcctttgcccttccctttttcccccttcgttccccttttttttcccccccgggccccggtccccgggggttttcccggttcctttctccgaggccccggtgcggtgcttttcccggtttgttgtcggtttgcttgctcctgggctttttccgggtgggcgggttccggttccggtttttttggttccttccctcccgcccccttattttcccctccgtggtgtggcccct

SEQ ID NO: 27076 - DNA, 277 bp, Zea mays
  Clone ID: MRT4577_124704C.1
gatataactataggagtattagtgcgtacataaatgttggtattcgataggataggaaagcaaatttatgtgcattaaaaatatttttacaatcttcacggactaaggggcagccagaaaaaaaggagccccggaaaacatacgtgtatgcttcaaagctgtagacctgtagttgttttttcacagttctttctacgcttaaagttaggggtgagtaaaccaccaagacattaaaaacttgtaatgctgctttcttatctgccttctcaacgaagct

SEQ ID NO: 27077 - DNA, 385 bp, Zea mays
  Clone ID: MRT4577_124705C.1
ctaacatcattttttttttttttttttttttttgtttgttttttttttgtttttggttgttttttttttttaaaaaccccaaaaacaaaaacaacgggggggtttaaaattaagggccccgggggaccaaaaagaacccccacaccgaacgggtcgaaccaaaccaaggaaagggggccacaaaaaacaaagggggtaggacttaaacctaaaaggccctttcatagcctcaattttaaaaacagaacaggggccccggctcaactagaaagccctaaaaacataagggcccaaagcatagcaaattagctccaaaaaatgttcggctgacttcgggccatcaaactttggaaaaaacccgccaaagacgttaaaaggggggcct

SEQ ID NO: 27078 - DNA, 186 bp, Zea mays
  Clone ID: MRT4577_124706C.1
ttgacccacgcagccggggacgcgtgggcagcccgacacaggccacaacgagcatactctttctcccgtgccgcgcatcttgtagggtgccgcgcgcggaaagctaatccatggatctgcactacggggcccgggtcggggaggccatggcggtgggttatgcgggctagatggccaccgcgggcg

SEQ ID NO: 27079 - DNA, 926 bp, Zea mays
  Clone ID: MRT4577_124707C.1
ttcctcgcgtctggcacaaggtccgcagcgatgtacccatggagtacgctgccactatcaccgtcaacccattgaccgcacttaggatgctccaagactttgtaaaactcaatcctggtgatgccatagtccagaatggcgctaccagcattgttggccagtgtgttattcagcttgccaaagtacatggaatccacaccatcaacattataagggacaggcctgggtcagaggaagcaaaaaacaaactcaaacaacttggtgcagatgaggtgttcacagaaactcagctagacatgaagaatgtcaagagcttgctgggtgctttgccagagcctgcattaggatttaactgtgttggaggaaatgctgcttctctaatactcaagcttttgaagcaaggaggcaccatggtgacatatggtggaatgtccaagagacctgtcactgtccctacttcatatttcatttttaaggatctatccctacgagggttctggctccagaagtggctgaactcagacaaaacagaagactgcagaagaatgattgactacctcttgggccttgtgcatgaaggcaaactcaaatacgagatggagtccatttctttcggcgagttcagcttggctctggagaaggccctgggcaaacatggaagccagccgaagcaagttatcaagttctgagaccagggcgggttagaggatctgagagcatgcgattgccatcgatctgtatgaatgatgaatccaacagttagctatgtcaagtgccagagttttaaataaaaataaagtaaaggcagcaatgtttaatggaattgtgaaatcagcagcttagccgaaaaaaaaaaaaaaaaaaggcccctagtgcaatcagcagcttagctatatgtcaaagaaaaaaaaaaaaaaaaagcggcc

SEQ ID NO: 27080 - DNA, 175 bp, Zea mays
  Clone ID: MRT4577_124708C.1
gggggggaggcacaacaccctcgcatgatgcattcttaaaattttccaggttatacacaatacaagcggcacacgttcacaggtaaaataggggcacaatgcctaaaggcacatgtttttaagcagacaaacttggtaacaggggacaaacaccgactttttgcggacccgtggg

SEQ ID NO: 27081 - DNA, 662 bp, Zea mays
  Clone ID: MRT4577_124709C.1
accagccgtattcttcctagcagctctggcagcctttaccttcggaccagcgtcaacacactgagcaatccatacatcacacacacagcgccagaggtttaacttaattagtcggccgagaagagcagaggagtgagcaaggtagctatggggaggtctccttgctgcgacaagacagggatcaagaggggcccgtggacggcggaggaggacatgaccctggtcgctcacatcgagcagcacgggcacagcaactggcgggcgctgcccaagcaggccggcctgctgcggtgcggcaagagctgccgccttcggtggatcaactacctgcgccccgacatcaagcgtggcaacttcaccggcgaggaggaagacgctatcatccagctccacgccatgctcggcaacagatggtccaccattgccgccaggctgcctgggagaacggacaacgagatcaagaacgtctggcacacacacctcaagaagcgactcgactcgtcctcgtccaagacgtccggccaggcagcgcctaagcgcaaagccaagaagcctgtggctgcagcgagcacagccgatggcccggtctccatgccagtgtcatcaccggagcagcccatctcgtcgtccgccacagattactcgatggcatcgtcgttgga

SEQ ID NO: 27082 - DNA, 398 bp, Zea mays
  Clone ID: MRT4577_12470C.1
gggggaaataacatccaaagggcaaaactttcccaattaaaaaaagggtttggggttggatcaaacttaatgtcatcgggtaacctttgcaacagttcatacattggaacggggcactaaaaaaacactcaaaatacaaacgtgccgaaaactgaatattccgtaatgcaaggggtcggaaaaaaaaacaaaaggtgggggatcttgttacaagcactgggaaactctgccaaaaaccgggttctcgtatttgcccctccacctggtggaaaaataaatgggacccgaaattccaactccggactgaacgggtggaacaaacgggcgatgtccccgtacttcacctcctcaaggggagggggattccacttaagggcattggctttatcgatgctaaa

SEQ ID NO: 27083 - DNA, 150 bp, Zea mays
  Clone ID: MRT4577_124710C.1
ccacgcgtccttgtgaggtgaaccagcagcctccaataaaggggagggcattcaaataaaaccgcgagaccacacccctcaggcgagcagaccgtcggcgaaccaccgcgccaacccgagagacagatggagatgagcaagaggatcccc

SEQ ID NO: 27084 - DNA, 191 bp, Zea mays
  Clone ID: MRT4577_124711C.1
tctaaataaggttaacaagctgattaagctggcctcatctttacaattgcatacttttattaattactgtattattccttgccagtttaattactgtatttgtcattaaactggcaaggaataatacagtcattaataacagtaagcaattgaaaagatgaggccatctaaataaggttaacaagctgatt

SEQ ID NO: 27085 - DNA, 208 bp, Zea mays
  Clone ID: MRT4577_124712C.1
ttatatttttctagaacccatagctcttgcggggtgggttaaattaatgggaagggagttgccacccggggcaacgcacacccataaatgaaccatgccctcgcattgagacgagagaagcgctccctttcggctacaatagagaaaaacattactgggtgcttagctcacaatctaattttccttggaagcaagactttatccacag

SEQ ID NO: 27086 - DNA, 212 bp, Zea mays
  Clone ID: MRT4577_124713C.1
gtacattgctacgggaggtcgaggaaacgtaataagacggatatctcaatcctaatcgtgtcaaagttcgatgactatgctcagcttcctctcgagatgcaatgcgcgatcggtaaccatgcctgatcatacgcaagagcgatgaaggcgaccgtattgttctcgagcgctacgcacaacatcgacgtgaacaagatcttcaagttcatcac

SEQ ID NO: 27087 - DNA, 364 bp, Zea mays
  Clone ID: MRT4577_124714C.1
gatcgccccccacacacaccttcccttcggtccatcccgatcttaccaagaatccgagatccgcctgcgacagctagcggtcctatcttgatccgatggtgtcaccggcgccgggatgtagggattcgggggaggatggcggcaaggcggagtggctgatctacgcctttgtcgcgcgcagcaccgggcctgacggccgcggcggcgcgccggggggggggggtatgcatgcgacgggcacacatccaacttcctcctgcaccgaggctacgcctattgtgtagttgcgaaggaatccgttccaaagaatgtgtcagtggcatttgttgagaggttaaaggatcgacgttgatgaagagatatg

SEQ ID NO: 27088 - DNA, 883 bp, Zea mays
  Clone ID: MRT4577_124715C.1
cctcgaggccggccgggaaagagcgaccagaaaagctggccggtcgctggcaacagcacgcattcctactctactccggcactgcacactcacgagctgtggatagctgatactctcccccggcgccaagaaaccacgaaatcgccccccacacacaccttcccttcggtccatcccgatcttaccaagaatccgagatccgcctgcgacagctagcggtcctatcttgatccgatggtgtcaccggcgccgggatgtagggattcgggggaggatggcggcaaggcggagtggctgatctacgcctttgtcgcgcgcggcatcgcggtgctggcggagtacacggaattcaccggcaacttccccgccatcgccgcacagtgcctgcagcgtctacccgccgggtcgtcctccgccagcaccgggcctgacggccgcggcggcgcgccggtacggttcagctatgcatgcgacgggcacacattcaacttcctcctgcaccgaggctacgcctattgtgtagttgcgaaggaatccgttccaaagaatgtctcagtggcatttcttgagaggttaaaggatgacttcatgaagagatatggtggcggtaaagctgatacagctcttgcaaaaagtctaaataaagaatatggaccagttataaagcagcacattcagtatgttcttgatcattcacaggaactagataaaacgttaaaagtgcaggcccaagtttcagaagttaaaaatatcatgttaaacaacatagaaaagactttggaccgcggagaaaagttgagtgaactccaagacaagacttctgatctacatagtcaggcccatgatcccttatcatcaggggagttctgggcttcttttcttt

SEQ ID NO: 27089 - DNA, 854 bp, Zea mays
  Clone ID: MRT4577_124716C.1
gtgcactctactcgtgtgctggggacctttgggtaccatgccccagaatacgccatgacaggccagatcaaccagaagagcgacgtctacagttgcggcgtgatccttctggagctactcaccgggcggaagccggtcgaccacaccatgccgaaaggccagcaaagccttgttacctgggccactccaaggttgagcgaagacaaagtgaagcagtgtgtcgatccgaagctcaacagcgactaccctccaaaggcggttgcaaagctggcggcggttgcagcgctgtgcgttcagtacgagtccgacttccggccaaacatgaccatcgttgtgaaggcgatcacgcctctcctgaacgcacctaaaccggctgctccggctgcgccgcaatcctgatcaaccaaccagccagatgacagaatttagcctgtgccgcatctctgactcctcaacaccgcggtttccctctgtttctgatcgtagatatgtgtttcaaggaaccgcgcatccttgctccatccatccagcgcttatgcttctgtaaaggaaaaaacaacactgatctgctggtgctgcaggacacatataggggaatttttaaaaatgttaatctgctactctgaattcgtgtgcttcttgctgtaagtttgtgttataccatgtgcagttttagagagtacacatgcagtttctagctacaaaagtaggcacgacgatggtttccagcttttccaaatataaaacaaattcacagccacagctacagagtgcatcagatcaagatagtattggctctttttcaccatatataattgctggtaccaattaccaaaggagcaaactctgatgac

SEQ ID NO: 27090 - DNA, 179 bp, Zea mays
  Clone ID: MRT4577_124717C.1
cattattagcataacaaacatccccatttatctatttatagatctgcaaggatacatgacagccggggggaatagagtccattgatccttatagcatactgagtgatgcgtgcaggctgctaggccctgagctgatcacatcaatagcatctggcatatagcgaccttacaatcaaaat

SEQ ID NO: 27091 - DNA, 519 bp, Zea mays
  unsure (1)..(519): unsure at all n locations
  Clone ID: MRT4577_124718C.1
tttacctttgcaaccgcctttggngggtagtcgctgttgagcttcggatcgacacactgcttcactttgtcttcgctcaaccttggagtggcctaaccaatgcaatggcgttcacagtcagtcaggagattacagtcagtcaacagattttggcacaaggcattgattgattacccaggtaacaaggctttgctggcctttcggcatggtgtggtcgactggcttccgcccggtgagtagctccagaaggatcacaccgaaactgtagacgtcgctcttctggttgatctggcctgtcatggcgtatctgagaaaacggtccagagtagcagatggtaagaaggctaaatgctagctacaaaagcaaggcaatgcagtggttattgcacaatttgtgtatattattatattgttccttcatcttactctggagcatggtacccaaaggtccccagcacacgagtagagtgcaagcgcgcggctgtgtcggggccctggttggtgaggttgaaatcggcg

SEQ ID NO: 27092 - DNA, 500 bp, Zea mays
  Clone ID: MRT4577_124719C.1
cccacgcgtccggctcttccagcacattatagtttccacctagttgtggatcaacgaagctctcttctatagccatcaactcaattgtatactgaactatgtcacgaggcagggatcctttggcattgagccaggtaattggtgatgtgttggatcctttcataaagtcagcaacgatgaggattaattatggtgacaaggagatcacaaatggcactggactacgagcatctgctgtgctcaatgcaccacatgttgagattgaaggccacgaccaaacaaatctctacacacttgttatggtggatcctgatgcaccaagtccaagcaaaccagagtacagggaatatctgcattggtgagcttattgtatttgatattcaagtaaattttgagttgaatatttcctaaactctggatagcgccacctttctaaaagaaacaaatgaatgctacttggcacattgtttttatgtttgtagttcaaggaccccttacct

SEQ ID NO: 27093 - DNA, 132 bp, Zea mays
  unsure (1)..(132): unsure at all n locations
  Clone ID: MRT4577_12471C.1
gnatattcatatatgcatacaggggcgggatcttacttttcttatgcttatcattactcccattacctcaaatttataccctttcacatattcttcactattaacatttcttaaaaaaatttttaaaatatt

SEQ ID NO: 27094 - DNA, 265 bp, Zea mays
  Clone ID: MRT4577_124720C.1
ccatataattctatacatagtccatacatagtctataaacaaactcactactcactcatgcgggctgtgggagttttggccactccctcctccgccaccaggaaggtggccacttcctcaagaaccatggacgaggtagtcttggacgttaacagcacccttcgatccctgagcatgtgacactgaaccctgcaattcatcaatcattcaaataaggttgtgttttgatatccctatacctatacattgctatgtttggtcaaaa

SEQ ID NO: 27095 - DNA, 193 bp, Zea mays
  Clone ID: MRT4577_124721C.1
gaaccaaaacaaactgtacgcaatacaaggcgagggcggacggcaccacgagatatgtacatctattgcaccgcgacaaaggaaagggaaatgactgcacccgggcagaggcgcatgatatggggacatacatgcatacacacccattcattgaacgtggggtggagcacatggaaacgtccacggcttagaa

SEQ ID NO: 27096 - DNA, 217 bp, Zea mays
  Clone ID: MRT4577_124722C.1
gctcagcatccagtcagtcagtcctcgatcttctatcctctactgcctgcatcgattccatctgcgatcgattccattccatgcatcgaagctgcatcagggccatgacgatggcagctacgacgactatgatctcagcatcagcgcatgcgtcgacgtcgcagctgccgacggagttccggttccacccgaccgacgaggagctcatcctgcacta

SEQ ID NO: 27097 - DNA, 409 bp, Zea mays
  Clone ID: MRT4577_124723C.1
atcatcctttatacctcgctttctctcttccaccatacggtgccttttacggactatttaaacgcctcgctcacgtcttacccctaattacattcccccatggaaccctcatcctctcaatccatccacccatccatcccattcctgaatttatgctactcatatctgtaacttctctttatccacgttaatgccatcgaacaccccgccctcaatctatccacttgtgctcgtctctgttccccctgaggcctataaccactactctgctcatgctcctgcttcaacgcctcagcgatctacgaccaaaccgccccgcacgattgtcactactcgacacacttcgatgtccatgtgtttatcccaatctcccctgctttcctcattcttctccctcttttgcttttaa

SEQ ID NO: 27098 - DNA, 828 bp, Zea mays
  Clone ID: MRT4577_124724C.1
ttccgaggccggccgggagttgctccttcgctttgctttgagcagttaatccatttctcgatacaggtctttgcgtgaatcctttttggtttcatctctagctttccgcggttttcgaaagccactgtcacttgcatccaattctttgctaaaccaactcatccgctactataactcgcttggttcagccaacttcttaccgctctctccgcctctcaccatcatctcatattctcaccgttccttgcgagcataaataaactctttgagtcctcatcaacttttaccacttttctaccacaaacaaccgacatcatgcctcccaagcgaatccgttgcactgccgccacttgccgcgagcctgctcagcgcatcgttggcgactgtaccttttgtcaaggtcacttctgtggcaagcaccgtctactagaagaccacaagtgtaccggtctcgaggattgtaagaagcagtcctacgagcgcaacgccatacaacttgagtcggagcgaacccaggttatccggggcgtgtaaaccgaccaacgagaatcacacatagtcttttaacagatatgtgttggactggagactggcgtcactcctcaaattcacgatgcgcaactctgacggccaccacgacgtaacgatgggattgggtttcgacacaagcatctgcatgagatgagatgcagggcgttattcgccattgtatatttctatttcaccagttgagggtgcgacggcgtactggatatgctttgaggggcatagttcccaattctagcgggggctgcattaaatcattcatcaccattcattacttaccag

SEQ ID NO: 27099 - DNA, 656 bp, Zea mays
  Clone ID: MRT4577_124725C.1
atccatattttttatattaattgttcatatttatttttttttttttcgaatgaacactatgaagtcctctatctgtcccaccatgtgaaaatatacagttaatatagttaatggttgcaacacaacataggaactatccaaaaatgtcacataaatggtctaaactttttactgattttcgaatagtgaagcattatcactgctaaacttctctaagcattatccaacacaggaacacaagcctgatgcattaaagccttttctagcaccaaaacattagcttgaacactctgttgctttaagttttttgccaacctagcaaagcgttgaagctcaaaattgtcgttttatcactcctcagttactttctggaaccacagcaaatgattgatttaggaacaaaaagtggcaataaaaaaatatcacaaacacttatcttccgatcatcttcaattgaagtagtcatcttctcaatttgatcgatctgcattcactcatggagggaaaatgttgattgaacttcttataccttgtgtatcgtcgcggttgcattgtcctccacgtgaagatcaataagcgcctgcatagctgttcaagtgatgccctttcaacacgcatagacatgcccagtgctctctgatgcttcttgccattta

SEQ ID NO: 27100 - DNA, 417 bp, Zea mays
  unsure (1)..(417): unsure at all n locations
  Clone ID: MRT4577_124726C.1
ggcttgngacctttgggcntgtttatgtgcttggcctgcgaataagttgctatatttatctgtcgtcgaattaggagccttacttactggtgtctatctttatgactagtgctgctgtccacttgtaaacactctctccttctcccgtagctggtattacgggccttgatcctaaactgacttttccgactgacactggtttgtccgctgaaaagaccgacgacttaagtacggttaatgacaaggacccatcgtaggccgcttggccatcggacgacgtccgtaaggaggttggacctcctcacgcgaaaggttacggcaccgacgagctatcgacgagggaagctaggaacgcaatttgcgaacctccctagtccttccacgaggaaaaaccaaaaaccaagacgatattctaaa

SEQ ID NO: 27101 - DNA, 230 bp, Zea mays
  unsure (1)..(230): unsure at all n locations
  Clone ID: MRT4577_124727C.1
cggcncgnggcccgtggccgcggggcgtgctgcccctgctcttgctcttggcgctgctggccgctttgcctcgcgctgggnggcggtcgctgctggtgtccctgggcgcctccgcgggcttgcgcggcgggggcccccgtgcttttttcttctcggccgtgtcctggccgggggggggggggcttgcttgtcggtgggccttctggtcgggctgttcccgtggctctggc

SEQ ID NO: 27102 - DNA, 284 bp, Zea mays
  Clone ID: MRT4577_124728C.1
atttcggcacgaggatccccctggtgtcacgaccgcgatgaatccaaagcagacacgagtccttctactgttcttggagcgtcctcagtctctctagcctggtgaaagagccacagagcatgtagcacgcactggcgcgagcaagcatggtgattaagtgctcatccgccatgaccctaaaggtcggggcaccgctggccatcttttacgtcgaggataacactgcgcaagactctgacgtgcgcatcatgatactattagccgccctgtgtcacaccgacggc

SEQ ID NO: 27103 - DNA, 516 bp, Zea mays
  Clone ID: MRT4577_124729C.1
tcccgctttttttcccctttttgcactctccctataacgctccgataattcccaggcattggaagaccgctgtatgggtgccgcgcgcaggctcaagacccaccgcaggaaccagtgctgggcttacaagggatacaccaagagccttggggcaatgtgtggaagaacacccttcggtcggtcgttcgatgccaagggcattgccctggataagattggtattgatgccaatcagcctaactgcgatctgcttaagtgtgctcgtgtgcagacttgatcagaatgtgtaaggaagtattgctgacttgttgccaaaagacggttgatatgaactacattgaggtaaaatgtatgaagtctctgattgctagtatttagtcctgaaggtgcactctgtgggatatattcctggagtacggttcaaggtgcccatgtttaccagcgagtctctgtttgcccttttgaaggagaataaagagaagtctagggcttacattgctcttgctaccaaaatca

SEQ ID NO: 27104 - DNA, 186 bp, Zea mays
  Clone ID: MRT4577_12472C.1
atgagtacttccaggcgggcgggaccgatcacccttcaccggcattcggtcattcctagagggtagagttctaagtacagacatctgcgtcagagctctcaactactgccgccggccacctcctccgcccgccgccagcgtctccggctccgatcacctcccccgtgccgcttacggccatctccc

SEQ ID NO: 27105 - DNA, 288 bp, Zea mays
  Clone ID: MRT4577_124730C.1
ggtttactttggattggtgaaagccaactggtgggtgacaatggcatttctctggatgtggataccaaccttaacgccaacgttaacaatctgaagtggccaaaggtgatacggtaacgcctaataaggaaaatctgagcattattgtggcagtgatcgtaatgctataaattctcaatcgactatcctgtgatgacacccatttatgacacatctactatatgcacaagctgaagaatcttttactttgaatcctagtgaaaaccctttggttgatttttcatcaat

SEQ ID NO: 27106 - DNA, 573 bp, Zea mays
  Clone ID: MRT4577_124731C.1
atgaagtacatcaacatatctcgaggcaaaaatctattgatggaaatccatgatggacaatgtggcatccatgtcgcatcaagaacattagtcagaaaagctttcagaactagattctatcggtcgaagaccaagcaagatgcaatagatctcatccagagggcagattttttctgtgagcataaaggtattttactcaagtatgcttcagtggtacatccaagagccaatggtcaggtcgaacgtgctaatggtattatacttgatgcattgaagaagaagatcttcgataataatgataaattgatagataagtggatcaaagagcttccatatatcgtatggagcctcaagacttggcctagtcgagcactgcaagggaatacacctttcttcatgatctatggttcggaggtagtgttacatgcagatctagcgtttggagcatcatggctcgacttcaaggatatagctgaagctaaagcaacacgattggaagagattgatacacttgaagaacaacgactcaacacgatcattgaatcggcacattatcagcagagaaacctttag

SEQ ID NO: 27107 - DNA, 274 bp, Zea mays
  Clone ID: MRT4577_124732C.1
atacttgtagaattgggtggggggaatgagcatgaactgtccttccatttgggatatgttacattagagtgagagagagaataaggagcgctttcttatggaagaaatgggagaagagagacagggttcttttcagcagagtctagtagtttctctgtaaggcaaaataatctaaaaagactaacctgcccacccactccttatattgctgtgagattgcccctatcttgtgctcttctgtctgcagtgtgcacggccttgttctaacccggaa

SEQ ID NO: 27108 - DNA, 1067 bp, Zea mays
  Clone ID: MRT4577_124733C.1
atcagaagaatctactcctatgtccttggcttccaaatccctgccttaggccgcgcagaccagtctcctgcagttgtttggcaacctgtgtatacttctatcatacaagcattgaagacttttatgatttctactgttgcttcaagtgctgcttggaacgagttagaggctttcttacttgaaaatattttccatccccatttcctttgcttggaaattattacagagctatggtgtttcttcattcgtcatgctgaaactgagacttcaattaatctagttaatcaagtctcccttctactaaagactgttgcatcaccagaggatgttctttcacctctcagtgctttgcggaaagttgcacgatcattgtgcatcatcttgagctatgcatcttctgcaactgttgatcaaatatatacttgtgtgctgaatggtgaaaactcttccaagtcttcaatcttacacttagcattgctgatggaaggatttcctttggattcattgtctgatggtacaaaggaacttgctatgaagaaaatgtttacctcttttgctggctatctggagagctactccaagaaccaccgagtaatcaatgtgccaacttgtaaattgggtgttgtaggacttcctatacatgctctagcctctgcattgcagcatagtgtaataaatgttgatagtattgtagatgagaatagcatcactgctatgtttaagttcaccatctctctcataaagatgtatagaattgcgccagatagtagtaaggataaccttgccaagcacattagttccatgttggttattatctcaaacacgaggcatctttgtgcattcagtgagatggagaagttgactctgcagttgcgcacgctgttcgtttccacttctgataaatcaaatgcagtgctgtcccagtgcaaaccgtcaatggcttcctttatgtcaactctcggtcacttgaacgtttctgaagacgatgcttacgaactttgttctgcaatatgggatctatatcatctcctgctgaatgaacgccactgggctctcattcacctcgc

SEQ ID NO: 27109 - DNA, 217 bp, Zea mays
  Clone ID: MRT4577_124734C.1
gagaaacatattgtgatgaagtggaggtttaaatcttggccagagggacactttgccaccatcaccttgaccttcatcgacaagaacggagagactgagctgtgcatggaaggtcgaggcatccctagccctgaggaagagcggacacgacagggctggcagcggtactactttgagggcattaaacagacctttggctatggcgcacgcttatttt

SEQ ID NO: 27110 - DNA, 309 bp, Zea mays
  Clone ID: MRT4577_124735C.1
tttggggtagttttgagtagctgagggtttaacaaacaacaacaatttgggaacacagaatagccaccaacaagactcagccgaacaataacgatgtaccggacaaaacaacgtctggattatcggaccaacctcaaggggaggcaacttccaagggcacactaattacaaaaactggggagatgagagttaacgcaaaaacagcgccttggaaagccatatttatatttataatcccccacactaccttaaaattaagatgaccacctaaaactatccggagactccacttaatcaaaagagcccgaa

SEQ ID NO: 27111 - DNA, 261 bp, Zea mays
  unsure (1)..(261): unsure at all n locations
  Clone ID: MRT4577_124736C.1
ttgttttttttttttttttttttttttttttttttttttgaaaagaaaagagnnnttaaaactaacttggggttcgagttactttgagggggggggtgtatcatgtgcaattgaaaagacaaaagcatgccaccgttcgctcgctaaagtttccagcagaggcgagcgccggtggaggacccccgaaaccaacccccaaaaaaggatctcgccaaaaaggacctaaaggaggatgccccccctgggggagtgccacccctt

SEQ ID NO: 27112 - DNA, 407 bp, Zea mays
  unsure (1)..(407): unsure at all n locations
  Clone ID: MRT4577_124737C.1
ggttaaagaaccctaccgacgatgttccggctagcgtcacgcctcttggctcgaactaccaccccatggaggagaagtcgagcattttcgtcagatctaccagccacacccgctcaagattcgaacttcatcgaatcatggtccaaagtcatacccaacatagaccctcccaagacaccatcttctttcatgacccctcgccccgccaccccttctgctatcccttctaaactcactgttaactttgttcttccttatgcatctgagctctccgctaaagaggttgacatggtaatagttccagcaacaactggacagatgggtgttttgcctggtcatgtccctacaattgctgaactgaaacctgngatcttgtcggtgcatgaaggaaatgatgtcacaaaata

SEQ ID NO: 27113 - DNA, 308 bp, Zea mays
  Clone ID: MRT4577_124738C.1
gcggaccggtccggataccctgtcgtccacgcgcttgtaccaccccacacgcgggcggaggaggggggtatttagaacaagtgaccgttctaacccgcaaaaggggaggacgcgctgaacaaaagggcagcgaggcacggaacgctcgcgagggtacgcacgaaccaccgcacgggcggcccgccaggaccgccacagccggcagcggagctggaaggacgcgggaaccacccgggctaccagaggcggggcgaccgggaccgagacgactgcagatggaagcgcgggcaaaagaccaacaaagcggg

SEQ ID NO: 27114 - DNA, 412 bp, Zea mays
  Clone ID: MRT4577_124739C.1
ggagtttaatttggatgcttacaagcacagagtgatcaggcctttagagtgtgggatgcgcattgccacagcacagagacttgagaagcacctgctgcaggtggcttgcttgggacgttgccgtccctggtcagccttcattctgctttcccgtcttcccgtctgcattgttggggatctgtggggtagggtggggagggggaacttctgaatgtaacttgcctgtgccgtgtgacagtcgtgggcctggtcttttgtttgtgagacccggaaatggggtctctgcctggctgtttggggtcccatacgcatgtcgtacccgtagctctgttgaactgcttgttcacctcatgggtgtaagaatcgtggatcgttctggtgaggagacagccagcaagatgggcatgtgcat

SEQ ID NO: 27115 - DNA, 333 bp, Zea mays
  unsure (1)..(333): unsure at all n locations
  Clone ID: MRT4577_12473C.1
tgatgtatactatcctttaccttnctcaaataaaaccattnatcaaccccatcctcatcctatantgatctctcctcttcattaaaaataattaaatctanatctgctntaccattattcaatctntnaacttcctattcatttttccccaccttattaaataaataaactgccatgagtttttttttttttgctactccttcactgcaaacatttataatgttcgctgtgattattgtattcaattttattatatacgcaataataatattatctaaatatcttttgtcctctcattggaatttcttggttcgtatacccaacttttttctt

SEQ ID NO: 27116 - DNA, 858 bp, Zea mays
  Clone ID: MRT4577_124740C.1
atgaccaatgagtggcaaacaaatttcagaaagttcatacaaactacatttggtggcagtgctagaggagaaactgcaccatgcccatgttcaagatgtcgatgcatgtcctacagaacacaatctcaggttcatagtcacttggttattagagggtttgatgagagcttcatcgaagaaggaatccaagcaaatgattcagatgagggcaatgatgcagcaattgtcaataatgatgaaacaagtgacagtgacatcgtcgagtggcattacctgatgttgtattttggatttgagaaattccagagagacccagaaactggtatagaaccaactgatctaaccctttggatgagtactcattctaagaatggtgaatggtcggaagaggcttcacgtggtatttatgagaaggcttctgaaaaaattgttgagaaagaaacaacaggatgcaaggcaaacaggcttcatggtcatgggtacctatcaagatatccaacaagaagtcaagtgatggattcaaaattccttgaacaagctcgtgcaacggctgcaaccaacctaaagaacattgaactcgaaagccaggtccaactattaaatgaaaaacttgtgagtgaggttgcagaacgggaaagaatactacaagaaaaaatgcaagcactgcaagaagaagaagccaaccgagaaagcatcactccaatcgatcctcctttagtgatcccaactgaaactcctgaactcatcccagctgatcctcttgcacctacactaagaaataaaaacaacgttcatagtgcagacacaaacaacaagaaagacattgtgccacgaactatattagctcttacactctaa

SEQ ID NO: 27117 - DNA, 328 bp, Zea mays
  Clone ID: MRT4577_124741C.1
gtctggcggacgccttgcttttcacttcaccggaagccaaaatggcaggcaggaggatcccttcttgccatcttcaccctccttcttcttactcctcctcctcctacatggccactatctgcccaaggccaggcacaatggcatttcaaccatcttaacgttcagggcctatgctcatgggagcggttcctcaccacacctatgattcttcactgctgtgacaagcaagaaggttaatgtgatcaaagaccatctgcgatggatcagagtgctacagacacaaggactgtgagatcagtctgctgaggtgcacaactaaagctcccag

SEQ ID NO: 27118 - DNA, 602 bp, Zea mays
  Clone ID: MRT4577_124742C.1
aaaggcaccccctatcccacttttataagccaaacccacctccttttttaaaaagttccatcagttaactgtcccgcccggcaatacaaattttcccaaaaaaaaaacaaaacctggggtcggggggagttttcccccgccacatactattttccttgctaacacccaaaaagggtgtttttaaacattttaaccctgaagtctgaccagcgatttgtttttgtactttgaaaacgggccccccccaacttgttattggggagcacccccctcccccccatttttttagcgaggaaatgccccaggccataaaattcagggaggggctgggccttaaaaggcggggttttgcctccagcgggggcgggagcaaccgccaaatggctgcctaccgacttgaaattgttcctttggggtgggcggggggggaccccctaaaaggcccggtataaaggggggcaccaccttttacggggctgttattcatgcgctggccctgatctcctgtaccaacacctcctggggggatacccctgtttaccttagggaattctagagggggttgctggggcaagggggccctttaaggggtcttaactttt

SEQ ID NO: 27119 - DNA, 443 bp, Zea mays
  Clone ID: MRT4577_124743C.1
ttcataatctcctgcagtagccgttcagtcgccgtgccgtcatggctacagccgtactactccgtacgtggctctcctgagccttcgcgacgccgaactaaagccgactcctgagacattctgcctccgtggcgccgcgccccccgcgccccctcgggactggctgcgccgcgctagaacatgtactagcacaagacgtacgcactaccccttctcgtgcccctcctaccagcgcttcatgcttcagggagatccagctctgccgcgcccacatattccaaacaacgtgccaccctaacgccgcagatcgtgaaaatacccaaaacacactacttgctggtgatgcaacacacaatattgttggaagactaggatcctccccagcagcacactctccgagaaaatagtgaacccactcacactcctacaaggagacatgacta

SEQ ID NO: 27120 - DNA, 319 bp, Zea mays
  Clone ID: MRT4577_124744C.1
ttttctcttaaggccccgctttcattcatcaggggctgttattgcacgatgggggcttagctattgagcacaaggaatgcctgccaaaccatgaatcgcgtgcaacccaatcaatgaattcggaacggctcatggcatactttattcatagatgagggcggttctgaccaggcaagtatggtctcaacggatatacaagcgcttgacagaggtcgacatcagcgatctactgaggatgacctatcagttgttaacagtcctgtaatgactgtctatacggcccttgcacatacacctgttttacacacctttgatgaac

SEQ ID NO: 27121 - DNA, 308 bp, Zea mays
  unsure (1)..(308): unsure at all n locations
  Clone ID: MRT4577_124745C.1
tcttattcccgattcgtcacgaagccccactgggagagagggacccggcccgttgtccccctcttgtacgcaatcctttcgtcgctgcgaaattgatcccttatgttccccattgcccccagcgttatcgttgaaaaccttaaccccaaagtcttgaaatgtgagtattcagtacctggcgagattgttattcatgcttaaagcttacatnaacatcttcaaacacaaccagggtctctttcttttgatgagatcctttttttgaacatttcgaatcctcaatccctttgtcaattaccttttaagtt

SEQ ID NO: 27122 - DNA, 1308 bp, Zea mays
  Clone ID: MRT4577_124746C.1
gggtaccctccgggtcggccttcctccccaaacaaccggcggcggcgcgaccgcgcgagggcttcgctttgcatccatggctctcgtcgccggctcctacgagcgcttcatatggggcttctcactcaaaaccctgacaaccccctccgccaccggcgcctcgctctccgagaccctcaccctcgcgccgctcttctcgtacccggcccacacgggcccggtgcgctgcgtggccgcggcgccgcgggcggggctggtggcctccggcggcgcggacgactccgtccgcctctacgacctcccttccgccgcggacctcggcccgctcctggacccctcggccgccgtctccgcgctcgccttctactcccggggccccgtgccgcggaacctcctggccgcctgcgacgacggctcgctccacatctacgacgccgacggcttcgcgctgctctccacgctccgcgccttcccgcgccacgaggccgccgaggcgctcgccgtgcacccgtcgggccgggtcgcgctcgccgtcggccgcgcgggggcgtttgccatgctcaacctcgtccgcggccgacgcagcttcgcatgccgcctcgagcaccctgcgtccgcgatcgcctacgctgaggacagggatggcggggaccgattcgtgatggctgccgagaacaaggtcagcgtgcacgactccgtggatgccagggttattcatgatatggactgtggcaagaaggtgctcgccatggcgcccgcaaagagtggggtcctttacactggtggcgaggaccgttgtattactgcatgggatctgtccagcggcaaggtctcctcacgcattgagggtgcccatgcaactcgtgtaaaaggggttgttgtttttggtaatagcaatgatggatcacagctctccaatctaatttcttctgcttcgtccgatggtgtcataaggatatgggacattcgaacaattgggaatggaaagcctactccattagcagaggctaatacaaaagcaaggctaacttgtcttgctggaacgtcactgaaatgactcaaggaacctacagtttgctaggcgtctgattctgcattgttagctgaattagaaaacctggaaatgaaagaagaaattgaaggtgaaagatctggcacgcgagcattatctgggtgcgtttggaacgtatccattatgtacaccgacatagtttggcatagtgtctgagctgcataacttatttatatttgattgcgcgacaagttttgcaatgagaaccgtttcagtactaactgtgccattgcatc

SEQ ID NO: 27123 - DNA, 226 bp, Zea mays
  Clone ID: MRT4577_124747C.1
aatgtacagctctagtggaggaggaggaggcacttcttgaaacggtatttggtgaaaggtgatggatgccagggagtacttgtgcaggaagaggaagagagactcgtctgattgtagtagaatagtatggaatggaatggagtgcaatgcaactgtacgctggacaacgcagttgctaagcaactgctgctgctaatctttgtgtagtgtaggatagatagctcaa

SEQ ID NO: 27124 - DNA, 198 bp, Zea mays
  Clone ID: MRT4577_124748C.1
ggggtttttttttttacttttacaccattgcttttcttttgagtgtcatatgactcagtctttctctcagtctctcgattagaattactgttaggcctagtattttccatggtaggaggtctgacataaggggaaggtaccctatttaactgctttgcttcatctattgtcctactttcatgaacaagactatctttc

SEQ ID NO: 27125 - DNA, 258 bp, Zea mays
  Clone ID: MRT4577_124749C.1
aaggctttggctgaatttgaagaaaaaatgaatgagaatggaagaaagaactggaaaaacacagggagaaattgttaagtggaagtgagagcttatccaaaaaaagacagagaaagataaaagaaaagaagaaatctggtaggtattcatcttcttctctatcaagctctgattcttccagcagttcttctgattctgaagatgaggataagaaacaaggaaaacggagaaagaataagaagaccgttcacataaatc

SEQ ID NO: 27126 - DNA, 359 bp, Zea mays
  unsure (1)..(359): unsure at all n locations
  Clone ID: MRT4577_12474C.1
tatcgtttacatggtagaatctaccgacgttcgcggcctcgacactgtgtgggacagcaaacctgancacggactcggtgtgcatcggcgagcgagagcgtcgacggcgaggactgcttcgtgctcaaggtggaggcagaggcgtccagactgcgcgcgcgcaacagcggcagcgtagagatcgaccggcacacgctgtggggctacttcagccagcgcacgagcctgctggtagcatctagaggactcgcacctgctgcagatcaggtgcagccaaagccgccgcagcacaagcatcttatcagagaccaccagagagtgcaccctcggcaactaacggcccgtacatgcactaatca

SEQ ID NO: 27127 - DNA, 356 bp, Zea mays
  Clone ID: MRT4577_124750C.1
atgcacaagaacgagccatttcaaacagctgcatcgagaccttaccagttgggatgatgcgagctgtccggtcgcgttcgctatattcacatgagcgcagtacaccgcacggaagcgggatgagtatggtgcgcgagaacagaagaattagggctggcgtggcatttgttagaatgccaaggattatcttgcactgtggtggaggtagttgactccggagctgaggcgataccgtggctgactggacacctcactgcaccagtcacactgccgtccaggaggatcctagaagacgctttctatcacccacgtgtgtatccgagttggggcaccaccaaggcgtacaggagagggtc

SEQ ID NO: 27128 - DNA, 759 bp, Zea mays
  Clone ID: MRT4577_124751C.1
cggttcgcgcacatcccttcagacatgacccaccagagccgggggatccgttgaaaggctccgggaaagattccacgacttgggacttctcacattccagatgcgacactgtgccactgacgacggcccgccgcactaggcgtagcttctcccttcccgtgcccgaagagttgtcctcatcggaggatccggggcgccgctgtaccaggaggaaggaggaggagaggataccagaattggcctgacgctccgcgtacaaggatatcatcactgctgctaggtctctgccaccatcgacagcgaggtcttcggagacgcgtggaatagcatgctctactaccgtgctgcagtacccggaggacagcttcagctatgtgaaaaggtactggcttaccatgctgctcactcatgatgagggcgtgaacaacttcatcgtcagcctcacctcccagctctctggacgtgaagctgcagcgtatcttgtctggtcataatgagcaaagtcaccagacgaggagctctaagcgctagaacttcaacatcgccaccgacgacgaggtcatcgacaaagaggtcatcaatgacaacagcgacaacgacatcatgcagggagatccaggtcatcgtgcgccagatctcgtcttgcatcacctacctcccctgactcgactagtcatgacatgtgtccacgtgctggccttcgcggacaccgacgtctgcgctactggcacctgactccagagtgacgtctagctcatc

SEQ ID NO: 27129 - DNA, 301 bp, Zea mays
  Clone ID: MRT4577_124752C.1
ccacgcgtccgactagtttagatccgagcggctgccctttttttttttttttttttttttttttttttttttttttttttttttttttttttaacaaaacacaataattacttaatcaaacattacccaaacggacattatgacaaggttagccgaggaagacgacaagggaaacagtaatttagggacaagcaggcccctttggtggctggcaagggggaccacccacaaaccccccaaaccagaggcaaaaccccccgccaggggcgccaacgaggagcgctttccgttatagcccgac

SEQ ID NO: 27130 - DNA, 373 bp, Zea mays
  Clone ID: MRT4577_124753C.1
tctgaagcagatgatttgctgctgcaacaagatggatgctactacacccaaggattcaaaggcccggtatgatgagattgggaaggaaggctttttctacctgaagaagggtggatacaaccctgataagatctacttcgttccaatctctggttttgaaggtgacaacatgattgagagggccaccaaccttgactggtacaagggcccaaccctacttgagggtttggacttgatcaatgagccaaaaagggcttaaacaagcccctgcgtcttccccttcaagatgtgtacaagattggtggtattggaactggccctgttggacgtgttgagactggtgtcattaaacctggtatggtggtacttttgg

SEQ ID NO: 27131 - DNA, 651 bp, Zea mays
  unsure (1)..(651): unsure at all n locations
  Clone ID: MRT4577_124754C.1
agtcggctgccgcanctggtatctccaagatgccggacgtngggctggtctccttgctttacacttggggggaagcagatgatttgctgctgcaacaagatggatgctactacacccaagtattcaaaggcccgttatgatgagattgtgaaggaagtctcttcctacctgaagaagggtgggtacaaccctgggggggggcacttcnttccaatctctgggtttgaaggtgacaacatgattgagagggccaccaaccttgactgggacaagggcccaaccctacttgagggtctggacttgatcaatgagccaaagagggcttcagacaagcccctgcgtctcccccttcaggatgtgtacaagattggtgggattggaactggccctggtggacgtgttgagactggtgtcattaagcctgggatgggtgttacttttgggcctactgggcttactactgagggtaagtccggtgagatgcaccatgaggctctccaggagggccttcccggggacaatggtggcttcaacgtgaaaaatggtgctgtgaaggatctgaagcgggggtatgtggcctccaactccaaggatgaccctgcgcaaggggctgctagcttcacctgccagggcatcatcatgaaccaccct

SEQ ID NO: 27132 - DNA, 663 bp, Zea mays
  unsure (1)..(663): unsure at all n locations
  Clone ID: MRT4577_124755C.1
aactccagcccagaccaccgacggacagattggtgcactgagcacaccaccactggccactgccaggcgcggaagcccaaccggagctcgagccaggcagaagacgcgccgccgtcgcagtctcactaccaccaaaagaggcggcgccttctcccgcggcgagcgacggcagcggtgggagaggggaggggagatggtggggtgnannnnnnnnnnnnnnnnnnnnnnnnnnnnnnnnnnnnnnnnnnnnnnnnnnnnnnnnnnnnnnnnnnnnnnnnnnnnnnnnnnnnnnnnnnnnnnnnnnnnnnnnnnnnnnnnnnnnnnnnnnnnnnnnnnnnnnnnnnnnnnnnnnnnnnnnnnnnnnnnnnnnnnnnnnnnnnnnnnnnnnnnnnnnnnnnnnnnnnnnnnnnnnnnnnnnnnnnnnnnnnnnnnnnnnnnnnnnnnnnnnnnnnnnnnnnnnnnnnnnnnnnnnnnnnnnnnnnnnnnnnnnnnnnnnnnnnnnnnnnnnnnnnnnnnnnnnnnnnnnnnnnnnnnnnnnnnnnnnnnnnnnnnnnnnnnnnnnnnnnnnnnnnnnnnnnnnnnnnnnnnnnnnnnnnnnnnnnnnnnnnnnnnnnnnnnnnnnnnnnnnnnnnnnnnnnnnnnnnnnnnnnnnnnnnnnnnnnn

SEQ ID NO: 27133 - DNA, 445 bp, Zea mays
  Clone ID: MRT4577_124756C.1
aaaatacaaccagaaaattacatgatttttgacaaccggcccagttccacaatttataattaaaaggggcaaattgggggggggaaacttaacggggaaaacatataaaaatcactaggcggggggggaattcaactcgcattgggtaaaccaagggctccaaagaacaaagatcagcccttcctggggacctggggaaggggataacatctctgggggtctccattccgggggcaaaaagaatttttctttaaaaacccaacccaaaaccactgggctttacagatccaaagggacggggggccaagtaccattcataggggtccaaaggcaggccagcataaagtatcctttgtttaaaaacatttaaccggtcctccctttgggttccaccaatcaattcaccaaccttagggacaaaaacatccattggagcccccgggtt

SEQ ID NO: 27134 - DNA, 491 bp, Zea mays
  Clone ID: MRT4577_124757C.1
gtgagctcagccgcaggatccagctgaaaggtgagggagagggcagttgccatctccttccacccggtggcgcgcatcgtgagctgcctctccaaggcagccctggttccccctggccacggggtgctgagaggtgaaggtgagcctcaggaccctccggctggagcgcggggcgggcgtcaccgtggacgcggctgggatgctgttcgtcgtgaggaaggacggctcgcaggtgtgcctggccatggcgagtctgtcgtacgaggacgagacgcctatcattggcaactaccagcagaagaacaagagggtggtgtatgacacgctggggtccaggctaggcttcgctgacgaggactgcaactatgtatagagacttgacagggaagaggatgtggaatatcggatttctagttatatgttgcatgaactatgcccgcctaactactgaatgtagtttgatgatcaaaaaaaaaaaaaaaaaagcggcc

SEQ ID NO: 27135 - DNA, 323 bp, Zea mays
  Clone ID: MRT4577_124758C.1
gcgggctcttatacgactatcttgaggaaagttggcgcgctctgcaggctccgatcctgtatagcgggcgcgcctccaggcgtccgactcactgcctttcatcctgacagggaagcgctcatgtactgtgacgtcaagaactccgagcacacgttccgtgctgaaggacaggacgaggccgatcatgttctaaatggctcgtctggaccgagtgaagaacatgacaggcctgggcggagatgttctggaaagaacgcgcgcctgagggagctggcgaacctcgtgagcgtctgcggggaccacggataggagtgcaaggacag

SEQ ID NO: 27136 - DNA, 461 bp, Zea mays
  Clone ID: MRT4577_124759C.1
aataaaactcgggttcttttatttgggtcattatgggggggcgatacacagtgggtctaaataaaacagaggggcacacactgggggaacaggggagcaaggggggcgttaaggagggcagaaagaggggggaagggggggaaagcaagggggaaacggaaaaggcacgcgggcaaaaaacccaccccaagggcacaaaaaaaagggggggaacacggaaagcccgaacggggccaaaaaaaccacaaaggggccaaaaaaacaagccacgggcccggggcaaaaaaccctaacacagaacggggggccccaaagcccggcaaaggggcccaaagcccggaaccgggacaccaatgcgagagacccccccaaaacacaaagggcgagggggggcccccgggccccggaaaaacccgcaaagctccccgggaacccgcacaaaaaaatggggcacacccccc

SEQ ID NO: 27137 - DNA, 675 bp, Zea mays
  unsure (1)..(675): unsure at all n locations
  Clone ID: MRT4577_12475C.1
agcgatgcttcaggttcgcgcgtccccggccttcctcccctccacctcctccccctccccgccatcctcgtcgcaggcaccggcgccagcgccgttccggctctcggggaagagccagcggcgcggcgggctggtcgcggtgccgcaggcgagccgcgtggctaggcggtccgtgatggcagcggcgggggcagccgcagccgccccggcggcggccaagctcgaggacgccgacgcgctcatcgactctgtggagaccttcatcttcgactgcgacggtgtgatctggaagggcgacaagctgatcgacggcgtgctggagactctcgacctgctccgatcaaagggcaagcggctggtgttcgtgaccaacaactccaccaagtcgaggaagcagtacggcaggaagttcgagacgctggggctgagcgtcgacgaggaagagatcttcgcttcgtctttcgcagccgccgcgtacctgcagtccatcgatttccccaaggacaagaaggtgtatgttatcggagaggaagggattctgaaggagctagagttggctggatttcagtacctcggtgggcccctcagatntcatcgtcgtgctgcagacagacggagacaagaagatagagctcaagcctggtctctatatggagcacgacgaagatgtgggag

SEQ ID NO: 27138 - DNA, 269 bp, Zea mays
  Clone ID: MRT4577_124760C.1
tcgagcggccgcccgggcaggtacaagcttttttttttttttttttttttttttttttgtttttttttttttttttttttttttttttttttttttcagaacaaataacaacaccggcatgccaagcaaatactacgggatgcaagacaagcaccataccagggcagggagagcacctgtcgcaacccccaactagggttgccccaccccaacaaaggttgggtttctcccaaaacaaaccaggcaggggagatcacacctgggaccac

SEQ ID NO: 27139 - DNA, 286 bp, Zea mays
  Clone ID: MRT4577_124761C.1
tactcctccgaccactcctgcgtcacatgcgctcattgtctattgcacgagcccgcttgcactagcgccttacttcctgaccgaggattctagcgccaacctgagcagcaccataaccgcccgtacgaccaacattagctccaacggcgaacttcgggcggacgcactcatacttgcagctcaacctgtaaaccaggactgctatctgagaaataccgcccggatgctcaacaaccctatggacaaacgaaaaacacatgcgttatcatacaacctttgcataaac

SEQ ID NO: 27140 - DNA, 102 bp, Zea mays
  unsure (1)..(102): unsure at all n locations
  Clone ID: MRT4577_124762C.1
gcgttcggntaaaatccacctagcggtattttaggaggtggtgggaattgttccatgcttgtagttcacctgtgataaaatgattaagaccatgcttaacac

SEQ ID NO: 27141 - DNA, 307 bp, Zea mays
  Clone ID: MRT4577_124763C.1
ctcgtccgccctcgatcagatatcaagtcatcgcgatgcaaacatgtttgccacggctctgcgagagaaagacgcgccgaattaccggcagattgtactgcaaccgcaagacattacgtctattcgttctgcgatcaaggcgggtaacaaggcagcactgcaagcagcggctaatttgtctggaggtgatcctggtacggcaagtgtctggctccccatctctgacgacctcgtccctcccagaggaattatcaacagcgctcatcttgagcgcgagctggtgcacatgttctgtatgccatcatgt

SEQ ID NO: 27142 - DNA, 309 bp, Zea mays
  Clone ID: MRT4577_124764C.1
ggggataccaaccggtacattacggttggttgaaaaaagggtctcaacagcacttggattgtccagtttgaccaattttttttataaacatgccctttgcaactaaaagggaacaaggttttaattgttcccagactgcggggggcatttttaacccgctccagttgctaaaaccaaaagattagagcttgtcctcaaactcaaaaaggggtgttattttttctttcaaacccttccttttggggaatttcagcaccaggggggccccctgggggccacccttctaaagatccctgcccatactttttc

SEQ ID NO: 27143 - DNA, 471 bp, Zea mays
  unsure (1)..(471): unsure at all n locations
  Clone ID: MRT4577_124765C.1
gaacaagagacggccggcaagggcgaaggcccggctataggcagcgaacgcgggacgacgnactctagcgccggcgcggggcaaaacgaccgcggcgagagcatcgccaacgaccagggaaaccgcaccacgccctggggcgggggcaccaccgactccaagcgccccatcggagaggcggccaagaaccaggccgccgggaaccccatcaacaccgncnncagaggccaagcggcgcatcggcaggaggtccagcgatgcgtctgcccagagcgatatcaagctgtggcccttcaaggtcattgctgggcctggtgagaagccaacgattgctgtccagcacaagggtgaggagaagcagtttgcagctgaagagatctcctctatgcgtcgtatcaagatgcgtgagattgctgaagcttacctcgggagcacgatcaagaatgctgggggcacagtccctgcctactt

SEQ ID NO: 27144 - DNA, 543 bp, Zea mays
  Clone ID: MRT4577_124766C.1
ggaaagcggagaaggcgaagaagcaggacagtgtcgatgccgcggcgagcgacgtcggcagctgcgtgtcgctctcactcgccaccgacgaacggtccgaggcggcgtcggagtcgtcggtcgcgaccagctcggtggccgggccggagcgctcaccaaggacgaaaccggccaggaggcgcccagcatccgccgatctggggtcagcacggcgcgagcgcgaccgcgaccgcgccgtcgcggcctcctacggcgtccgctcccgcagcgcgcgggcgtcggcgtccccgccgccgaggcaggtgccgcgggaccgctccgtccggcattcgccctcgccggcagcgaagcggcgggcgttgtctgagccccgccgcgccaccagcccaactccgtccgtacagcgcaagccgtctgtcccggcaaggccggccagccgcgtctggttgcccagctttgatttttaataactaggcgacatcagttgcagaatttgcgtaattacgatttacgatatatgaaccagttacctagaatgttaat

SEQ ID NO: 27145 - DNA, 271 bp, Zea mays
  Clone ID: MRT4577_124767C.1
tcctataggggattgggttcctcaaggccggccgggttccccacgtaacactgtccttcctccgacttcctcctctgccgactgccctcatccactccactcccaagccaccaccaccctgaatcccgactctccactgcggagaaagattcagctcggctacaatcggctcgagaagaacaaaatgcacctcacagtgggaaccgtcaggttacacggcaatgactccaaatatgatggtctacaacacatcaccgctgccaagccacca

SEQ ID NO: 27146 - DNA, 258 bp, Zea mays
  Clone ID: MRT4577_124768C.1
aacctaaattttttccccaaaaggccagggaacccgaaaaaaaaaaccacaacccccaatggaaccccggtttttggccctcaaagctaacacatgtaagcttggcatgtcatgccgttcaatgttttacaaaaacccaaaaaactcttttacaagggggggggcccccgggggaattaaatctttggaaagggtggtgggcccgaaaaggaaattcttttaaaggaccccttcaaaaaaaaaaaggccgaaaagttc

SEQ ID NO: 27147 - DNA, 256 bp, Zea mays
  Clone ID: MRT4577_12476C.1
cggacgccgacgtggtacgcaccggccaagcagctgtacgtcggcgaccggtggcaggtggccgacaccccggcgccgtggcagttgtggatggtcgtgctcaataacggcagcgtggacaccacccgcgccgcgtgcccggagaacggacgcaccgcacggacgttggcgcagacgtcgaggttagcgttccccgctcgcgcaaggtggatggcgcacgggctggtgttcgacaaccgcaccgctcgtggacgac

SEQ ID NO: 27148 - DNA, 509 bp, Zea mays
  Clone ID: MRT4577_124770C.1
gccggccggtcctcgtgaagatctagaggagacagagcctgaactggtatggggttgtccttgtccagtgtgtggtcggtggaatggaaagcttgacacaaacaatcatatattgtgcatgggttgccgaggccactattgcgcgttatgccggaggagggtaatgaagagctccgaacactatggaccaagaggttgccaacaacacacggatccgtagtgattcccaatcttgtacagtacagaatctcctttatacatagcattttgccacttccagtgttggcatcgacttgttgagttgtttcccaaaacgagaggcttctcgtggtagggccaatgtgaatttgcaattggaagggtccattgcatttatctaggatcgttgatgtcaacaacagatggttggccatgtaatgaacagggcattttattgaaaatgaccgtgcagattgaagattcaaaaaaaaaaaaaaaaaaaagaaaaaaaaaaaaaaaaaaggccccta

SEQ ID NO: 27149 - DNA, 200 bp, Zea mays
  Clone ID: MRT4577_124771C.1
ggtttctattcctcaaatccaactaagcactctatggatggggcatttgctgcacgtctggggcggtcaacgcactaagattatatgagttgccacaaggccacaactaggtgtgaagttgaacaaggaatcacatgtattgccctaatgttaaagtgcacccagtcattgcttcaatatctttatcttatatattcttg

SEQ ID NO: 27150 - DNA, 378 bp, Zea mays
  unsure (1)..(378): unsure at all n locations
  Clone ID: MRT4577_124772C.1
gtgcgcccacgcgtccgaccacacgtacgaccacgcgtacgtcncatttttacacccacgacgtcaacacacacgggggccnggggaaaaaataaaacaataaataaataaacaaataaatagaaaaataatgaaagaaataataaaacctatgaaaactggaaacatattatatggggaagtgaaactgatacccgcaagacccgtattttaaaaaaggactacaatgcatcaaacaatgaactagtaaggacacaaacccttgtgaagaaagccattgtgcaagataatgctgtcccatttaaacattggtactctcacttactatagacttgacattggtaagaacaagaaaacccctggtggaaagaaggataa

SEQ ID NO: 27151 - DNA, 1568 bp, Zea mays
  unsure (1)..(1568): unsure at all n locations
  Clone ID: MRT4577_124773C.1
ctcggnaaattgaatggtctggttacaggnacctttttggtataattaaagagttcaagctgaaagttcaggttgtattgtcatttcatgggtctggagagactggatctggtgatgtgttaatctctctcccaaagtggatcatgngaaattgcaaaagagaaccaggatatattttttacagaccgcgaaggtagaagaaacacagaatgcctttcctgggggattgacaaagaacgagtccttcgtgggagaactggcattgaggtctgttttgatttcatgaggagtttccatatggaattcagaaacttatctgaagagggccttgtttcttctatcgaaattggattgggtgcttcaggggagctaagatatccttcatgtccagaaacaatgggctggaaatatcctggtattggtgagtttcagtgttatgacaggtacatgcaaaagaatctacggcaatcagcattgtcccggggtcatttgttttgggcacgtggacctgataacgctggctattataattcaagaccacatgaaactggctttttttgtgatggaggcgactatgacagctactatggacgttttttccttaactggtactctggagtcctcatggatcatgtcgatcaggtgctgtcgcttgctactcttgcatttgatggtgcagaaatagttgtgaaggttccatctatctactggtggtacaggactgcgagccacgccgcagagctcacagcggggttctacaacactacgaacagagacggatactctccagttttcagaatgctcaagaagcactctgtgatccttaagctcgtctgctacggacccgagtacacagttcacgagaaggacgacgacgaagcgtttgcggatccggaaggtctaacctggcaggtcatcaacgcggcgtgggatcagggactaccgctctgtatcgagagcgctcttccgtgccataatggtgaggcgtattcccgcatcctcgacacggcgaagcctagggacgatcctgatcgtcaccatgccgcgttctttgcgtaccgtcagcagcagcagcccccgctccgagaagcttgcctttcggagctctgcacttttgtaaagtgcatgcacggggaggctccccagaatggggaaggttgaatctcgttagcaactgatgcgctggctcgacaatatggaagaaaccaagtaggtgggtttcggatttgagccgcttttgaaggcgtccggcggcgagcgaacattctgatactgctaggtcctattcagttggttccatctcgtcgtcagccgtctgccctgttactcgtcggctggactgagcaggtgcgtttgcagttgcagccttaccatatagcttataactttgtggtaagttagcataccgcatgctgtaacagacatggaggatctaaaaaaaaaggccgtggaaagcaacagtaatggcttgcgcttgccagcccaggggggagggcatcttaaacttaactactaaatttgtataatataataatggtattgaaatttgaatcctttgacttcctacg

SEQ ID NO: 27152 - DNA, 541 bp, Zea mays
  Clone ID: MRT4577_124774C.1
ggtaaaatgcatatcccatacttgtttgataccattattatattatacagatttagtagttaagtttaagatgccctcccccctgggcgtgggctggcaagcgcaagccatcactgttgctttccacggccatcccatggggcacacagactggaactggactgggcaggaaagaagaggatggctgtgaccagcattcatcccgcatcacatgggctgctctcgtaaacgtctctcgtttaaataccaactgggttaaccagcttctttttaggtcacctgagtgggcattgccactctattatcctgcagagctccactatatcctccatgtctgctcagtccagccgacgagtaacagggcagacggctgacgacgagaaggaaccaactgaataggacctagcagtatcagaatgttcgctcgccgccggacgccttcaaaggcggctcaaatccgaaacccacctacttggtttcttccgtattgtcgagccagcgcatcagttgctaaccagattcaaccttccccattctgggg

SEQ ID NO: 27153 - DNA, 302 bp, Zea mays
  Clone ID: MRT4577_124775C.1
ggcaccgggccggaataactcccgggacgaccagtactctcggcggcggccgcccaaaaaaacaggggggaacaatcaagggacggcccaacacaccccaacaagcacggcaaaacacgagacgaccccgaaacaacaaccgcaaaccgagcccccacaagaccgcagcagccacaatgcaagacaacggcgcccaaacacaaacaaccacaaggacacacactcgacagacccggggcgcccaagaacccaaggaccacaccagcaaacccccacaaacgccaagcacggagcaaccccag

SEQ ID NO: 27154 - DNA, 1633 bp, Zea mays
  Clone ID: MRT4577_124776C.1
ccggccgggaattgcaaaagagaaccaggatatattttttacagaccgcgaaggtagaagaaacacagaatgcctttcctgggggattgacaaagaacgagtccttcgtgggagaactggcattgaggtctgttttgatttcatgaggagtttccatatggaattcagaaacttatctgaagagggccttgtttcttctatcgaaattggattgggtgcttcaggggagctaagatatccttcatgtccagaaacaatgggctggaaatatcctggtattggtgagtttcagtgttatgacaggtacatgcaaaagaatctacggcaatcagcattgtcccggggtcatttgttttgggcacgagggcctgataacgctggctattataattcaagaccacatgaaactggctttttttgtgatggaggcgactatgacagctactacggacgttttttccttaactggtactctggagtcctcatggatcatgtcgatcaggtgctgtcgcttgctactcttgcatttgatggtgcagaaatagttgtgaaggttccatctatctactggtggtacaggactgcgagccacgccgcagagctcacagcggggttctacaacactacgaacagagacggatactctccagttttcagaatgctcaagaagcactctgtgatccttaagctcgtctgctacggacccgagtacacagttcacgagaaggacgacgacgaagcgtttgcggatccggaaggtctaacctggcaggtcatcaacgcggcgtgggatcagggactaccgctctgtatcgagagcgctcttccgtgccgtaatggtgaggcgtattcccgcatcctcgacacggcgaagcctagggacgatcctgatcgtcaccatgccgcgtcctttgcgtaccgtcagcagcagcagcccccgctccgagaagcttgcctttcggagctctgcaccttcgtaaagtgcatgcacggggaggctccccagaatggggaaggttgaatctggttagcaactgatgcgctggctcgacaatacggaagaaaccaagtaggtgggtttcggatttgagccgcctttgaaggcgtccggcgagcgaacattctgatactgctaggtcctattcagttggttccttctcgtcgtcagccgtctgccctgttactcgtcggctggactgagcaggtgcgtttgcagttgcagccttaccatatagcttataactttgtggtaagttagcatacctgcatgctgtaacagacatggaggatatagtggagctctgcaggataatagagtggcaatgcccactcaggtgacctaaaaagaagctggttaacccagttggtatttaaacgagagacgtttacgagagcagcccatgtgatgcgggatgaatgctggtcacagccatcctcttctttcctgcccagtccagttccagtctgtgtgccccatgggatggccgtggaaagcaacagtgatggcttgcgcttgccagcccacgcccaggggggagggcatcttaaacttaactactaaatctgtataatataataatggtatcaaacaagtatgggatatgcattttaccaattatatcacatttatgtt

SEQ ID NO: 27155 - DNA, 1146 bp, Zea mays
  unsure (1)..(1146): unsure at all n locations
  Clone ID: MRT4577_124777C.1
naaggtcgtacgccatcgcgtatcagctccccttcactgtcactcatccatctttctagtactactgcacctgtaaaagttcatggagatgcacagaccactgcgcatcctgttgcccatcgtcgtcctcgtcgccgcggcgtggccatcggtgccggcgggggcggacgacagcgcctggtccaagggcacggcgacgttctacggcgggggcgacgcctcgggcacgatgggcggcgcgtgcgggtacggggacctgtactggtcggggtacgggacggagacggcggcgctgagctcggcgctgttcaacgacggcgcggcgtgcggggagtgctacagggtgacgtgcgacgacggcgcgtcccagtggtgcctgccggggacggggaggaggtcggtgaccgtcacggccaccaacctgtgcccgcccaaccacgagctctccggcgacgacggcggctggtgcaacccgccccgccgccacttcgacatggcgcagcccgcctggctccggatcgcccagtacaagggcggcatcgtgccggtgctctaccagaggacggcgtgcgtgaagcagggaggggtgcggttcacggtgtccggatccaactacttcgtgctggtgctcatcagcaacgtcgccggcagcgggtcggtgaaggcggtgtgggtgaaggggagcgccacggacaggatgcccatggccaggaactggggcgccaactggcagtcgctcgcgggtcttgccggccaggcgctcaccttcggggtcacctccaccgacggccgcaccgtcgtcgtccccgacgtcgtgccggcctggtggaagttcgggcagtctttcacctccggcgtccagttctccaactgaggctcggctcactttgggagaatggggcagctcagcccagggaacagtcacacaccctcctccattatttgattcagtttcacgattcactgatgatctgatgtaccagtggctattactagtagagtgtattctctaggtcttaataaaaagaggaatatcttctgttatttagtgctgccattctggacagaagctacagtttcaagacaatttacaagctgctatcttatctggatgcaggatgttaccttgtgtactgcttttttgtt

SEQ ID NO: 27156 - DNA, 272 bp, Zea mays
  Clone ID: MRT4577_124778C.1
caaaaaagctatagccccaccacaatggccgcgccattgtgccatacgatatccaatctggtacgacgaacccacgtgcttagataccagggtgctgcactcttaagcgcgttagataccaatgtctctgcgaaaacgagcgcgttgactgcatcacttctgttggcaaactgtagccgttccttacaaacatcatgaacaggccagtacactgaagttggggggagagaccggtgctctctattgtggacgttcgagcgcaccacaccgac

SEQ ID NO: 27157 - DNA, 485 bp, Zea mays
  Clone ID: MRT4577_124779C.1
aaaacaaaaaaaattagaaacgcccgggccaaaaaagcgaaaaaaaaaaaaaccaaaggcccggggcgggggagggaaaaaggggagaggaaaaagaagaaagggcgggggggggggggggggagggggggggggcgaaaaggcggacacggggggggggagaaggggggggcaagagggagaagacgggcaggaccaaaaggccagggcccggcgcgaccggggggaccagcgccagggcgagccgcacgcggagcccgagcgccccaggcaaaaacctggtggccccgcccccgccgcccccgaaccccggagagcgcagggcggggggacccgccgccccagtggaggaaatgaagggggggaagggaaagcaaaccgggggaaccggacacgaggggggagccgggaattgcagaccggaaccggcacgcggaccaccgcggccaaccgagagtcgaataagagcacggcgaagacaacca

SEQ ID NO: 27158 - DNA, 1541 bp, Zea mays
  Clone ID: MRT4577_12477C.1
cccacgcgtccgcgccacccgataataaaaacagagcgccacacgagcgggcgcaacgatgcttcaggttcgcgcgtcctcggccttcctcccctccacctcctccccctccccgccatcctcgtcgcaggcaccggcgccagcgccgttccggctctcggggaagagccagcggcgcggcgggctgatcgcggtgccgcaggcgagccgcgtggctaggcggtccgtgatggcagcggcgggggcagccgcagccgccccggcggcggccaagctcgaggacgccgacgcgctcatcgactctgtggagaccttcatcttcgactgcgacggtgtgatctggaagggcgacaagctgatcgacggcgtgctggagactctcgacctgctccaaagtaaaggctcgaacaataaaaatgtcgtgtttttttcgtcgagatgtgtgaatgttttaagtgtaataataacatacagccggcaagttttccagattcttacattctcatgacaggtcgccggccgtttcagggcaagcggctggtgttcgtgaccaacaactccaccaagtcgaggacgcagtacggcaggtcgttcgagacgctgcggctgagcgtcgacgagggagagatcttcgcgtcgtctttcgcagccgccgcgtacctgcagtccatcgatttccccaaggacaaggaggtgtatgtcatcggagaggaagggattctgaaggagctagagttggctggatttcagtacctcggtgggcccacagacggagacgagaagatagagctcaagcctggtctctacatagggtttgtcgaagatgtgggagcggtcgtggtgggatttgatcgctacttcaactactacaaagttcagtacgggacactgtgcatccgtgagaacccagggtgccttttcatcgcaacaaacagggacgccgtcacccatcttactgacgcccaagaatgggcaggtggcggagcaatggtcggtgcacttctcggttcgactaagcaagaaccgctcgtggtcgggaagccatccaccttcatgatggactacctggcaaagaagttcggaatcacaacatcccagatatgcatggtgggggaccgattggataccgatatcctgtttggtcagaatggaggctgcaagactctcctcgtcctctcaggcgtgacttccctgcagacgcttcagagccccgacaactcgatccagccagatttctacacgaatcagatttcagattttctcaccctcaaagcagcaactgtctgaagagcccgcgttccatttgcacagcatgtcagcatcggccttttttttaacgaataaggaaatacaaaggacggatttgttttttttcactcttgtgtaatcatgggatatctttatgtgcaacatcagccatgcaaatatcataaggatgccaagaattaatctaaattctctagtcaacctttttttttacttcagacaaaatgcatatatatgtccattgttaacgtaccagcatcaagttaccaaaatgg

SEQ ID NO: 27159 - DNA, 251 bp, Zea mays
  unsure (1)..(251): unsure at all n locations
  Clone ID: MRT4577_124780C.1
agcggtcgtcctttttttttttttttttttttttttttttttgntnttgtttttttttttaattaagataagaagttgttacatagacaaattgcagctgtntcgacgcgtcacgattggccactttcagacgctgacagccaaaaaaatgctnncgcntttccattcncttgcataattgcattggtaacgctcnccaaatgtgggtgcanaccagtatgatgagtggggttgcctgaaactgctccgca

SEQ ID NO: 27160 - DNA, 203 bp, Zea mays
  Clone ID: MRT4577_124781C.1
cggacgcgtgggcgcgtcgtcgtcgtccctcttgaaacaaaagaagctattttgacaccggacgcacacacacagaggagagaagataagaaaaccaggggcaaggcatccagcgccgctagcttaagcaaggcaaggcaagagaatccgtacgtttaggtgcaagtcgtaggtaagatggacgcggaccaacagggcgtggt

SEQ ID NO: 27161 - DNA, 204 bp, Zea mays
  Clone ID: MRT4577_124782C.1
tactcctcaccaacacaatcttaaaatccttcccatcctacctctctattatatacttacctcattacatcaactcttcattcttctcatcatatctctcattcaatctcttacctcctaaaactcttcctctcctctcttaatctctccaaccactcattcttccttatccacttactttcattcttcacctccttcctcaaa

SEQ ID NO: 27162 - DNA, 280 bp, Zea mays
  unsure (1)..(280): unsure at all n locations
  Clone ID: MRT4577_124784C.1
attttaaagaagtcgtggtgggtgttacctggtcttgtgggtcttgtgatgttttctaccattttctatttatatggacattattgcagttagacgggagtggacaactgttgataggatccttgatagcatgtatgcaatgtaatttaacaacagacaagttgtactgaacactaatatgtgttagatatgtagtgactcatatcactattatcgctatngtgattttataatctggtgctctagcttttctttggtgaataaatgaatagcatatgca

SEQ ID NO: 27163 - DNA, 498 bp, Zea mays
  Clone ID: MRT4577_124785C.1
gtgtgtgtgtgtggggggggtttttttttttttaacgctggtttccgttttctcgccgttaaagctgagcccatgcatggatgcattatgcaaatgcaatccattgaaagcaggcattcccaggtcaggctaaaacagaatgctacaccactttactggggggggggggggcctgcatcccaaataaaacctcgctagccctgcacatgtcctgctataaactcctcctgatgccgttccattcctacctgttgtttgttcacctgagcgactgactgtcatcaccaacagttaaaaccgcaggctcgatcatggttacccactcatctgtcaggaaccaccgtccctgattagctcccaccgatcctgcacccaataaaaggcaaatcggatacaccaagataaaaacctgcggtgcgcgccttcactgtggaaaccagcaaccaagccctagacataggccaaggacgccttttgccggctgtatgagcactggga

SEQ ID NO: 27164 - DNA, 609 bp, Zea mays
  Clone ID: MRT4577_124786C.1
ttgggtacctcgaggccggccgggatacgcccgctccttgccttcgatccccgaatcctccttgagatctcgcattcagcgcagccgcaggagtggaggaacgtggacggtgatgaacatggtgctcgcagttcgcggaagctcttcaggcggctcttcaccaagaatgagatgcggatcctcatggacgggctcgcacagcggcggtaagaccaccatcctctacaatctcatgctcggtgagatcgtcaccacgatccccaccatcggcttcaaagttgaaaccggcgactacagagaacatcagcttcactgtctggtatgttgatggtcacgacaatatcatacctctttgtagggattacttccagaacacccaccgcattatatgggtggtgaacagcaacgaccgtgaccgtgtggttgaagccacctatgagctccacaggatgctgatcgatgatgactgacgcagggctgcgctgcttgcttttgccaacaagcaagatcctcccaatgccatgaacgatgctgagattactgacaagttcgcattacactccctgcgctagggacactggcacatccggagcactagtgcctcgactg

SEQ ID NO: 27165 - DNA, 226 bp, Zea mays
  Clone ID: MRT4577_124787C.1
cgctccgctgggaagtcaaccacccgaccaacctcatcccacctcgactggagcacagttgagctccaattttggcgtttggccgttgcggacgccggagtggctgttatcggtcgcgtgggctataacttccccgattactcaattaactttaacatcaacctcacttagacctcctcttgcacctgctaagacccagcgaagcggtaacggtcctccctgggcg

SEQ ID NO: 27166 - DNA, 618 bp, Zea mays
  Clone ID: MRT4577_124788C.1
atgaccgccctctcctcttggccgagaacggggaggtcggggataaccgcgggcggcggcgcctcaaccatcccgacatcggtggcgacgggcggctccgcgggcgaatcagcgacggccccggtaggtgtcgatgccggcgccggcaacgagtcagctgggctcgaggccgcggccacgtcagcggcctcccccagcgtgatggccgctccaacagggggtcagcctgggaggtttgccccatggcagctcgtgccgcctgggcccccgccggagagcgccttgtgcggaggccaaccaaccggcatggcgcgtcgtagcaccggctgcagaggtcggccccgtcttaagggccttcgtgggggccagaccggccgggccctgcctccgcttgctgaaagaaagagagagagagagagcaagttcaagacacacagagaagaaaccaaaacaaaggtatcctcagatacttacccgctccggggcaaggccaatcgtgcccgcggggaggcccctcaggccccggtctccgcaggcgctgccgagggttgccccgctgtcggctttcgtgccgctttcgcctcgggcgcccgaggcaccgaggggcggcccgcctag

SEQ ID NO: 27167 - DNA, 394 bp, Zea mays
  Clone ID: MRT4577_124789C.1
cttatgttcatacgacaattatcatgtcaattttatctatcatatcagtcgtcaaggatttgttaggagtttcaatctctactagtgtctgtttcaaaaatattatcagtaagtcgcatgatctttattacagcacactaaaagcattaatattactaggttgatgcccttgctatcaatatagctgtcgattgatctgttacattttctaaaatatttcctattattctctgattttttatgattttttgaacaattttgtctcatgaagcgtttttagccccttggatgccaaacattggcaagtaaatacaatgcaggttatgacaactttaattctggcatttgttttaatcattatctgatctgcaattaatctatcacaagcacattc

SEQ ID NO: 27168 - DNA, 359 bp, Zea mays
  Clone ID: MRT4577_12478C.1
gtggctaccagaggtccagagccgttgcttgttcttggcgcttgccccagcaccagcctcgcgcttccttggctcgcccaggtcgccgccgtcgctcagctcggcgcccatctatctgctcagcctccagcggcggccttcccctgccggtgcccagcccagcggcccctcctctctctccctcaagctctctgcgcgccgtgaagcccctgcgcgtcgcagtctcccaagctcgccatggctgccggacgagtctctcccgtctctgcttgtcctcttcgagcttggttcctgcgcgcgcgctcctctgctcccatggcgtgttcctgcgcccgcctggatttccctgctgagctcgg

SEQ ID NO: 27169 - DNA, 336 bp, Zea mays
  unsure (1)..(336): unsure at all n locations
  Clone ID: MRT4577_124790C.1
ttagagatccggagcaaccaaaatccgaccggacccaaaaacgggctgcctggatatacttaccaattcctctcgtttctcttttcaataatcaaaatgagccgtcgtcgtaatgccggtggtggtcaaacatatcttgcttatctctttgcaagccgnaaaccccccaaaccagcattgccaccagctgcaagtgcttcacctttttagaaaccatcttcttcaaaaacttattctgccaaacaagtttcttattgagttaccagtcaaaccgattgcttccacaagncttattgacaaaacaatttcaactttcttaccgacccttctttaacc

SEQ ID NO: 27170 - DNA, 211 bp, Zea mays
  Clone ID: MRT4577_124791C.1
agcgtctggctacaggcaacagccctcgggaaactcgcctctcgcccgctcgcaaccggggcgggaaccaccggcccactgcgggtggcgcgggcccatagagagcagtctggtcctggcccacataaaacaaccaacggcttgcaagacatggcggactgcaaaacgtaacatactaaagacggagctgctgtaacatgacatgctgctt

SEQ ID NO: 27171 - DNA, 386 bp, Zea mays
  unsure (1)..(386): unsure at all n locations
  Clone ID: MRT4577_124792C.1
agnagttaacagtttctttttcttccttaccggggtttcccccctgcaaattaggataaaaaagggtacaacaggggggctctaatcaaggctggaacaaacaccttgaactgttaactgaaagtggggggggggggatctgtgcgacgacatcctattgtccataacgggacgggactgtttttncggngatgagcttgtncagggcattcgggggaagggcgatcatttggagcgtnttgtgccagaccaggtgggaggttttaagggtgtggggttgttgagacgcgttgatgggattagagggggggtaatgggggcacagactgggcagtgttgtgtattgggggtgtgataggtgtgtgggtgttgggggggaggtgggg

SEQ ID NO: 27172 - DNA, 447 bp, Zea mays
  unsure (1)..(447): unsure at all n locations
  Clone ID: MRT4577_124793C.1
cggcaacccccgggnncgcccagcgnccttttttctggcngncgnnccgcttggggggggggcctcngncncccttgncnntgtcggggctgngatccgggtcgtggggggcntccctcctgtcctgctgcggcttgtcttcgccggcntgctgcttgtgggcggtcgctctcttgctgtctgctgcctccngnnggggtcaaggcgggggggggggctgcgccttttgggcggcctgctggtctttgtccggaccttggctggcgggcccttcgcccttggggtggggtcctctgtctccgttgccggtgtcccggctctggtcctgggcggggggggcgtccctccggtccgtcccgtcttctcttcgccggcgggccgtttgcggctgggaggccccttgctggcttccgcttcctggctgtgcgctccctccccttggtgctg

SEQ ID NO: 27173 - DNA, 267 bp, Zea mays
  Clone ID: MRT4577_124794C.1
ataattttcttttttttttatattaaattgggcggatttttaaatagttggggggggtttatcacctgtgatcttttgaggatcctttttattcaaactgatagcaacgtttccaccatcatcaccctgctatgtacaggatccatcaatctcccctgttaaaatctgccccaagaatgtatactcccttcagcttatctaaccttgacgtgccatacttttctctaacccaggtccataccacttgacagtttcccaccctctacc

SEQ ID NO: 27174 - DNA, 229 bp, Zea mays
  Clone ID: MRT4577_124795C.1
gagggcgcgtatccctcccgtgtgttcgagcccatggtgaatgtctcctcacgagagtttagtccgttgcgatggagcagacccacgcatcctgacaggagtgcaacatccttctgaaactgcactacccaagatcggccgcgatcgagctgtacaagaaggtgaagcgctgctactcaccctccctgatggataggagcacacggagtccgataacctactgaggcag

SEQ ID NO: 27175 - DNA, 141 bp, Zea mays
  Clone ID: MRT4577_124796C.1
gccatgataagctctacacatatgcgcaatttttattcaaattcgcggatcagcccaaaaacgaatcacatcagcgggcggaacatcttggattcggcgttgaaacttactaaacaatggtacagccgtaacaaaaggaac

SEQ ID NO: 27176 - DNA, 290 bp, Zea mays
  Clone ID: MRT4577_124797C.1
ccgacttctccgggctcaggccggggtcgtgctccgtcgagcgtctgccgcgcgggcaggcgtccttctccgacgtccttggcgcgcagtcgtcgccaacgccaccggggagaacgccgtgagggcgcccgcagaggcgaactcgaaggtggcgatcaacggcttcggccgcatcggccggaacttcctccggtgctggcacggccgcgacgactcgcagatcgacgtcgtcgtcgtgaacgacagcggacgctcaggaacgcgtcccacctcctcaagtacgactcgat

SEQ ID NO: 27177 - DNA, 419 bp, Zea mays
  Clone ID: MRT4577_124798C.1
cccacgcttccgaaaaaaataaaaaaatttatttaaaaaaaaaaaaaaaaaaaaaaaaaggaagattaaaataaaaaaaagggggcggcccttttaaataatccaaccttacttccccttccatccaacgtaatacctcttttatagtgccacctaaattaaattaactgccctcctttttacaacgtcttaactggaaaaaccctgcctttccccaacttaatccccttgcacaaaatccccttttctccagttggcttattaccaaaaaggccctcaccattcgcctttccaaacattttcccaccctataatggcaaatggaaccccccctttatcgcccctttaaccccggcttgttttgtgtttacccccatttttaccgttacatttgccaactccctaacccccgttctttt

SEQ ID NO: 27178 - DNA, 133 bp, Zea mays
  unsure (1)..(133): unsure at all n locations
  Clone ID: MRT4577_124799C.1
aanatgcccggcgaacgacagaaaccgtccctgctacagagcaggagttgccgcagccccaggctgagacagggtctggaacagaatctgacagtgatgaatcagtaccagagcttgaagatcaggattccac

SEQ ID NO: 27179 - DNA, 416 bp, Zea mays
  Clone ID: MRT4577_12479C.1
atcctcattgggggtgatttctatatactgaaggccaatcaaacttcacaaaactcttacagtaccttttcattttttttggttgcgggaccagaacatctcatttaattcaaacacacatatggaacctgactccacacatcatataccccgaacataacaaaacagattccacgaaccgggccatccaaaaggagaagctagacccctccattaccgacggctttctggttctaagccccaagccccatacgattaatcctattgagcgcctcatgcgaatcgttcacgagagcctgcgaacatcacaggcatatgggaagctcaaaaagcctcccgggaagattgagcttttcctacaaggacttgtttttcgggacatctgagaaaccaacaaccctggaatgtttcccaaa

SEQ ID NO: 27180 - DNA, 1393 bp, Zea mays
  Clone ID: MRT4577_1247C.1
ccggccgggaccaccgatcccttctgaaaaatccccctcccctccccgaggttgcagcggcgagggaggggagagataataataatcgcaggagggaaaagcagcagcgcaggcgcaaaaagcaaatcaaagccacaccaccaccaccaccggcagctgccgagagccgcgcccgcgcccgaacacaagggagagcggccggagaggaaagccaaatccatccactccaccccgtacgccgccgccgtccctgtccctcccctcttcccgcgcgcatgggccccaaatcgccagcgccgcgacgagcgcgcctgcccccgcggcggcggtagcagcagcagcagctgctgctgtgtgcttcgcgtcttcgccggggatggcgcggctcgggcgagcgggctgccgctccggtccagcccgagcttttttttcaggaattcctgaagacacattgagaaattttatgtccaatgtcttgcctgctgtattgatcctggagtttctcagtgggaccaatttgattgttcaaacgtttgctctaaaagtagtcgcccctgccatgcctccattccaaggttggggaccatttcattctttggcatcccaaactaaagtccttgtgagtgtttctgcacaaccagatgatggcctccaaagtgcccccctcctaacacacacactcactctctctctctctctctctctctctctctctctctccattgtgtcactgtaactagcaattgagctcttaaaattttggttgaggtgcagtagcaaggcacactactacgatctacaaacaagatgatcagttgatgcccggtgtcttcaggatcttttcaggttcgcgaggtcccattttgcttctccccccgggcttgcagttgcgtttgagtgcacctctgaggctttggttggctctcgcgctgcgtacttaagctctccgccccgtccacggcgttgcatctctcatggcactcggtgtctcctgatagctgctgcttcgatctactccacctaaccgaaaggtagaaccgagatcaggccgggaattcgttaaagatcacttcttactctgcaacccgaccacttcaaacgaacatcgcgagttgacgccgcggcggagagggaggacagctcgccgcggcagatcaatctgccggcgcgcggcgaccggggcttcttcagcctgtgaatgatcccatccacatccatccacgagcgtgcgcgtagactgatgcctagtaggtaaagaaaccgagtttgctgagtgctagtattaagttcagccttcatgttgcggtatttgtatcggttgctcccgtttcatctgatcaatggatcatggttgtttccttgatcaaaaaaaaaaaaaaaagcccctagggcc

SEQ ID NO: 27181 - DNA, 193 bp, Zea mays
  unsure (1)..(193): unsure at all n locations
  Clone ID: MRT4577_124800C.1
agtccagtgcctcatagcagtaggttttagagatgattcaacagtaatatatctagtagacatcctgaagctgcaaanttttactagggaatatcagcgtttcatcttcactttcatgggccatagtcatctgatcatgtgctctcacatggctagagttttggaccgtagttgagatcaaagttcctcacac

SEQ ID NO: 27182 - DNA, 569 bp, Zea mays
  Clone ID: MRT4577_124801C.1
aattcggcacgaggccaagatctaactggagacggagaagatctatactgcgacgggcggaggggctcggaactggacacagcccagccgtggcaacctgtatgtggcaagtattgtccctgcgccataggacacaaaaaacaggcgaccagattatgcaaagatacgggcaaaagatctgctcttgacacaacgcttatactatgcaaacatgtgagaactcctacgacaggaagacctgagtgagcaaatgacacaaaccgtacaggaccatggcaacatgctcatgtgtgtgaacaggagaagcagatgtaccattcgctatcagcaaaaggacgaagcatatggaggatacattaacgagagccaaaacgagcacagcacatagaagaagggtcgaccgaaatctttcacacatgctttatctgactgatgataagactcattatcatatgcaacctatgagataacccttcggtgagggcgcccatacatcgacgaacatacatcattgcccttatatagagctgccactataagatgacaaaatctccccatctggatctgat

SEQ ID NO: 27183 - DNA, 496 bp, Zea mays
  Clone ID: MRT4577_124802C.1
atcgttctttttttttttttttttttgattagcattggcgaatttttttttatttcttttttactagaaacaatatgtacattttttcttaccatttattcacaagatacttccagccccaaaaaaacataagatgagaggaggggcccgaaaaaccccccctgaaacaagcctttacagacgcaaacaaacaaaaaactactccttattacaaataaaggaagagccacgcacgcttaacggacgggaagggacaaccaaacccttaattgttgtccttaaaaaactgggagtcaacaccccccccagccccggccaaaaatcttctcttctgtaaaaaaacagcacgtagtcactcaacaagaccctccgccctcctgaacacccccgaaaaccccaaaaaaaaccacacctttgtaattactaaaggaaaaaagtgaatccctgcggggagagggaaaaaaaaacttttccaaaaaaacttttatacagggtg

SEQ ID NO: 27184 - DNA, 214 bp, Zea mays
  Clone ID: MRT4577_124803C.1
aaacacaggaaacacccacacaggacagcgacagccacggcccagcagcagaggacaccaaccttccacgaccataagggaacggaggctcaaccagagatttcaatagccttcacctcaggcttcttctcctccgccttgggcacggtgaccgtgagcacgccgttttagaggccagccttgacctgatccaccttggcgttctccggtaggc

SEQ ID NO: 27185 - DNA, 1791 bp, Zea mays
  Clone ID: MRT4577_124804C.1
ctgtgactctcgagggtggaggggccgggattccgttcgggtaccttgctcgaggccgggtggccgggcaccgtctcgtttctctctcctcccctcgcccgtcttccctcttgtgcgagctcagctcacggtcctcccacccccatgagcgcctccgcggcgaggaaaagataatcagcaggcggagcggggggcgcgccgatggatctggagaggtcgccgccgccgtcgccggcggaggcggccggggccgcggcgtgctccatctgcctggatccggtgctcgcctgcgtcgcgggccggtccgtcgccaagctgcaatgcggacacgagttccacctagattgtattgggtctgcattcaatgcaaaaggagcgatgcaatgccctaactgtcggaagattgagaaaggtcgctggctttatgcaagtggacgtcacccccctgctgatattgatatgggtggctgggtgactagcgacaactatgatatcacctccgagcttccttttggatttcaatggtgtccctttagtggattcacccagctagcatcaatgtttggggtgcgtgaagctgagccaacttaccacacaactggagatcactcaagtgctgcaagcagttcacttgtttgcccatatcttgccctgcgtggttttctccatcctgttcatgtgccttctacttctaattctggtgctgaaagcacttcatttcatcggcactcaactggcttggaaggacatgtcactcctgatttgaacaatgctccagttttccatgctaccgagtcaagaaatcatgacagtgagcacagacatttgagtaatcttcctgtatcaggaactcctgaatattctatgactccatttgggataggagtaccaagatatgacagtggcagccaacagggattccgatcatatgcgcatcatcatcccctaatccataggctgacccctcgcagcggaagcaatctggtggcaccattagggtcagttccagccgtcgtggcagagactagaggccatggccatggtgcaccgggccatatgtaccagcactcatctgtgcagggcagcccgttccctcctaccaccagaagggttaggcccagagccttgacgattacgtctttcatcgcagcgacttcctcagctgagattgcagggccccttggccacgggtttcccgctcctggagccgtgaacaggagcgtttctgatgccgagggcatcgaccgagcgtacacatggggccgggagggatatgatctgttcccttggacccctgctgaatggggcaccttcaatcccatgcagaaccatgcgcatggaagctttaccagaaggcctgctggggagcggatgccgcagagtcgccccgagaacggataccagccgcctgtgcccacttcacagaggatgccaccgttcttgtgatcagacgaggctgcctctccaattgctgtgtataaaattatttgattcggggtttggcagagaacaacgagcgaatatcgaccgcacggcagcatcgaaactggtcggctatgggacctgtgtgtgtgtgatgtttatgatgatgccgctcgtatttttagcgctttcggtccagcggcgctcaggtttcgtcgagcgctgtcgtttgtcctgactgatatggtgttgcgttgaaaaggactgttaaaacagcggccgtttctgaactgcatctctggtcgccggggctaaaaaatgccgtttgctgctatgaaagaaagttgtatcgatttgcggccgctctag

SEQ ID NO: 27186 - DNA, 515 bp, Zea mays
  Clone ID: MRT4577_124805C.1
agcaagtggtccctggggaactaccgcggcttcgtcatgtccgccgcggtccagggcgagggccggtgcagcaagccgacggtggaggtcggggtggcgcacgttgggtgcgccgaggacgcggcggccttcgtcgccctcgccgcggccgtcgacctgagcatggacgcgtgcaggctcttctcccaccggctgaggaaggagctctcgcacccgcaggccgacctactccggtgacccaccggaccggcggcaacccacgaatcacgagcgaattgtacataggtagttgaggtagatgtgtgctttattagcgtgcgtttgtttgctggagtagttcggttccgctgatcggctagttgatggtggtcgcctttttttttcgtgagcgctgagttcctgagtgcggtgtggtgtgatttttttggctggttgcttcgctttagccatatgtagggtggttcttttttggatctccgtaacttaaggcaatttgtgatcataaaacaagaaaa

SEQ ID NO: 27187 - DNA, 291 bp, Zea mays
  Clone ID: MRT4577_124806C.1
gggatctcacgtgtagtattatcctcgcttctccggctagagacagcccgcgatcaggcgctcttactctttatctcccgagaatctatcgagaacggcatcccagagtacgtagggtactccctcccaggcatggggaagccgaactaccacgctgacgggcatcggctcgcccaagcgtgctggtattgcgacgctgcagaatccggcaggtgccgagtcttcaccgacatattccagaaggcccgctacgacaataacaccaccaccgtccctggggctgagaacgct

SEQ ID NO: 27188 - DNA, 1683 bp, Zea mays
  unsure (1)..(1683): unsure at all n locations
  Clone ID: MRT4577_124807C.1
tcgaggcnncggccgaaaaaaaaaaataaacccaaacaaaagaatgcgttttcacgcagaggggggacacccggactcagagagagagagaggggcattcgcccgttcgaattctctcgcctcggcctcctcctcacctgcctgctcggctgctcgccagaccaaccacagccgtcggcgctgcagaccgcggcgggcaggatcagcggtgcgtagcctgcccatttcgcgaggaccatataattccaagaccctgatgatggccacaactgcttatatcgatgattcctgttcggaggttattgatcccccgaagactgaggtgctggatgttgctgaactccctggtgaccatactcagaacccaccaaaaccgaatgttgtggtgtctagcagtgtgcgtgaacttctggaatgtccagtctgtttgagtgccatgtatcctcctattcatcagtgctctaatggtcatacattgtgttccggatgcaaaccaagggttcataaccgttgtccaacttgtaggcatgaactgggtaacataaggtgtcttgctcttgagaaggtggctgcatctcttgaacttccatgcaagtaccagtgctttgggtgcccaggcatttatccttactacagcaagctgaagcatgagtcgcagtgccaatatagaccttatagttgtccatatgctggatctgaatgcacagttgctggtgacattccatatttggtgaatcacttgaaagatgaccacaaagttgacatgcacaatggctgtaccttcaatcatcgctatgtaaagccaaaccctcatgaagttgagaatgccacatggatgcttacggtattcagctgctttggccagtacttctgcctacactttgaggccttccagctgggcatgtcacccgtctacatcgccttcctgaggttcatgggagacgacgcggaagcgaagaactacagctacagcctggaggtagggggcacggggcgcaagatggtctggcagggggtgccccggagcatcagggacagccaccggaaggtccgggacagctacgacgggctcatcatccagaggaacatggccctgttcttctcgggcggcgacaggaaggagctcaagctgcgtgtcaccgggcggatctggaaggaacaatgagcttgatgggtcagctagtacgtctgtcccgctccgctgctgccctgaactcatgaatcgcatcgcaaagagcttttgccagtcgtaggaatgggcgactctgtggttcgttctgtgttttcagcttcttctcgcttgctattgtcttcatggttcctgcagggtaggtaggtgctgttggatgtgtagatcatgtagaggttggaggttgctaccgatgcagaattcgtggagatttcctattttattgaactgtctttagagcagcttcaacagatcacctatttgttttgtcaggaaaaatctctataggcggaccacaattgtacctgagtttggccaatgagttaggtcccaaccatgctccgagcaagagaggacaccggcttttagcccccggttggtttgccctctcctcccccttcttttgctctagatcctgatcctcctgattctcctagaaaatcagaatcatttttaaaaccgtttggcaagtaaacagattcttgtcttcaaaa

SEQ ID NO: 27189 - DNA, 210 bp, Zea mays
  Clone ID: MRT4577_124808C.1
gttggggagacgtgcaaagatgccaacttttccgtgcgcccgccgagtctgtctgtctgttgcccacttgtgtcacctggaaaagtgcggtgtgcgggtgatcattttatatgtaaatgtgctttgttattaataatattatagcagcgcgtggtggtggtgctgctgctactgtaataaagacagatactccagcatggaaagtcaccg

SEQ ID NO: 27190 - DNA, 265 bp, Zea mays
  Clone ID: MRT4577_124809C.1
tttttacccgacgtgccaccgtgtactgcgccgtagctgggcatgccaacgatccgctggttgcctaagagacacgggggggctcgaaggccgtatgtacccgtattgcggcaggtgcctgtgacactcccggagtcgatggccgtccacgtgctgacatagggctgacacttagtggtgaatgacctgcgagtctaagtagtcagtgacgacaacgctctcgatccgaggcgtgcgcataccaactgtggagccggctactctg

SEQ ID NO: 27191 - DNA, 613 bp, Zea mays
  Clone ID: MRT4577_12480C.1
cgaagatgtacgtatgatccttctccacgttctgggggtgggtgtggcatgctgttagaagtagaccaaccaaatggcacgcttttggagggtttgttttacaggtgggagcggtcgtggtgggatttgatcgctacttcaactactacaaagttcagtacgggacactgtgcatccgtgagaacccagggtgccttttcatcgcaacaaacagggacgccgtcacccatcttactgacgcccaagaatgggcaggtggcggagcaatggtcggtgcacttctcggttcgactaagcaagaaccgctcgtggtcgggaagccatccaccttcatgatggactacctggcaaagaagttcggaatcacaacatcccagatatgcatggtgggggaccgattggataccgatatcctgtttggtcagaatggaggctgcaagactctcctcgttctctcaggcgtgacttccctgcagacgcttcagagccccgacaactcgatccagccagatttctacacgaatcagatttcagattttctcaccctcaaagcagcaactgtctgaagagcccgcgttccatttgcacagcatgtcagcatcggccttttttt

SEQ ID NO: 27192 - DNA, 561 bp, Zea mays
  Clone ID: MRT4577_124810C.1
ctgtgcggcgctcgaggcggccgggtactcgaaactatatattcccttgattgactcattcctcgaaacaaaaagcaaaaagaattagctcttagcagacagtcatcaaaatgcctggaaatggaaacagcagtgccgggactggcggccatgcccctggaggtggcgctcatggcgggggtgcgccgcaggggggaatgacgatggaagcagcgggccgaatccaagccgccgaagctcgcggcagcggaggtgccgtctcgtccggcgggttcgccgccagagctcaagccgccgccacccgcaacggtcgctaggcctccctcgcttcgctgacctcatcggccaaaccccgcccctctatcagacggtgcgagagtgcgcctcgacgttgtctttttttttttcttctataaggaaaaaaaaaatacttcttgtattcagtctgttgtcattaggatgatatctgtctccctgatcgatatccagggccccgttgtctgtaacattggcttctctcgcttctgggaggtcaactgagaaatatcatagcccgtgtcc

SEQ ID NO: 27193 - DNA, 258 bp, Zea mays
  Clone ID: MRT4577_124811C.1
aggatgttctgctctacggattgggaggatctttttcctggttttttgcttcagagtgctgcttctcaagattcagatcattgccctcttcttctgggtttgcaggatgtcaatagagcaaaagggtgtttcttctttcaggctttctgggtcaagttggaaggttttcatgatactgtggctcaggcttggagtttggtggcgccaggcccctgtccttttgtcactctctccaggaagttgcaaggtactgctaga

SEQ ID NO: 27194 - DNA, 678 bp, Zea mays
  Clone ID: MRT4577_124812C.1
gccctcactaacattaattgtttgtatgtttcatctcagcttgatgactgaaaataactagggccttgcagggaaaccttcgttgacttctgaggtactgaagcaattgggaaccagcaggccctctgtccagacgctggtgctttgtgctccgttgttgtgctgctgctccactggcgtttactagttctagtgccttttcactgatttgtccgcacagggatcctggtgctagtgcttggctgattgctgctgcccctgtgttctccctcaattcgtactgctcatgcaattcctggaggccctaggaattggttctgcagttgtacctgtaggctgtagctgccaatttagttcgattttgaatttggcaggtagttgttgtgcttgtttctagatgcaagagtgcttattgtttgtggtgtttgttattggaaattttggttggtggtagttatttgtccggaaaggttaatgcaatgctgtggcttgtcttgcttttagtcaatggtagtaagttgagtaaaatgttcatgtgtatgtgcagcttgtggtcggcagtgtgaaattttgacctctaattatttgttagtaatgtaattttctcaaaaaataataaaaaaagaaaaacaacaacagtaataaatagaaaaacgtgccacacaggatgggtaaaaa

SEQ ID NO: 27195 - DNA, 1355 bp, Zea mays
  Clone ID: MRT4577_124813C.1
atgagcggtggcgctcaactccagctaggttaaagactgtaacggcattggcacagtttcaggcttttcagcccccctggtgggccggcccaaatagaaaagagcagcctggagcccaaaacaaagcacctagtcgagaacaaccctaatcggacgactaatcgccgactagatggggattagtcggacgactaggtttctagtcgccctaatcgcgtcggtggccctaatcggccttgcagcagcgataagtccgactaatcgcgactaatcgcgattagtcgaccgactttaaaacacccattccgatggagacaatggaaacaatccagttgttggagggggtggctaagaactcgaagaatttaaagttggtggagaaaccacgaaaacgagaccagggttgccacgtaagagaagactgcatcagcatcactacttgcctgttttgaaatttaatgtacctttcacggaagccctcactaacattaattgtttgtatgtttcatctcagcttgatgacctgaaaataactagggccttgcagggaaaccttcgttgacttctgaggtactgaaggttagtgaagaggcagatgattacgttccaaataggaagtcttgaatactgctgtgacttgtgttttgaaatagatatagtattttctggttctcttgcaaacctcattgttgcagccctaacatttcatggtgtgtttgatttgtggggtgggggtggatgggagacggtcaacccattttttaaagttgttcagttagatgggatgcccaaccagtggggatattcccccgagatcttggatgggatgtccatgcaaatctggtggacagagtagtccatggccttgttgaatacttattgcgcgactggttgtggtcacctaatgtgccttttctttttgctccaattgttcccaatctcatccctcattaacctgtttctgactgggatgcgcacagcaattgggaaccagcaggccctctgtccagacgctggtgctttgtgctccgttgttgtgctgctgctccactggcgtttactagttctagtgccttttcactgatttgtccgcacagggatcctggtgctagtgcttggctgattgctgctgcccctgtgttctccctcaattcgtactgctcatgcaattcctggaggccctaggaattggttctgcagttgtacctgtaggctgtagctgccaatttagttcgattttgaatttggcaggtagttgttgtgcttgtttctagatgcaagagtgcttattgtttgtggtgtttgttattggaaattttggttggtggtagttatttgtccggaaaggttaatgc

SEQ ID NO: 27196 - DNA, 568 bp, Zea mays
  Clone ID: MRT4577_124814C.1
tcgtgagcatttagaaacaccctaacgaaacgcactaacaacgacctagcaacactggctaccaagatgtctccatctttgcgccatttgctcttttagtgagcacatcaaacgcgtaaattatggcagatgcctcactaggtcctagtgccttaattacacatggtcttcttgcagctactgcagttggcttaggacagccagctccacaggcctacacgctgctagaggctctagcagctggcgtctttcaacaaccaactgcccaattacaacaacaatccttgggacatatgaccatacataccatcggaacgcagcagggacagccacatctagcatcactgaacctactacatgctgtgaaccctgctgcctacttgcgtactagcaggtgcattgacactcacaacccagtggctctggcaaacatagttgcgttccaacaacaacagcagttgcgacaaccatctaccagcgctcagaccactagccatgactgaccctgccgcctacctacaacagctacaactgttttcatctagccctctcgctgtggttaatgcac

SEQ ID NO: 27197 - DNA, 290 bp, Zea mays
  Clone ID: MRT4577_124815C.1
ggtaaaaataaaaaaccagcccattaatcctggcttctgccccaccaaatttttccaatcacttagcccgtcagtggcccccacatttctttcttcggcaatttccattttccaaaacctttttaaccatttttttttttattcatcttctatggaaccaagcagcccttcacttatcaaacacacatccacgggcggcagcaacaacaacaattctttcaggttttaacaaaacccaaccaaaataaacctcatttccagtgaacttcccaatacatttttaaacggat

SEQ ID NO: 27198 - DNA, 137 bp, Zea mays
  Clone ID: MRT4577_124816C.1
cggctactgatgatgcggctacttcgtctctgttgacccgtctgattatgtactgtaacccatggctgtcagccggatgtgctaaaaaccattggttctgtgtggattcatgctgcctgcctgtgctgtgcttgctc

SEQ ID NO: 27199 - DNA, 143 bp, Zea mays
  unsure (1)..(143): unsure at all n locations
  Clone ID: MRT4577_124817C.1
ttctttcgtttgactccattactaangatgggagttaaggtcttcgtcgcggggccgtcgaaacctggcgcttagtttcctaatgccgcccgttggtacgagaccgtcttttcggcttgagcctcaaaattccctggtaaggc

SEQ ID NO: 27200 - DNA, 466 bp, Zea mays
  Clone ID: MRT4577_124818C.1
gacatcattaagatagggttatggtattatcatgaacaaatatgaacaatatcgaattacatttgtaccttcggcttgatagaaggtgaaaatccaggtgacgtgcgagtgaatacaagtcatcgtgaacagcacgaggtactgttcatctatttataggcacaagacgcaacctgtgtggatttacatccatgcccttgacatttactattgacttagggataatctatcaaggactagacaaccttttcccctttaagccggtttcattttccaccgctaagccgaagcttctccacacatagcttcagaactgattcatccttcttctgaaccacgcttttcatatcgtgtacagcttcatcccaatctctgaaggttcctatgaatatactacactgggaaaacatgtgagtcgtgttttaggggaccttcggaagacgaagcccccagcagtagcccctcg

SEQ ID NO: 27201 - DNA, 869 bp, Zea mays
  Clone ID: MRT4577_124819C.1
gctgcggaagctgggcgtgggggcgtgcacggtggtggggttcagctacggcgggatggtgtcgttcaagatggcggaggcgcacccggacctggtccggtcgctggtggtgtcggggtccgtggtggccatgaccgactccctcagcgaggcgacgctggaggggatcggcgtgaagtcgtcggccgagctgctgctgccggagtccgtcaaggggctcaaggcgctgctctccgtcgctacctaccggaagctctggttccccgaccgcctccacagggactacctcgaggtgatgttcaccaaccgcaaggagagaggcgagctgctggaaggtttggtggtcagcaacaaagacgccaccgtgcccgtcctgccccagaaaatactcctgttgtggggagagaacgacaacatcttcaacatcgagctcgccaagacaatgaaagagcagctcggcgagaagacgacgctgcagagcataagcaaggccggccacctggtgcacctggagaggccctgcgtctacaaccggctcctcaaggagttcctggcgtgcgtcacggctaccgaaaccaccaacaaggagtgacaagggcagctggaaggagttggccgcctacatttgccacgagttctgtctgtttcgaaataacgagagagaacggacgacacttccaccacccaatatgtctattgtattgttgttgtttgagaaagattttctgccacgtgcctaaagtgcaagaatcaacgtttaacccatataaatatgtactaatagttttaaaagcaggtattcaatgagctatatattattatttacaaacaaaaaaaaaaaaaaagggcggtcgctcgcgatctagaac

SEQ ID NO: 27202 - DNA, 208 bp, Zea mays
  Clone ID: MRT4577_12481C.1
gggggtgtcttctcaccgcgctttctttcgttagggggagccccactccagggtgttcattgaagcacttggtgaacaaccatgggggggtcaggggcgcccgttttgtaaaattatccctcctcgaagccaccttcaagtcttatggcccatgggtggaacactcctttccaaacctgttgagagggtcttggaccacccctccatt

SEQ ID NO: 27203 - DNA, 323 bp, Zea mays
  Clone ID: MRT4577_124820C.1
gaacgccagcaaacttatatgtttatatgtcacaaatcgaacggtaagcggcaacttaatcggccggatatttacatggaagcacaaacagggagctctgttctagaggagcaaaaccacccaacctcttatgtttaactcacagacaacacctaaattctgacggaaatacagctgttggtttagccccgggaactcgaattcatggtttttattggacccgctttggatctcaggaactagggggtgttcacgggccaccaaccttaggatgacaaccgtgcctattggatggtagtttaccgaacgaaactttccaaatt

SEQ ID NO: 27204 - DNA, 668 bp, Zea mays
  Clone ID: MRT4577_124821C.1
gtgataattacggaacatatccccataacaaacttgtttacatgcctttggttcaatgaagttgaccgcttcacgtccagagatcagctaagcttcagcacagttagggataaaataaggtggcgagttaattggactgcagacatgttcctggattgtgaaaggcgtgattttgttgttcagtcgtaccaccgagaactgttggaacagaggcagtctgccttacgaagatggcctccccagcggtctcccatcgcgcgcttccaacctagaaagatgcttccagacaatgcagcaagggaaccatggaaggcttctgcaaccaagaagttatcacggaagcgagcacgggataagaaatcaagctcgagacgaactcattgaactagtgggaaggaagcaattcaactgtaaatgctggcgattttgctcctacacaactgcatatctaacggacagcattccaacattgttttactacttttaacttcctttcatgctcctagctcccctccccaagggcgccaaaattttgtcagggattgttgatagagagctgaaattctttgttgtaaataaacatttttagatcagagatgtattcaactagcagctgattcaattcaatccattttggaggtaaaaaaaaaaaaaaaaaaaaaaaaatt

SEQ ID NO: 27205 - DNA, 818 bp, Zea mays
  Clone ID: MRT4577_124822C.1
ggacctcagcggcgggaggagtgtctcctagctagagctcctcctatagagagcaccttgtgttcttgcgctttctagctaggaagctctccttccccgcgtagcctagacgaccactgtgcctgatcctgtcagctcagaacgtccgctccgccctccacgagtaagcgtggcgtcgccgtcgccgtcggggcggcgcttcccgtcggacaccacggcgatcgcgagctggcttccgtcgcccgccggcgccggccgaggggacgacctctcgctgggtttcaatgccggcgccgcctccgcctcgtctggcgcctcgctggcggcagggctctggggctcctcggcgtcgcgccaggccgcggctgctgccgctgccgccgccgccgccgcggcgctcggctacggggcgataggccccaccggcgacgtcgggatgctcgtcgtcgcgcctccgggctcgttccaccaccagcgggcagccgacgacgacgaccccgtgctcccgctcgtcaccgcggcgcagcgcaccctcgtcaacgcagacgccgcctccggcggccacggcaatccgcccgtgtcgtccgctggtgccatccagttttggcaccaggagccggccccggatgggcatgggtcccacggcgagaaggccgtcgccatgctggatcacgccagcggcgggtccgggtccgggtccggcggggcgacgtgccaggactgcggcaaaccagcgaagaagggctgcgcgcacagccgctgccgcacgtgctgcaacagccgtggcttcgagtgtgacacccatgtcaggagcacct

SEQ ID NO: 27206 - DNA, 299 bp, Zea mays
  Clone ID: MRT4577_124823C.1
tctcagatcgtttcggctctgagtgctagcatatctcagtgattgacccatatcggacagtcgcactgacaacacactatccatcttgcgccgccgtcgcgagtgtacgacgcttgatctgattgatgtcgagctccatgttcaccggaatacgctcatgtgggatccaagagttcgcattgtacgaatccggcgtctatactttagcgtgtaaatgaggatctcgcttagacgtcttctcagtagtatggcaggggattatgatattactgattggaatgtcgatgactctgtagcat

SEQ ID NO: 27207 - DNA, 457 bp, Zea mays
  Clone ID: MRT4577_124824C.1
ggccggggaacgagatgcccaagcgggtacggcctggtctggttctggctgtagagggctagaggtacaagctacgactctgaaagagtgaacagcgcgccgcccaaccagagatggcgccgcataccaccgcagccggcggcgcagccgtcgaggaggaggcggcggaggaggccagcactctccggcaccgccacagagctgccaagggcggcggcgaggaggggcaaggcaacaacgggggcgccgcctcccatctcgcgcccgccgacgacgacgacgcggcaggtgaacgcactgtcggtggagagcgctttctcggaccacgcggggcccccgtggcgggagcagatgacggtgcgcgccttcgtgcgcatcttcttcgtgggcatcatgtgcaccgtcagcgtgatgaagcatcaaccgcaccagcgggatcatcacctcgctcagcggc

SEQ ID NO: 27208 - DNA, 329 bp, Zea mays
  Clone ID: MRT4577_124825C.1
cgggcagggacgcggggcagcatgccgtgcttccttcttgacacagcaacagttgctgcctttctaccagcagtttgcggataaccccgaaaccatgttacaactacaacaatggttgccctttgaacaacttgctttgacaaacccagcagcctcctaccaacaacacatgattggtggggcccactttgacattgcttattacatggaactgaataataaagatcttcggatgatgtgtgaggacagccagaaattagaacctacatttccagattctagtgtcaagatgatgctgctgtaaataagcaggagtacctcaggtgcgt

SEQ ID NO: 27209 - DNA, 900 bp, Zea mays
  unsure (1)..(900): unsure at all n locations
  Clone ID: MRT4577_124826C.1
ccacgctgtccgggatagggaggatgaaatgcttaatttccctccaaagtggcatgatccaagtcatgatgaactctcttttgcaaatgaattactacaacttcatttccagtcagctttagaagatcttttgactatttgtcagacaaaagttcattctgacacagcaggagatgagaaggagcacctaaaaataaccctgttacgcattcattctgcattgcatggtgtaatgtcttgtttaccagaaattcgcccgtcatataaagatgggaggtccctggaagtggagtcggctttcttcatagcaggatctgctggtagcactgttggaagctcagaaatgcgtgaaaaggctgcagaatttgtgcacatagcttgcaggtacttattaaaggaaagaactgatgacagtattcttctatcccttgttgtgcgtgtcattgatgctttggtaaactatggaagcttggaataccaagaatggtcaagccatgttcaagcttggaaactagaatctgcttccataattgagcctccatgcaacttcattgttccatttcatgctcaaggaaaaaagagacctagatgggcacttgttgacaaagcaacttgcatagtacatggaggtgttcacaatcatcatatcacagatacagaatgatgcagatgttcgccactgtcccatgattaattgatgatgatctcttagattntcactacacactatgaactgtcgtcgatgcggaaatcntacaaattgtgaacgtngctcncaattcnatgggtctacctccggnatttnggaccaaannctgaangtgtctggctgacatcgatccagatgtttagactgccctgttgtcccccctcctacaggattggagcccngaccgtaag

SEQ ID NO: 27210 - DNA, 404 bp, Zea mays
  Clone ID: MRT4577_124827C.1
gccttacttaaccgtaggactggaatgcttacaggacagcgtatataaaagactcgatgctgcctgctgcttctggccatccagcaagctgttttttattggttacctggggtcatgactcgtgcttttttccggccgtgcgtgaaaagagacggaaagctcactagccaggtcgatccaataaacacccgaggatattgaagactgtggacatgctctttgctaaagcgagggggacaaccttctttacggtgttggggtataccctgctccccagggaagcttatgacgctagaccattatgctttcgagggcgtggcacgccgggtgtaggtcctttctattccgagccggcctcatgaggctatagataccgatactggacaaggaaagggcgcgccccc

SEQ ID NO: 27211 - DNA, 376 bp, Zea mays
  Clone ID: MRT4577_124828C.1
aacgtccggaccgaggcgtgagcagacgaccaccacctagggcctaacgctggcaccctcttacaactgcaacactggctgccctccaaccaactcgctatgacagacccagcagggttctaccaacagcccatctttggtggggccctcctttaaagggggggggggtggggagctgattttttttgtcctcgcgggtgatgtgtgtggctgccctggctgcggccagcacgtgggtgccagcgttaggcgcacacgtgactggcttgtccgcctccccggccgggcgctcgtttggggggatttcccgcccctggggggcggtgctcgggggatcggggcccggcccctgcctggcgttgtcctgggccttggt

SEQ ID NO: 27212 - DNA, 362 bp, Zea mays
  Clone ID: MRT4577_124829C.1
agccgtcccgtgacatatacctaatatatttttcatcaatatgacgctcttcataggagggactcatatcaaaagcagacagacattcatgagattcaatgtcacaatgatcaacttcacatacatgaacagaaacatgaacacaagatggatcatttagccaaataaccactactacactaccataatttctaaaacagagcttcaaacaacacagaacacaatgatgcatccaaagctcaacacacaaactcaaccaatatttagattctcaataataaagccctacatatatccaaggaattcaccccaatcattatggctatcaacgatgcaaacattatggaaacacagtaacgaac

SEQ ID NO: 27213 - DNA, 845 bp, Zea mays
  Clone ID: MRT4577_12482C.1
gccggccgggttcttcgagccgttagccttatccctcgccggcttcttcttcctctccacgcacggcgctccctctgtcctcttcccatggctgagcgcgcctagatcttctccctcccaggcgtttggcagctcggctgctcgttcctctccgctgctcgccggttccctttccccaagctccatggctgctgcacctccccaaccgagcggctcttccccacggcgctccctccctgcttctccctccctctcgcgtcttctcctcgccggcgtgctcctgctccagccatggcacgcgcccctgcttccatggatgccgcgcccgctgcttgctccccttgcttctccagtccgagctccttcccctcgccttcccatggccggctttgagctcacccagccctttctctgtttctttcacggccgagtctctttttccttggtcgccgccgttttcctgtgccgcggcctcgcccagccgttcctcctctttcctctagctcgggttcagtccagttcgcccttgcgcttgccatggtggccgtcgggcccataccaaccggagctcgctcggctgcggtctcgtcccggctcctgctgcggctcgccgcgtccctgtgtttgaattcgtcgacgttcactcttctccccatggtcggacagcctcgtggatgctgctatttggtggtcgcctcttggcctgatttcgtcatcacatccgcactcctttgcttggcccgtcatcatttctcagctgttctgcgcgttcgtcaggctgtgctgtgtgccggcgtttcctcccggcagaactcgtcgtcgtccatggtcacagatctcgtcct

SEQ ID NO: 27214 - DNA, 646 bp, Zea mays
  Clone ID: MRT4577_124830C.1
agatacctcacatcgtcccctcctccagccttgaggcgcgctttcacacgctctcgcgtctgcgaatccacgatacgccgccaccatggcctgctcgtccccctcctggtgcaccaccaccatcaagagctcagcacgcaagaaacggctgcggccgtcgcctacacctggcccgtgacggcgctgatcaaggcgacggcggtatgtatgactctcagctccgcaaagaggtcctctctcacttccacctggcgcagcgtgttttcctctccttctccgtcatcggatatcacacatgacatcctcgcacccagagatgtacaaatgacccttcacaatctcgctctttatgaggcccatggcaatctgctcatccctcactatcgaagtcgtccgagtactccgcgaagaagaactccccagatctccctccatgacaccacagttctattcttcctcccgagtccacatggtggcagtctacgaaatgtcgctctggctctccaactcccactatatctaactgctaccgtcgttcgttcagatgctcaaagttgtcatgcccatggccgtgtactccatccttgtcctcttcatgaatgagaccttgaggtactcttctatgatcaaaatgacctatgtgtca

SEQ ID NO: 27215 - DNA, 652 bp, Zea mays
  unsure (1)..(652): unsure at all n locations
  Clone ID: MRT4577_124831C.1
gacgcccgcggtcctggtccggaattcccgggtcgacccacgcgtccgcgtgtttctggatcggagcgtcttccgcagcccggccttaccatgagcgtcccggccttcatcgatatcagcgaggaagaccaggccgctgaacttcgagcttatctgaaatcaaaaggagctgagctctcagaagaaaactcggaaggtggacttcatgtagatttagctcagattattgaagcctgtgatgtgtgtctgaaggaagatgataaagatgttgaaagtgtgatgaacagtgtggtgtccctcctgttgatcctggaaccagacaagcaagaagcattgattgaaagtctgtgtgaaaagctggtcaagtttcgggaaggcgaacgcccatctctgagactacagttgctcagcaaccttttccatgggatggacaagaatactcctgtgaggtacacagtgtactgcagcctcatcaaagtggcggcatcatgtggggccatccagtacatcccaacggagctggatcaagtgagaaagtggatctctgactggaagctcaccactgaaaagaagcacaccctcctcanactgctctacgaggcgctcgtggattgtaagacaagtgatgctgcatcaaagggtcatggtggaa

SEQ ID NO: 27216 - DNA, 105 bp, Zea mays
  unsure (1)..(105): unsure at all n locations
  Clone ID: MRT4577_124832C.1
agcgtccggngacgagtagcaccgcagccggnaggactcgccgggccgccgaagagaccaggggttctgggcgacgacgctcatcttcgtnctcgccggcgtcgc

SEQ ID NO: 27217 - DNA, 265 bp, Zea mays
  Clone ID: MRT4577_124833C.1
ctggcccagcatctactcctgtagctttactttttcgtcaaaatgaaaagaaacactgctctgtaactggttgacagtaccactcatagcataatgggtatactgctgattacggtggacctagactgatttcgatgtagagccaatatcaccaacgtccttgactgtctcatagaggagttctgcatcgagaaagtggagttcgatgacatgaacgataataacgtggtgattgtgcttggaaagttcgacgtctagaatctct

SEQ ID NO: 27218 - DNA, 656 bp, Zea mays
  Clone ID: MRT4577_124834C.1
ctgtctagccgccctccgcctccccgtctcgctcgctcccacctctcgccgccgccgccgccgccgccgcccgcgcagccgcaaaatgccgttcaagaggttcgtggagatcgggcgggtggccctggtgaactatggcaaggactacggccgcctcgtcgtcatcgtcgacgttgttgaccagaacagggcacttgttgatgctccggacatggtccgctgccagatgaacttcaagcggctctctctgaccgacatcaagattgacatcaagcggatccctaagaaggcaactttgatcaaagcaatggaggaagctgatgtgaagaccaagtgggaaaacagctcatggggcaagaagctggttgtccagaagaggagggcatcgctcaatgacttcgacaggttcaaggtcatgctcgccaagatcaagaggggaggagctatcaggcaggagctagcgaagcttaagaaggaggttgctgctgcttagatcactttggtgggcagactgttgagcttttggtcagcgttgtatctttgccccaaaatcgtgaaatattgtgtgaatcactcatcactgttattggtgtatcagatgaaaatttagtagtgtttgagattttgctggacttgtcaggatctgagatggtatg

SEQ ID NO: 27219 - DNA, 386 bp, Zea mays
  Clone ID: MRT4577_124835C.1
caacaacactgttggcattagttttacaacgcaatgcacttaaaaaacattctttgggcccaacacaacacaacagaacacaccaacccacccgggaggaccgaaacccggttgcgcgcggaagcctgacggggttgataatacttgatgaaacccatgcttgcaggggccgagagccaaatgcgagtagctcgctgggggtcccggccaagtaacaaaaccttgatggcccccgccgggccgccgaaaacccaccgggaagggggcccgatgcttacctccaggccgttgacggcaattcttacccccaagctttcaacggtcgaggccgtttccaggccggaggccatgggaagggaagtcccccggggaaccagggaattttt

SEQ ID NO: 27220 - DNA, 696 bp, Zea mays
  Clone ID: MRT4577_124836C.1
cggggttagtgccactaaaactggtttcttaaactttaaatctttctgcacagtgactgtaccaatatttttttttctaaatactaattccgttatgaaatattttaaaaggaaaaccagctaccttttgctaatcagtcaagggtaagtttttcccgaaacaagattttggtctccagaattgaaatatggcttttgtttcttgggtgactaccttttttttaaaaaaaaacaggaatatactctataataaatactaccacctgacacggagcttgatcctcgtgtgagctttccttgtgtagggcttcaagagctttccttgtgtagggcttcaacgagaatctctactaagtctgcaagggtagcataccattctttgttctgcatgtcattccttgttctgccatccctattctgcgattcagattcccattcctattccctgttatgcgattcccattctcgtttgtgcggcgtccgctgctccctcctcccttcaccacgcgacgcagcgacacgacgactgttctctcctccctcactcgccctctcctcccttccccatggcgtcttcgcgtctccgatcgatccaagccaccatggttttttttaaatccattctcgccgagctcgatccgccacagatttctccgatcgttctgaacccgtgtcctccccacaggtgggagcagg

SEQ ID NO: 27221 - DNA, 2464 bp, Zea mays
  Clone ID: MRT4577_124837C.1
gttcagcaggcttctgcaacagagagttgacaccgggtacataacagatgtgagaccaggcgcttctctcaagagcgcatttgttatgcgccaagatttgttgaatctaacaccatgagcaatgctatctaattcggcacgagggaagagagagagaaaaagaggagaccagagagggagagagatgctgcaggtggaggaggcgctggcggcggtgctgtccgcggcggcgggccacgcggagccgcacgccgtgccgctgcagggcgcgctcgggctcgtcctcgcggaggacgtctgcgcgcccgatccgctccctcccttccgcgcctccatcaaggacggatacgccgtcgtggcctccgatgggccaggggagtatcctgtggtcacggagtcgagggcgggcgacgacgccctcggcgtggtcgtcgtccccggcacggtcgcctacgtcaccaccggagggccggttcccgatggcgccgatgccgtcgtgcaggtggaggacaccgagcagctccctggcggagcggatgggtccaagagggttaggattcttgcgcgggcctcccaaggacaggacatccgcagtgtgggatgtgacatagagaaggattcgattgtgctcaagtctggcgagcatataggtcctgcagaaattgggctacttgcaacagtgggtgtaaccactgtcaaggtgtaccctcgaccaacaatcgctgtattctccacaggggatgagctagtgcagccagccactgccaccctcagccgtggtcagattcgtgattccaatcgagccatgcttctagcttgtgctgttcagcagaaatgcaaagtggttgacctgggtattgcagaagacactgaagaaagtctcaaggagcatatggatgcagctttgcgttctaatgctgatataatcattacttctggtggtgtttccatgggcgacagagatcttgtcaaaccttgcctggcaaagatgggtaaaattcactttgagaagatccagatgaaaccaggaaagccgttaacctttgctgagatcaccacacaagacacgccaaagccatctaaaacagttcttgcatttggtttgcctggaaatccagtgagctgtattgtttgctttaatctttttgttgttcctgcaatccgtcttctctctggctggtcaaatcctcatctgcaaagagtgcatgtgcgcatatcacatcctttaagagcagacccacatcgtacagagtttcaccgtgcagcaattagatgggtgcttgatgatggatctggtcgacctggttttgttgctgagagtactggccatcaggctagtagccgtcttcttagtatgaaatctgctaatgccctgctggaaataccatccactggacaaatattggcagctgggacatctatccaagccataattatttcagacataataacttcttcagataaactgcctactccttcaaatccgtatccatcttgtggtccttctgcaaaaagtatttctgcagatgtatctcagattgcatctccacaggatgctgaagttaaagtcgcaattctgactgtaagtgacactgtttcatcaggtgctggccctgataggagtggcccaagagctgtatctgtagtgaattcttcatcagagaaactgggtggtgcaactgtggttgccactgcagttgttcctgatgaagtggacaagatcaagggcattctggtacaatggagtgatattgaccatgttaacctcattctgacattaggtgggactggcttcacacccagagatgtcacaccggaagcaacaaaaatggtgatacagaaagaagcgcctggtctcacatttgttatgcttcaagaaagtttgaagattacaccattcgcaatgctatcccgggccacagctggaatcagaggatcaacacttatcatcaacatgcctggcaacccaaatgctgtggcagaatgcctggaagcactcctcccagcgctcaagcacgccctgaagcagatcaagggtgacaagagggagaagcaccctcgccacactccacatgccgcagcggtgcctgtggaccagtgggagcggagcttcagagccgcatcatctggtaatggtggtgggtgctcatgtgatccctgaggagccctgatcgactgagatacccaaaagagtggaaccaaacacgagacagtaggagagctctgtgtcctccgtgctccattgcattgcctgcgtgcctgcgtccagttcgatgttgaagttttgatcttgtcctttggtatgttatatggagatgcgggagtccttgactgttacttgctcacgaacttctttcactgtgctacaaataataatgtataatatgtaatctcattgtctggccgtttgatgttttgccttcgtctaatagaggaaccgcagtaaaagttctctcctctgtcc

SEQ ID NO: 27222 - DNA, 248 bp, Zea mays
  Clone ID: MRT4577_124838C.1
cggacgtgtacgagagcgtgtctcggacagtcgtatcgcgcggacggactcaggtacctcatccatctgcaactacacccgagtaattagacgatggcagctccatggagcatcgtcaatcacggactgaactgagccttcccaatcttctgacattatctcgcctactactccttcagtccccgatcagacgatgatacaatcggcacttttatactagcagctcatgggtatctcggaactgccct

SEQ ID NO: 27223 - DNA, 179 bp, Zea mays
  Clone ID: MRT4577_124839C.1
gcacgaggatgccatggacatatataataatcgttctattatataaaaaaaaaaaaaaaaaaaaaaaaaaaaaaaaactggacggaagcaatggggacactggagccaattcctatcatatgtaccctgtaagaactgggatgccatggacatatataataatcgttctattatagcag

SEQ ID NO: 27224 - DNA, 357 bp, Zea mays
  Clone ID: MRT4577_12483C.1
cttctcttggtgtgtttaacctcatgaagaggtatcattcattgcacattcatcatacatttgcatgggctgggcaatgatggggaccaaaatgtatcgcgccctgcccaatgggggcaggcaggaacggaaagatgtgcacgaactatgtgagaaatctctttatataggttgtgcctactcccaacgggatatggcgttcttgtgtggcgcgaaccgggaccgacggacttgtggcgaggagccggacatcagagagtcgcagatgacctacccgaactttttaatgtgttccgcctgaagacagatagccaaagaaaggcgtgccgcccggatggagctggtgagaacgaacgc

SEQ ID NO: 27225 - DNA, 718 bp, Zea mays
  Clone ID: MRT4577_124840C.1
ccggccgggatggacatgtgttgcgctgttcaactcactacaaataagtaatcgatatattccctaaaaaaaaaaaaaaaaaaaaaaaaaaaaaaaaaaaaaaaaaaaaaaaaagctggaatcagaggatcaacacttatcatcaacatgcctggcaacccaaatgctgtggcagaatgcctggaagcactcctcccagcgctcaagcacgccctgaagcagatcaagggtgacaagagggagaagcaccctcgccacactccacatgccgcagcggcgcctgtggaccagtgggagcggagcttcagagccgcatcatctggtagtggtgggtgctcatgtgatccctgaggagccctgatcgactgtgaaataccaaaagagtggaaccaaatacgagacagtaggagagctctgtgtcctccgtgctccattgcattgcctgcgtgcctgcgtccagttcgatgttgaagttttgatcttgttctttggtatgttatatggagatgcgggagtccttgattgttacttgctcccgaacttctttccctgtgctacaaataatgtataatatgtaatctcattgactggccgtttgatgttttgtcatggtctaataaaggagccccagtaatttgagtggcgtttgtccctgaaaaaaaaaaaaaaaaaaaaaaaaaaaaaaaaaaaaaagaaaaaaaaaaaaaaaaaagcggcc

SEQ ID NO: 27226 - DNA, 503 bp, Zea mays
  Clone ID: MRT4577_124841C.1
tattacatatcacgtatcctctctcacagactgcaccttggtctctgatgccagaaccgtcttgaatgatgctatgataccatcacatccgacacaatatcgcgcatgatgcatgttatttttactagcacatacgtacaaggatcatctgcatgaccttgatctgatcatgtctgatctaaaacgatcattattttcttgacacttcctgttcacacgtgtctgctatggatgatgaatttgcatgtgtgcggtctgccaggcggaccccctaagctgtatacagaccgagataaagtcagcaagagcacaagtcaacttgctctggtttcgcagtgccactgcaaagagctgcttctctgcaggattgatacgtatgaccagcgtcactggaaccatactgtgaatgaatgcgtgacgtctagcaaacactctgagcgcctcgtgatattttgaactctgataatatgctcctgtatgcacatgggacggaccactacatg

SEQ ID NO: 27227 - DNA, 793 bp, Zea mays
  Clone ID: MRT4577_124842C.1
cattgggtacctcgaggccggccgggaaccgagtggtcaacgtgggaaattgaagcggaggaagatagagagaaaaagaggagacgagagagggagagagatgctgcaggtggaggaggcgctggcggcggtgctgtccgcggcggcgggccacgcggagccgcacgccgtgccgctgcagggcgcgctcgggctcgtcctcgcggaggacgtctgcgcgcccgatccgctccctcccttccgcgcctccatcaaggacggatacgccgtcgtggcctccgatgggccaggggagtatcctgtggtcacggagtcgagggcgggcgacgacgccctcggagtggttgtcgtccccggcacggtcgcctacgtcaccaccggaggtgaggccgtgccttctctctagcgccgccttgcccctttgtgtgtcctggccgtctgagcgatagactgtcgttgctggcgcagggccggttcccgatggcgccgatgccgtcgtgcaggtggaggacaccgagcagctccctggcggagcggatgggtccaagagggttaggattcttgcgcgggcctcccaaagacaggacatccgcagtgtggtatgcaaagtctggtcactgcacggttactagagtttcctctgcttctgcctgcggtgtgcttgtattttgttgttgttgaagcaaccatctcgctgcagttattatcttaattttatctactatgtagcagtgtgtacatttctttctcctgcgaactccatactggttaatttactatggattcacttgct

SEQ ID NO: 27228 - DNA, 338 bp, Zea mays
  Clone ID: MRT4577_124843C.1
ttccgcctttgggatgggatccatattactgggggcgaagcagaaacgactatcaggacacctaagacgaaagcattacaagaaacacacaggagagactccaaagtcctagaccatataatgcttgcactagtgttgccaacactataagacgatagctagttaatcgaagatgctaagactaacaagggaggaaggctctagctgccatacagtttgggtggtcacatgagaatccacaaaaaatcttcactgtaccctaaatagactcttcattcaagaagagttggaaagcctgcggtcaattgacatgaactgggtccgaatatgctgattat

SEQ ID NO: 27229 - DNA, 158 bp, Zea mays
  unsure (1)..(158): unsure at all n locations
  Clone ID: MRT4577_124844C.1
gcggtgctgcgccgggggcgcagngtctcgcaggcgcctcttcttaccgtgtcaaggggctgatgtgggnnctctggcgnncgccggcgttcgcgcccgctttctgcttgagnaacggnnacgacaagggctttgcggctgcgccgcccgtcggggtg

SEQ ID NO: 27230 - DNA, 625 bp, Zea mays
  Clone ID: MRT4577_124845C.1
cccacgcgtccgcccacgcgtccgaccagtgcgaccaccacacacaagggtggtgccaaggagccgcactgccgacctgagcccggcactgccgatcatgtccacgccccgccgccgcctggtcaccgcctcaccgtccctccgcttcctcggcctgctcaagcaacccgaccacgccagcgcccaggagctggagctcgacgagcgcgacgtcgtctggtcctcctcctccagcgcggcctcctcgccctcgccttcctcctcgccgtccccgtccgccagcctccggaggccggtctccgcgccgtcctcccgccacttccccgcgggcagcatggggctgtccgcgctgctcgccgacgaccatcaccaccagcgcgcgcccaccgcgcccgtccccgtcgtcgcgcgcccggagagacagcagcagcagcgcgccccgcagccgtaccaccgctcggctcccgtcgccgtgccggcctggcccaaggcgatgcagccggcgacggacaggcgccgccgggaagcggagctgctgcaggccgcgcccgacgacggttacgatgacgccgagcccgtggtgccgccgcacgagatggccgcgcggcgcgccgccgcggcggcg

SEQ ID NO: 27231 - DNA, 578 bp, Zea mays
  Clone ID: MRT4577_124846C.1
gccagggaggctccggcctgccagccatgtctcaaatccaaagcttctcgcggaacaactgtgtgctccttgtggtgctgtgtgggaagtatgctgagaagcgagcaccagcagcgaagtctgggctggaggcgaagcggccacggccgtcttacccattcccggagctcagctcagctgggcgattggaggtccacacactgtttaatcctacaccagagcagttcctcgaggcgcagcgggtggtgcagcccaacttcttgtacatccagggtcagcagcttgaggatgagaaggagattggctcacttgtgtggggggacgccgatgtctctgatccgcaggcgtttagcactcttatcagcccaccattcccaacgatagtatatctggaagttcctattggtgaaaaacttgcccaagcagttcactcaaaggggatcccatatgtaatttactggagaaattattctcgtcttatgccgcatctcattttcgccatgcattgatgtcagtagttcaaagttcggtgagccatacttgggatgcttttcagcttgctcacgcatcctttcgtc

SEQ ID NO: 27232 - DNA, 196 bp, Zea mays
  Clone ID: MRT4577_124847C.1
gggcaaaaccaaaaaaatttcctggtccatcaaaatcagtttaggcaaacgacattacgacgagggcaaaccccccctcggcaaaatctagagggggagaaaaaaaaaaaccgtttttttttggttttggggcccccacaaaaaaaacacctgagcagttttggagcaaacaccaccatacatttattgggaccgt

SEQ ID NO: 27233 - DNA, 317 bp, Zea mays
  Clone ID: MRT4577_12484C.1
actagttctagggtcgactacgagaagaatgtatgaagcaccacaagcacatggagaagctcggcgagctcggcgccatcgccgccggcgcgtacgccctgcacgagaagcacaaggccaagaaggacccagagaacgagcacgggcaccgggtcaaggaggaggtggccgccgtcgccgtcgtgggctcctgcggctttgctttccacgagcaccatgagatgaaggactcctagaagcacgcccactactgattcgatttatggtagttgttcatttgtttctttcagcctgtgttttttttatttgttgccggt

SEQ ID NO: 27234 - DNA, 350 bp, Zea mays
  Clone ID: MRT4577_124850C.1
ttttctacatacccccatcttcttccttaccctcatcacagatatcatattctcctcatctttctctctcccatcctccctattatttattggaggctacttattgatggtatcttaattatttttcctctcatcttcctccttttgaaggagtacattttatttttgccagcgttcctgtagtactattagtgcttcctaccccttcttctctggctacttacttcttctgcatctctttccctttccccccctctctggcctgcttgccttctacatactcttattcctctgaggtccgtctctcctcttcccagttgtccttgccttccacctttttcacctacccc

SEQ ID NO: 27235 - DNA, 339 bp, Zea mays
  Clone ID: MRT4577_124851C.1
tcgcggacgcgtgggcaccaggtcaccgaggctttcctaaaatgttacgatgctctttctgctgcaccatgtggtgcgcgtgcgcgacactatgcgggtggatcgaagaaagaggggcacgggagcgagctacgccaagacacggccatggcaaaaaggaggtactggccaagcttcggtgcatgatcaagaggcggtaactcttgcagccacattgcgccgcgcgccgccttcagccgacccgggggaggaagaacgctgtgccccgcgccgctcggtgcaacacggtgcggactaagggcctgaggaacggcaaaaccggtactctcgcaagtgggg

SEQ ID NO: 27236 - DNA, 276 bp, Zea mays
  unsure (1)..(276): unsure at all n locations
  Clone ID: MRT4577_124852C.1
cccacgcgctccgatatatccaatatatcttaataaattactccacaatatttatattgaccaaatattatctacacattgattcttattaatcaaacctaatctnacaatcattcaaatcttttctattaataatctaatcttaaacatttaaaaaaattctacatattaccaaataactcctttttctcaaaccatatttcaacaatttccataacttacctttcattaacacataccaacttcttttctttaacatttctttatcttataaaa

SEQ ID NO: 27237 - DNA, 509 bp, Zea mays
  unsure (1)..(509): unsure at all n locations
  Clone ID: MRT4577_124853C.1
ttcgggattacggtgaaggccatggaggtgcagccggagctctcgctggggtttgctcctgctgtgaaaattccaaggaggtcgtcctccaactcggaaggcagcggtggcggcgccgggaacaagaggaagcactttgcctgggagtcccatggcagcagcctggacctccagctcggcgatccccttcccctggactgggagcagtgccttgacctacactctgggaggatgtactanccagannnacaggaagaccaangaacaaagaagctggggatagggcccgagttccaaaagaaggagcaaggccaccctgaaacctgggaactcggnatttccacgaaccccggaaaccttcaaaaacccacaatccggggggccacatggggggccgaaacccgggggaaaatggcccccccccccttttatgtgtgtgggggagaaccccccccccggggggcgccccccaaaagaaaagggggggggcggccccccccccccccccc

SEQ ID NO: 27238 - DNA, 149 bp, Zea mays
  Clone ID: MRT4577_124854C.1
ggattggttgacctctgccagcacaaatgacaaggactcgggtaattttgagcccaaggcgctgaaataaccataaagcacaccatatacaacttaagacatttcactaatttttgaagagctgcgaccaagcgaggagcctgtcatta

SEQ ID NO: 27239 - DNA, 313 bp, Zea mays
  Clone ID: MRT4577_124855C.1
ccggaatcaaaagcaggggtgctcgacgcggctgaagacatcgatccaccgggtcaccgcgccggagtgaaacccggttaacgcgtctgacgcggcggtggggcgcatctacttccgcaaccgcgccgcgtacgtggacgcggacgcgttcgactcggaccatgagatccggcagcacgtcatcggctccgacgactacaccgcagacaagactctccgcatggacggcatcactcagaaggcgcgcgccatctgtggcgatgccatgtccgacaccgtcatgcgcagcctgaagccctccgaggtcgacgtc

SEQ ID NO: 27240 - DNA, 276 bp, Zea mays
  Clone ID: MRT4577_124856C.1
gtgatgtgatgtgagtattatatgccttaaatctccttatggatggtgtgttgtggctgctgattgtataggaattatcttgttttgtactgtaaagaggtaaacaaccatacaagtgatgatttggttgtttgcggtcagcctaaaaaactttagtaatcaattacttcgtgcttgttaaggttaaacatttggtagggtgcatgtatgtttgtctaaaaattcttaatatatattttgctatggtttgtaaacatactgcagtagaaataagca

SEQ ID NO: 27241 - DNA, 276 bp, Zea mays
  Clone ID: MRT4577_124857C.1
cgcctgcggtaccggtccggaattaattcccgggtcgacgagctcactagtcgcgcggccgcccttttttttttttttttgactgagaactgactgctttatttatttgccacaggtggattactcagcgagaacatatctaatgcacatggaagattggtgcacatgctgcacatattaaatcatcaccactcatttgagatctaactctactagttggatgggatattttgctaaaagcaccctccaacgtggtggtgtgtaggggtcaaagcc

SEQ ID NO: 27242 - DNA, 295 bp, Zea mays
  Clone ID: MRT4577_124858C.1
tgggaatccggttcgggcccaaatttgaagcccactaatggtcccccggccaccccagcataaaccggggggctctttaaaaggctcgggggggggacaccacaccccatcaaaatcaatgccagggcgccccgtaactgcccaaggaacctacccagcctagccccttccaagggacccagcaccattcaatccgtgctagaaaatacactctacggacacaatggctgcaccaggggggcgaggcaccaaatcctaggagggcttatgaaacagagctgcatactgatcttcc

SEQ ID NO: 27243 - DNA, 178 bp, Zea mays
  Clone ID: MRT4577_124859C.1
gctgcctcctctgtagcacgccgctggccgcccctcctctgcagccggctgcccctcgtatttatcacattgaccgactatgttttttggtatactggtatttctagacacatttttgactgctgacacaacattttgcggacgcgtggtcggacgcctggtgcggacgctgtgggca

SEQ ID NO: 27244 - DNA, 405 bp, Zea mays
  unsure (1)..(405): unsure at all n locations
  Clone ID: MRT4577_12485C.1
aaagcggaggggccacccacatcccctcttaantttactcttacatccacgatttaaattttcactacatcctanctagaccagaaactttcaattttaccatcacatatcaataaaccattccttccttcctcctgccgtacctccattatcgccatcgattcatactcttactatcacatactattagacccataattattcatcatgtcagtaattcagtatccaaacaattatattagattggcatactattataatactaccttatattacaatgtactcccttcaccatttcattcatttattgtccaaacaatttgatacatttcattatattaaaattttattatatatatcttgtgctcttagaacccaaacttagtattttatacaacattttca

SEQ ID NO: 27245 - DNA, 417 bp, Zea mays
  Clone ID: MRT4577_124860C.1
acggcggcccccccggcgggcactcggggccctggtgttctatccaaacttgcaaggtgtgagggatttatgtgtgttgtaagcctaatctcctctcccgctgcctcttatttggctctgtccacagctgtgtgcgctgtttccctgtgtttgctgttgaccacagtcaccacgttcaccgcaccctagcctgaacattctagggtgttgctggcctgtatgaagcttgttccttcaccgtttcagaccttccagcaaaaggagtgttaattaaagatgaagtggtcttgcaagatgagtttgcttcattgcatgttcatcaagtggctggggctatctcactgcgttttgggttgaagatctagaaccttttcattgcgatttggtgatgagaagtgcctcggccttgaccacgct

SEQ ID NO: 27246 - DNA, 684 bp, Zea mays
  Clone ID: MRT4577_124861C.1
ctctaagaccccaactgctatggccaaagccaaaaaaaaccagtgggtgaagagcataaagttggcaggtaattaagagctagcatatccttgcgcgcagtgggggagatatagcacaattagcttagaaatcattgatgacacttgcaaaaatgctccttcgcccctgaaaaaaagctgagcccacatcagtctagttctgctccttctctgaactgaagccatacgcgaaggcaagactagagggcgattttgggcacgaatagagagatggcaagctccactgcgattgcgactgcgcgcgcccatgatgctgctgtttatggcgcggcagggacccactccaatctgaggagttttcttgacagtgttacgccggttgtaaaggcgcacacggtccctatggcatcctaccttccattgtcaaacggatattatgaaaagattgcagatggggttagatgtttctaccttggagatctttggaattcattctatgagtggagcgcctgtggcgttggtacttcagtgtgcatcgctccgggtgagacagtggttcaatacttcgtgccatatctttcagcaattcagttgtacaccaacacgagaaatgctcctgtttcacaaagcatgatttatgatggaagattcgatcggaataaccattatagtgtcgggatgtac

SEQ ID NO: 27247 - DNA, 239 bp, Zea mays
  Clone ID: MRT4577_124862C.1
tctcttttaggatcatcacacttatctagcttgtacatgtggcccttgtgtatgcacgagcgctttcttagttgagtatctagacttgaaaataaggatacttcaaatcctcggtaatgtatcgtctgaaatacagtttgaagtagtattgaagcggtgacaatgatgattaaaaaaaaaaaaaaaaaataaaaaaaaaaaaaaaaaaaaaaaaaaaaaaaaaaaataaaaaataattg

SEQ ID NO: 27248 - DNA, 170 bp, Zea mays
  Clone ID: MRT4577_124863C.1
ccggcattcgccccaaaaaatcgagccgaaaaagatcaaaagataaaaaaagaagacaaaaacgctaaccactccgatcgaatcatccgaggccgcagcagcccgggaggctatgctcaggaaccgccgctccgggatgcttccctgggaacactcgggcgcattcgctt

SEQ ID NO: 27249 - DNA, 261 bp, Zea mays
  Clone ID: MRT4577_124864C.1
gtaataataatgatagaaacaacagagacgggatcattgaaaaacagcagcatcgagcaacatcatgtcgatgaccaagagatgcatggacagatatgtaatactacatcatatatatcaacgtacgtacgtatactaccagcttgatgaaattatacagcccacaaaacgaccgatcgaggggcacgtaatactaaaaaacactgaaacctctgggggacacgcctggcacacaagatggcgaggaggctgggggaaatg

SEQ ID NO: 27250 - DNA, 616 bp, Zea mays
  Clone ID: MRT4577_124865C.1
atcttcttcctcccccacatcgcacttcccctgcttagattcctccctccaccgaccggcaaggcctctctcctgcagttccctcgcccaaggttgcaccagagaaggcgagaaacatcgccgtttgcgagatcgtggagcggtagagagagatggccgagacggtgttcgctccgtgtttggaagggatgaagcatgtcaggtcggacagtggggtcatgctcgccaagcccttccttgatgtctgcaagcaaatcttgcctgtcttggataaatttggtgctgctatggcaattgtgaagagtgatattggaggtaatatcacgaggttggagaacaagtactcttcagacccgacaaaatatgagcacttgtacaccatggtccaagaagaagttgaaaagaagaccgcaaaaggttcatcaagctgtacaaatggacttctatggctcacgagggcaatggacttccttgttgaactgttccgtaatctgcttgaccatccagactggactatgagtcaagcatgtactgattcatacacaaaaactctgaagaaatggcatggctggctcgccagctccagttttacggtggctatgaagcttgctcctca

SEQ ID NO: 27251 - DNA, 299 bp, Zea mays
  Clone ID: MRT4577_124866C.1
gagagggtcaatacacagagggcattcacttaaaattaacattgacaatatttcattacaccttaatgcctctacaaacttaattaataacaaggctaacatctatctttgatctaattacatgccacgagccataactctatcttgaatgcttaagtaattttgattctgcatctcattcatcgcaccttaaaacaaacaacattattctatcttcttatacactcctcttcaagataatacttatttgcctcgtttgccacctccttctcctttaactcaatcctctacctttttac

SEQ ID NO: 27252 - DNA, 553 bp, Zea mays
  Clone ID: MRT4577_124867C.1
ccctcgagggttcgcgggacccgcttcagctgctcgctcctcctcgctcgctcaatcgctccacgtgctggcctccctgcacaaaccaccaccaccaccaccatacaggatcgcagcgcggtgcgcgagagaggggtcagctggttggccaagatgagggagatcctgcacatccagggcggccagcgcggtaaccagatcggatccaagttctgggaggtgatctgcggtcagcactgcgccgactgcacgggctactcggcgacctcctagctgcagctcgagctcgagcggatcaacgtctactacaacgtggctgggcgtgaccgttacttgctccgcgccgtgctcatggacctggagcccggcaccatgcaatccatacgtgccggccccctcggaggcatattcccacccgacaacttcgtatactgccagtccggcgccggtcacaactgggccaagggccactacatcgagggcgctcagctcatcgacttcgtactttgactttgtgctgccggcggccgttaattgttattgtcttccagtt

SEQ ID NO: 27253 - DNA, 296 bp, Zea mays
  unsure (1)..(296): unsure at all n locations
  Clone ID: MRT4577_124868C.1
anacctgttccatcattttttttttaggcaaacnacatttcaacgaggggattcctccactcgaaagaaggtttatatattcaaataaaaacanttcttttctgcttttaatgcttccactacaaaatcaccttagtagctctctagcaaacaccaccattcatttattgctaccgtacaaacatttttacaaaatgcatcatcgagcttgtatatcttcacatgaaaacattcccatcctctttctttcttaataagtcttcactgattcccttatcttttctcccacttatacc

SEQ ID NO: 27254 - DNA, 424 bp, Zea mays
  Clone ID: MRT4577_124869C.1
aaaagggaagaaaaggcactttttcttttaaaaaaaccaccatttttttttttttcccgctgggccaaaaaagggccgggagtacctgatcccattttcaatttttttcccccctgaatgaatccttccaatgaagggctttttcgccaaagggagggggaaatatttttttggtttgggcccgtttgacttaaccggaatccccctggtgctaataagttgcttaagaggacagggaggtgacccttacctatctcccatccccgaaaaattgaccttttggcacttaaacccgacctccccgggggggccggggagaacctttttgttgcccatttttacctaggggggggggaatccttgtaaacagagggtgggggggggggggtaaaagccccaaaagccggccttttttttttccccc

SEQ ID NO: 27255 - DNA, 165 bp, Zea mays
  Clone ID: MRT4577_12486C.1
atgtgttctgttgtaacgaacatgcagccatcaattgctgacagtgagcaaatccgaagccaaaggcagtatcggaggttgcttacatagcaaggcttgaaatagatgataaaatgtctgcacgtccaagtatataaaccaccaaagctgatttcattgaatatg

SEQ ID NO: 27256 - DNA, 421 bp, Zea mays
  Clone ID: MRT4577_124870C.1
cccacgcgtccgcccacgcgtccgcccacgcgtccgcccacgcgtccgcccacgcgtccgggaagttctggtgctatttgcacatatatcctctctatacacttgtaaaacactgacaattctgtatttgtatgaagtatatcataacttacaaacgttgttattccccagctacactacttgtctgttgtatattttttttttttctcgaaagcgcaggagaactgcgcgatattatattaagcatataggggtttctttttgggatcttctgagtttgagccttttcatagaatatggaaatcttgggctcctccaaaaaccaagttttttatgtggttggtcgcacacaggaaggtttggacggcagatagactgcagaaaaggggtatggaccatccaaagagatgtccactatgtg

SEQ ID NO: 27257 - DNA, 282 bp, Zea mays
  Clone ID: MRT4577_124871C.1
gaaccagctggttatcctcttgcacgttcgctcatgtgcacatcccgtgttagcatcgatggcgaggtgaccattcgagacacacagacacacctacagttgaagcccaaggctttcttccttaacaaggcccactacacctcggattcattgttagtcatcaaacgactttcccttaatgatgtgttctatgaacaaaacacaccctgttaggtttaagtctaatttgtttactatgaataacgcgtttgttgcattccacacccactgcccctttttgct

SEQ ID NO: 27258 - DNA, 2020 bp, Zea mays
  Clone ID: MRT4577_124872C.1
aaaaaaaaaaaaaaaaaaaaaaaaaaaaaaaaaaaaaaaaaaaaaaaaaaaaaaaaaaaaacgcgaccgccacctccccgaagctgccgggaccgatcgagcgaagcgtcgttccccgcgccgccgccaaaaccctagcttttcctactccatggccactgtctcgctcaccccgcaggctgtcttctccacggagtccggtggcgccctggcctctgctaccatcctccgctttccgccaaactttgtccgccagcttagcaccaaggcacgccgcaactgcagcaacatcggcgtcgcgcagatcgtcgccgccgcgtggtccgactgccccgccgctcgcccccacttaggcggcggcggccgccgcgcccgcggcgtggcctcctcccacgccgcggctgcatcggccgccgccgccgcctccgcggcggcggatgtcagcgcaattcctaacgctaaggttgcgcagccgtccgccgtcgtattggccgagcgtaacctgctcggctccgacgccagcctcgccgtccacgcgggggagaggctgggaagaaggatagccacggatgctatcaccacgccggtagtgaacacgtcggcctactggttcaacaactcgcaagagctaatcgactttaaggaggggaggcatgctagcttcgagtatgggaggtatgggaacccgaccacggaggcattagagaagaagatgagcgcactggagaaagcagagtccaccgtgtttgtggcgtcagggatgtatgcagctgtggctatgctcagcgcacttgtccctgctggtgggcacattgtgaccaccacggattgctaccgcaagacaaggatttacatggaaaatgagctccctaagaggggaatttcgatgactgtcattaggcctgctgacatggatgctctccaaaatgccttggacaacaataatgtatctcttttcttcacggagactcctacaaatccatttctcagatgcattgatattgaacatgtatcaaatatgtgccatagcaagggagcgttgctttgtattgacagtactttcgcgtcacctatcaatcagaaggcattaactttaggtgctgacctagttattcattctgcaacgaagtacattgctggacacaatgatgttattggaggatgcgtcagtggcagagatgagttagtttccaaagttcgtatttaccaccatgtagttggtgggtgttctaaacccgaatgctgcgtaccttatccttcgaggtatgaagacactgcatctccgtgtgcaatgtcagaacgacactgctcttcggatggcccagtttttagaggagcatccaaagattgctcgtgtctactatcctggcttgccaagtcaccctgaacatcacattgccaagagtcaaatgactggctttggcggtgttgttagttttgaggttgctggagactttgatgctacgaggaaattcattgattctgttaaaataccctatcatgcgccttcttttggaggctgtgagagcataattgatcagcctgccatcatgtcctactgggattcaaaggagcagcgggacatctacgggatcaaggacaacctgatcaggttcagcattggtgtggaggatttcgaggatcttaagaacgatctcgtgcaggccctcgagaagatctaagcactctaatcagtttgtattgacaaaatcatgaggtgatggctgtcttggatcttgtcaagatctgtgacaatgatatgagctgatgactgcgaataagttctcttttgcttattttatccgtcaaattcaaaaaaaaaaaaaaaaaaaaaaaaaaaaaaaaaaaaaaaaaaaaaaaaaaaaaaaaaactcgagctggcaccatgtatttgtagttttgctttaaagtggtgacctgactatgtgggatgaggtcactcttcccttcaattactgtgagattcacacatttaataatcttgataataaaaatgagaatcctcacaaggaatttgcat

SEQ ID NO: 27259 - DNA, 855 bp, Zea mays
  Clone ID: MRT4577_124873C.1
aacgtaccgatgaacgcactctgacggtcttgccagtttgccactacaaataagccgcaccgcatttcggaagaccacgcgaccgccacctccccgaagctgccgcgaccgatcgagcgaagcgtcgctccccgcgccgccgccaaaaccctagcttctcctactccatggccactgtctcgctcaccccgcaggctgtcttctccacggagtccggtggcgccctggcctctgctaccatcctccgctttccgccaaactttgtccgccagcttagcaccaaggcacgccgcaactgcagcaacatcggcgtcgcgcagatcgtcgccgccgcgtggtccgactgccccgccgcctccgcggcggcggaggtcagcgcaattcccaacgctaaggttgcgcaaccgtccgccgtcgtattggccgagcgtaacctgctcggctccgacgccagcctcgccgtccacgcgggggagaggctgggaagaaggatcgccacggatgcgatcaccacaccggtagtgaacacgtcggcctactggttcaacaactcgcaagagctaatcgactttaaggaggggaggcatgctagtttcgagtatgggaggtatgggaacccgaccacggaggcattagagaagaagatgagcgcactggagaaagcagagtccacagtgttcgtggcatcggggatgtatgcagctgtggctatgctcagtgcacttggttccggctggtgggcacattgtgaccaccacagattgctaccggaaaacaaggattaaaatggaacctgagcccccctaagggggaatttcggatgacttcatttagcctgctgtgacatggatgctc

SEQ ID NO: 27260 - DNA, 580 bp, Zea mays
  Clone ID: MRT4577_124874C.1
acagagttcatgaaacctttttaactgtttagattatggaaaggaatacaacatcaaattccaaggaatggtgatgcatcaattgtttattcacacaactcctatcacctaatgcagcatataagtgataaaagtttttaaaataaaaggaggtgtcaaatgcatcggggattgcctgggataacactatgttagtgtttgttagatgacgtccacttggcgagcatctcacatcctgggacttgatcagatcatccaatcttcaggtgcatgcattagtatcaccttgcgaagatgcccacgcttaatggtatcttggggtcgactcagctctggtcctccgcatcacgtgatcaattaacgtaccatattgcaatttgactcgatcatcacacgaacgacgacgaatcgaagtcttcgaccgaacacttgaccagcaatgcacacgggcctcacttcttcactaattgacctcagatttctcctcctcgatcgcacacaagaacacacaatattaacatcaaggaattaacatcggatggggaaccaagcattaactatggttcgacagcgacgatgc

SEQ ID NO: 27261 - DNA, 1112 bp, Zea mays
  Clone ID: MRT4577_124875C.1
ccggaacgcattcccggcatcttgtgggacatttggatctgtaccaccgtgctgtcccaaatcatatgaagataagtgaagcactccacatgtgaatcgttatgctctccacttggttttgatgcagagaatgctagagaggaccttgggatccatcacattgtggttgatgattggaacaaaggagttgatggtgaacaaaatgttgttttgatatccgttcccagtgttcttagcaaggacctggcaccgcccggaaagcacattcttcatgcatatactccagggacagaacctttcagtttgtgggagggactggacaggaaaagtgcagaatatcgaagactgaaggaagaacgttctgaggtgatgtggaaagctgtggagcttgctctcggcccaaaatttagccgcgaaaaatgcgacgtgaaattggtcgggacaccgctaacgcacaggagatttctccgaaggaacaggggaacctatggtccagccataaaagccggagaagccactttccctgggcaagcaacaccgatcccccagctcttttgctgcggtgactcgacctttccagggatcggagtgccggcagttgcggccagcggcgcgattgtggcgaacacgctggttccggtgtcgcagcattcagagctccttgacgctgttggaatctgagtggcagatacgtccgtcggtcctgaacgataatcaaagattttcccactgctgttggaaaaagatcgtatggctgaatggagaagaagacgacgacgacgaccgatacagtagagttttctagtcagaacggagactgggaaaatatgttgtacagtatattatttactacgactgcatgaagcttgtgctgcttctgacaaattggtcgcctcgttcgcctgcatgctccttgtattgttctaccgaaagctctgtggcgcatgcaggccttttgtcggacattttttttttctggtatacggaggaaggaccatgtgcttgtttgtacaactctagtcgcagtttgctgaagtccttgaacgacggcaacaaatgccagctgcgctgtcttttcattggagggcagcactggcctggttgttgtttat

SEQ ID NO: 27262 - DNA, 679 bp, Zea mays
  Clone ID: MRT4577_124876C.1
acccacggttccgcgatcagcaacacccccccagtcttttgctgcggtgactcgcttttccagggatcggagtgccggcagttgcggccagcggcgcgatcgtggcgaacacgctggttccggtgtcgcagcattcagagctccttgacgctgttggaatctgagtggcagatacgtcctccgtcggtcctggctgattagcagatacccctacatacacagaagtacagaacgataatcaaagattttcccactgctgttggaaaaagattgaaagaacgtatggatgaatgaataagaagacgacgacgacgactgatacagcagagttttctagtcagaacccagactgggaaaatatgttgtacagtatattatttttactacgactgcatgaagcttgtgctgcttctgacaaattggtcgcctcgctcgcctgcatgctccttgtattgttctaccgaaagctctgtggcgcatgcaggccttttgtcggacatttttttttctggtatacggagaaaggaccatgtgcttgtttgtacaactctagtcgcagtttgctgaagtccttgaacgacggcaacaaatgccagctgcgctgtcttttcattggagggcagcactggcctggttgttgtttattattattattattattattaaaaaaaaaaaccac

SEQ ID NO: 27263 - DNA, 624 bp, Zea mays
  Clone ID: MRT4577_124877C.1
ccggccgggatcaacgctcactgcatgcctcaccctctccccgccatcaacgcgccgcagatcccccaccctctccccgccatcaacgcgcaagcggatgccacggatccgcctatccgccataaacgccgatccatagatccacgctcgccctgcctcctacgacaccaaccgaaccctcaacctctcctacgacaccttctccagcccgctccccgacgacatcgagcgcctggctttcacagcggcgggacatggaggatgaacgagcaccgggagagagtcggttagatctaaatttccgtggaggtgagcttggacgaggtcaggttcaaacaggcatatctctgaacaccttgggttctctaggctatgagatagatcatggatcgagatggagaatagcagtgagtcattctaaactgggtgatcagccgaaaagatcccatggataatcattaatgattatgtgcttgatcaaacgagaggtactgtcatatccagccaggttgtttctaatttaacagagggagggaaccaacaaaggcactccatgggggaatggttgtggccaggtttgttaatggtggtgcggctgcaagcgtcgtgggccatctgtcgcga

SEQ ID NO: 27264 - DNA, 822 bp, Zea mays
  Clone ID: MRT4577_124878C.1
atgtcagcctatatcctgaggaagtttgcagacttggttgggcaaggagtaaaaacggataaagggttcaaggaggtccatgtcaactctgttgccaaggcactgactgaatttagtggccaagaagtcacaggcacccaagtctacaatcatttgaggaagtggcgtcaaaaatggatcagggtttgtaggctcaaggacctaagcggtgctcattgggatgagaatacattcacaatcatccttgatgatgaacacctcctgggccatacaaaagacaacccaaaggatgctgaattcctcaatgtgccaaatgaaaactatgtgcagatgcaaattatatttggagctgggcaggctactggcaagtatgccatggcttcaaatgagccccttggcaccatctcggatatcactgaaggtgctggtgcatctgaagaaccatgtcttgttggtactggtgctactgcctctggttctgttggtgccaacccttctcatagtggtgctggtgctggtagttcctatggatcaaatggaaagaaaaggagactcagtgatgaagagcttgggattatggcaggacttactggagctgtgaacaaattggctgaagcagtccaagcacctgttgtagtccagaccacagatgtccaccctgatctgtatcaaatttgcatgagtattccaggtttcactaatgaggagttgatgacttgccttacctacctattggacaacaaaaggcaaggtgatggctttgtgaagatggagcctaaacaccgtgtgctttggctaaggcagcaccttgcaaagatttga

SEQ ID NO: 27265 - DNA, 282 bp, Zea mays
  Clone ID: MRT4577_124879C.1
catgtaaatatacctctttggtgaaaaacagaccacactaggtgtacaaccgcatgtaattaaagacttgcccaaagccccagcgctgattatttacctctaacacccacctaacactatgaacatggtacttcagaactcatactgagccgatccgactccaatcgcgcaaagacatgtttgtgtgttacacatctgctgcttgaagcctgcatcaagcggccgggcattcgctcgcttaagccctacacgcaacctggtcccaggggcatgaacatcggg

SEQ ID NO: 27266 - DNA, 204 bp, Zea mays
  Clone ID: MRT4577_12487C.1
atccggttgaagttaacggcggcaattccctgacttgagaacgggttgcccgaccgcggtccggagatctctctgacacccctttctttgcgctgagagcccatatctcgcgtatctgtgtaaaacgatggggcgacagagggggaggcgttgtgcctttgtgtaccaggaggaggacgatatactgatgctcgctgcggacgt

SEQ ID NO: 27267 - DNA, 295 bp, Zea mays
  Clone ID: MRT4577_124880C.1
gtggtggggagggaaggcctcctgaattgagtttgatgcagagctttttagccatgaagaatctttcagtcatagtactaataattaaattttcagtatttaaaaagacaaagtattttgtccatttgagattctgcactccatgaaaagttcacttggacgctggggccaaaagctgttgattttcttaagttgacggttgtcaatatatcgaactgttcccaagttagtcaagtatgtctcaacactagcatgatataaaaagggacactgcagctgaatgaaaaaggaatca

SEQ ID NO: 27268 - DNA, 447 bp, Zea mays
  Clone ID: MRT4577_124881C.1
aaaaaaaatggggccttttttggacacacccaaggggggggggttataggagcccaatcctgttagggcaacccttgggggggtccaaacataatttaaggggaaatgttaattccagaaacacactgggacaaacacccaaaagggaggtggggcatttacaaattttgacaatgctgggaaaaaacccccaaaacttttttggggggggacccaaacttggaaccacaggattgattaccttggccggcatcactacatgatctcaaccccaggtgggcctaaaaatttgccctggaggaaaacccaaaaggggccattcgcccccccaaaattgcatttccttgaaaagggggtctggaaaatgaaggccccactttccggggggtttattttttgaggaagggtttgcctggcccttgccccatataaaccaaagattttcac

SEQ ID NO: 27269 - DNA, 298 bp, Zea mays
  Clone ID: MRT4577_124882C.1
agtaaaggactcgcatcatcccatcaaccctttcatttcacctaatgccatgcgatattatctgagggtttacttcaagagcacaggggatacatacttttcacttctcaagttgtctcttaccaaggctaatctataccttcaagatcttattgctcacaaacatgctattcctttccctagatactgacctgctgttactcataccgttcaagctaataatcaccacttcaatgttcacctcctctagaccgttaaatcatccagttccattctactatagcttaaaaatgctcat

SEQ ID NO: 27270 - DNA, 1977 bp, Zea mays
  Clone ID: MRT4577_124883C.1
tgggaccctcgaggccggccgggaccctcgaggccggacgggaattgctttataaataacataacatacaatataaaattgcatcgtgtcctctccttcctgacattggcactggcagctgcactcaccggcagccatggaagacttgctctactactccctcaccatagccatctgcatcgcagtcatcgccctcctctccatccttcgttcgttcaccgctaccggaccgccgccggcgctcccgcccggcccgtcgctgctgtcgctgatcaccccgctcctcttcctcggccgaacgaacttcggcatcgagcggatcctctccgccgcgcggtcccgctacggccccgtcttcacgctctacctgctcccgtcccgcccggccatcttcatcgccgaccacgccgtggcgcaccgcgtgctggtgcagggcggcgccgccttcgccgacaggccgccggccagcctccccttccgcctcttctccagtggccagcgcaacatcacatccggcgcctacggcccggtctggcgcgcgctccgtcacaacctcacgggcaacgtgttccacccgtcgcgcatgggccggttcgccgccgcccgccgccgcgcgctgcgggggctcgtcgccggcgtcgcgcgcgacgccggcagcggggccgtcgtcgtcgaggggctcctgcaccgggccatgttccacgtcctcgtcaccatgtgcttcggcgagcgcctcgccaccgacgccgtcgtcgcgtccgtggaggcgctgcagcgggagttcctcaagtcggtgctcggcttccaggtgttcgacgtgtgccccgcgctcaccagcctcctgttccggcgccggtggaagcagatgctgtccctccgccgccggcaggaggagctcttcgcccctctcatacgggcgtgccgcgcgcaacgaggctccgacgccaacgccggcgcggacacgtacgtggacacgctactcgacctccggatccccgaggacgggggcaggaacctcacggagggcgagatggtgagcttgtgcgccgagttcgtggccgtcggcaccgacaacacggcgaccgaggcgcaatggatcatggccaacctcgtggcgcatccggagatccaagcaaggctccgggccgagatccaccaggtcaccggcggcgcgggcgtccaggagcaggacctgccgcggatgccgtaccttcgcgcagtggtcctggaggggctccgccgccacccgccgggccacttcgcgatcccgcacgccgcgaccggcatccaagacgacgacggcggtggcgaccacgcgaccatcgaaggcttccgcgtgccgcggcgcgcgtccctcaacttcacgctcgtcgcgctggggctcgacgaggcggtgtggcccgacccgctgcggttccggccggagcggttcctgcccggcggcgagggcgcggacgttgacctcaccggcgcgaaggaggtcaagatgataccgttcggcgccgggcggcggatctgccccgggagggcgctcgctctgctgcacctcgagttcttcgtggccagtctcgtcgccgagttcgagtggctccaggtccccggtgagccggtggagttcgccgagaagcaggagctgtccgtcgtgatgcgccggccgctccgtgccaccgtcgtccggtgcacaaggaacgccaactgaccacacgggttgtcgttgtcgaaccgaacgtctgcacttttctgctcttgtttgttgctgcatgcatgtgcttttctttcagtgaagttcagcgaatttagtaaaaaattcgctaccaaatttcctgtggacttgtggagtcatgttgttagcatgccctgctcttgttggctagaggctttcatgtatttgcactgcactgctctgattgtcctaaaagttataatattaataaaaaaatcagtttttctttaaaaaaaaaaaaaaaaaaaccttag

SEQ ID NO: 27271 - DNA, 157 bp, Zea mays
  unsure (1)..(157): unsure at all n locations
  Clone ID: MRT4577_124884C.1
gacgacgtgtcattcggtggtgattgctgttgtttcttttcttttggcagtttgatgattttttttggggggaatatcaggcaaaccataagcaactcttcagtgcgtccattttacatcgtnaacaaccgggccggcgggtatgttgnacattcta

SEQ ID NO: 27272 - DNA, 349 bp, Zea mays
  unsure (1)..(349): unsure at all n locations
  Clone ID: MRT4577_124885C.1
aaanaaannttttttttttgcacaangcaccgcacaangaacggccccgattacctgggtgaatcgatcgccatcatcaagacgcatgcttcgatttgtatgaagcttgcagctaccgtacgcttctccagtccacgaatctcagctcactgcgctggcagtggcatggatactctccaccaaccactggaatggatacttatactagcctatgtacaacacggtccagtctgacttacttgttctccatgaccagcctggggccgccgccgatggcaatgaagcgctaggcaagcttctaggcggagaagatggcgccctttacaacaaacgctcgggcgactgctgt

SEQ ID NO: 27273 - DNA, 1684 bp, Zea mays
  unsure (1)..(1684): unsure at all n locations
  Clone ID: MRT4577_124886C.1
aacggccatgactacatctcctgttccttcccaagccgaccacgttgccatcttcccgctcatggcgaaaggccacaccatgccgctgctggacctcgcctgcgtcctgcgcggccggggactcgcagccgtcaccttcgtcacaaccccgggcaacgccgccttcgtccgcgccgctctgcggcagggcggggccggcgacgcggccgtcctggagctggcgtacccggccagcagcgcgcccgcgggcggtgagggcgccgagggcgtcgcctcggcggcctccttcgctgcgttcgcggaggccacgtcggcgctccggccgcggttccaggaggcgctcgcggcgctgcgcccgcccgcgagcctcctcgtcgccgacggcttcctgtactgggcgcacgcgtcggccgccgcgctcggcgtcccgagcgtgtcgttcctcggcacgtctgcggtcgcgcacgtcgtccgggaggcgtgcgtgcgggacagaccgggagccggtgccgacgtcggcgcatccgctggcgccaccacgtgctacacggtgccggagttcccgcacctccagttctccctccgcgacctcgtgccgccgccgccacagatgatacacctggatgctaagatggcggcggccgtcgcggcgagccgcggcctcatcatcaacaccttccgtcaactcgaaggccgctacatagagcactggaaccagcacatcgggcctagggtctggcctataggccctctgtgtctggcccggcaatcctactcccccggcggcaccggcagtcaacaacgacacgacgccaagccctcctggatgcagtggttggacgacatggcggctgccgggaagcctgcagtgtacgtctcactggggacgctggcatccatatcacaggcgcagctgaaagaggtgtccgacgggctagacagtgccggggtgaatttcctgtgggctgtgcggcggcctgacaacgccgatgatcttggcacggggtacgaggaccgtgttgttggacgaggcaaggtggtcagagaatgggtggaccaacggcgggtcctccggcacccaagcatccgaggatttctaagccactgcgggtggaactcggtgctggagagtgtcgccgcgggtgtccccttggtagcatggccgtgcgacttcgaacagcctatgaacgcgaagttcgtcgtcgatgagctgcgcatcggcgttagggtccataccagcgacggagcggttggaggtttggtcaagagcgaggagatcgcgacggcggtcaaggagctcatgtttggggaggcaggaaaggcgatggcactgagagcgaaagggatagcagcacaggctcggctagccgtgtcagatggtgggtcgtcatggaaggaggtcgaggagatgattagtgagctacgtctacgtggggtagatatgaatggaaaagccaacggaggtacctgtgcaagcatactgtagtaccgtacaagggataactcaaaaagaaatggtgtgttggatctttgcactactttggttctgacttctgaacctctgctgtagctccttttctaaagtgctttttgtaaagaaagttctcctgtggccaccagagcaaaagcaagttttcaagccgaatttgtacgattggaaaacaaanctatgaattggatttgg

SEQ ID NO: 27274 - DNA, 241 bp, Zea mays
  Clone ID: MRT4577_124887C.1
gcaggggcaggaagcaccatggagtgcttaagattaacttataataaagcctgacgggggtgacaacatacatgtgatccgaaaccatgttatttggtacacgggactgatttatccgaggatgaatacaagacttacaactgttacagaatgaccttgccactaaaaacccagataggcgttattcatttcaagactgatgaatataaaccctctggtataagggaaactcagctgtagg

SEQ ID NO: 27275 - DNA, 438 bp, Zea mays
  Clone ID: MRT4577_124888C.1
aataatttttttttttttttttttttttttttgtgtttttttaatttttttggggggtttacccttttttttttttgggggggggaatttggtcgcgttgaacatgggtcaaaagttcccttacccggggggaacaagaacgaaggggccaatccccattcctggcggagcaaccatcccgttaaactaaaaggggccgggaaaccccctccccaaatggggggggcccatggaggggggggggggttttttgaaaccttaacctaaaggacaacaactccccactcgaaatcggggggcccctgggaaacaacacgatgcccttatgagcccgaattgaacccaacccaaaatgctcctgccgctgggtgttgccctggtcaactaaaataaaatatggcatccttttactggccaaccacctccccgggtgggggg

SEQ ID NO: 27276 - DNA, 335 bp, Zea mays
  unsure (1)..(335): unsure at all n locations
  Clone ID: MRT4577_124889C.1
attaactcgtcatcgtatnacgnagtcctaaatctcctcattctgctgctcctgcccctggtgtatatcatgcagataatcgaggcgtgcgaacacaccgataatgcaatactcctagaatagataaccaccacctaagattttttccccaaggtctacacgcactatcatgccgccatatacctcttggcactcagcggaccatatataccactgcacacgtcatgacttactcatgaatcgtagtgatcgcgatctacctgtccggtctgctcacgccgggcctgctgttccagctgccggcgcacggccgcatcgtcggcttcggcaccatg

SEQ ID NO: 27277 - DNA, 730 bp, Zea mays
  unsure (1)..(730): unsure at all n locations
  Clone ID: MRT4577_12488C.1
ctctctctctttgccccggcccagcctttccggcggctatgtatacagccctgccccgtgctcctctgcccgtgctaccagtgttttgactgcccctgctcttctcctcgtggctgcttctcctcctccttcttcctcagcttgtcattagctccgagatggaggcgcaggatgactgcggaaagtggcgccaaatcccggcgttcggcgattggaacatgtgggaagagatgcccgtcacccagtacttcgagccggcggccaccttcttcttcacggcgcaggcaggggaggacgacgtcgacctcttcaaggtgccccacttcgccgccaacccctacacctacaagaagtgcgtcgtccgagtaaagaagagggaggagaacgagaagccgaacgccaacgccaacgccggtgctatgtccgggaggaggaagaaggggggcaggaagcagcagcagcagaaccaccagcaagggaagaaggagcagcagcaacagaggaggaagaagcaggccccccaggggcgggcggnnnnnnnnnncnnnngnacnannacctctacaanatctcccccaacgngatctgcaangggcanaaaaaaaagntgntgaagaacctgctgggagggtgcctgggcctcaactgcatcgcctgaatcaaacaataatatccgagacttcttatcccgaggtccagaatttggtggttacgaaactaagatcggccg

SEQ ID NO: 27278 - DNA, 185 bp, Zea mays
  Clone ID: MRT4577_124890C.1
catgaaagcttaggcacagatttattaaactggatatttaattctccatatactgaaatactcaagaagaacataatgaatatacacacacatatatatctacatatttattgtaataataccatcaccgttaactacgtcaataacatcacatgaatattttattcgcatctggtaaaagccaa

SEQ ID NO: 27279 - DNA, 1881 bp, Zea mays
  Clone ID: MRT4577_124891C.1
ctctctctctctctctctctctctctctcccaaatctctctaccctctcctccaccccattcatgcctcccggtccctgctcccgacctgcttcctagattggcgggtccgctgatcccatccacccctcctcgtccgctgcgcgggctgcagttctcgattctgttcctctctctctctctctctgatggaggatggcgtatctacttatactgtggatgaggcacttgtgtccatggggtttgggaaattccatgcattcgtgcttgcatactctgggatggctaaaatctctgaagcaatggagatgatgcttttgtcatttgttgggcaatcagttcaagctgagtgggggctttctgcacatgaagaaagcctcataacaagtgttgtctttgtggggatgcttgtaggagcatatgcttggggcatagtttcagataactatggaagaagggttgggttcaacttcacagctattgttactggaggagctggccttcttagcgcttttgctccaaattacttatctttgattgtactgagatttatggtcggtgttggactgggtggtgggccagttttaggttcttggttcctagagttcatccctgctcctaaccgaggaacatggatggttatgttctcagcattttggactgttggcacaataatggaagcttctcttgcttgggccgttatgccagcttttggctggaggtggctgctggcactctcatcattgccatcgtttgccctgctactcttctacccagtgacacttgagtcaccaagatacctatgcatgaagggtagaatagctgaagcagttcatgttctggaaacaatgtcacgcgtgaactgtgtttctctcccctctggccgacttgtctctggccatcgggtggaacttcatgatatcggggattcttcagaaacggcacagttggtgacatctaataagaataacactgctgatcgtggtagcaaatccgagatcggaggcctcagtgccatcttaaagcttctatctccaaacttaatcagatcgactcttctactctggactgtctttcttggtcatgcctttctgtactatggtcttgttctgctcacatcagaactaaatcatggaaataggatctgtggatcagaagagggggcagaagtgacaacaacagcccacatacatgatgagaatctctacagaaatgtatttataacaagctttggagaggtccctggtcttctcctgtcggctgccattgttgacaagatcgggcgcaagctctcgatgtcttccatgctttacatcagttgcctgtgcatatctccgcttatgttcgcccagacggaatcgctgacgaccgtctttttgttctgtgcccgggtttgcatctctgcaagcttcactgttctgcacatctacgcccctgagatatacccaactgctgttagggccacgggtgtcgggtttgcaagctcgattgctcgctttggtggaatcctgtgccctctcgtggccgtcggcctggtgcacgcgtgccaccagatggcagctatcctgatattcatcacggtgatgctggcttcaggcatcgccgtgtcatacttccccctggaaacaagcggccgaaagctgagcgaccacgtcgccgccgcgtaagagctgattaattgaagaactgactttttctgagggatacaccaatacagaatcaaggcccaaggggccattaatttttttgttcagttgttgacaaaggatacagtgggaaagaaagtgcaaaggaggcactagattgttacgttattatactgttgcttctcaatagaaatctacaaaatcactatatgatttttgttctaaaaaaagcggcc

SEQ ID NO: 27280 - DNA, 281 bp, Zea mays
  Clone ID: MRT4577_124892C.1
aataaagctaccacttttcctagttaagcatcttcttgagttgtccgtgttgatccgatggacagcgcgaggagctgtctcgtggacgacgtgagcagcggcgcgaccacgggcaagaaggtctctccggcgtcggtcgcgccggcgaccaagccgctgcagcgtgtccgcagcggggccagcgcggtcatggacgcgccggagcccggcgccgaggcgcactccggccgtggctgggccctgccgtcgctcatgtacgagggcgtggtgccgcaccccaa

SEQ ID NO: 27281 - DNA, 468 bp, Zea mays
  Clone ID: MRT4577_124893C.1
acaaccagtaaccaccccttgtcgaacgcgaggtgatcggaggatcccgtcccacgatgacatctccggccgcagaggcgacgaaaaacggggaagacaacagtgcgcataaaagcagcgctgtacacactgtcgcccttccggcacaaggtgatgacaagcctgtggcaagacatcacctaccagagatccaccacaaggccaccaagaactggatctccgccacaatcctcctcacaccgcgtacgtacaggcacctgacacgactcacaccatagcgacatcttcagcgtgataaactttccgacacatgctatctgcaatgccctccaagtcgttgccatcttgacactccttcaatctttccatgtatgtcgagaatatctgctgtcgatgtcatttctgttgctcacgctataactcagacccattttcgccttctccatatgagtatcacgaccatctgtg

SEQ ID NO: 27282 - DNA, 514 bp, Zea mays
  Clone ID: MRT4577_124894C.1
gacaaagatccctgccagcaggtcgactctagattatattttctacaggtgctaaaggttcaacacaaaccaataaaaacatcaagttagggttcaaaaagaaaggagcaaaagaaaccgaagagcactgttggggacttgttctcaaatgctatgagttaagaacaaggcaacacaaaatgttagtggttaaagaccttcgtccttcgaagcattatctccctaaggatataatgatcttcagacgaaggttatgaaggacataccttcatcatctcagcatataataatggaagtagagaagcatatgaaacatagaaaataatgtgagcaattatcttgaattgtcagattatttatattgtcattatctcatcatgtacaaacattaataacaatgaattacagttgtaccttcggcttgacagaaggtatgagtccaaaagttgacgtgcgagtgaataccagtcagcgtgaatagtacggtgttactggtcatctatttataagcaca

SEQ ID NO: 27283 - DNA, 319 bp, Zea mays
  Clone ID: MRT4577_124895C.1
agaacagtaccattcagtagctcatatttaaatattggcaaatcactgacacatcagtgaacgctagagccgagactaaattctaatggaaaaacctggatatcaactggtagcactaccgaggggcctaacttaatatatatgaattcaagtctccacacttgcgcggtcaccaaaattagagatacctgccatctcttcctgttctgaaactttgctgggaacaggcgcgcagacaattggggagacaatggttgcacggccagttgtccagaactaccatttaagtcaagcacatgtgggggtccaagatgtacta

SEQ ID NO: 27284 - DNA, 156 bp, Zea mays
  Clone ID: MRT4577_124896C.1
gcgcgcacgcgtccgggtatacacataactccaagcggtcgttatttattcttctggatgtcatatttaaggtatacttcgcttgtgtcctacatattatgtatttgtatcatgtatagatacgttttgttttttacttgttctaattataatgta

SEQ ID NO: 27285 - DNA, 164 bp, Zea mays
  Clone ID: MRT4577_124897C.1
ttgggaccctcaggccgccggatccgatcctgcttcttctacactcaaccgcccttgcttcctgcacctgctgatagcatatagaaccacctgctccccggaagcagagagaaaaggagcggcctgccatcgctatgtcatgccgcctaaccccggacgacccg

SEQ ID NO: 27286 - DNA, 391 bp, Zea mays
  Clone ID: MRT4577_124898C.1
gggcaatgaacacgggggggtttattgacttgggagggccggggggcaacgcaaccacacgttttggggtgcccgacgggccccggcggcaaacattagccagagacaagggcacggaccgggggacctatcttggttgtaagcaaaataagggaccagggcgggcaccaaaccaaaccagggacgggcactaataaaatgggacccgtcaataaatggactggaactgtactggactggaccatttccaggtttcgctccatctaattcttgaggagggagtcgtcgagggcggggaaacttttgggggggggcttctttatgacatccgggtcaggcacctggtcgttggccttgttgaaaatttatgggccaattgaagaaggggccc

SEQ ID NO: 27287 - DNA, 1311 bp, Zea mays
  unsure (1)..(1311): unsure at all n locations
  Clone ID: MRT4577_124899C.1
annnnngggttgtttgtctgtctcaccctggagagacaatgttccatctgattctgtaactgttggaaacagttcttatagcaaaatagaaagatccatggccattctgaacactttcatcagtttcataaaggtatcaatgccaagaagcgacttgatcatattgactgatcctggttcaaaaatttcagtaaatcaagggactgctacactattgccagttgaaggaaactattctcgaggaaatttgatgcttcagagaataaagacatacattgcatttctggagcaaaagcttgtggaatttgataggatggagaggttgaatcattttgttttaactgattccgatatagcagtggttggtgatcttggacatatattcaaaaaatatcctcattttcatctggctgttacttttcgtaataacaaagggcaaccgttgaattctgggtttgttgcggtaaggggaaccagggatggcatcactaacgctgtggaattcttgaaacaagtccttggaacttacagtttaagatatatgaaggcttctcgtatgcttggtgaccaattagcacttgcatgggttgtcaagtctcatctaccatcggctttcggaaaattttctaagaatgaagcatttactggtgaagttaatggaacatctgttctcttcttgccttgtgctgtttataattggaccccgcctgagggtgctggacagtttcatggtgtacccttggatgttaaggttgttcatttcaaaggttccagaaagcgattgatgcttgaggcatggaatttctacagctcaacctctaagctgtctgatatgctatgcctaatcttgagaagtggccggacgaaatatgacttctgaacttttgggttaaaactgacacatgttgatactgttcaaagctgttgtatgttcaagtatagtacaaaaaaatgctgaccatgaggctgtcattgcaagaattcagatcagcataaaaaattgctagtagcattcagtatgtaacaaaaacatgtgagaacccatacgagaaccacgcagggtgaccatcgccttgtgttcttttggtttatccctacctgttaaatatgtaatgtggttccccaccaatgtgcgctatgtaggcaatttcgccgtcagatgtcgtcagcagtattaaatagagctggcgctgtttcaatgtgtcaccggcaaaatttgcagatgtttttttttgctgtcaaaaaaaaaaaaaaaaaaaaaaaaaaanaaaaaaaanaaaaanaaaaaanaaaaaaaaaagagggcgggcc

SEQ ID NO: 27288 - DNA, 144 bp, Zea mays
  Clone ID: MRT4577_12489C.1
ttgggaatgcaaaatatggggatctcatatttctgtaaccctaaccttctgaaggcttagtctggtccaaaatatggatgactaggtcatgtttgacggctttagctttctttggtaatggttggccgaaactaatttgaccat

SEQ ID NO: 27289 - DNA, 1269 bp, Zea mays
  Clone ID: MRT4577_1248C.1
cgaggccggccgggaccaccgatcccttctgaaaaatccccctcccctcccctccccgaggtctgcagcggcgaggggagagataataataatcgcaggagggaaaagcagcagcgcaggcgcaaaaagcaaatcaaagccacaccaccaccaccggcagctgccgagagctgcgcccgcgcccgaacacaagggagagcggccggagaggaaagccaaatccatccactccacccccgtacgccgccgcagctctagcagccgccgtcccgcgcgcatgggccccaaatcgccagcgccgcgacgagcgcgcctgcccccgctgctcccgcggcggcggtagcagcagcagctgctgtgtgcctcacatcttcgccggggatggcgcggctcgggcgagcgggctgccgctgctccggtccagcccgagcttttttttcaggaattcctgaagacacattgagaaattttatgtccaatgtcttgcctgctgtattgatcctggagtttctcagtgggaccaatttgattgttcaaacgtttgctctagaagtagtcgcccctgccatgcctccattccaaggttggggaccatttcattctttggcatcccaaactaaagtccttgtgagtgtttctgcacaaccagatgatggcctccaaagacaaaagaagctatattcatcagcagttgccatgtcatccacacatcctcctatttcagcacctagctatcgttacatgcctggtgctttagatcttgccatttattcctcagatctatcacgtcctccagtgcagcataccagacacttagcaacagctgctcctgctcacgtagatgctgaccctccggatgcagcttcaaattctagcgcagctcctttgggattagtgcagcctccagtgtctcctcacagtggttgttgtgcaccgaacatggtacaaaaacgagggacccgggactgccattgtgtttatccagtgagaattgagctcttccttcgtaatgtttccttgacttcagcctgtgaatgatcccacccacatccatccacgagcgtgcgcgtagactgatgcctaggtaaagagaccgagtttgctgagtgctagtattaagttcagccttcatgttgcggtattgtattggttgctccgtttccatctgatcagatgatcatagttgtttccttgatcagatgatgtgtactagacgttttgtccaggttgagctgaagctgtgatataaaatttcattacgttggtatt

SEQ ID NO: 27290 - DNA, 446 bp, Zea mays
  Clone ID: MRT4577_124900C.1
gtagggttcggcaccggcgcgccggccgtggcatcatcggcggggggcaggacgacgaacgtgggccggcccttcgcggggcagttccttggggggaagaccaaaggttctcggggggacgggggtaaaccggtggaagaaaaaggcctggttcaaaccatttttggggcccttgaccaagaagaaccactggtggaaaacgaccccgttcttaaccagggggggaacaagggccagggccgccgccgcccggggcccaaaaaaggcggtgaaaaaggccggaacggggggcttaaccctggggggttttttttcaagcccaaaaaagggggaaccgacctaccgtatggtacctccaactccaatggagatcggtttggccctgttttggctttctggaacgaagtcctggattggaatggaatggaccggttcgatggttgatt

SEQ ID NO: 27291 - DNA, 436 bp, Zea mays
  unsure (1)..(436): unsure at all n locations
  Clone ID: MRT4577_124901C.1
gtgtttgataatgacaagattccaaatttctcggatgtgaagcgtattggtgagannncgaactaccaaggtttattacaggatgtagatagttagtggatatttagttcatgaatgtatatttgacaatatgtgtttcttttcatttttctcttgcagattcactaagttatacatccataatatatgttgctatcattattacagttgtattcattattattattgtagaaattgctatcatcaagttgataggtggacaaattccaatgcccaagttatttcccaccgttaatgatgtgaatgtcataggtgtataaatgagaaaaaatgaataattggttaggaagaccgtcagggacaccactgacaatggctggtcaattccccttggaatttacgcttctctttttttattgcttgaatgtgatcacat

SEQ ID NO: 27292 - DNA, 451 bp, Zea mays
  Clone ID: MRT4577_124902C.1
tcgagcggccgcccgggcaggtacaagcttttttttttttttttttttttttttcttttaaaatctggaaatggaactttttatttttgggtggcccccttccttatccaaaaaactttatttttggattaccacttataagccatcttaaagagggccccccccatgatgggttgttggtaggaggcttctgggtttggcaaaacaaggtggaccaagggcaaccattggtggaattgtaaaaagggtgcggggttaaccccaaactggttgtaaaaagggaacaactggtgcttggtcaaaaaagaaacaccggttggttcaacttgctggctaaatgggaataatatttgcttgtgcaaataaaccacggggttcaatgccggccattggttaaatggaaaaaattgttgtttattaaagaaagccataacttacttgcttaatggga

SEQ ID NO: 27293 - DNA, 283 bp, Zea mays
  Clone ID: MRT4577_124903C.1
ggacggctcatccaaaaccatataaaaacggttgccaacgtggcaaaaccacattaaagccatttggcccccaaacttaacatgggtcacttgggtttataaacttggcaaagaatcacttacttattaagggccttaaaaggtctttaaagcccaccaacgtgggatttcacatcatcttttaaggggagtaaacctaacctttagacacttttttaggggcggactttttttccttacccggttttcttaggttaaagaccccaatttggcccgggggtta

SEQ ID NO: 27294 - DNA, 321 bp, Zea mays
  unsure (1)..(321): unsure at all n locations
  Clone ID: MRT4577_124904C.1
cggccgggccgtgcaatcatatnaggaacaaatattttagagataaatcatacatcacatataaataagtgaataataatttaattgtatcacacatttagttcacacaatctaatagccaaatttgagaattgataaagtttggtattcgatttttttggtatttcggttcggtatacggtgaaaaccgattacgataccgaaaaccgaacttattagatacaaaaaccgaaaccgaaccgaactaccgaaaaaccgaaatttcggttcggttcggtacggttcggttttcggtttatggtaaaaaattgcccaccccat

SEQ ID NO: 27295 - DNA, 747 bp, Zea mays
  Clone ID: MRT4577_124905C.1
cgaaagaaaaaaccatcaacatgaaagttgtaggtattgaagagttatgaaactttgtagttgacaatgttttggtttgaaatcatcttgccatgcaaaactatgtttgaattttgaattttaaatttttcaaactgtctcggatggaaaaatcaccaaaataaaagttgtaggtcttgaaatattatgaaactttgtagttgtcaacttttttatttgaaatcatcttatcattgaaaaattcgtgtgaagttttcaaatttaaaattcaaattttgtaaacggtctcggatgtagaaactattaaaataaaacttgtagatctcaaaaagttatgcaactttatagttggtcacatttttaaatgaactcatttattgccttaaataatcaaattactctcgatttgttatagtacatggggaatgaaatcgtaatataaacataatttgtgtagtagtgtagtggtatagaagtgtatgcgcgagagagaggttgagagttcgaatctcatcatttataaaacatataaattttgattcaaaataatagtgaaaaatgatagagcaattgataatagacagtgttggagagttgttcctagaattttaaaaaatgttttgctgtttttttttattttttcgattcttaatttgccgagtgttttttgacactcggcaaaccgaaaaaagtattcagcaaaaaaacactttgccgagtgtaaaatagcttttaccgagtttctta

SEQ ID NO: 27296 - DNA, 676 bp, Zea mays
  Clone ID: MRT4577_124906C.1
cattgggtacctcgaggccggccggattacaattcgacatctgttcgtattacctccacctatcacctctgtcttggtttctcccctctatcggacccttttctccctccggattcgctgttcactctgatctttccctaaccactgcagccatggcatctaaaggtaaagaaatcggttcaggggccccccataaggccaccgctagaagatccacagatgatctccactccctgcgataaggatccccaggctcctcatggacgtccacatgccgagagagtcgaggccgtcgtccctgtctacctcgctgccgcgctcgaggatcttgctgatgacggttttgagctgctcgttaatgccttgcgtgacatccatagagacccgacatcgtacctgcgccacatccagcatcgccggacgcaacgacgaagatctctgccgcttgctgagaacgtggaccatcgctactagagaatgtaatgaccaacatccatagacctgctgatcccgaataaggtcgctaacaacattgcctatgctgctgatgttgatgacgactaagttcttgactacgcctgcagagctctcgcttatgctgacgtatctacatgtgatctgagaactagcttatgctttcttcctcatgtgagaatgaagttgtgctgcatcactg

SEQ ID NO: 27297 - DNA, 631 bp, Zea mays
  Clone ID: MRT4577_124907C.1
gcggcacgttcctggcactgagattcacgttcctggcgctgggatcgaagtagtggccagcggggtcgaagtcgtagccagcagccggcgcgtggccgtgcgagctcggcgggcgggagggcacgttcctgctgctgaggttgtcgtagtgctcgtaggggtcgaagtcgccgtagccgtagccggcgccgggcgccggcgccctggcagcggcgggctggccgtgcgagctcggcgggcgtgacggcggctttctgctgatgctctcgtagtgctcgtacgggtcgaagtcgtagcctccgttaccgccggcagcgggggcggaaggcttgggagcggccgccggtggcgcagccggcggagccttgttgtctctcaccttctcgaagaagacggtgtagccgatgttctcggcgtcccacgagccgaacttgggcacgaccgcgtgcccggcagcagccatgttgtcgttgttgacgatgacgatgtgtgcgcctggaggaggattggacgacggacggactaggcggccggccgggccctgctggttgttcctccaccacctccggtagctcctcctcctctatgtgcgcccctccccctttctctcaggcgagaggagggaagggag

SEQ ID NO: 27298 - DNA, 181 bp, Zea mays
  Clone ID: MRT4577_124908C.1
gcatcgtccacagagacatcagagagcggtcctccttgtgagtctgagctgaacaggaggaggaggccgcggccaagcttgagactgtctgccaggtggacactagggaagcgccttcctcttaagatccaacccccaccccttgcgagctccggcgattggtcccctgggccgcggcggt

SEQ ID NO: 27299 - DNA, 375 bp, Zea mays
  Clone ID: MRT4577_124909C.1
cggacgcgtgggcggacgcgtgggcggacgcgtgggctaacgagtacaaagtacgaacgacacgcacacacaccagcaggcagccgcgcgcgggctcgatcgcaatggcgtccaaatcctccaatgggggccttttcctcttacgcgggttttctggttgtcctggtgcttgtggcgggttccacgcttgcccaagcgcaggcgacgccggcggcggcggccaacttcttgtggccctttaatgggttcgtgccggtattcaacattacaaaaggtcttggacttgttgcggagcttgaccttgacactgtgcgccaatggcttttgaacggtttggaaaggggtaatttccttggtcggcttcttcttcggttc

SEQ ID NO: 27300 - DNA, 223 bp, Zea mays
  Clone ID: MRT4577_12490C.1
ttttgtggttaataaagctttttgggggtttttacccccataaagataaggcaggagcatatacacgcgtacacgttgagaaagtttgtttttcgtgatggaccattttcattcgaaaacgtgcaagtaatggtatggtacctggaacgcttggattactcgccaagacacgaagatcatagactgggctaccactggtgggcaaaattcacactgctaggat

SEQ ID NO: 27301 - DNA, 477 bp, Zea mays
  Clone ID: MRT4577_124910C.1
aggccggccgggccggggtagcagcagcagcagccgccgacgccgacgtaaaagcccgagtcgctcgtctcttcccagatcctccgagcacaacagctctccgtcgccgtcgccatgggtaaggttcacggatcgcttgcccgcgcggggaaggtgcgtgggcagacgcccaaggtggcgaagcaggacaagaagaagaagccccgcggccgcgcgtacaagcgcatgcagtacaaccgccgcttcgtcaccgccgtcgtcggattcggcaagaaacgcggccccaactcctcggagaagtagatatagccatgtctttgtgttttgttcccgcactagtttccttgtactgatggcaagttgctgaagacttatatgctattattatctgtatcgatgtgttactgcaacactatgaaatatggtatgcatcgttgagctaatcaagttgcctgtgttggcgatcgttttagttgg

SEQ ID NO: 27302 - DNA, 181 bp, Zea mays
  Clone ID: MRT4577_124911C.1
aaattttgagagattcatattttgtttaaagaagaagttttgtgcagaacggaaggaagcaaagattaagctcggaacacttgctatatgggaaggattttttgggggccatgtaacaaacaacgaccaccagactgggacattcaccatagaaggaatttttgaaaggggttgacaaaaa

SEQ ID NO: 27303 - DNA, 570 bp, Zea mays
  Clone ID: MRT4577_124912C.1
gcacgagccgacgccgacgtaaaagcccgagtcgctcgtctcttcccagatcctccgagcacaacagctctccgtcgccgtcgccatgggtaacgatctccttgtccttctttctatctcttcttgcgtgcaggtgcagcccgccaatagctgccgtacgcttagactggtttatctgtttgtggcgcaggtaaggttcacggatcgcttgcccgcgcggggaaggtgcgtgggcagacgcccaaggtggcgaagcaggacaagaagaagaagccccgcggccgcgcgtacaagcgcatgcagtacaaccgccgcttcgtcaccgccgtcgtcggattcggcaagaaacgcggccccaactcctcggagaagtagatatagccatgtctttgtgttttggtcccccactagtttccttgtactgatggcaagttgctgaagacttatatgctattattatctgtatcgatgtgttactgcaacactatgaaatatggtatgcatcgttgagctaaaaaaaaaaaaaaaaaaaactcgagactagttctctctctctctctctcctcgtgc

SEQ ID NO: 27304 - DNA, 715 bp, Zea mays
  Clone ID: MRT4577_124913C.1
gagccactccattattatttccagaaaaagctccgcacccaataattctccaaagcaagcatctgcatcatacagcactagttcgttcgcacgacactcccgccaccgcgcttcgaggcgctttggtgttggtggtggggatgagccgggggagcaagctccggtggctatggcgtgcgccggcgcgggcgctggggcgggcgcgggacatgtacgtgcgggggctgacggggtgcgcgcgctacgtccccgccgacgccgggttcggctaccccgtgttcgtgccggcgccgctgtcgcggagccacagcgccgactggcggggtggcgccgggtccggcgccgacgaggacctgcgggagctggtccgcgccgcgtcgcagcgccgcgtggagcagcggcgcgccgagctgcaggccgtggccaggagccagagcatggccgcctcgctgtccatggcgcggatcgacgaggacgcgccgtgcgagttcggggccgacgccggcgacggccccggcgcgctgtacccgaggagccagagctgcgttggtgacgccgcggggaggagggcacatgcccaccgccggcacgggaaggtggtggccttggtctgacggagctgctgctgcttctggtctggctgctgcccggccgccgtcagtgacacagtgtgtgcgatcgtgtcatgcgctgtctttgatcatgtcaatactcg

SEQ ID NO: 27305 - DNA, 498 bp, Zea mays
  Clone ID: MRT4577_124914C.1
agaaaaattatgggaaacaacttttcaaatccgggggagggaaaaacataaaacaaaggccgcgggcggttttatactaggataaaggggtttttattaggggggataaaccaacaaaaagtttgttttattaggggaaaggaaaataagtaaaaggggcggggcctttttcacttgaggagggacaaaggggcccccaagcttgttttggatttggaaaaggctacctgatcaggggagggggacgggcctttcaaacccccaactgaagcataccggcggggcccccatttgacccgcacggttttgacccacctcccccatcctgggtatttggggggggaggccacacacgtagtcctgggcgcgcccccccttgcgggacaggccagggtaaagctcccccaccttccacctgggcacaaaaggctccaccatgtgggggaattctgccgccgggtacacccctgagcgctgcccaaccggggaaaagtgatc

SEQ ID NO: 27306 - DNA, 295 bp, Zea mays
  unsure (1)..(295): unsure at all n locations
  Clone ID: MRT4577_124915C.1
tctnctgcccttcccgtcccgtcccctcccctacgcgcccttccaatacccgtgggggagcctcactctaaactccnaatctaaaccctcttaattcaattttanaatttctacacctctttccccaaaattttcttaatctatttctttcaacctttctctatttacatctaaaattttccttcaatttttcatcctctattatttctataccttcattttccctttcttttctatttcatctattaactcatcttccttttcctattttttctacaactgcaggcgatttctt

SEQ ID NO: 27307 - DNA, 775 bp, Zea mays
  unsure (1)..(775): unsure at all n locations
  Clone ID: MRT4577_124916C.1
tttaggggcccccaaaaaaaaactattaactcgcaagcccggggacgtaaacctggaccccctaaaacgccccccccctttnttttttttttttttttttttttttttttttttttttttttttttttttttttttttttttttttttttttttttttttttttttttttttttttttttttttttttttttttttttcaaagcacaaacgcttacaccaccaaaacctcagagccactcccccgcgatccgcctcccctccggcaaacgttctgccatcatattcatacagcactaataagttcgttcgcttcacatccacactcccgccggccgcgcgctttgtcttctcccgcttggcttggtggtgttcctcgacaggagtttccactccaggcgcttggtgtggtggtggggggtccggatgagccgggggagcaggctccggtggctgtggcgtgcgccggcgcgggcgctcggccgggcgcgggacatgtacgtgcgggggctcacggggtgcgcgcgctacgtcccctccgacgccgcgttcgggtaccccgtgctcgtgccggcgccgccgctgtccaggagccacagcgtcgactggggccgcggagccgccgacgaggacctgtgcgagctggtccgcgccgcgtcgcagcgccgcgtggtggagcagcgtcgcgccgagctgcgggccgtggccaggagccagagcatggccgcctcgctctccatggcgcggatcgacgaggacgcgccgtgcgagctcggc

SEQ ID NO: 27308 - DNA, 245 bp, Zea mays
  Clone ID: MRT4577_124917C.1
gggatatactcacaccatagctgcatagcaagttctgagtcatccttctatctgaccaaagcctgtcctttccggcggtgaaagcagattctgtcgtatacaagagatagcaaatggcactctagatacatgactaggctggaagcgaacacgacaaggatcctaaggtctctcgagttgtggtgcagattgatacaattgatactcccactatttataaacctgtttatgaagacaatgtttgc

SEQ ID NO: 27309 - DNA, 816 bp, Zea mays
  Clone ID: MRT4577_124918C.1
gccggccgcggccggggataaaccacagagccaccccactaactactttcaccattgtttccagaaaaatctccgcgcataatatttctctagagcaaacgctctgtcatcacacaacactagttcgtccgcacgacactcccgcagttcctcgacaggggagaggtttccattccaggcggttgcggttgcggttggcggcggagatgagccgggggagcaagctccggtggctgtggcgcgcgccggcgcgggcgctggggcgggcgcgggacctgtacgtgcgggggctgacggggtgcgcgcgccacgtcccctccgacgccgcgttcgggtaccccgtgttcgtgccggcgccgctgtccaggagccacagcgccgtcggctggggcgccgggtcgtccgaggccgacgaggacctgcgcgagctggtccgcgccgcgtcgcagcgccgcgtggagcagcgccgcgccgagctgcaggccgtggcccggagccagagcatggccgcctcgctctccatggcgcgcatcgacgaggacgcgccgtgcgacttcggggcgcccggggcgctgtgcccgaggagccagagctgtgtcggcgacgccgcggggaggaggccccaccgccgcggccacgggaaggtggcggccttgctctgacggagtcggagctgctgtccggccgccgccgtcggtggcacagtgtgtgagaatagcgatcgtgtcacgccatgtcttctgttcaaagtttgatcatgtcattactcgaaatgatggatgtttctgctgtccgccgaaaaaaaaaaaaaaaaaa

SEQ ID NO: 27310 - DNA, 274 bp, Zea mays
  Clone ID: MRT4577_124919C.1
tatgatttgaaaaagggggattgattgttccaccatggaccacattagaccagttaggcaccctaagaatcgtgtcctgtcagttaccataacttcaggtcgaagaactgagcttcgcaaattactaccaaactatacacatacactgtggttgaaatattattctattgaatctctgatcagccagaaacattggactcgtaatttggatgagatctgggtattggctcttgttcctagatcctgtttattgaaacttagtgaaaaacatgtc

SEQ ID NO: 27311 - DNA, 494 bp, Zea mays
  Clone ID: MRT4577_12491C.1
gggccggtgcgaggaagcggcggccagcgagcggcccatcaagatgatcagggtcggcgagccgtgggtcggcgtcccgtcgtcgggcccgggccggtgcggcggcgagaattaactgtcatccaatgtgaggttgatgacaaggacagtttcatccatcatatcgagcaagtaacaaagccagtgctgtggttaaactgcaaagacagaacacaggacacaggagaaatataggcgtaagcatgttaattaagaattaattatatatgggatgcttttgaagtagcaagattggaagtagagataagtaaaacgggctagaagcagcgcccatgtgttcagaatggaaaattagcgtttccgtgtgtgtgttaagaaaaacttatatgcgctttctgcgagcacggttgattcttaagagcgacagcaaatgaaaggtgtattattaattgaaggtcacttgaccacaaatattacccaaaaaaaaaaaaaaa

SEQ ID NO: 27312 - DNA, 219 bp, Zea mays
  Clone ID: MRT4577_124920C.1
ccccgtccttaacctggattcctttaaaccggccgcctttttttttttttttggaagaccttgggagattcattggttggttaatttttaggggtatttattgcatgtgatttagggcttaaaatacccccaccagccattcaaagcccacccatggaggggcccaaatttttccagttagggaaacttgcaaagtacctgttccaactccagcaaaaa

SEQ ID NO: 27313 - DNA, 604 bp, Zea mays
  Clone ID: MRT4577_124921C.1
gcctgtcgtgcgtattgaagggaatactgaacggattctggtataaacatatgtggtgacatcatatggtacattaaaattcacattttacatcggtataaacactataatcaatcctaaatcacctccatggacacggatctggaccgggggcgtcatcgagggtgtcatgaactctgtctacaactccgtctgcggcaagacctggagcttaaccgagataaagatgttgctacagagagaactatagtggcagatggagaagatgatggtactataaatatatctattaaaatatcttttaaaaatgcctcggatagaacctatgctcatagcgatatgcatggtgacttgacaggattcaatgcgctattgaatgagctactaaagaatgttcttgccaatgaagacgctgctagaacaactgctgaaccaaagccggaacatgagctgcagaagaagggctcaactgctgacagagatggatacagggataacaactttacgaacatagcaagctatggactatgctcttgccgtagcaccagcggtagcaatcgacatagtgatggacaaagtgacttatgcagagcgttttgcatat

SEQ ID NO: 27314 - DNA, 2701 bp, Zea mays
  Clone ID: MRT4577_124922C.1
atggctcggagaagatcccaaaagaacaagaagactcctccagcagaacgcaactcagaaggaggtaactcttgagattttatttgatgattgttctaactatgattcatggtctactagtgtgctaaatgcctttagaaccatacatcctcaattagaacaaattattgacaagagtatcttcccctctagttttaatggagaaattgtttccgaggaggatcaaagatgttttcgcttaaactacctagcttttgacatcttaagcaattctcttagcaaagaagattatcgtgccttcatatcaaactatgacgaatccgtccatgatgcgcacgatatttggactagaattagaagcaaatttgatgagtccaaacatgatagttcattttgtgtctctgcttcctttggtatttgtgatactaacccttgcaaggaagaagaagagaatgaacgatggagaccaaacgatgaatccacctctccaaaaggtttgtcttcccatttcgattcccacatgtgttgtgtggctaatgaaaatgatagcggaagcacaaatgaggatgaggaggaagaaagtagctttgtgcatctctacgctcgcctaagccaagaagataaggcggtcatgctcaaacttctagaaagagcgagagagcaaagcgaagctcgtcaaaggctagaggatattctctccatgaagatgctacactttgacgagttgactaaagaacatgaggagctaaagtgctctcatgttgatttggtccaaaggtatgaaactatttcaattgagcaagataacgcttcacattgtatcgctcaattagtaaataggaataccctgctcaaggaccaagtagaaaagctaaaggttgaaaatctagcttttcaagataaatatgatatgctcctatgctctcatgaaaatcttagggatgatcatatcatgttaaacattgctcatgaggttgtgatagaatacttaaaatcccagcaacctcactcttgcacatgtgttcatattgatactatattaccatgtgctaatgcttgttgtccgtcgacaagcaaatcttcctttgagctagaatttgcaggaacaaatgatgatacatatcaaaagctcgaagaagaaaatgagaggctaaagatgagcttgacacaacttaaagggaaatgcatcgctcaaccttctcaagataaccgtgatcacatggtgaaggagcttgagacgggaacaaccgtggcatgcactacatcccttgaagaaaatgtcaaggacttgaggattgccaagaggaagaaacaaaagatgaaattcaatacctcttccaaaagcctcaaccatgcctccatacaaggtaacatccaaggtaatgatcaagccacacttcacactaagaaaagtaagaagtgtagtgaatgctttgaagaggggcacttgattaggtcatgtccctatattaaaaatggcttgattattaacaaggatgatagacattgttttaaatgctctaagaagggacacttagttaaatcttgtccccatttaaaacaaaaaggcatagggttagaaaagaaaatatttactaaccatgtagcaagcaagaaacaaggaaagaagaaatcttcaaaacttgaagatcgcctttgctacatatgccgaaagaagggacatcaatgcaaggattgtcccattggtaactatcccactcctagcttgtcaattgattcatatgtaactaggcaacccaaaattgcaacttgtgctagaaaggtaatgagtttaccaagtgctagcacaaaggacatttgggttcctagatctttgttgactaaccttgatggacccatcaagagatgggtaccaaaatatgcttgacaagctttgcaggggaaaggagatgatatgaagctttggaggtgcttgagagggtcaattcaattcttattaactcaagctatcaatcttacaatgatctatatccctaagattgacccaaagttatttttcgaattattatatctaaaactcatatcatctcgagcaagatattgatgttgtaggaaataaagaattatcctgtgcggaaaagtcaaggcctacaacatggaggaaagccaaaggatggtaacacttatgcttttaagtgcaagtatcttaaattatcatttcttatgtgtcttgtgtagtcacatagaaaaagaaagcacttcaaatatttttaaattatgtcaccattctttgaagaaattcctctcatatggtagattgtatattcatcatttctataccatggcaatctacatgctttaattgttgtaagtatctcatggcatgctttacactaatcatcctattattgccatgttctagttatagagatattccaagctcttaagagaataaggtgtcacgtaaggaattcaatttcttaggacacttataaagggaatctctctttatatctagaaatcgtgggactaatgtttttgtctaaataacctaagtagtctcacatgaagagaataagtttctctttggagatgtgcaatctaacatgaaaagaaaagtcaatccaatgatttatgggtgttttgcctcttgcttaaattggatatgattcttctatgtctatcgctctccatgctatgaattagatctattcccctaatctttaagaattaactatgc

SEQ ID NO: 27315 - DNA, 243 bp, Zea mays
  Clone ID: MRT4577_124923C.1
ggggcaaccaaatttcgttacagcaaatcgccccgcacagaacaccacgatcagattccgaaggacccaaaattcgcccacactttcacaacccaggggaaatcacgacgagcccagttccagacgaaagaccacggggggcggcgctctcacaattaatttcactacccctggaccggcacaaccttgacctggcccaacacggggccgaaaagcgagaccccctcgggaaccttggggggg

SEQ ID NO: 27316 - DNA, 1875 bp, Zea mays
  Clone ID: MRT4577_124924C.1
tcaagcacattttggtacccatcgcttgatgggtccgttaaggttagtgaacaaagatctaggaacccaagtgtcctttgtgctagcgcttggtaaacttgttacctttctagcacaagttgcaatcttgggttgcctagttatatatgaatctaatgacaagttaggagtgggaattttaccaatgggacaatctttgcattgatgtcccttctttcggcatgtgtagcatagccgttttccaagttttgaagatttcttctttccttgtttgttgcctgctacatggttagtaaaaaccttcttttctaaccctatgcctttttgttttaaatggggacaagatctaagcatgtgtcccttcttggagcatttaaaacaaagcctatcatccttgttaataatcaagccttttttaatgtagggacacgacctaatcaagtgcccctcttcaaagcattcactacacctcttaatgtgaagtgtgacttgatcattaccttggatgttaccttttgtggaggcgtggttgaggcttttggaggaggtgttgaatttcatattttgttccctcctcattgcaatcctcaaatccttgacattttcttcaagggatgtagtgcatgcaacggttgttcccgtctcaagcttcttcaccatgtgatcacagttatcttgagaaggttgggcaatgcatttccctttaagttgtgtcaagctcttctttagcctctcattttcttctttgagcttttgatatgaatcatcatttgttcctgcaaattctagctcaaaggaagatttgcttgtcgacggacaacaagcattagcacatggtaatatagtattaatttgaacacatgtgcacgagtgaggttgttgggattttaaattttctatcacaacctcatgagcaatgtttaatatgatatgatcatctctaagattttcataagagcataggagcatatcatatttttcttgaaaagctagattttcaatttttagcttttccacttggtccttaagcaaggtattcctatttactaattgagcgatacaatgtgaagcgttattttgctcaattgaaatagtttcatacctttggaccaaatcaacatgagagcactttagctccttatgttctttagtcaactcgtcaaagtgttgcatctttatggagagaatatcttctagcctttgacgagcttcgctttgctctctcgctctttctagaagtttgagcatgaccgccttatcttcttggcttaggcgagcgtagagatgcacaaaacttctttcttcctcctcatcctcatttgtgcttccgctatcattttcattagccacacaacacatgtgggaatcgaaatgggaagacaaaccttttggagaggtggattcatcgtttggtctccatcgttcattttctccttcttccttgcaagggttagtatcacaaaaactaaaggaagtagaggcatcaaatgaactattatgtttggactcatcaaacttgattttaattctagtccaaatatcatgcgcatcgggaatggattcgttatagtttgatatgaaggcatgataatcttctttgctaagagaattgtttaagatgtcaaaagctaggtagtttaagcgataacatctttgatcctcttcggaattaatttttccattaaaactagagggaaaaatactcttgtcaataatttgttctaattgaggatgtatggttctaaaggcatttatcacactagtagaccatgaatcataattagaacaatcatcacataatatctcaagagttacctccttccgagttgggttctcctgggttttcttgttcttttgggatcttctacgagccat

SEQ ID NO: 27317 - DNA, 2036 bp, Zea mays
  Clone ID: MRT4577_124925C.1
cattgggtccctcgaggccggccggggtgccactaactaacacacaagagccgccgtgcacgcgatcgacgacgacggccgccggatagttagctccttcctgcagctagcttctctagctaataattctagctagccaccacctgctgccttagccagagacaaagagagagccatggccaccgtggacgccacgacgacggcagggtcgggcaagcagaccgacgcggcgccgtcccctccggcggcagcggcggcggcgtgcagaagcctctccggcgccgacctggcgctcagggtgctcctgttcgcggtgacgctgtcggggctcgtcgtgctggccaccgccaagcagaccgtgcgcgtcccggtcccgcagattccggggctcgtcctctcgctcccggccaagttcaaggactcgccggcgctcataccggaataatacgaagcttgatacagagccgaaggtgttgagcaggaaagcttcggcgtaacagcagagagtggaaccgacttaaagatgaaaaggctattcagacctcaatagattactatagagttcattttaagtgcttcctttttctatgtgacatcctttggctttcctccatgttgtagatcttgacttttcggcataggattatttctttatttccttggatgttaccttgtatggaggcatggttgaggcttttggaagaggtattgattttattcttttgtttgctcctcttggcaatcctcaagtccttgacattttcttcaagggatttagtgcatgacactgttgttcccgtctcaagcttcttcaccatgtgatcatggttatcttgggaaggttgggcaatgcatttcccttttagttgtgtcaagctcatctttagcctctcattttcttctttgagcttttgatatgtatcatcttttgttcctgcaaattctagctcaaaggaaggtttgcttgtcgacggataacaagcattagcacatggtaatatagtctcaatttgaataaatgtgcatgtgtgaggttgttgagattttaagttttctatcacaacctcatgagtaatatctaatatgatatgatcatccataagattttcatgagagcataagagcatatcatatttttcttgaaaagctagattttcaacttttagcttttctacttggtccttaagcaaggtattcctatttactaattgagcgatacaatgtaaagcgttatcttgctcaattgaaatagtttcatacctttggaccaagtcagcatgagagcactttagctcctcatgttctttagtcaactcgtcaaagtgtagcatttttatggagagaatatcttctagcctttgacgagcttcgctttgctctctagctctttctagaagtttgagcatgaccgccttatcttcttggcttaggcgagcgtagagttgcaagaagcttctttcttcctcctcatcctcattgatgctttccctatcattttcactagccacacaacatatgtgggaatcgaaatgggaaggcaaaccttttggagaggtggattcatcgtttggtctccatcgttcattctcttccttttccttgcaagggttagtatcacaaataccaaaggaagtagaagcataaaatgaactatcatgtttggacccatcaaatttgcttttaattctagtccaaatatcatgcgcatcatgaataggttcatcatattttgatatgaaggcacaataatcttcattgctaagagaattagttaagatgtcaaaagctagatagtttaagcgataacatctttgatcctcctcggaattaatttttccattgaaattagagggaaaaatactcttgtctataatttgttctaatcgtggatctatggttctaaaagcatttatcacactagtagaccatgagtcataattagaacaatcatcaaataatatttcaagagttacctccttttgagttacgtttgatggaggagtcttcttgttcttttgggatcttctacgagccat

SEQ ID NO: 27318 - DNA, 1530 bp, Zea mays
  Clone ID: MRT4577_124926C.1
ttaattggagtcattcatatccaagtaggtggtgttgttcttgatgtcctcctctttcatttgagagtcctccctttgtagatgtttctttttcctttcaaacatcctttggctttcctccatgttgtaggccttgatttttgcacatgatatctcttcacttccttggatgttacctcttgtggaggcgtggttgaggcttttggaggaggtgttgaatttcatcttttgtttcttcctcttggcaatcctcaattccttgacattttcttcaagggatgtagtgcatgccacggttgttcccgtctcaagcttcttcaccatgtgatcacggttatcttgagaaggttgggcaatgcatttcccttttagttgtgtcaagctcatctttagcctctcattctcttctttgagcttttgatatgtatcatcttttgttcctgcaggttctagctcaaaggaagatatgcttgttgacagacaacaagcattagcacatggtaatatagtatcaatttgaatacatgtgcatgagtgaggttgttgggattttaagttttctatcacaacctcatgagcaatgtctaatatgatatgatcatctctaagattttcatgagagcataggagcatatcatatttttcttgaaaagctagattttcaacctttagcttttctacttggtccttaagcaaggtatttctatttactaattgagcgatacaatgtaaagcgttatcttgctcaattgaaatagttccatacctttggaccaaatcaacatgagagcattttagctcctcatgttctttagtcaactcgtcaaagcattgcatcttcattgagagaatactttctagcctttgacgagcttcgccttgttctctcgctctttctagaagcttgagcatgaccgccttatcttcttggcttaggcaagcgtagagttccacaaagcttctttcttcctcctcatcctcatttgtgcttccgctatcatttgcattagccacacaacacatgtgggaatcgaaatgggaagacaaaccttttggagaggtggattcatcgtttggtctccaccgttcattttcatcttcttccttgcaagggttagtatcacaaataccaaaggaagtagaagcacaaaatgaactatcatgtttggacttattaaatttgtttttaattctagtccaaatatcatgcatatcacaaatgggtttgtcatattttattatgaaggcatgataatcttctttgctaagggatttacttaggatgtcataagctagatagtttaagcgtatacatcttaaatcttcttcggaggcattctccctagcatagttaggaggaataatactcttgtctaaaatttgttctaatagaggatctaccgctctaaaagcatttattactctagtagaccatgaatcataattagaacaatcgggaagcaatatctcaagagttacctccttgttctcctgggtcttcttgttcttttgggatcttctacgagccat

SEQ ID NO: 27319 - DNA, 917 bp, Zea mays
  unsure (1)..(917): unsure at all n locations
  Clone ID: MRT4577_124927C.1
agggccgttttttttttttttttaattttttttttttttttttctaattcaagggcgatcgatgccattctttttcgaacaattatttcagacagacttcgtatcagtaataatttggcgaagaagcaacattaaacaattggtcccaattaaatctcacgaggattttggttgccggcaaattaaagcttgtcggccgcgtcattccgctttacccttgttggccttgggcggcgcctttgtaggcggcgccgtggaagttgaggaagagcgcgagcagcgacgcgttgaagacggcgttgaacacccagccggccatcccctcgcagccgccagcggcgaagtggagccacagcatcaccacggaggccgcgaagctgaagaggaactgcgcgatctgcagctccgtgacggcgcgcttccaccgcccgggccagcgcaggccgacgctgcaggagaggtagtaggagtacatcacgacgtgcacgccggcgttggtgacgagcgcgacgggcatcagcgactgccgggtggcgagccagaggtagcacatggccacgacgagcgcgtggtggtacacgtggagcagcgtgagcgggcggcgggcgagcaggatgagcagcgtgtcgccgagctcgtacaccttggagaggtagaacacgtgcgcccagaagaagacgggccccgacgcctccgtggcgccccgcggcccggccgagaagggccacgcccaccgcgngcccggcgccgtcgcggccgtcgacagcgcgcacccggccgccatggcggcggagagcgccagcaggaccgcgttgtgggaggcggagagcgcgcggagcgccggcggaggcagcgccgggaggcggggcaggacgaggcggcggaggacgagcaccgcgcgaggtagaagcagatgc

SEQ ID NO: 27320 - DNA, 291 bp, Zea mays
  Clone ID: MRT4577_124928C.1
cgtaaatatacctggaattatatcatatgcagatacagttagagaaagcaacaatatggtataacaacaaatgaatttgaagactcatttaaaatattgtgtcatttataaagtcatttgaagattattcagctcaaaatttgattacatgaaatagcttgtaatgttctttacaggagtttaaaacgtatagcctacaaagtaccagcagcaaattagcatagaagcagtgtatacaggcttctactcaagtgcactagggaagagtcagcaagcaaactgagagaggtg

SEQ ID NO: 27321 - DNA, 1527 bp, Zea mays
  Clone ID: MRT4577_124929C.1
ctatatcatcctttgacagtcctccatgttgtaggccttgattttccgcacatgatgattcttcaattcctttctagcacaagttacaatcttgggttgcctagttatatatgaatcaaatgacaagttaggagtaggatttttaccaatgggacaatctttgcattgatgtcccttcttccggcatgtgtagcataggcgttttccaagttttgaagatttcttctttcgttgtttgttgcttgctacatggttagtaaaaactttcttttctaacatcatgcatttttgttttaaatagggacaagatttaactaagtgtcccttctttgagcatttaaaacaaagtctatcatccttgttaataatcaagccatttttaatgtagggacatgacctaatcaagtgtccctcttcaaagcattcattgtacttcttatttatcttagtgtgaagtgtggcttgatcattaccttggatgttaccttttgtggaggcgaggttgaggcttttggaggaggtattgaatttcctcttttgtttcctcctcttggcaatcctcaagtccttgacattttcttcaagggatgtagtgcatgccacggttgttcccgtctcaagctccttcaccatgtgatcacggttatcttgagaaggtcgggcaatgcacttcccttttagttgtgtcaagctcttctttagcctctcattttcttctttgagcttttgataggtatcatcatttgttcctgcaaattcttgctcaaaggaagatttgctttggaccaaatcaacatgagagcactttagctcctcatgttctttagtcaactcgtcaaagtgttgcatcttcatggagagaatatcttctagcctttgacgagcttcgctttgctctctcgctctttctagaagtttgagcatgaccgccttatcttcttggcttaggcgagcgtagagttgcacaaagctcctttcttcctcctcatcctcgtttgtgcttccgctatcattttcattagccacacaacacatttttggagaggtggattcatcgtttggtctccatcgttcattttctccttcttccttgcaagggttagtatcacaaaaactaaaggaagttgaggcattaaatgaactattatgtttggactcatcaaacttgattttaattctagtccaaatatcatgcgcatcgggaatggattcgtcatagtttgatatgaaggcacgataatcttctttgctaagagaattgtttaagatgtcaaaagctaggtagtttaagcgataacatctttgatcctcctcggaattaatttttccattaaaactagagggaaaaatactcttgtcaataatttgttctaattgaggatgtatggttctaaaggcatttatcacactagtagaccatgaatcataattagaacaatcatcaagtaatatctcaagagttacctccttttgagttgcgttcgttggaggagtcttcttgttcttttgggatcttctacgagccat

SEQ ID NO: 27322 - DNA, 231 bp, Zea mays
  Clone ID: MRT4577_12492C.1
gagctttcttatttgggaagcccaactagcaaaaaactttattattgaactataactcatagaaattaagagccccctgagggttgtgtgacactgtggtgtaaacagtggtatggggcatgtgcgtgtagaggtgggcctggcggaccctagggcgattcgccctggcggcgtctggggtcggccgtccggttgggttgtggctcgtgttcttggcctttttttttcttt

SEQ ID NO: 27323 - DNA, 203 bp, Zea mays
  unsure (1)..(203): unsure at all n locations
  Clone ID: MRT4577_124930C.1
gccaccacctccctcccggttccgccttccgccgcgaacacgccgctgtctcgaccccttgacctcctccttgagcaagaggcggaaagtgagaaaaaaacagnacctgctgagctgcgnttccttacaacaaaccaaacacggaagtgatttacaacgaatggcaaaggctacaaggagtggacagccggtggggggggggg

SEQ ID NO: 27324 - DNA, 1251 bp, Zea mays
  Clone ID: MRT4577_124931C.1
ctttctagcacaagttgcaattttgggttgcctagttacatgagaatcaattaacaagctaggagtgaggttgttaccaatgggacaatctttgcattgatgtcccttctttcggcatatgtagcataggcgatcctcaagtcttgaagatttcttctttccttgtttctttcttgcttggatgttaccttttatggaggcgtggttgaggcttttggaagaggtattgattttattcttttgttccttcctcttgacaatccttcaagtccttgacatttcttcaagggatttagtgcatgccacgattgttcccgtctcaagcttcttcaccatgtgatcacggttatcttgagaaggttgagcaatgcacttccctttaagttgtgtcaagctcatctttagcctctcattttcttctttgagcttttgatatgtatcattttttgttcctgcaaattctagctcaagggaagatttgctttggaccaaatcaacatgagagcactttagctcctcatgttctttagtgaactcgtcaaagtgtagcattttcatggagagaacatcttctagcatttgacgagcttcgctttgctctctcgctctttttagaagtttgagcatgaccgccttatcttctaggcttagatgagcgtagagttgcatgaagcttctttcatcctcctcatcctcatttgtgcttctgctcatattttcattagccacacaacatatgtgggaatcgaaatgggaagacaaacattttggagaggtggattcatcatttggtctccatcggtcattttcttcttcttccttgcaagggttagtatcacaaagaccaaaggaagtagaagtacaaaatgaactatcatgtttggactcatcaaatttgcttttaattctagtccaaatatcatgcgcatcatgaatggattcatcataatttgatatgaaggcacgataatcttcattgctaagagaattacttaagatgtcataagctaggtagtttaagcgaaaacatctttgatcctccctggaaatgatttctccattataactagaggggaagatactcttgtctataatttgttctaattgtggatctacgattctaaaagcatttatcactctagtagaccaagaattataattagaataatcggaaagtaaaatttcaagagttacctcattgttctccttcggagttgtcttcttgttcttttgggatcttctatgagccat

SEQ ID NO: 27325 - DNA, 998 bp, Zea mays
  Clone ID: MRT4577_124932C.1
cttggatgttaccttgcatggaggcatggttgaggcttttggcggcggcattgcttttcttcttttgctccctcctcttggacaatcctcaagtccttgacattttcttcaagggatttagtgcacgccacggttgttcccgtctcaagcttcttcaccatgtgatcacggttatcttgagaaggttgagcaatgcacttcccttttagttgtgtcaagctcctttttagcctctcattttcttctttgagcttttgatatgtatcatcttttgttcctgcaaattctagctcaaaggaagatttgcttgtcgacggacaacaagcattagcacatggtaatatagtttctattcgaatacatgtgcatgagtgaggttgttgggattttaagttttctatcacaacctcatgagcaatgtttaatatgatatgatcatccataagattttcatgagagcataggagcatatcatatttttcttgaaaagctagattttcaacttttagcttttctacttggtccttaagcaaggcattcctatttactaattgagcgatacattgtaacgcgttatcttgctcaattgaaatagtttcatacctttggaccaaatcaacatgagagcactttagctcctcatgttctttagtcaactcgtcaaagtgtagcattttcatggagagaacatcttctagcctttgacgagcttcgctttgctctctcgctctttctagaagtttgagcatgaccgccttatcctcttggcttaggcgagcgtagagttgcatgaagcttctttcttcctcctcatcctcgtttgtgcttccgctatcattttcattagccacacaacacatgtgggaatcgaaatgggaagacaaaccttttggagaggtggattcatcgttcggtctccatcgttcattttcttcttcttcctccttgttctccttcggaggtgtcttcttgttcttttgggatcttctacgagccat

SEQ ID NO: 27326 - DNA, 1362 bp, Zea mays
  Clone ID: MRT4577_124933C.1
atggctcatagaagatcccaaaagaacaagaacacaactcggaaggaggtaactcttgagatattattttccgattgttctaactatgattcatggtctactagtgtgctaaatgcttttagaatcatagatccacaattagaacaaattatagacaagagtatcataccctctgattatgacgcttccgagaaagatcaaagatgtatactcttaaactatctagctcttgacatcttaggtaattctcttagcgaagaagattatcatgccttcattacaaattataatgaacatattcctgatgcgcatgatatttggactagaattaaaagcaaatttgataagtccaaaaatgatggttcatttgatacttctccttcctttagttcttgtgatactaaccctttgaaggaagaagaagacaatgaacgatggagaccaaacgacaaatccacctctccaagaggtttgtcttcccattttgattcccacatgtgttgtgtggctaatgaaaatgatagtggaagcacaaacgaggatgaggaggaagaaagaaactccgtgcaactctacgctcgcctaagccaagaagataaggcggtcatgctcaaacttctagaaagagcaagagagcaaagcgaagctcgtcaaagactagagaatgttctctccatgaaaatgcaatgctttgacgagttgactaaagaacatgaggagctaaagtgctctcatgttgatttggtacaaaggtatgaaactatttcaattgagcaagataactctttacattgtatcgctcaattagtaaataggaatgccttgcttaaggaccaagtagaaaagctaaaagttgaaaatctagcttttcaagataaatatgatatgcttctaagttctcatgaaaatcttatggatgatcatatcatattaaatataactaatgaggttgtgatagaaaacttaaaatctcaacaacctcactcatgcacatgtattcaaattgaaactacattatcatgtgctaatgcttgttgtccgacgacaagcaaatcttcctttgagctagaatttgcaggaacaaaagatgatacatatcaaaagctcaaagaagaaaatgagaggctaaagatgagcttgacacaactaaaagggaagtgcattgctcaaccttctcaagataaccgtgatcacatggtgaagaagcttgagacgggaacaaccgtggcatgcactaaatcccttgaggaaaatgtcaaggacttgaggattgtcaagaggagggagcaaaagaagaaaatcaataactcttccaaaagcctcaaccatgcctccataaaaggtaacatccaagtcacatag

SEQ ID NO: 27327 - DNA, 1080 bp, Zea mays
  Clone ID: MRT4577_124934C.1
atggctcgtagaagatcccaaaagaacaagaagactcctccatcgaacgtaactcaaaaagaggaagaagaagaaaatgaacggtggagaccaagcgatgaatccacctctccaaaaggtttgtcttcccatttcgattcccacatgtgttgtgtggctaatgcaaatgatagcggaagcacaaatgaggatgaggaggaagaaagaagctttgtgcaactctacgctcgcctaagccaagaagataaggcggtcatgctcaagcttctagaaagagcgagagagcaaggcgaagctcgtcaaaggttagaaagtattctctccatgaagatgcaatgctttgacgagttgactaaagaacatgaggagctaaagtgctctcatgttgatttggtccaaaggtatgaaactatttcaattgagcaagataacgctttacattgtatcgctcaattagtaaataagaataccttgcttaaggaccaagtggaaaagctgaaaattgaaaatctagcttttcaagaaaaatatgatatgctcctatgctctcatgaaaatcttagaaatgatcatatcatattaaacattgctcatgaggttgtgatagaaaatttaaaatcccaacaacctcactcatgcacatgtattcaaattgatactatattaccatgtgctaatgcttgttgtccgtcgacaagcaaatcttcctttgagctagaatttgcaggaacaaacgatgattcatatcaaaagctcaaggaagaaaatgaaaggctgaagatgagcttgacacaactaaaagggaagtgcagtgctcgaccttctcaagataaccgtgaccacatggtgaagaagcttgagacgggaacaacagtggcatgcactaaaacccttgaggaaaatgtcaaggatttaaggattgccaagaggaagaagcaaaagatgaaattcaatacatcctccaaaagcctcaaccacgcctctacaaaaggaagtgaacagatatcatatgcgaaaaatcaaggcctacaacatggaggaaagccaaaggatggtaacacttatcttttaagtatttaa

SEQ ID NO: 27328 - DNA, 294 bp, Zea mays
  unsure (1)..(294): unsure at all n locations
  Clone ID: MRT4577_124935C.1
cggacgctggcggtacgcgtgtgatcttcctgggccagctctctcattcgaaccagtgtgaagctggactggtactgctgtgatgtctagcaccgcggctggtgtacgagtacatggccctgggcagcgtggattcgcacctcttctcgcgcacgtcgccgctgcttccgtgggccactcggatgatgatcgcgctgggctgcgcgcctgggctgtcgntcctctacgacgcggaccccgctccgttatctatcgcgacttcaagatctccaacatcctgctggacgcgcactt

SEQ ID NO: 27329 - DNA, 502 bp, Zea mays
  Clone ID: MRT4577_124936C.1
atcaaaagtaaaaaggagaggcgcgtgaagcctaacctacgaaggctacgagtatgaagtcgattatccaatgaagcctcacttacgaaagctatgggtgcaaagttacacatcctgtgaagccttgacgagaagaagaattgctccaagcccttaagaagtcaaagaaccttcactaggtgcatgtatgtgctcgtgaaggccagtcgatcatgaggacccgttaataccatggaatttggatgaacccttgtattttaagccaaaaggtggttggtagcctttaaaaactctgtatataatactgtggttttatcaatactatggtaattttggggtatagaaaaaaaaaaaaaaaaaaaaaaaaaaaaaaaaaaaaaaaaaaaaaaagaaaaaaaaataaaaaaaaaaaaaaaaaaaaaaaaaaacaaaagaaaaaataaataattgaaatcaagtaaaaataaatttaattaactggcacattaattaacaacagtta

SEQ ID NO: 27330 - DNA, 363 bp, Zea mays
  Clone ID: MRT4577_124937C.1
tacgtaagctcggaattcggctcgaggtggtggtggtggctacttctgcggtggctatggcggcggctatggaggtggtagcggaggctatggcggcggcggcagtggtgactatggaggcagcagcggtggatatggtggcaactacagcaacagggctggcggtggctatggcggtggtggtgattatggagctgcatacagagcattaagacggtcgattcagaaatcgttctccacttatatacagcatcagcaagaaagcactatccttactgcacccatctcatgaggacgatgccgagctccaactggaactctcaaccacacagacatctaatatgtgccacatattggggttgg

SEQ ID NO: 27331 - DNA, 263 bp, Zea mays
  Clone ID: MRT4577_124938C.1
catcaactgacgagagagcgaaccaacctacccacccagggagaaagaggccaaaagcggaagggctagtgctcccaatggcttccattttcccttgcaggagggcctttcctttatgttgctctttctacaatgctattgcagcagctctcgggatggaactggttccggccatgagccggcagggagtgccggttgcatagcaagctacaagacctggactcccgctccacagtgcaatgtgacgccggctgaagacaata

SEQ ID NO: 27332 - DNA, 725 bp, Zea mays
  Clone ID: MRT4577_124939C.1
tcgggatcaagccatcaaacgcccaaacccagcggacggaggcaaagcgaaggaaggagctcgccgtcgccgaactgcaactgcaactgctacaggacccgattcccagagacagacaccgctgcaactgcagctgcgatggagatggcctcttcctccgcgccgaccgcgtcctacaacgtgtccgtggcacaggcggtgctgacgctctccatcaacgccatcctcctctggctcaccaccgtcatcaagtcctactcctcctcatcctcctccgcccgccgccgcgacgccgcccccgcctccgcccccgccccggctaagcccgccgccgctgccgtcgccgtcgacttggacgtggtgctcgggctgatgggcgccggcgccgagtccgtcgggttcgaggaggcggccgcgctgttcgaggaggaagaggcgaccgtggaggaggccaggcaggcgttcgccgtcttcgaccgcgacggcgacgggttcatcgacgccgcggagctccggaccgtgctcacgtcgctcgggttcgagtccggcgtcgccgccgcggagtgccagcgcatgatcgacgcgtatgacgaggacaaggacggcaggatcgacttccgcgagttcgtcaagctcatggaaaccagccactgaaacggataccgttctttcgcaggatcgccggatcagaagatggtccggtcgcatttgttcagaaattcttt

SEQ ID NO: 27333 - DNA, 2490 bp, Zea mays
  Clone ID: MRT4577_12493C.1
accgacgcccaccctcccacgatccccacatcgctctctccctcgcccaccagcccttcccgtcctcgatgcgctctgcaacttccaccctcgccgcgacgagctcggccggccgagctccgcgccaacctccagcttgatctcctcgccatgagccttgccaacctctcgcgccgagctacgcgtttccccgcagatctcctcaccatgatctccttgccatgatctttccctcgctctgccatctgcccccaaattcccctccccgctcgctcgcgtcgcgatagcaagcaacgcgcaggtgctgaaactcgtgtactgttgatggatgatgactgttcccatggatagtgctagcgcagccccatcctctgcgcgggaccttgccatggatagtgctagcactagcatgaagcactttcagttttataataattgaaaaaaacctggcgcctgggctcatatttatgcaatagggaaatcacatggttgcttatatttcctgttttctgtgatgagactgttgatgtgaagatatatcaattcaagcacacatagctttaaccttcataatttcttcaccagttataacagttttcatttttgagataccacatgtcttttaaacagcataacttccttttacccaattattggtttacacaactaatttttacatttgcttctattactaaacttaaatttcacactcagccttgtgttaactaccttgaggtattatggtttatttctcgcattaggtattcttctgagtactggcataaggtcatttttttcattaggaacttcctgagaggcttcttcttacatacaaacctgaagaattggaggacattcctgagcctgcttctgttgaagaggaaaatgcaccagttgaagagcctgttctggtaccacctgttactgaagttgtttcacctcccaagaccgaggtggccgatactggtgacttactgggcttaaatgatccaaatcctgctgtatcagctatagaggaaagcaatgctcttgccttggctattgttccaacagatggggcttccacaactggtaacactgcatttcaagataaggggtttgatcctacaggatgggaactcgcccttgttactgcacctagcaacacgacttcatctgcgtctgtcggtcaattggtgattgatttctcgatttgggccgattggagcaatcgttggctattctatcggcatgaataattgatgagacaaactcaatgtcaaacatatttctttgagttttcttcattgatagagtcaaaggcataaagataggacgacaactgacagcacacccctgactaagcagtggagaggtaaagcatcacagtagtctggaggaaaccgacaacacaccggtgaccaagcagtggagaggaggagcatcacagtagtctcgcattgcttatggattgtggggaatggaaccactctgttcaacagcaattctgtttggcaaaatattgtcaaggacacaagggatagaggttgttttttaaatgccactgatgagaaggagttgttgaatgcaattttcaagcttgctgttgagtatcctcacgcggacaatttagctggcgaggagacaaggcagcgattgagtaccaggatgagtctattcaatgtcgctgaggcaacaattacaagatcctagaagaaaacccgtggcagctctacactacaataagggtgataaatatgtctcgcccaatggaagacatgatcaaggtagcaagatgttgaccccatgggtccttttggtggaataatgatagagtgcggcaccaatcaacctattgagaaagtgcttgcagctgaagatgcagcgcgaggatgctgcagcattcgaacagtgccaacgagctgctcttgcgccggaagctggaggagcagcagcaggctgccgaacttcagcacgccattgagctccagagccgccgcctcatggatctccagctgctcggcctcaaggctcgcgcagctgcgacagcagcagcggcatcggcactgccaacaccagttgccaatgcctttgcgtccaaccatcctttgagcaccatggcagtcgagtcgccactagagtccggagagcagctcaagctgagcagtgggtttgctctggaggggaagctcaacggtggcgacaaggaagaatctgcttgcgaggcgagccctgacgccgctgatagcgaccaaaggtggattaaacaacccatttcatcattcttcttccttgttagttatgattcccacgcttgcctttcatgaatcatgatcctatatgtatattgatattaatcagttctagaaagttcaacaacatttgagcatgtcaaaacctgatcgttgcctgttccatgtcaacagtggattataacacgtgcaaatgtagctatttgtgtgagaagaagtgtgatcgactctttttttatatagatagcattgagatcaa

SEQ ID NO: 27334 - DNA, 756 bp, Zea mays
  Clone ID: MRT4577_124940C.1
aagccaatcaaacgcccaaacccagcggaaggaggcaaagcgaaggaaggagctcgccgtcgccgaactgcaactgcaactgctacaggacccgattcccagagacagacaccgctgcaactgcaactgcagctgcgatggagatggcctcttcctccgcgccgaccgcgtcctacaacgtgtccgtggcacaggcggtgctgacgctctccatcaacgccatcctcctctggctcaccaccgtcatcaagtcctactcctcctcatcctcctccgcccgccgccgcgacgccgcccctgcccccgccccggcaccgccgtctccgtccccggctaagcccgctgccgccgccgccgccgccgtcgacttggacgcggtgctcgggctgatgggcgccggcgccgagtccgtcgggttcgaggaggcggccgcgctgttcgaggaggaagaggcgaccgtggaggaggccaggcaggcgttcgccgtcttcgaccgcgacggcgacgggttcatcgacgccgcggagctccgggccgtgctcacgtcgctcgggttcgagtccggcgtctccgccgccgccgaggcggagtgccagcgcatgatcgacgcgtatgacgaggacaaggacggcaggatcgacttccgcgagttcgtcaagctcatggaaaccagccactgaaacggataccgttctttcgcaggatcgccgggtcagaagatggtccggtcgcgtttgttcagaaaatctttgttcg

SEQ ID NO: 27335 - DNA, 437 bp, Zea mays
  Clone ID: MRT4577_124941C.1
ttcttttgctattggcacaggaacatgggaccaaagtttaggtgccctggttagattcaccatttactaattttcatttgtcttatggatcaatgttcttgtactcatagtgcatgatcttgtcagaaacaatagttgtagcttcttctaggcgtggagcctgaatattcttatacagagtttgaattgacatgtgatgtaattcttaaatcacttcccagagaagagacaggccacaaacaatgctctagtgtcggtggtgcacaggaagcttgggaccagcccagggcgacagggtctgcacggttcagttttccatagccaaaaccaagccagtggaagacatacccttagttatgcaattatgcaattgcagatgcatgttaaagctactactatgtatcgtgtacttccatgctgatttcttatagaatacc

SEQ ID NO: 27336 - DNA, 350 bp, Zea mays
  Clone ID: MRT4577_124942C.1
tttctagcaagtgcatcaagtaggttgatttgcactaggcccgctgctgaagggaatggaaccgtattgtccctcatcgctgagagggagatgcctacgcagaggaccctattactttggacggggcctctagaaggcgctaggtcacaaggctctaaccaaggcttgagagaactcctttataagcgatactgagtcagtgcagtctctgaacatccaaacgtgggtacgttagcacagtagctacccaatcactatatgatttacacttgacgatatactaatcctgtccgcatgcaacgacagaactctggttccgtgcgaccagaaccaagcgcatcaagactcaa

SEQ ID NO: 27337 - DNA, 364 bp, Zea mays
  Clone ID: MRT4577_124943C.1
attggagcgattctgacttatattctccatgagcattatgagttcttgtcatgcagctgtctggcatttgctcctcctgcatgtatgacatgggagctggcggagtcaggaaaggatttcatcacttctcttgtcaatagaaatgatgtggtaccagcattttcgaaagtttcttcggagagcctgcgatctgaggtgatggtttcatcaaagctggataatgtgcaggatcactttcaccatggtttattcgccactataagccagcgtgttgccttcatcaggtcccatatgctctccatctctcactcaacagggaagattgcagatcacggctttagtatttctgagcctttgcttaaag

SEQ ID NO: 27338 - DNA, 363 bp, Zea mays
  Clone ID: MRT4577_124944C.1
agggcctcaaaaacagagcccccatctctctcccttacaccgacgcgcacatcttcgtccccggccacggcccaaaccctagagaccgacaaccgccgcgcgagcagcgagagggagaggaggaggaggccggcgccatgaacgacctcatgaccaagtccttcatgagctacgtcgacctgaagaaggcggccatgaaggacctcgaggcgggcggcgacgagaccgggaccgagctcacccaggccggcggcggcggcgccaccgacgagcgcctcaagggcttcttcagggaggcggaggcggtccgcgaggagatggcgcccatccgcgacgcgctcgcccgcctgcacgccgccaacg

SEQ ID NO: 27339 - DNA, 1224 bp, Zea mays
  Clone ID: MRT4577_124945C.1
atggatcctaaagggaatgcgaaggtgatcaaggaaaaggagaaggagaacccctccaatgaaacacccaaaagaggagagattgtcgactctgggtctagcaagaagaagaaggatgggaagaagaagaagcgcatcaagaatatattgtactatgataatgatgcttcttcatcttcactaaaggaggaggacgactcatcctctacaaagaaaagatgggaagaatacaacaaagtgagtggcttggacaacgccaagaagctatgggacaccctcgagatctctcacgagggcaatgacgtcaccatgatcaccaagatggagttggtggaagacgagttgggaaggttcgccatgaagagaggtgaagaaccaactgaaacatacaacaagctcaaggccctggtgaacaaggtgcttcccgataaggtggcgaaaattgaggcgatcggtctcaatgaggagaaaatggcgcttgtgatgaagcgcttccagaccgcattgaagggacacaaggactaccccagcaagagcaaatcaaggggaaagcgtacatgcttcaagtatgataagaaagggaaggagaaaaagaagttcgataagaagaagaagggtgtggcacacatcagcaaggagtgggattcaaactgcttctcatccaactccgatgatgaaggacttgtcgcctccgccttcaacaagtcgtccactcgtccctctttcctaatgagtgacacacatgcctcatggctaaggaaaagaagatttctagaaaagcaagaggatattctctatgaagaacatggtaaattagttaatgtagaaaaatcccttgctctagaaattaagaagaatgaaatgtttgctcttgagttatcttcatgtgatgattctatttgtagtcttaagagcttaaatgttgatttaaatgctagaatagaaaaaatgagtattgtttatgcatccagaggctcaagctggattatcgatagcggatgcacaaaccacatgacggaggagaagaagatgttctcttcctacgtcaagaataaggattcccatgacacgatcatctttgtacatgggaaccaaggcaaggcaggaaagcaagtgggaacaagtcatccaaataagaacatggcgacgatgtcaagaccattcgagctacttaatatggatctcttcgggcccgtttcttatcttagcatcaggggaagataa

SEQ ID NO: 27340 - DNA, 258 bp, Zea mays
  Clone ID: MRT4577_124946C.1
aaaagcaaaagagatatttacatccgcacaacttacgccggagccacattttgtacattgggggccggcatgaagataatttacattcggccaacccacacaggaaccccattttgtccctcgggggccggcctgccacgaaggggggttacaaaacttccacgggcctttggggggcaaaatatgagggccaaataaacccctatggggcaaattagggggggggtttgaggccaaaaaaaaattgttttacaaact

SEQ ID NO: 27341 - DNA, 463 bp, Zea mays
  Clone ID: MRT4577_124947C.1
cacgcctgcgtgataccgggctcctattacacggccgacccactctttcgtcctatgcctatatccctaattcttacatcaatttttataacattctattctaacacatttatcccttcagcttggcataagcagtactacagagcggcgcgcaagacgattactaaccttagcttgaacagctctagcaagacggttcatctattctttagcgcagggcacaacctgagcgaaataacctttatgcccttgacaagaggtgacaaccacaacatactatcatgggatgatcggacatattgatgttaaaaaccagtgactgcttgccattgaaacatgccataatgcacactatttaataggtgatatgatagggacctgcttgatgggttgctgtcgtgacgagcccttgatacaaaaccgcgtaacaataggggaaaccgggccactgttctcctgggac

SEQ ID NO: 27342 - DNA, 263 bp, Zea mays
  Clone ID: MRT4577_124948C.1
aaaaaaaaaataaaaattaaaaaatttttttgataccaagaatgatgaaaggagaggacagtaatctctatgtttaggatgctgaaactccgcatactgtggagaacatgctgttcgaccaccgcgcgatacagatggtggtgcccgcacgtgatgtaatgctaaaccacgaaattgtgaagaagttcatgtctgagtacccggagactgtctggtctatagcgaaaatgccttgaagatttgttcgagcagttatttcctac

SEQ ID NO: 27343 - DNA, 193 bp, Zea mays
  Clone ID: MRT4577_124949C.1
aattcggcacgagggaaagggcggatatttaggtacttaggagggacggccgtggctccaacgtccgccaccagagtcgacggtctactcctgtgaccatccgccggcacgatctgcaagcgttctacgacgcctacctgaggcggaaacgtctaccggacttgggcttgatgtccatgcggtgcatcttgca

SEQ ID NO: 27344 - DNA, 516 bp, Zea mays
  Clone ID: MRT4577_12494C.1
ccggccgggatcccagtcgccttgcctctccccgcgcccccttctccttgctcgtgagccgccacccgtcgtcctctgctcgtcaccagatagctgccccgagcctccctatcgctggcgaggaacgcccggagcccgatgtcgcgcccccgacaaccagactcagagcatgccccaccgacctccgctaatcgttggcgagcttctggcctgctcgtcgtcttccctacacaaggaccagttaggaggtagaggatgaacgtgattcattcaagcccgtgattctgtgtaaaattagtttatatatttttccagttcaaaacaaagtgaaaagaagccatgtgattttatgtgctatcccctgtagtctatagttaatcgcggtctaatttctgtagcgatacatacttttagtttgtatattttgagtcttaaatcatgtgtatactggacgattaatttaatgtgtatgcgataagctatttttattataaaaaaaaaaaaaaaaaagcggcc

SEQ ID NO: 27345 - DNA, 413 bp, Zea mays
  Clone ID: MRT4577_124950C.1
cccacgcgtccgcagcaattatcttcgtcggtaagatcggtcattccgcaataggacgatttcaggttcatggatggaattcaaacttgtggggtccctaaatgatttgaaaatgatggtattccatcagcaagcagcccatgcatggacaaacttgcgtgtttcaaagctgcgttacaaggcaatacttcttattacaatactgtaattcagaagacacaaaacacgccacgaaaccacgcgcgtcacgctcatctggaagttgatgcaacgaacctaatgacgtaactgacgccctaccatgcacaacggaaattgagccaggtatgaatctcactgtagctagctctgattggtcagtttattgagacgatccggacgctgctattgacaaactgtcatggggactactg

SEQ ID NO: 27346 - DNA, 587 bp, Zea mays
  Clone ID: MRT4577_124951C.1
ttttttttttttttcttttttttttttttttttttttttttttttttttttttttttttttttttttttttttttttttttaaacaaggggggggttcccccccagaaaaaataatcccaaactttccgggaaaaaaaaacgggggggggccctccaaaggggtttttcgaaccaggggcccaaacaggaggaaacaaaaccccccggcaaaaaaggggggggcggccaaaactaaaatttcctttatcccaaaattaaaccgatttaagctccccaaggggaaccaaatgggtttgggaacaaaaaaaaaaaaaaaagggcccgaaagggaaaaggggggacccaaaatttcttctggggaagggcaaaaataaacacagggtccttgggggacaaaaaaagaacggatttttttttaaaaaccccgaaaaaaaaccccgggaaaaagttccccccaaaaatggggaaccttggggagccctccacatcaaaaaaattttggatttccccccctggaacattgggaaacaggaggcagttcctagggcacaatctttccccaactttggccccaaggttctcaccc

SEQ ID NO: 27347 - DNA, 589 bp, Zea mays
  Clone ID: MRT4577_124952C.1
ctcaccatcttacgcctcgcgctgccgccattgcacgcttgcagcctctatcggacagtgggaccatggctggagtgtgagagttctctccgtggagggaaagatgcgcggccataacggcgaggtgacggcgatcgcgaccccgatcgacaattcttctttcagcgtctcctcctcccgggacaagaccttgctggtgtgggagcggaccaatccggcacagtccgccccggaaggcggtgataccgacgagtacagcggcctattccgccgcctcaacggccactcccacttcggctaggacgcctcccttagttgcgacgaacagcgcgcactttctgactcctgggacggcgaggtccgctcgtctgggacctctccacgtgcctcagcactcggcgctgtcgcggacacgagaatgaaggaatctccgtcgcctactccgacgacgatcgacggattggatcagcgcattcgcgataaggccataggggtctggaacactctcggagagcgtgagtacaccattggcgatggactcgacggaggcgagggccacaacgggcgggtctctctgcgttaggttctc

SEQ ID NO: 27348 - DNA, 286 bp, Zea mays
  Clone ID: MRT4577_124953C.1
gccaactccgcacggaggtgggtttagtaccctacgcggcgggccgaccatccaaagcgactgggtgttcaaccaggcccgttgggtccgggggaacctgactggcaggggtccgtgatctaaccctgacggctctgaccactacggtcatgggccggacgaccagggccatccgcctggccgagacatttatagaccatgccgtgggaagcggtgatacacgccgtacggagctttggtacgtgggacccataacccagcctaaggaaccatactactacaagat

SEQ ID NO: 27349 - DNA, 311 bp, Zea mays
  unsure (1)..(311): unsure at all n locations
  Clone ID: MRT4577_124954C.1
aaggaggagggaccgaggccccacccagcccaacagcaggaaccangcggaccgcgcnacaacgaaangccgagcgaggggggggagcgaanaangcttttctgcttgctttagcttgtcacgcatctgatccagctgaagctgagcgacttaaattcttggcttgagcttctggaaaggatgagtattctcaatggataactgctagtgagaggatccttgttgaagatatggccgcattcccttgaactaagccaccactggaagtggattttgcaggaatagctacagaggtgggaccacgatactac

SEQ ID NO: 27350 - DNA, 767 bp, Zea mays
  Clone ID: MRT4577_124956C.1
cccacgcgtccgatatgatcaaaacgaatacgaagagttgtggagaaaagcgactgaccggaagcctgtgagcagacaaagacacttgcgaagtgcatcaaagcgctatgttacagaggcaatcgggctgtcatatctcgattattaccctgatctagccgtacaaataaagtcatctgatcgtgataagagactgagcctactacgaaggttcttcttctggttggagaacttgtgccatgagggagcctacatgccctggatctccaaacctctagcttgcaaccccatttcaccggatggatgaatatgaaccgacgcccactctcatgtctcatcctcaagacacacgaagatgagccctaggggtgagcggttagctgagatttgcttgcagcctccctgcatctgtggtgctacttgactgctccttgtttcgatgcgatgcatcaaggctctcctcacctaccgtgtgtatatgtacttgctatgacaccgatataaaaacagaacaaagttgtattggcctattgggactttgatatgccggctgtaggtttaggcgtttagctctcgttgtttaggattcaggctaagctgagtctgtaatcttcagtgtctatgcagtactgcacttcttctccgaggtttcatgctttgtggtgaatgtttttcagttgtttgaggattagttcattaccctctcacttcttatggggagtggacatgctaatgctaatgctggagcagttattttactgcaggct

SEQ ID NO: 27351 - DNA, 379 bp, Zea mays
  Clone ID: MRT4577_124957C.1
gggaaacatattttttaaattcgaaaattgggtcttggtttcacattagggccccggggggggggggggggggccctagcttggggcaaaaaaccctaaaggcccctggacccgaaaatcccaacccaaaagagcaaatagggggccgtcttttcaacccttaaacatggcccccttgaaaccaaagatgacactggttacccttaaaaagggacccttccagccacttgggccaaaacaccccttccctggggggggaagaggggcccacccttgggatcgacatcgatgatgcccataatttgcaactgctgcaggatgttgcgtgcaacaacaccactggttttgcaaaaatggggggggggggagccattccttt

SEQ ID NO: 27352 - DNA, 498 bp, Zea mays
  unsure (1)..(498): unsure at all n locations
  Clone ID: MRT4577_124958C.1
gactgaagaagcgggggtagtgctggtcgttatcaactgctatttttgtaggttttggggagtttctgtttttgtaggcagggcgagtaggaggatatgactgcggctacatttcagcatcaggccctcccagcccatgttgatatatcctgctactggcttcaggtcctagaattgttgctggatcgcgcgaaaagtaataagttggctgtaaagctttaagcatttgcctaactcataaaaaatctgtcccttgttgatgtaccgagattgaacttaaaagcggtattgcgtgctgctaatagttgattctaatgatttttcaaaaaaaaaaaaaaaaaaaaaaaaaaaaaaaaaaaaaaaaaaaaaaaaaaaaaaaaaaaaaaaaaaaaaaaaaaaaaaaaaaaaaaaaaaaaaaaaaaaanaaaanannnaaaanaaaaaaaaaaaaaaaanacaaaaaaaaagggggggggcnntttttaaagaacccaattt

SEQ ID NO: 27353 - DNA, 1593 bp, Zea mays
  Clone ID: MRT4577_124959C.1
cattgggtacctcgaggccggccgggacgcttggcaagttcctccaatgtcgccagccaaaccttctctatccagttccaaccctccctccctccctcctcctacaagaaacagcagcagcacaccaccctccaacctccaagaagaggaacgaagagggaggaaggtgaggagttgcctccgaaagcaagccatcactggctaccaaatgcaggcatgcatgcatatagcgaacaggacaagaagaagcagatgatgaggaggaagaataagtaggagcagagctgaaggacgccaataaaaaacggttgctcgctgccaccaccatgtcctatgatcagatgctctcgccgcttttcggtgccggcgggcgatcggcgtggagagcgggcgcccagcacggcggcggcgacgcggtgacgaggcagatactcaagtgcacgaggtggcagctcgaggagaccaccgacttcgtcacctgcccctaccactactactgcgacagctcctacccgggcgactaccccgccgccgtcggcgccctcgtcgccgccttcgccgcctactgctttctctccactctcgcgttcaccgtcctcgacctcgtgcgggggagcagcagcgcgtcggcgccggcgccgggcgtccgaggcgtcaggaggaagtacctggtcccgtcgggcccgttcctgctcccgctggtgctgctcgcgctcgccagggggcagcgggtgaacgccgtgttcccgctggcgcagctcggcccggcattgctgctgctgctgcaggcgtcggcgctggcgttccggaacgaggccgacggcgacgtccggtacgcggtgctggaggcgtccacggtgtccggcgtgctgcacgccagcctgtacctggacgccgtcgtgctgccctactacacggggctggaggcgctccggtggtcccgcttctccggggagtgcgcgtcgtgcctgtgccggatggagccgctgctcgtgggcggctcggcggtgcggtaccgcggcctctccaagacggcgctggcggtcatcttcgcgctctgctcgcggatggtgtgccgcatctacggcgaggagcgcctcagcgcgtggacgcggtccgcgctggaggccgcgggctgggtgctcgtggccgccgacgccgtgtacctcgtcggctgggtcgccgcggagggcggcggcgtcggcgtcgcggcctacagcctggtcgccgggctcgtgttcctcagcgtcttcggcaaggcgtaccggttcctggcgtgggtggaggccaggcaatcgcagtggaagtccagcctctgccatagcgccgtttgatcgacgacactcgtcgtcacagctaattctcgcagggaaaaaaaatctgtaaaaagaaagaaaggaatcgtcgcttattagttcatcttcttcttggttcttgctgtacaatctacacgatggggggaaaaaaggtgcgattttttttgttcatgttacttagcttaatttggctgaagccattcaggtttttgttgatgaaaaaaaaaaaaaaaaaaaattggcgttttccaaaaaaaaaaaaaaaaccccccacccc

SEQ ID NO: 27354 - DNA, 3584 bp, Zea mays
  Clone ID: MRT4577_12495C.1
atgatgactgttcccatggatagtgctagcgcagccccatcctctgcgcgggaccttgccatggatagtgctagcactagcatgaagcactttcagttttataataattgaaaaaaacctggcgcctgggctcatatttatgcaatagggaaatcacatggttgcttatatttcctgttttctgtgatgagactgttgatgtgaagatatatcaattcaagcacacatagctttaaccttcataatttcttcaccagttataacagttttcatttttgagataccacatgtcttttaaacagcataacttccttttacccaattattggtttacacaactaatttttacatttgcttctattactaaacttaaatttcacactcagccttgtgttaactaccttgaggtattatggtttatttctcgcattaggtattcttctgagtactggcataaggtcatttttttcattaggaacttcctgagaggcttcttcttacatacaaacctgaagaattggaggacattcctgagcctgcttctgttgaagaggaaaatgcaccagttgaagagcctgttctggtaccacctgttactgaagttgtttcacctcccaagaccgaggtggccgatactggtgacttactgggcttaaatgatccaaatcctgctgtatcagctatagaggaaagcaatgctcttgccttggctattgttccaacagatggggcttccacaactggtaacactgcatttcaagataaggggtttgatcctacaggatgggaactcgcccttgttactgcacctagcaacacgacttcatctgcgtctgtcggtcaattggtgattgatttctcgatttgggccgattggagcaatcgttggctattctatcggcatgaataattgatgagacaaactcaatgtcaaacatatttctttgagttttcttcattgatagagtcaaaggcataaagataggacgacaactgacagcacacccctgactaagcagtggagaggtaaagcatcacagtagtctggaggaaaccgacaacacaccggtgaccaagcagtggagaggaggagcatcacagtagtctcaaatcttttacttccatcgcaacgcacgtgcacatatctatactatatattgttaacaagggccaagcattgcttatggattgtggggaatggaaccactctgttcaacagcaattctgtttggcaaaatattgtcaaggacacaagggatagaggttgttttttaaatgccactgatgagaaggagttgttgaatgcaattttcaagcttgctgttgagtatcctcacgcggacaatttagctggcgaggagacaaggcagcgattgagtaccaggatgagtctattcaatgtcgctgaggcaacaattacaagatcctagaagaaaacccgtggcagctctacactacaataagggtgataaatatgtctcgcccaatggaaggcgcgaggatgctgcagcattcgaacagtgccaacgagctgctcttgcgccggaagctggaggagcagcagcaggctgccgaacttcagcacgccattgagctccagagccgccgcctcatggatctccagctgctcggcctcaaggctcgcgcagctgcgacagcagcagcggcatcggcactgccaacaccagttgccaatgcctttgcgtccaaccatcctttgagcaccatggcagtcgagtcgccactagagtccggagagcagctcaagctgagcagtgggtttgctctggaggggaagctcaacggtggcgacaaggaagaatctgcttgcgaggcgagccctgacgccgctgatagcgaccaaagatcaagattcagtgcgtttgttggctgttgaaggttgtgctgctcttggtaaattgttggagccacaagattatgtagctcacattcttccggtcattgtcaatttctaccagtatctgaccgagaacaattatttcgtgatgattggggtaattgggctgcccggtgtaggcaagtcaaccatcatgaacgagctttgttaatatgatgcaagctacctgtggtaacaaaagagatgccaagtgcgctgaggatgcagaggccagaacatacatacagttcccattttctgaacacagaaaccaatggcaccgtcgaattcagaaagagcagaaagcaagttctttttttaactttctttctgatttggctgggaatggaagtgagtactaagaacagagcaagtgatatttatgtttctagataaacaggcgtgaggcgtggagtaaaaacagaggagccgcggtatattgaattcggaattagcccaatccgtgctgctgccgtctgtctttccctatcctcttcccaagaaagcctcgccgcaatagtttggcatccatgggattcttccattgcatctccaccgtcaactccacgcatccctcaacgagcactgaagcccggcgagccccggatcgccgatgaccacttccggcgcgcccaagcgcccaagcttcaagcgctcctcgcccgggaagaagtcgcggctcagaaaccgtcgcgtcgccgccggtggccgagagggcgaggccgaggcggcggggacctcggcgctggcgagggcattgcttcccgcatcggtggcgctagacgcggtgccgcctgttgggcgcgcattgccgcgacacttcttcgaggtggatgccctcgacctggccccccgcctcctcggcaagctccttcggcgcgatgaggttgtcctccgcatcaccgaggtggaggcttataggccaaatgactccgcatgccatggccggttcggcatcacagcgaggacagctccagtgtttggaccgggaggccatgcatatgtgtatctgtgctatggacttcacatgatgctcaatgttgttgccgatatagagggcgttggtgctgccgttttgatccggtcatgttctccagttagcggtcttgaaactattcagcggcgccggggtcaacaaaccgagaaaccgatcctacttacgggaccaggaaaggttggacaagctctgggcctatccactgactggtcgaaccatcccctctacgcgcctggtgggttggaggtactggacgggccagagccggagagcgttttggttggtccccgcgttggcatcgagtacgcgtctcccgagcatgtcgcggcgccgtggaggttcgcgattgccggcacgccgtggatcagcgcccccaaaaacacgctacggccacgctactgaccggtgtctgagcaggaaccgttcgagtcccgttccaacccgaattgccatgtgtttgtatttgcttgacacttcggaatgctgcctataactggctcctgtaaatgtatcacagtgtgttcgacaaaaaggcctacgaactctacgagggcgggtgcccgggtcgaacattctcaaatgttaaaagcgtggagtgtgtttgaagggctgagaaagatgggctagagagaagtaaataagagtcaattaactattttttcctgaaatagccgttgtcctagaaaactc

SEQ ID NO: 27355 - DNA, 1266 bp, Zea mays
  unsure (1)..(1266): unsure at all n locations
  Clone ID: MRT4577_124960C.1
tttgaagacgccataagaacggttgctcgctgccaccaccatgtcctatgatcagatgctctcgccgcttttcggtgccggcgggcgatcggcgtggagagcgggcgcccagcacggcggcggcgacgcggtgacgaggcagatactcaagtgcacgaggtggcagctcgaggagaggaggggcttcgtcacctgcccctaccactactactgcgacagctcctacccgggcgactaccccgccgccgtcggcgccctcgtcgccgccttcgccgcctactgctttctcgacctcgtgcggggcaacggtagcagcgcctcgtcgtcggcggcggccggcgtcaggggcatcaagaggaagtacctgctcccctcgggcccgttcctgctccccctggtgctgctcgcgctcgccagggggcagcgggtcaacgccgtgttcccgctcgcgcagctcggcccggcattgctcctgctgctccaggcctcggcgctggcgttccggaacgaggccgacggcgacgtccggtacgcggtgctggnaggcgtccacggtgtccggcgtgctgcacgccagcctgtacctggacgccgtcgtgctgccgtactacacggggctggaggcgctccggtggtcccgcttctccggggagtgcgcgtcgtgcctgtgccggatggagcccctggtcgtgggcggcacggcggtgcagtaccggggcctgtccaagacggcgctggcgatcatcttcgcgctgtgctcgcggatggtgtgccgcatctacggcgaggagcggctcagcgcgtggacgcggtccgcgctggaagccgtgggctgggtgttcgttgccgccgatgcggtgtacctcgtcggctgggtcgccgcggagggcggcggcgtcggtgtggcggcctacagcctcgtcgccgggctggtgttcctgagcgtcttcggcaaggtgtaccggttcttggcgtgggtggaggcgaggcaatcgcagtggaaatccagcctctgccatagcatcgtttgattgatgatgatgatgatgatgatactcgatcgtcagagctaattctcgcagaaaatgtgtaaaaagaaaagaaaggaatctttgcttagttcatcttcttcttgctgtacaatctacagttctacacgatggtaaaaaaggtgcgaaatttttttgttcatgttacttagcttattttgacgaaaagccattcagatttttgttgaatgaaacttcagagcttgttccttgccct

SEQ ID NO: 27356 - DNA, 149 bp, Zea mays
  Clone ID: MRT4577_124961C.1
cccactcatcctaacatacatactattactctcacacctttaccactacacactcaaatccaaccatcagatcattgttaaaatcacaatcttctaccaccatcattacaacaccttctacaacctaccttactaactccctcactcct

SEQ ID NO: 27357 - DNA, 260 bp, Zea mays
  Clone ID: MRT4577_124962C.1
acttagttatgactgtgatgccataaagatgagccaacaacacccatttttgaagcctaagtcctgaggcaaacaaggacgtgtaccacaaacggttagagggcttgcaagaaacattaattttactaatgaacgacggcgacacacaacaaatggtcacacttgcaagcgggtgtaaaaattagatgacccctaggggcggagccggcgacatcgtgctgatgttattggagccatgttgtgctctacccccgactgcg

SEQ ID NO: 27358 - DNA, 593 bp, Zea mays
  unsure (1)..(593): unsure at all n locations
  Clone ID: MRT4577_124963C.1
ggggagtgcgcgtcgtgcctgtgccggatggagcnccctggtcgtgggcggcacggcggtgcagtaccggggcctgtccaagacggctctggcgatcatcttcgcgctgtgctcgcggatggtgtgccgcatttacggcgaggagcggctcagcgcctggacgcgggccgcgctggaaaccgtgggctgggtgttcgtggccgccgatgcggtgtacctcgtcggctgggtccccccggagggcggcggcgtcggcgtggcggcctacagcctggttgccggcctggtgttcctcagcgttttcggcaaggtctaccggttcttggcgtgggtggaggcgaggcaatcccagtggaaatccagcctctgccatagcgccgtttgattcatgatactcctcaaagctaattctctcagaaaatctgtataaaaaaagaaaggaatcgttgctttagttcatctccttcttggtgtacaatctacacggtggtaaaaaaaaggtgcgatttttttgttcatgttacaaaaaaaaaaaaaaaaaaaaaaaaaaaaaaaaaaaaaaaaaaaagaaaaaaaaaaaaaaaaaagcggcc

SEQ ID NO: 27359 - DNA, 2633 bp, Zea mays
  Clone ID: MRT4577_124964C.1
ggcagtctgctgattcagggtggaagtatagattttggccggatcttcaaaataaagataaggtggaatgcaccctatgtggtcaggttgttagtggagggttagagaggttaaatcagcatttggcaggggcatatggatatgcaaagttatgtcccaaggctcgcagtggattaaggaagtagaaaataaattaattggaggcaaacaatacaaaaagagcaaagtttcttgattatgaagaataagatgatgaaatggcggattcatacgccaaatatgtgacgtgtgatgcatctataggtcccggtaaggtgtggagcttgatctcgccctcggtggtgggcgggatagtaagggcgccaatggcggggaggtcggcagtgagccccaccgccatcaagtaatcgatgtccctgcgtgacccgagacgcatcaccagcgacgcgttgtgggcgtacagcaccttatccggttgctgcaccacagtggtggcaggcgcaaaaagaaacgaggggtcacgctatgtggacgccgcatgcacattgtgggagcacgagttcggtggagggatctatgggtggggaaggcggtgaaggtagggaggcacccaatatcccaggagagtttgatgatgatttttgagcgacgagagacagggagagtagctattgctagattgcattagtaatttagcatatttactgcattactaactgcagctagttactattaattatgccattacaaactatctatgttgctatttcggatttggacatttggtattgtgttgttttcgttttaagaaatatcctactcggtacttattatttagagattattgatgaatcaagtgaagtacatgatgcatacatgcttgctgattttctagagaaaaaagttgatgagattgggagagacaaggttgtacaagttgttactgataatggtgccaattacaaagctgcaggcaagcttctaatggagaggattcctactttattttggagtccatgtgctgcacattgcttggacctaatgttggaagacataggaaacttgaaggaattcaagaaaccaattgcacgtgcaaggcgtgtgacaactttcatataccgacacgggagaattcttgctgccatgagagagaaaactagtggggctgatcttgtgaggcctgctgccactcgttttgctacttcctttctcacattgaagagcttgtacaagcacaaggatgctttgaaggctttatttgcaagcacagcttggactgataacagattgtcaaagactagtgctggattggatgtgtataacattgtcttctccacacagttttggaattcagtagaagattgccttagagcttcagggccactacttattgtacttagggtggtagatggagatgagaggccagctatgccagaggtccaagcattgatgaaatgtgcaagggaaaagatcaatcaaagctttgctgtccaaagcaagaagactttactcaagaaaatcataactataattgaacggcgttgggagaaacaaatggatcacccattgtatggggctgcaatgtatttgaactcaggaaagctgcatcatctcataagaaatgatgatgatgctactgttggttagctaagaggttgctttcttgatgtgcttgcaagaatggtagatgatgaggaaactagagacaagatcaattctcaagcaatggattacgagtttcttagaggagcagctttttcaaataagatggccaaagataacctacaaactatgaccccacttgagtggtggcgttcgtatggtggtcgtgctattgagttacagagatttgctagacgtttggtgagtctttgtgcgtcttcatcaggttgtgaacgcaattggagtacctttgaatttatccatacaaagaaaagaaaccgattgttgcataagaggttgaattctattgtcttcatttcctacaacagaaagatgaaagctaggttccaaaaactacgccagaagaaggggaaaaactttgatccattggttcatgaggacttcaactgggacaatgagtgggctgattctttgcatgtagtccctgaaggtgggcgtgggtgtgagtgtgaccttacatgggaccttgtggataatgccattggagcatcgcaagcacttcgtggccgaaacttaccaagaagggcccataatgtgtattcaagaagaaattctgttgctgcacaaaacatgtcagaggctgaagaggaagatgaagatgaagatgaagatgttccacatgacgatgcagaaatcacagattgtgaagatgaatctaatggtggcaatgatggtgaagaaggggaggcacccaatatcccaggagagtttgatgatgatttttgagcgacgggagacagggagagtagctattgctagattgcattagcaatttagcatatttgctgcattactaactgcagctagttactattaattatgccattacaaactatctatgtggctatttcagatttggacatttggtattgtgttgttttaaaattttgtgacttgctattgttcctttagaaactactttgtggctatttcagatccactattgtgct

SEQ ID NO: 27360 - DNA, 730 bp, Zea mays
  unsure (1)..(730): unsure at all n locations
  Clone ID: MRT4577_124965C.1
aattcggcacgaggtgtgaatgttacaagcaattgcccaaggattcttgatgcagtggaaccacatgattgtgaagtggagaacatggaaggcaacgtcatttctgaggtcctgagtggaaatggtgctgtttacgagaatggagctaaggattgtgcaacagaagtttgtggaagtaagaatgacaggagggaagaaggtcttttccttctaaatgatcccattataagtcctagtacagatgaagttagcatgactcatagcaaggataaccatgaaaaggagggtatgattctgatcggtgcaagtgaaacgtgtgctgcttctgtaggccaacctgaggaaaattccaagatagcagaagctgctgttgctcatgttgcatgtaaggaagaaggcaatctgctgaacaatccaagagagacggatgtggcaccttttggatcttggggaacccttaataccacagaaataagtgttaataagattacccaggagaaagagtggagaataccaattgaaccaaatgaagccattgtaccagaagctaacaaggaacaccaatcatgcaaatcttctctacttcctatctgttcttcagaaaaggtatcagcaccaaaggaggatagcaagaaggcgttgtcagattcagtagtcaactctgtagtaaaatctcctcctcgaataatattgncagctccacagtattggaggtacctactaagcaggt

SEQ ID NO: 27361 - DNA, 191 bp, Zea mays
  unsure (1)..(191): unsure at all n locations
  Clone ID: MRT4577_124966C.1
gagatcgataagggatggacgggcggacgagacgacagctgtacacgggcttcggtcaggtgcgngtgacccccagggtggacaccaaggtgctgcacgcgttccagaccagcttcgtgcaggtgcagacgcagctggaccagaaccgcctcctgatcaacgagatcaaccacaaccacgagtccaaggtg

SEQ ID NO: 27362 - DNA, 3965 bp, Zea mays
  unsure (1)..(3965): unsure at all n locations
  Clone ID: MRT4577_124967C.1
aattcggcacgaggcttaataccacagaaataagtgttaataagattacccaggagaaagagtggagaataccaattgaaccaaatgaagcacaccatgtgaaagctttgagtacattagaaattaatattggtgagaatatccagaaggagagccaaatgcccatggatccaagtgcttttcaaataatagaatgtgccgaagctcctaatacaggagttgttagtagtaagtttgctctgaatgtagcatgcgatagtcccatggatttaaatgtgacaaatgttgggacttcagataacatcttgtacactccagagtttgctgtaccaggtcgaaccgaggatagaagcatgcaagttgattttcatgatgcgaaagctggcatacataagccaaatcttcccctggaagtagtggatacagatacccatgatctgcagtcatccagaaatactgagagcacaattctgccatcattcggtgatgatcctatgaaggattcctctggtgctctgaataatggtctagggaggagcacttcatctcaagtaaacgaactgacacatcttcatagatcccacccgcctgctgactacaatccattctccttgcattcccatgattcaccatctgtatctggtaacagtgagcattctgttccgacagctttgacccttggtaataatatctatttcagtagtgcagagagtgagggacagcctgaggaaaaccataacctattggatgtaaacttaggatttgatgggacaacgacagaatttggtaatgttgtcaaaagaaaaggtgaatctggcaatgacttaatgaatgcaggcagtcagaattggttgactttaccacttactgtcagctgcttggataatgcttctgctgttagtaatgggaggataggtttagagcagattgtggatgaaggtgtccctgttatccatcaggatcatgatattatgccggatattgaacagcggngcagtattgatgttttgtctggccaggatcacaacctcaaactatgtggtatcagtgattcctcaagcagtccttttggcaacagaagagagaaataaggatgttgatgatgagatcgttcgcccaggtcgagacttagcttctcagatatctgttggttctgatcacacttatcatggaagtactgaggatcctgtgggcatgccaagtacaacacctgattcggtatcctcctggattgaagccattgtaccagaagctaacaaggaacaccaatcatgcaaatcttctctacttcctatctgttcttcagaaaaggtatcagcaccaaaggaggatagcaagaaggcgttgtcagattcagtagtcaactctgtagtaaaatctcctcctaccaattaatattgcaagctccacagtattgaaggtacctactaagcaggtagctttgcctggttcattgctagagccccctcgcttaaaccagaatgcaaggaacaggacatgggcgtcgtgacaatgcatcatcttctaattcgtcattgcatgtttcacagacttcaggattaccccctaaactgccattaaaaaagaacagcaaaagtcaaaactcttatatccgcaagggtaatgccctcattagaaatccagccaatggaaataatcatcttcattcttcttctagtctagattctcaaaataagttgagtaagcctgttatgaggagaagcatgaactttgtcaggaatgtcgattcaaaagacgcagcacattctcatatttcagttgaaagacccaagaccccacctttgccacttcataccaaatccatcagttgtgctgtgaatgttttggagccattgtctcaaaatttgcagcaacaggtccttgaaactgaaaaggaagattccagtgggcaggttaactcaggtgctgacaatctaagcattattagtttgcacaagtctgaagcccttgatgctggtaaagcaatttatgttaggccaaagttaaatcaactagttgcacaggggcggcatcttggtgagtcgagtaacatttccttggataaagtgacgttgctgcagccttccgcaacatctgatctctatttcaagaaaaggaaaaatcagattattttgggtccctctacttctgatgccccgagttcaaaagatacatttcaggctgaaaatataaagtcaggtgagagtaaagttctaatgtcttcatcttggaacaacaatatcactgtggcaaaggacaggctgcacaaagctcttcagacaacaaatactgtcagaagtttctctcatgtatggacacttaatggacaaaatcctcgaaagaaatcttatgtgggagctagtcatatgaaggtcttacctcgtatacttccatggaaaagaaaaatattctgccagaactttagaggcagttattcttcgttgttgaatacaagctctataggaataatgagaaaattattgcaaacaaggaagagaagtactatttacactgtctctactgatggattctctcttcggaaatctggagtgttaagtataggcgggtcaagtttgaaatggtcaaggtccctcgagaaacattctcgaaaggttaatgaggaagctacacaggcagttgctgaagttgaaagaaagaaaagagaaaagagaaaacggcagtctctccgtagcaagggaaggaatgatcggtactctgcatcagttgctgccaatcaattaacaaacagaagcagagcatcttcagattcaagggtgtcatcaacttgcaatgaatatgtgcgtgttaacaaaggcaaccaactggtcagaaatccgaagaaagtaatccgcatgctagcaagtgagaaagttcgatggagtttgcacactgttagaacacgattggcaaagaagaggcaatattgtcaattcttcacccgcttcggcgagtgtaaaaaatctggtggcaagtgtccctacattcatgaccgagctaaagtggttatttgtactaaatttcttaaaggcttgtgttctagtactagctgcaaactaactcacaaggtcctgccagaaagaatgccagattgttcttactttctgcaagggctatgtaccaacacagcctgtccctataggcatgtgaaagtgaactcgaatgctcctgtctgtgaagattttttaaagggatattgtgctgatggtgatgagtgtcgtaaaaagcacagctatgtatgcctcgtctttgaggcaacaggagagtgcccacaaggatcaagatgcaagcttcatcacccgaagaagaaaagcaaatccaagagaagcaaagtagacaccgtccaaaacaacagtcggggtcggtattttgagacaaacgttggccatggcagtggagcaagaatagtttatttggaggaagatgagagacagaaaccagagcaagtctctggtgaggagtttgctgacttcattgaacttggtgccggtattgaagtccctgaagatgcagacacttcggatgacatacagctgatggaactggactcagggaatctcgaggtgcaggctgacaataatgacgcgataatcaagccacttcggatcatgagaacggcaagagtttgatgagttctttggttggatacagctgcagtgttcctgggtcagggtggtattttacgctatgtttgacgtggcatataggcgctgactggagtttctatttctcgaagactggttctgacgggggcaatcggtttttgcttggttgaaggtttgattttgttcatcttgtacatcttttattaggaaatatataggaccatatggcagtggtagaggccatgagggttactggctgttaacccgtgttttttcaacattacccagagttgaatgtaacaaacagtgctttacaatatgaaatgaatgaaggtttgcatacaggaaatgaagctttcattt

SEQ ID NO: 27363 - DNA, 391 bp, Zea mays
  Clone ID: MRT4577_124968C.1
tggtcgtattatcttttaaatttctgggaccttagatgaacctttacgggtctgaatggatatcactaatcttgtcatggacttgaaacaatctctgttacgagcagtgtcgtaaaaagcacagctatgtatgcctcgtctttgaggcaacaggagagtgcccacaaggatcaagatgcaagcttcatcacccgaagaagaaaagcaaatccaagagaagcaaagtagacaccgtccaaaacaacagtcggggtcggtattttgagacaaacgttggccatggcagtggagcaagaatagtttatttggaggaagatgagagacagaaaccagagcaagtctctggtgaggagtttgctgacttcattgaacttggtgccggtattgaagt

SEQ ID NO: 27364 - DNA, 371 bp, Zea mays
  Clone ID: MRT4577_124969C.1
gtcaattcttcacccgcttcggcgagtgtaaaaaatctggtggcaagtgtccctacattcatgaccgagctaaagtggttatttgtactaaatttcttaaaggcttgtgttctagtactagctgcaaactaactcacaaggtcctgccagaaagaatgccagattgttcttactttctgcaaggtgactcatttgtagtgtcattgctaccgtcacttactatcctttgtaatttactgcctgcttacatagttacatttacatgtatgttttggcatcactattagggctatgtaccaacacagcctgtccctataggcatgtgaaagtgaactcgaatgctcctgtctgtgaagattttttaaagggat

SEQ ID NO: 27365 - DNA, 1141 bp, Zea mays
  Clone ID: MRT4577_12496C.1
gatcatgggattcttccattgcatctccaccgtcaactccacgcatccctcaacgagcactgaagcccggcgagccccggatcgccgatgaccacttccggcgcgcccaagcgcccaagcttcaagcgctcctcgcccgggaagaagtcgcggctcagaaaccgtcgcgtcgccgccggtggccgagagggcgaggccgaggcggcggggacctcggcgctggcgagggcattgcttcccgcatcggtggcgctagacgcggtgccgcctgttgggcgcgcattgccgcgacacttcttcgaggtggatgccctcgacctggccccccgcctcctcggcaagctccttcggcgcgatgaggttgtcctccgcatcaccgaggtggaggcttataggccaaatgactccgcatgccatggccggttcggcatcacagcgaggacagctccagtgtttggaccgggaggccatgcatatgtgtatctgtgctatggacttcacatgatgctcaatgttgttgccgatatagagggcgttggtgctgccgttttgatccggtcatgttctccagttagcggtcttgaaactattcagcggcgccggggtcaacaaaccgagaaaccgatcctacttacgggaccaggaaaggttggacaagctctgggcctatccactgactggtcgaaccatcccctcacgcgcctggtgggttggaggtactggacgggccaaaaccggaaagcattttggttggtccccgcgttggcatcgagtacgcgtctcccgagcatgtcgcggccccgtggaggttcgcgattgccggcaccccgtggatcagcgcccccaaaaacacgctacggccacgctactgaccggtgtttgaacaggaaccgttcgagtcccgttccaacccgaattgccatgtgtttgtatttgcttgacacttcggaatgctgcctataactggctcttgtaaatgtatcccagtgtgttcgacaaaaaggcctacgaactttacgagggcgggtgcccgggccgaacattttcaaatgttaaaagcgtggagtgtgttttaagggcttagaaagatgtctagagagaaaaaaaaaaaaaaaaaaaaaaaaaaaaaaaaaaaaaaaaa

SEQ ID NO: 27366 - DNA, 475 bp, Zea mays
  unsure (1)..(475): unsure at all n locations
  Clone ID: MRT4577_124971C.1
cgcccgccggaccggcccggaaggcccgggccgacccacgcacgcgccctttcttcagaggccgacgccaacaccccccaggggggggcggggaacaagcccccggcgggcaccaccgcgccgggcgccgacccacccagaggaacacgaagacggcgaaacagggcaangaggggaggccgggggggaccggaggggacgagggagcaaagacgacgcgaaagacgacggaangaacccgcggacaggggcgaaagaccaagcgaaccatcgagnagctgaaagagggccaggacgacggaaccaggaggcggagcaccacagcggccatagcaagcaaagccaacggagagaggcaccggggagcaccaaccccncaacagcaaccaaaacggnaaagaggcaggacggggcggccagaagcggccaggcgggcgacggcaaggccagccccaagagggccacgaacaggacg

SEQ ID NO: 27367 - DNA, 419 bp, Zea mays
  Clone ID: MRT4577_124972C.1
actgtatatatgtttgtatatatgcagcaaatgcagatgccatacatgcagtgtgtacgccacggccaagtttcagtacaaaccacttgtttcagccgagtgacacacaaataatagtttttcagacatcagtctatccagcttacatgaaacacttgacagcttctatcccttgtaataactgaatatacaaacaagcactttattcagaatacagacaaatagattccattgagctgcctgcagatgaacatacaatctgcaacctgtacactttcaagacagtttatgctactggcagataaacagaccatctgcagataaacacatacctatgcagttcttattagtcttatcaggcaccaactcgaataaagatagtgaaaaaaactttcaagttatatcatactttctagttt

SEQ ID NO: 27368 - DNA, 155 bp, Zea mays
  Clone ID: MRT4577_124973C.1
catatatacaaaacggatcacaccggcaattacagtcgaacaccggtatggtggtttcttaccagaggcccaaatttatgcggccacatgacgaagcgcaaaaccccaagaaccgaattatgccaaggctgcgcctcatgcctagccggaagcgc

SEQ ID NO: 27369 - DNA, 361 bp, Zea mays
  Clone ID: MRT4577_124974C.1
aaaaaaacaggtaacaaagttggctttcaatggggtgcgccccttcttaaaaaaaaaatttggtggcccacaatttttttcgcttgcttaattacatcataaaactttggcttttgaaagcccaagccttaaaattcaaaagcccttttattataatacctgtcatgaccgttgttgctcaaatgatgagcccaaaaaggttttttttgaccaacttgtttggtcaactaaggacaaaacttcccacttgcttttccctttaaaatttaaattctttatgtcaaaccaaactaaattgatgtccaactccaaatcaacaacatttttttgagcaagttcaaaggactgtgggcaatttcaa

SEQ ID NO: 27370 - DNA, 780 bp, Zea mays
  unsure (1)..(780): unsure at all n locations
  Clone ID: MRT4577_124975C.1
cctcgaggccggccgggccgggtcactcaaaaagggtcaagaaactagctgttgaacttggcaatcctaacgtagtgtggagtgcaagcgaggatggtactctgagacaacatgattttcgggagtgtagttcccgtcctcgtgcaggatccgctaatcaggaatgtcacaatgtgcttgtgagcattctgcactcctttccttgcaatgttctacttgtcacttcttcactgcattcttcatatggagcatggcattttagtctgtccagcatatgctcttcatttttttcttaataacatctccttgttttagatatttcaaaatatattaacggcaatccgaattatactttggggtattttgtttttttatttgaaatgttatgtttgtaatttacttcagttttttgagaacttccttgaggtatctggatctggacatcattttctgctgatgaatctattgttcctagaaaaagtgaactcataatgcttcatttgttggacaattcagttgtagctttgtgtccagtattctgtgtttctcatgcacctgcttattaattgttttgtaccattagtacatttttcttcttctagattctatttgaattgcatggataagtctgcttgtagaatgaaaataaatgctagataataatattagctgatctagttatggacgtggnttttgattttattttctgcactacacatttttggcagcttgatctacggtgcgggagcaaagaagtctttagccgatttacccaaacat

SEQ ID NO: 27371 - DNA, 799 bp, Zea mays
  unsure (1)..(799): unsure at all n locations
  Clone ID: MRT4577_124976C.1
ccggccgggaaaaatttccactccctacccctagccgccacaacctttctccctctcctcctttcagccgacgcacacaaccacttctcgctgttcacaagcgcatggagcagctgcggctccacctccctgctcctctctccgtggtgacgtccagcacctttccatggacgcctccctccccaagctccaaggcgcacagggcagcagcaccttcattccccatggatccatggtgctgggagttttttccccattgctggaatttgttgcagccttcccatgcacaggttccagccatggccgacctcctttcttcctccctattcccggcagtagcacgccagcacagggacaacgacttccatggccggcgccccaagctccagcccctccctgcgagctccctcctcccgctgctcggtaccctgagctcctgctcttctcccatggagggcgtccagaaatttttccagcgccttcactattcatcttcctcccagcaggcccagcttgctgttcccctgctccatggcacccctgcaatattccccttcctccccctcggctcccccatccgggcacccaagcagcgcctttccttgcccctctctgtccccagcgacaagcagcggcactccctcccaaggacagcgcccctatttccctctctcggcagcgcagctcctcgcaaccgagcttcccccgcagccctcaacatcgacgtgtcataggtgttcgacggaatgctcgtgngaaatattatgttgtacgcagcagccccgacgtcttcgcgcgc

SEQ ID NO: 27372 - DNA, 452 bp, Zea mays
  Clone ID: MRT4577_124978C.1
gggaagggttattaatcttattaaagggggcaaaagaaaccccctccgggccggaaaaattaacgggggggggggggggcaaaaatggttcgaaccaaaccaagggaaaacgaacaaatggaacgggcccccgggggggtttattttgggaaaaaaaaggggaagccaacctgggatccctacttgggcccaaaatgggccctgagggggcccaccccccccctgttgatgcggaaggccctggggaggatgtcggggggcacggggggaacgggcccaaaaagagtaatggggaaggcccggggcccccgggactgggtgttaaaggggggaaaaacggggggggggcccccccccctgttttggtggaaagggacaaggccccccgggaaaaacaaaaaccccccccctggggacgggcttgggaaaaaagcccttggggggggggaaaa

SEQ ID NO: 27373 - DNA, 386 bp, Zea mays
  unsure (1)..(386): unsure at all n locations
  Clone ID: MRT4577_12497C.1
aggaccggccggatttttcccggggggagagcgactagccggnggncgccttntatnggggggnattttgaggatcccctttacgttgtcgacgaggactgcggcggcgctctcgcgctcggcggagacccggacatgctccaggacgtgtgcgtttttgactattttttccgggggggggtgaacngnatcccgtgcaaggcgaacgaaataggccacnacttcttgttcgagggggtgatgatttcgggcaacaccaacaacccggggggctccgcggtgacgggggccaacgtggacaagttcccgggggagaacacgctgcgcgtnttcatggggcgcatngactacgcgccgggcggacagaaccccgcgnacacgcaccc

SEQ ID NO: 27374 - DNA, 1031 bp, Zea mays
  Clone ID: MRT4577_124980C.1
gggccacccagtccccacaaggatggatcgctatactctttgatcactgtactagtcacacgattggctacacgacacgagctcagagctctcaggtttcccaacgccggctgctggccaatggcgcagcaccacggcagccactccctggaggtcggcggcgtcgagttcgacgacgacggccgcgccgcgcgcaccggtaccaccactcactctctcccgcgccttgtgcatgcgtgcgtcggcagcagcagtagccgcgctaacaagcaaatccccacacccccgatctaattctcgtcgttcgatgggcggcggcaaggcaacctatggacctgcttcgcgcacatcatcaccgccgtgatcggctgcggcgtgctggcgctctcgtggagcgtcgcgcagctgggctgggtgggcggccccgtcgccatgctctgcttcgccttcgtcacctacctctccgccttcctcctgtcccactgctacaggtcccctgcctccgatgatggctccctgaaacgccagaggaactacacctacatggacgccgtcaggacgcacctgggggagaagcgcacctggctctgcggcctgttccagtacctcaacatgtacgggaccgcaatcgcctacaccatcaccacggcgacctgcctcagggcgatcgtgagggccaactgctaccacagccagggccacagcgctccctgcggcgccggcggcgaccacctctacatgctgctcttcggggcggcccaggcggtgctgtccctcatacccaacttccacagcatggcctggctctccgccgtcgccgccgtcatgtccttcacctacgccaccacgttcttctacctcgccgtggggtgcttcgggtacgccgccttcggcaacgccgcgccgggcaacctgctcaccggcttcggcttctacgagccgtactggctcatcgacttcgccaacgcctgcatcgtgctccacctgcttggtggctaccagatgttcagccagcagatcttcaccttcgc

SEQ ID NO: 27375 - DNA, 391 bp, Zea mays
  Clone ID: MRT4577_124981C.1
gcgacaggagcagtgacagcagcaccaccaacaccaacaatggcatcaacaatggccttgacagggttcctgcagggcttcctgcacttgtcgtcccacttgcggtccgggcgccccgcagcgggcgcctgaatggccttgtccatcccgtcggcgacacgggctaatgcggggcataatgaggggctggagccgcgggtggaggcgcgggacaaggggcgctggaacgggaacgggaggttcaaggccaggctccacaccgacctgaaggcgaacgtgaaggaggagcccatgaaggtgcccatggacgtgtgcatggacggcctcgtcaggaacctcatggacatgctcgtggacgtgaagctcaccatggacttctccaaggtccacc

SEQ ID NO: 27376 - DNA, 1717 bp, Zea mays
  Clone ID: MRT4577_124983C.1
gccggccgggctcgaggctgctgatgctgaccggccgacccgtcggccgtcgccaactcgtctgctcagcccatctgtatcacaattcccaagagcttgagctccaagtacccggcctgcgcccacggccgggcccaggaaccgccgttctgctgcaccggcggcggaagaagagacggatagcgtggggatccggctgatgcgccggcggcaatgggcatttgggattccattctccccggcggcggccggcgcttcatcaagcgcaaggacagcgacgccggcgaggcaggtcgggcactagaggaactgaggggctcactgtacaacgactttcatacttcagaaggggccaggcgccagcagcagaagctttgtggccctattgttgcactgacattcaactttgtggttgctgttgggattatcatggcaaacaaaatggtgatgggtgctgttggatttaacttcccagttgcactgtcattaattcattaccttttcgcttttgctttaatgtctgttctcaaggcattatacttgctgccaattgcttctccttccaaatccactcctttctcctcattatttgctttaggtgctgtcatgtctttctccactgggcttgccaatatcagcttaaagcataacagtgtaggtttttatcagatggctaagatagctgtaactccaaccatagtggtagcagaatttattcttttcaagaaaaaggtttcccttcgaaaggttagcacgctggttgttgtctcatttggtgtggccgttgcaaccgttactgatttggagttcaatttctttggtgcttgtgtagcactagcttggattattcctagtgctgtaaacaaaatcctgtggtcaaatttacaacagagtggaaattggacagctcttgcgttaatgtggaagacaaccccaattaccatatttttctttattgttttgatgccattgttggatcctccaggccttttatctttcagttgggatttcaagaacagcagcacaattatcatatctgctttgttcggtttccttcttcagtggtctggtgccttggcacttggggcaacctcggctctcgctcatgttgtgctgggtcagttcaagacgattgttataatgctctctggttatctggtatttaaatctgatcctggattcaccagcctgtgtggagctgtcattgccctcgcagggatgtcagtgtacacttacctggggatgaaagagtcagccgccagcggtaggagaaattccttaaattcaaggcaaaattctcatttgaagaagcccaaggctattatagatggagaaaatccagaaacaaagcctatggattctgtgtaaaatgagtgccgtcctcctgctaggtttaagaacctgccattggaagcaatgaggtttggtgagcatacttatggagtgagtttccttcaccaaccagttcatccgaaaacttcatttcgctttctttagttcttgcttggagttctattattctttaggcaatggtggtcaaaattgttttcatcgttgatcacattcattgcacgtaggaattatcattgattctagttttaggtaactttggttactgttccaatccatatcctgtcatgctttatttgtttacttgccgtgtggattctgttcctcagaaaatagatgaaaggtggctgaaaatggttcctggttg

SEQ ID NO: 27377 - DNA, 432 bp, Zea mays
  Clone ID: MRT4577_124984C.1
aggcctacataccgtcggcaggcctgccatcacctgctggcaggtgagctcccccatcacaccctggctctgctacacccgcgtctctgcggccggcccctcacggtactggtgtagctgaagcagggaacctaaagagcgcccgcacaaccgacgccgacaggggacccggctgcaactgtctcaagaactgcatcaggggcggtaaccgactcaacgtcggtaactatactatgtctgcttaatgcggtagcatccaccatgtcaccacgaaatgcacgtgactaaactaacacctcaaaacgccctgagccacgacctacattactacgcgccggctgacgttcatcgatcgtcgtcatcaagataactatcaatctacccgtgacgatcgatggctacttgagtactgctatgtactactaaataaaa

SEQ ID NO: 27378 - DNA, 1287 bp, Zea mays
  Clone ID: MRT4577_124985C.1
ctctcgattatgttgtactttattcacttgatgtgatctgccacttccagtttagctcttcgatgttaatttattgctaagtagcctctacaaatagcaagttgccattgtataatactcttatcttcatctaaagaggtatgcctctcgaatctgggaatgagccatggttcagcttgaccatctcagattcagaaaggctgagacactggataagtttgttaatttgggagatggtggtacacattccagtctcacagacttcatcatttcaaccacctcattgagatgatagggatagctacttgggcttaaagaggtttacaattccaatcataaacgcatggttttgtgttcttttctggttagtttttgatacaaatacaagagattgattgatttttttacatctgtaagttattccatgctgcacatgtactgctgtataagctatagtctttgaccccatcggcactcaaatttactggattgctctagttgatagaaaattgttatgttggttcaatttactgataagagtctaaaatcataacccagtgtacagacacttaaccacatgcgtcctaacattgtaggcgtacataatggagctggaagctgaggtggcaaaactcaaggaccagaatgaggagttgcagaaaaagcaggttgaaatgctaaagaagcaaaaggatgagcggaagacagcagatctttctggctgctgattttgatgcgctgcatattcatcaactgggaaatgacggttcccttcagacaatgtgtttttttttcactcacaaaagcttttgtgtaaatggtttttgcaggtcctggagcgaatcaacagccaacatggaccaaaggcaaagaagctttgcctgcgccgcaccctgactggcccatggtagcctgctgaagcttgcacaaaattgaccgaagtcaagatcgtcgggccagatgtgcccgtgtgtatatatcagatgaagtcaagagtactgagtaccccgttacccctgtagaccgccgctacttcagagctgccgttcttgttctgtgacgtgggtagtctgcgcctgacagttcgctgtttaggttcggttgcgcgatcctcacatgaacaatgaggcgtgccatctaatttgtttattaactcactcctatctatggtgagataatgcaagtaacctggagtatgtttggttgatttgccgttttgaaaaatatgctgtgagctgtgtggaaaaacagcggtggcccgtgtggaaaatagaagccgtttgattt

SEQ ID NO: 27379 - DNA, 312 bp, Zea mays
  unsure (1)..(312): unsure at all n locations
  Clone ID: MRT4577_124986C.1
agcagtggtaacaacgcagagtacgcggggttcccagcacactagaagttgctgcagaattatccagtacttctttcgcttatccgcccaactattgctgtctcctgtgtggctggttgggcgctatcaaaactggaccattaacggccgtgggaccgcattgaaaagtccaggagaaaaaaaaaaaaaaaaaaaaaaaaaaaaaaaaaaaaaaaaaanaaaaaaganaaaaaaannnaaaaaaaannnagggggaaaaaaaaaaaaaaaaaaaaaaaaaaaaaaagggcctctgggtggttccccctgttt

SEQ ID NO: 27380 - DNA, 1428 bp, Zea mays
  Clone ID: MRT4577_124987C.1
ggcgatccaagagccgctcctcttccttctctccgcctactccctcccggagtcaaccatgcgctccatgctctctctctcctcggcgccgcccccgcccccgggcgcgcaggacgccgcggggctccatgctgctgtggcagccctagcgccgccgcacatgcttccccagggattgtcgccagacctaacggcggctctcctcgccaaggaccggggcaacagcttcgccatcatggagccgtaccgacacgggatgtcgctcgagctcctgaaggcgcgggcctacgcagtctacccccgtgcttcgctgttcaaccatgactgcctgcccaatgcgtgccatttcgattaccccgacaggcctgggccagggaacactgacattgtggtgcgtgcactccatgacatacccgaggggagggaggtctgcatcagctactttgcggctaattggaggtatgctgataggcagcgcaggctgctggaggattatgggttccggtgcgagtgtgatcgctgtcaggtggagagtcagtggaaggatgatgatgataacaatggagatgatggggatgacactatggaagaggagggtgaggatgatgttggagatagaggtgatgatgggattgaggaggaagagggggatggtgctaccaatggcggtgatgatgatttcccacatgcctacttctttgtcaggtacttatgtgacaatgagggttgttggggtatgcttgctccattgccaccctcaccaaacggcgacctgtcccatgtgtttgaatgcaatctctgtgggaagctgaggaaggaagaggatgtcattcctgatgagggcacttctggcatggtccattagtttgatgaaaacatactgatccgtgtgctgcttcttttagtggagtatgaacttacgacatgagcctttcaatcaaaggggagaaagttggaagatgatgtctagccatgtaaagagaatgagaattggccaatgtccataactcttccaagatttgagccagagggcagggggtgggggtggagttaaagagttcattgctggcaaaccatttagccttaggggatgatcattgctgctaatctccaccttaatttagtagtgttcatgttaattaggctacaaatcctgtggcgaaggtctaacacaagcttggataagtaagagaagtgagtgtcaaaatggcacattatttcatttttagtttcatggagatacccagtttgagcagtatctaggtacgaggagttacaaatttgtttatgttatgtattgtgctcttgcgtcatactgataagagaaccgtgatgacaaaatccacctgttttggtgtttaccttgagccttgtaaaggttttcattaacatttcatcatgcttcacaatcagatgtgtttcattttc

SEQ ID NO: 27381 - DNA, 358 bp, Zea mays
  Clone ID: MRT4577_124988C.1
cgacacctggtctgactcttcggattacctatacaattacacaaaaaacaaaactaaaaagggcacggggcaaataaaaaaaggaaccaggcaacaaaaccataaaggaaaccctttatgaagaccaaactaacaatcacctccatatcaagctctacaactaatatacgtataccaacatttaaacaaatggccctgctataacaaccaccttacttgcaaacccttgacgtaacctaaattacaccactagtcatgaaaagctcttctaaaccatgacctaaacctgaaaaggtcctactacacgtactttaccaacaggtgcgcactctaataaagcaactacaccaccccttac

SEQ ID NO: 27382 - DNA, 565 bp, Zea mays
  Clone ID: MRT4577_124989C.1
tccctcgggcctgccggatctatattggtccgctttcaaaccacctagtatactcctcctttcttctgagcagcggaggtcggcggtgacacttattgggtgctggaaggtctgaccaagggcagtcagaggggcggagcgcgcgacacgaagcgctaacgaggggcgctgtgggacaacatccatggggatgacaatcgctcccgtcgtgcaagtggccctgaggtgaggggtgcggtgcaactacgggctgatcgaagatgataaccaccgtgtgcacctgcaactatctacaactgtgtaggtgctgaacgctgggacactactggcatccacatccttgataaaaccatgtctttatgaactccttgacactgacatactctggaggctcacttgctatgtcttcaggctgtggcgctattgcaggacgcccaccgtgacctcgccctagatccagacctcggtgcgcgttggcttcctaggctagcttgccaagcacgtcctatgcgagggcaccaaggccgtcaccaagatcacctctgtgtacgttcatagtactagg

SEQ ID NO: 27383 - DNA, 131 bp, Zea mays
  Clone ID: MRT4577_12498C.1
ggaggggttccccataacccttaaattcaacaatttgaccaattgccgaatcagaacgagaaacaaaacatgggggaacatttatacacaacgagctttgactggtgaaaatttttttgttgaagaccaac

SEQ ID NO: 27384 - DNA, 509 bp, Zea mays
  unsure (1)..(509): unsure at all n locations
  Clone ID: MRT4577_124990C.1
tcggttcagccggctggccgatggtttcggccgcggcgcaggcgggtgtggtcgcggcgtgcgtcgtgctcttcgtccccatggggctggccggctggcacctcagccgcaacaaagtgcttttcttctccggcgcgctcttcatctcgcttgctgtcggggtccacctatccccgtacctcccctccctgccccacctcgcctcctccttcctcctcccccactccggcgccgcgtccgcgtccgcgtcctcctcctctgggtcttcctgcgtcccgtttctgcaccgtgtgtcgtggtctgacgccgccggcgccgcggacgacggctcgggaggcggaaaggcacgggcgtggtcgtggccgccctcgctggcgtccgcctgcgggttcgcgcggctgtcgcgcgatgacgcgtcgctgctgcttaacggctcgtgggtgatggtggcccgngattcgcaggcgcgactgctcgtcctcgcgcttctccgcctcctgctcgacccg

SEQ ID NO: 27385 - DNA, 369 bp, Zea mays
  Clone ID: MRT4577_124991C.1
gaaaaaaaaaacaaaggccccccgcttttggtcacaacaaaagccccggacgggggcacccgggtccccaacttattcaccccctggatttagctggggccgactaaaatgaaccaaattccccgggcgccggggcagaaaaagaactggtttgggcaaaccttttatttaagggacaagtggggcgggaagaaaacccccccttcaccggaaaaccttttaagggcccgaacccccgaaaacccccgggcccatttttacagcaccacaaaaaaaacctttttggtggtgaacacttgaaacctttgggggggaaactttacgggggggttttcctggggggccctacccagggaatgggcccggcat

SEQ ID NO: 27386 - DNA, 618 bp, Zea mays
  Clone ID: MRT4577_124992C.1
ccggccgggccggggcatcccctcatcctcatatctctctctctctctctaatttgcaggattccattcttcatttctctctttcattattccgtagttgcaactgcaagtagctacggcctacagcggctgccgcagtttgtaacgattggccatgggtgcccacactggcagccgctgcaacccgtcagcatcgacggcgaggagaacgaggccgccgccggcgtcctcgggcatgttcctcagaaggccttcgccggcgaagccgatgagccagggtgccgcggaaggcggcaaggccaggacgaagtcctgcgggcgacgggacatggaggtgggggagaagatggaagtcctgaggcgcctcgtcccgaccggcagctgcgatgacgaggtcgatgggctcctcctgcacgccgccagctacatagcgaggctgcaggcacaggtggcggtgatgcaatttatggtcgacgtgctggaggacacaaagcattaatcattttcttttgttattaggattcagacgacacatgtgtagcacacatcatattattcatgatatttacttttgcattgaacctcttggcctcatgtgtggctccttcatatctcttt

SEQ ID NO: 27387 - DNA, 559 bp, Zea mays
  unsure (1)..(559): unsure at all n locations
  Clone ID: MRT4577_124993C.1
gtcatatctagctatagtcgctgccttgaacagcatacgagggcggtgctcatgtttgnggcagaacaccaccaccacctgtctcaccaccgcatgccacgagaggagggcgcctccggcgaggtcgactacgagatgaagagaagcactcacacgcacatgagagnaagctactggcgagactgcggacgaccatcgctctccggctgcgtacatccctgctaccagaagcactacgccaagaaggacccaccataactagcacgggcaccggctcaaggtaggaggtggcctgccccacctccgggggctccgccgccttcactttccacgagcaccaccagatgaaggactccaataagcactcccacaactgatccgtcatggctgctgatccatgtgttcttccagcctggtcttcttgtactgtgtgccggccaggccttgctttgggctacccatatttgcatggacgtaggaactgtgttggtctgtcctcaatcgttcttgtatgaagatcaaatcaggcctagtataagtgcgagggcatatatcggcc

SEQ ID NO: 27388 - DNA, 552 bp, Zea mays
  Clone ID: MRT4577_124994C.1
gggaaaaaaaaaaaaacaaaaaaaaaaaaaaaaaaaaaaaaaaaaaaaaaaaaaaaaaaaaaaaagaaaaaaaaaaaaaaaaaaaaaaaaaaaaaaaaaaaaggggggccctggacccccagtttttgtccctttaagggggggtaaatggccccctgggcgaaatcagggcaaaagttgttcccgggggaaaatggttatccgttaaaaattccaaaaaagaggggggggggaaccaaaaggggaaaagccgggggggcctaaggggggggcaaactcaaataaatggggtggccctaactgcccgttttcaagggggaaaaccggggggcccacttgcttaaagaaacggcccaacccccggggaaaggcggttggggaatggggcgcttttccgtttcctggttaattgactcgggggcctgggccgttcggttggggcaaggggtataacttaactaaaagggggaaatacggtttcccacaaaatcagggaaaaccccagaaaaaaccttgtgagcaaagggccaacaaagggccagaacccgaaaa

SEQ ID NO: 27389 - DNA, 260 bp, Zea mays
  Clone ID: MRT4577_124995C.1
cccccccaaaaaatataatggggggccaattaatttttgggtcccggaaatgcaattggatcaaccaacatgcggggggacccaccttccctcattaacccaaaaactggccccaaacatgccgagggggatagcaaactgaaaaacttttttttttttttttttacacaccccacaaaatacctttttttgggagcccgtttggcctcttttttttttgttcaaccccccccccaagctggatagataaaaatcatttc

SEQ ID NO: 27390 - DNA, 284 bp, Zea mays
  Clone ID: MRT4577_124996C.1
aaactgagcggaattatgggggattctcagaaaatatttgcgggggcaacaaggccaagtctaacaataaactccacccgatatcatgatttgaaacatgttaaccaacaaataacaattcgaacgcggaccaaattcaaaagatacatgtgccctgctatagcagactataaccatgtggggatcaagaaactaataagtgctaatttaatcaaccagctggatggccgacaactccaagaactccaatatttgaacaaagatctttggagggagagggccga

SEQ ID NO: 27391 - DNA, 416 bp, Zea mays
  Clone ID: MRT4577_124997C.1
aacatttgattagaataagttaccaaaagcttcattaacatacgggagggcccaagattacttgaattatatttacgtctgactgttacaagaacaaactattcaagagggcaaaattgaacaactcacaaaagacgactcgcgctgatgaatctatgtaccatgcttgacatgatacctatgctgaacacaatgtacattggcttgctaggaacgggagcctggctcaaaaaatccataagaccatatgcaataaatagagtgtaccagaacaacatgcacagaccatgcaaattaatataccggaagtatagggtgcaacttttattgctggtccaagacccattgcttatgttaaagagtattacagtgcaggggtaaagatggcatatcctaatgagtgtgtcactgcgaac

SEQ ID NO: 27392 - DNA, 805 bp, Zea mays
  Clone ID: MRT4577_124998C.1
tgccttgtatggatttcgcaatggcgtctggggcatttcccacgagcgccccccctgccctgcccatttcgctctcctccctaggcaactaaacgccgcgctcccgcagacggtaccagccgccgcgatggggtcctcgtcctcgccaccgccaccaccgccgtggcgcctgcggtggtgttcaccccgcccccgccgcctgcttctgtgaatgtcgcgctgccgccggtgcaggtgccgccgccgcagtacgagaaggcgtccgcggggggcaagcatgacgtatcggcgttcggcttcttctgggacgccgtcgcgcgcgtccaggaagcgcacgcgagcctcgacgagtacgtgtctacctggttcgggttggatcagtccaagtaccagtgggcgcttaacgactactacgagaccataggcaaggtcagcaaggaagtggattgtataaaaggtggtatgcccaaggagcctactactaaagtgcagaaactctaaaaaaacaacttcgttttgtgttgtaagatgagtagctagcagcgtatgtatggagaagtatgttacatttttgtggagccttgaattgaaaggtggtcatctctgctttgtcggcggcccaagtgtaagccctgcaccgagcgccattcatctgggacttctggaggccgggccgcgaacggtcgctgttttgttccgccgttcaggatctactgtaatcctctaaggttatgtcaaagcacagaatcagtctaatctgcatgttgggcgttgtttactatcacgcccttgtgttttcatggct

SEQ ID NO: 27393 - DNA, 1464 bp, Zea mays
  Clone ID: MRT4577_124999C.1
gctggccagccgagttgaaccttctttttccgccaagggggatgacggcgctgcaggttttgatacacaccaagcctccatgcaccgactagaggtttagcgcgcaggtgttctcaatcgggagctaagcacgacgatgatctttgtataaggcttaagtatactgggtatagggccttcatggctgaggtgaaagattatgcctgcgaccgtgctggagtgcccacttcaagtagtgggagtgctgcatcctcagccaataattccgagggtaagaaggcgcgggttctaaagcgagagccatgccagtcaaagaggtgtggttgtgggttccgtattcgggcaattgtgccgatagctaactataatgaaaaagacaagacttttgtgtacttggaggagggcactgcagtgttcaagctttacgctgtgcattcagggcatgaaccagggccacttgatggcaatgcacgaattgttcacaggttggttggtcataagggagctcttgagtttgatccagacatttatggtgtcagtgaggaaggtgatcctaccttttcagcaaagggggatgaatatgttgatattgatgactcgcaccaggcagtcttgcagcaagtacgggatctgagatcagaagttctcttgctagaagggaaggtggctaagatgcacccagaattgttagggtcactgtccaccgagttgtctgaggttttgcacaggattaggaagtttaatttggagggtaatgtctaccaacatgagacattgatggtaggcaatgaagaagtcaggggatgggggtcagcggatgtatctcaccagttagaccagcatgatcgagcattctgcaaggatgatgagatgcttgatgatgatactgactttggctcaagccttggacctattgtctcgtgggataggatggaagcagagtgcgaggatagaaagatgctcatgggtgatagcccaaagtgcgacaagtggatgcttaaggatgatgtgggtgaatttgatgcgaagagtattcttaactgtggggatgatgatggcgtgggggattccaaggtcatcaaaccattgatgcatgatgacaccatggtaactggcccaagtttggtaggtattcatgtagaaggattttacgccggaacaaaatggtatgattcacaaggtttggattccagtgttgatggaggggatagcagttttaggcatggtggaatcgtgtgaattgtgataacctgatacctggaaggtcctgtaaattatgtatactagatgtatttagctcacaccagtttaattaagtgtctgtaggtggagcttcagtcaaagtaacatgtctgccctgatatatacaggctgcattatcaaagcaacttttgttttaacttgcatatagtccctgtattggttatctgcttgcttcaatacattaaagctatgtttctgttg

SEQ ID NO: 27394 - DNA, 1304 bp, Zea mays
  Clone ID: MRT4577_12499C.1
gcgttctttcattgcttatggattgtggggaatggaaccactctgttcaacagcaattctgtttggcaaaatattgtcaaggacacaagggatagaggttgttttttaaatgccactgatgagaaggagttgttgaatgcaattttcaagcttgctgttgagtatcctcacgcggacaatttagctggcgaggagacaaggcagcgattgagtaccaggatgagtctattcaatgtcgctgaggcaacaattacaagatcctagaagaaaacccgtggcagctctacactacaataagggtgataaatatgtctcgcccaatggaaggcgcgaggatgctgcagcattcgaacagtgccaacgagctgctcttgcgccggaagctggaggagcagcagcaggctgccgaacttcagcacgccattgagctccagagccgccgcctcatggatctccagctgctcggcctcaaggctcgcgcagctgcgacagcagcagcggcatcggcactgccaacaccagttgccaatgcctttgcgtccaaccatcctttgagcaccatggcagtcgagtcgccactagagtccggagagcagctcaagctgagcagtgggtttgctctggaggggaagctcaacggtggcgacaaggaagaatctgcttgcgaggcgagccctgacgccgctgatagcgaccaaagatcaagattcagtgcgtttgttggctgttgaaggttgtgctgctcttggtaaattgttggagccacaagattatgtagctcacattcttccggtcattgtcaatttctaccagtatctgaccgagaacaattatttcgtgatgattggggtaattgggctgcccggtgtaggcaagtcaaccatcatgaacgagctttgttaatatgatgcaagctacctgtggtaacaaaagagatgccaagtgcgctgaggatgcagaggccagaacatacatacagttcccattttctgaacacagaaaccaatggcaccgtcgaattcagaaagagcagaaagcaagttccttttttaactttctttctgatttggctggtatgatgatgtctgtagcacctgtgattaacttctgcattaggagggtgtccaatattttttctttctagataaacttttaaactctttgggcacagggaatggaagtgagtactaagaacagagcaagtgatatttatgtttctagataaacaggcgtgaggcgtggagtaaaaacagaggaggtaaagaaagggccttcaatcgtgaggcattcattttgattgttcg

SEQ ID NO: 27395 - DNA, 405 bp, Zea mays
  Clone ID: MRT4577_1249C.1
ccacccccacaaacctttgaactcctttttttatttatacggggggggaattactcaacaaaaaatcgtaaagtccccctactgcacagttagctaatcgttaaaactttactactactccacaaaataatcacaatgacccacactttagttcaaatcccaaaacggggcgatactcacacatgtttccaccgatttgttactgttaccactaaactttaccaacccctcgtgtttaactttaacctggattacccctccaacacgcccaaaaatcacagccaggcaattaggcaaacaacccgggggtaagggccgccccggccccggccacctttcaaacgcttggcccgcccgggccacccgttggggggctggggtggccgtgcaatcctcctggggccg

SEQ ID NO: 27396 - DNA, 198 bp, Zea mays
  Clone ID: MRT4577_124C.1
ccacccaggccctgaaaaacaataactaccttacacttgctgtaccacatcatgatgcccataccctactagttcactccattaatcctttttataacaactacaaccctaatacacttaaagatgatcccgtcgtcctcaaagccctctactatatatatatcctgaacgaagaaaccattgtgtactgctacaatt

SEQ ID NO: 27397 - DNA, 1319 bp, Zea mays
  Clone ID: MRT4577_125000C.1
tcgaggccggccgggaaaaaaaaaaaggaagcaaacaaagctctactgccttgtatggaattgcaatggcgtctggggcatttcccacgagcgccccccctgccctgcccatttcgctctcctccctaggcaactaaacgccgcgctcccgcagacggtaccagccgccgcgatggggtcctcgtcctcgccaccgccaccaccgccgctgccactgcccatgattgggcgggccgggaacctcaccatcttcatcacgccgccatcccccgctagcacgccccggggcgctgggcgcacgccgccgctcgagtccccgcgctcggatatctccacacccatcccgcagagggcagccccgtcgccctccctttctccctctccgcggaaccacgagagccgggccgtggcgcctgcggtggtgttcaccccgcccccgccgcctgcttctgtgaatgtcgcgctgccgccggtgcaggtgccgccgccgcagtacgagaaggcgtccgcggggggcaagcatgacgtatcggcgttcggcttcttctgggacgccgtcgcgcgcgtccaggaagcgcacgcgagcctcgacgagtacgtgtctacctggttcgggttggatcagtccaagtaccagtgggcgcttaacgactactacgagaccataggcaaggtcagcaaggaagtggattgtataaaaggtggtatgcccaaggagcctactactaaagtgcagaaactctaaaaaaacaacttcgttttgtgttgtaagatgagtagctagcagcgtatgtatggagaagtatgttacatttttgtggagccttgaattgaaaggtggtcatctctgctttgtcggcggcccaagtgtaagccctgcaccgagcgccattcatctgggacttctggaggccgggccgcgaacggtcgctgttttgttccgccgttcaggatctactgtaatcctctaagagcatctccaagagactcttcatttttttctctctatttgactatctatttacgttttcataaagattacactctatatatagtatctcagtccaacagactatctatttagtttggctagtcaggtggctagccaaatttagctagtgagagagccaatttacagagtcacatagcttgcgagtcagatagctagtctgttggagatttaatttactattgagtagcaaaaatttggcttagcaagtcatttagctagtctcttgaagatgctctaaggttatgtcaaagcacagaatcagtctaatctgcatgttgggcgttgtttactatcacgcccttgtgtt

SEQ ID NO: 27398 - DNA, 265 bp, Zea mays
  Clone ID: MRT4577_125001C.1
ctagagtggtcatggctttatgttagtaaagtcggttctaaaactaaatattttgagcatggtaaacatcttaagaatctggataggaatgtaactctttcgagtagaaatactttgtggaatgtttagatggttgtcacttgccatgaatcgaacttttaccagttttatggacgactatattttcatttttatgtttaagcaaatttgagaaagtttctataacaaaaaatagataaattttctatcggacacatcatttatt

SEQ ID NO: 27399 - DNA, 257 bp, Zea mays
  Clone ID: MRT4577_125002C.1
gcctggaaagctcacttgtctatcaatgaatagatgcaagagactatcataggcacgggtggccacactatttgaaacggcagacccgactaacaatttgtatgcacagggcgaggctgaacaaaacactggttatcaccaggcatatatagatcaatgttgaaaacgacctcgtcacaaatttaacctgtgccggtatcaggacttaagacaccagtatcctaacaaattatgggattggatcgcttgcctgttct

SEQ ID NO: 27400 - DNA, 970 bp, Zea mays
  Clone ID: MRT4577_125003C.1
catgaatttacatcttctagccctcaagtgtcaagaggtcccagaaattgtctgagatcgatataaatagagcattctgtaataaaatgttccagctaccaaacgataattttgaccatcacaacttcgacttgtccagctctgcctctattagtcggttcagctctgcctctataatttttttggtccactgtacaatgggctcctttattacctccttgagaatccttttcagtttggtccactgtctcatcatccatcgaatcacgacccaagcacacaatctaaaaagcaaaagaattgttaagagtgactaatgattagccttattttctgaataattcagtttatctgccacgccatcattagtagcaagtgacccttctgaatctgaatcagccttattttctgagccctcaacaaggttctctttctgggaatcatggcatctctttgaagatgactgacgaggaattacttcattggagctttcaatttctcgaatagagttctgacccagtgagcttcctttccatggcctttgatcctaagtagattctcgtatgcaatgtgaatcaccgacagatgctagtcacaacccactcatctattatcacaaatgtcagccatagcctagaaatctttatcggtcttgacgaacgctacaacaagcgcatgtgggagcacggcaggacactcctccttgcagaaacatgtaggaatggcacgcaagacattgatcaacatattctgccttgcatatatggaagctcaggcgtgttgactattgacgacgcaattgaggacggtggggaagctactattgccgaccgcaccttgatcgtgggcatctcgatcccaaccctgcacaatgaacttgaggttcttctcccttcctagtccaaatggttgtgctgtagtcaagaagcaaatgccaaaggagacggacgcgtgggtccggacgcgtggg

SEQ ID NO: 27401 - DNA, 655 bp, Zea mays
  unsure (1)..(655): unsure at all n locations
  Clone ID: MRT4577_125004C.1
ttttttttttttttttggaatccttgtacataacagtctgatctttggttttttttctatctttccacgtttaccgtcgtagacaactattaacgctgccagtccaagcctttgactcgcagcttcgtcctcggcgcagctcctgcacagcttcgtcgcgtcgtgcctccccatcgcggttctacgtcccgctcagtcgctctacctgttcgtgagcgtgaacgctccgtcattccctggcagcggcacctgcggaacgagggagtggaggcggcgaggagctagaagaaccatgtgagcgcggaggatgtggagtccttctcggcgagcacgaagatgacgacgatgtccgcaagaaccgttgcttcgccaccgacgatgcggatggcctcacggagccgcctctcacttccgatgccagcgagccgtgttgcattccagacgacggcggtcaggtggagcatgcgcgcgaaggagatctcgatagcggtgccgaacgcctcgtagaacacgccgcggccgaggccgagcgcgcggggcactagcaactgggagatggaggcgccatatgatctgatccgatatgaagttgaggacggggaggtggcgcacgggccggcgcaagcacgtcggtgttgtcttantcggcgcggca

SEQ ID NO: 27402 - DNA, 526 bp, Zea mays
  Clone ID: MRT4577_125005C.1
gtgcatccttaatttctcatgggacgcttaccatcaacccactgactcaattatgggattacccctcctctccaatctaacaaaggaaccgactggtggggatgtgggtaaaacaggtgcacgcatttagcctgaaccatgagtgcacaaaggccaacatctgacgccaagcgtaagatggaggccgtgttatccaccatctgctgctaaaaccgacgctctcgtgaatgtcccaaaaagcaaggggcgcttgttaggacctagctacgccaacagcatactattgtagcactgctgccaatgaaacaggaggggcccagtgcgcacattcgctgaaaggcaagaaagcctcctggaccatagaggccagagctacctcctctgaaggcaggagtggctccagccgaacataagccttagggttcactgtatactgcttattgaagggaagaaacccgggagctgcagaaacaaaaaaggcccggcccatgtacgtgagggccccctgtttaagggaactactgca

SEQ ID NO: 27403 - DNA, 196 bp, Zea mays
  Clone ID: MRT4577_125006C.1
gacccactcgtacctagcaacatacatagataagcacactatcaacatcttagcaccactgtatacctacatggctaaggctccttgccctccttgctatttcatcaagcgctactaccttgactcttattccacaatgctcacaacaatacctctttccagcgtcactctcatcatttcaatactcaactataca

SEQ ID NO: 27404 - DNA, 628 bp, Zea mays
  Clone ID: MRT4577_125007C.1
caaaacacaagtagggttaggaaggcggcggccagcggcgagagcgcgagaggaagagcaggaggaggggtcggccatgacggggaaggcgaagccgaagaagcacacggcgaaggagatcgccgcgaagatcgacgcggcgacgacgaaccggggcggcggcaaggccgggcaggcggaccggctggggcaggacaagggcgggcatgcgaagctggcgtgcccgctctgccgcaccccggcgcccgacatcaagtccatgcagatcccgcctgcatggggcgcaattcccttcggtttcaatcccatccgccgacccgatctataatcaatcaaaccgccgccctccggcctggcggctgccgcagtcggcctgcggtgtactgttagtctgctgctgatttccgttgttatactgctggtacatgtgtcgtgtgatagatgtgtcaactatatatcaatctcgtcgccggcagctctggcatgtttgagtatgtgttgctgctctgtggtgccggcgacgatggctcctagtactgttaatgtgatcgggtctccttgaacaatggcataaatatgttgcttgtttactttttcctctaatggcaagtaaagttcatgatttgcg

SEQ ID NO: 27405 - DNA, 1375 bp, Zea mays
  unsure (1)..(1375): unsure at all n locations
  Clone ID: MRT4577_125008C.1
gtggctttcattggtaactcggggccggccgggattccaagctctcttcattggttcatagctagctagttcgcctcccaaaaacacctgccctcgtgcgtggcaggagcacgggcacgatgatcagcacagcgcacagccggcagcagcaccatgccttcgagaagagccctggcaacagccacatgaagagcatcgacaggaagctgcagcaggccatgagccaggcggccagcaagtacatgcagaggatctaccctctaggcatgcagaggagcagctccagcctcacattgtcgtcgctctcgctgtcgcagaactccaacgactcctccatcagcagctccaactccagctgggagcccaaggtgccgctgctctacggcggcaccttcagcccctggggcgacgtcatggtgtctcgggagatgaggcgggaggacgatgacaaggtcagtgaccatgacgtcgaaggaggcgaggaggacttggactgcagtgagccggggagcctgcgtaggtgcagctggatcaccaagaacagtgacgaggcgtacgtccagttccacgacgagtgctggggcgtccctgtgtacagcgacaaccggctgttcgagcttctgtcgctgtcagggatgctgatcgaccacaactggacggagatactgaagcggcgggacatgtacagggaggcgttcgccgacttcgaccccagcgcggtggcgcgatggagccggcgtcggctacatgtggggccacgtgaaccaccggccggtggtgggcaagtaccgccaccacaagtacatcccgttccggacgcccaagtcggaggcggtgagcaaggacctcgtccgccggggcttccgcctcgtcggccccgtcatcgtctactctttcatgcaggccgccggcatggccatcgaccacctcgtcgactgcttccgcttccacgactgcgtccgcctcgccgagcgctcctggggcatcaccaacgtcgccgcgtaggcgtagccagccgggccctcaatatctgtgcatgcatgcctctccaactttttccacaccttcttcttggtgttgttattgttttttttgtttggagatcgaaattgtgtgtgaaattacgtagagtatgtagctctactaagttatgatgtaatacttctattaactctttgccaatgaaaagtagtactgaactaatataaataaaaaaagattggagagccaaattgtgcgtgaaattacgtagtgtatgtagtactcctcttcgctccgtcgtaatacttctattaactctttgccaatgaaaagtagaaaaaaaaaaaaagtcgtaaaaaaaaaaaaaaaaaaaaaaaannnnnnnnnnnnnnnn

SEQ ID NO: 27406 - DNA, 676 bp, Zea mays
  Clone ID: MRT4577_125009C.1
cgggggggacgcacgcgtccgcccacgcgtccgggttaggaaggcggcggccagcggcgagagcgcgagaggaagagcaggaggaggggtcggccatgacggggaaggcgaagccgaagaagcacacggcgaaggagatcgccgcgaagatcgacgcggcgacgacgaaccggggcggcggcaaggccgggcaggcggaccggctggggcaggacaagggcgggcacgcgaagctggcgtgccccctctgccgcaccccggcgcccgacatcaagtccatgcagatccaccacgaggcgcgccaccccaagctccccttcgagccggagaagctcctcaacctgcactcctccgcccccgctgctgctgccgccgccgccgccactgccgaggccaccacctccaagcccaagccccgcagtcggcctgcggtgtactgttagtctgctgctgatttccgttgttatactgctggtacatgtgtcgtgtgatagatgtgtcaactatatatcaatctcgtcgccggcagctctggcatgtttgagtatgtgttgctgctctgtggtgccggcgacgatggctgctagtactgttaatgtgatcgggtctccttgaacaatggcataaatatgttgcttgtttactttttcctcctaatggcaagtaaagattatga

SEQ ID NO: 27407 - DNA, 294 bp, Zea mays
  Clone ID: MRT4577_12500C.1
gaacccccagccgacctgtagataacttgtgatagtgggtgaaggggtgatgtttgtctctttcccactcctagagtccgatgaagaagttagatgagtagatgatcactctctcatacatcggtgcatacctggctaccaaggttgacttgacggcttgcttgtctatacctcgtgttcgctcgctcccgcatttcaacatatcaacgtagcatagcgacttagacacattgatgaggttgagaggatgaacggaataactggaaagggtcaaggtggaatcgtcgaatgctc

SEQ ID NO: 27408 - DNA, 840 bp, Zea mays
  unsure (1)..(840): unsure at all n locations
  Clone ID: MRT4577_125010C.1
cctcgaggccggccgggacctctcccatgctctcttcattggttcatacttcatagctagtttgcctcccaaaaacacctgccctcgtgcgtggcaggagcacgggcacgatgatcagcacagcgcacagccggcagcagcaccatgccttcgagaagagccctggcaacagccacatgaagagcatcgacaggaagctgcagcaggccatgagccaggcggccagcaaaactccaacgactcctccatcagcagctccaacgccagctgggagcccaaggtgccgctgctctacggcggcaccttcagcccctggggcgacgtcatggtgtctcgggagatgaggcgggaggacgacgacaaggtcagtgaccatgacgtcgaaggaggcgaggaggacttggactgcagtgagccggggagcctgcgtaggtgcagctggatcaccaagaacagtgacgaggcgtacgtccagttccacgacgagtgctggggcgtccctgtgtacagcgacaaccggctgttcgagcttctgtcgctgtcagggatgctgatcgaccacaactggacggagatactgaagcggcgggacatgtacagggaggcgttcgccgacttcgaccccagcgcggtggcgcggatggaggaggaggacgtggcggagatcagcggcgacagggagctgaggatcgccgagtgcagggtccggtgcatcgtggagaacccaggtgcatccagaggttgggcagggagttcggctccttcagcggctacatgtggggccacggacnacccgggnccgggggtgggcaagtaccgccaccacagtacatcccgttc

SEQ ID NO: 27409 - DNA, 1717 bp, Zea mays
  Clone ID: MRT4577_125011C.1
gcattggcttgtactgtttgaagttaataaagccttctcttcactgaaatacatcttttaactgttagacattgcaatgatatcccatgattagatacagtcatgtaaaacacacatctagaagcccttcagtaaatactgccattttctttaccttcaaattttatatattgttgactcttgccacttgttaccttatttttctgggggatgaacaagagatagaagaacttatggtcggccttgaaacctacctggttctacaatgtcctgtcaaaatataccagacatttccaaatctagattatttaaacattttccagtgtcttatgttcttgagtcagcttaaaagtgttgcaagcatcttggacaagctgatttatggaagcaaggatgatgctctccttgcataccaaactgcttttgatcttgctgaaaatgaaaactaggctttcctcctaaatgtgcggaatcaccttggtgcattgagttcacatacttctgcccatgtgtaccctctgtgcagactggttgtacaaaggccaaaaccacgaggcgaaggaccaaaaacaccattgggacctcgaggccggccgggcccgtccccaaaacacaagtagggttaggaaggcggcggccagcggcgagagcgcgagaggaagaggaggaggaggggtcggccatgacggggaaggcgaagccgaagaagcacacggcgaaggagatcgccgcgaagatcgacgcggcgacgacgaaccggggcggcggcaaggccgggcaggcggaccggctggggcaggacaagggcgggcatgcgaagctggcgtgcccgctctgccgcaccccggcgcccgacatcaagtccatgcagatccaccacgaggcgcgccaccccaagctccccttcgagccggagaagctcctcaacctgcactcctccgcccccgctgctgctgttgccgccgccgccgccgccgccgccgctgccgaggccaccacctccaagcccaagcccggcgtccgcggcagcctcaagaagtaagcttgctgggcttggttggctcgcccgcctgcatggggcacaattcccttcggtttcaatcccatccgccgacccgatctataatcaatcaaaccgccgccctccggcctggcggctgccgcagtcggcctgcggtgtactgttagtctgctgctgatttccgttgttatactgctggtacatgtgtcgtgtgatagatgtgtcaactatatatcaatctcgtcgccggcagctctagcatgtttgagtatgtgttgctgctctgtggtgccggcgacgatgactgctagtactgttattgtgatcgggtctccttgaacaatggcataaatatgttgcttgtttactttttcctctaatggaaaaaaaagttcatgattgaaaaaaaaaaaaaaaaaagttccctaaaaaaaaaaaaaaaaaaaaaaaataagatctgccgttgggtgtttaaaactgtcagggtttcatgggacagatcctctcttgtgcttgtgtatgaatagtttgtattgttcggatatgcacggctagcccaaatcttccccggctttgcttatgcccacttgaaccacctaggacaatcgcctttgtaacccatgtgacagttgttaggcttaattgttcttggtttatgtattgtgactagaaataggaacgtagttatctagtttg

SEQ ID NO: 27410 - DNA, 1001 bp, Zea mays
  Clone ID: MRT4577_125012C.1
cctcgaggccggccgggattccaagctctcttcattggttcatagctagctagttcgcctcccaaaaacacctgccctcgtgcgtggcaggagcacgggcacgatgatcagcacagcgcacagccggcagcagcaccatgccttcgagaagagccctggcaacagccacatgaagagcatcgacaggaagctgcagcaggccatgagccaggcggccagcaagtacatgcagaggatctaccctctaggcatgcagaggagcagctccagcctcacattgtcgtcgctctcgctgtcgcagaactccaacgactcctccatcagcagctccaactccagctgggagcccaaggtgccgctgctctacggcggcaccttcagcccatggggcgacgtcatggtgtctcgggagatgaggcgggaggacgatgacaaggtcagtgaccatgacgtcgaaggaggcgaggaggacttggactgcagtgagccggggagcctgcgtaggtgcagctggatcaccaagaacagtgacgaggcgtacgtccagttccacgacgggtgctggggcgtccctgtgtacagcgacaaccggctgttcgagcttctgtcgctgtcagggatgctgatcgaccacaactggacggagatactgaagcggcgggacatgtacagggaggcgttcgccgacttcgaccccagcgcggtggcgcggatggaggaggaggacgtggcggagatcagcggcgacagggagctgaggatcgccgagtgcagggtccggtgcatcgtggagaacgccaggtgcatccagagggtggccagggagttcggctccttcagcggctacatgtggggccacgtgaaccaccggccggtggtgggcaagtaccgtcaccacaagtacattccgttccggacgcccaagtcggaggcggtgagcaaggacctcgtccgccggggctttcggctcgtcggccccgtcatcgtctactctttcatgc

SEQ ID NO: 27411 - DNA, 822 bp, Zea mays
  Clone ID: MRT4577_125013C.1
gcgctgctcgttaacttgccggacctctctagatccatcctgatcctggtggctttgtgggtgaagaaagaaagaagatgctggacaagctgtgggacgacgtggtggcggggcctcacccggagacgggcctcgagaagctccgcaaggccgccactgcccgccccatcctcatcgacaaagacgcggatgccggagccgcggggagctacaagcggacgcagtcgatgccgtcgaccccgacgacgccggtgacgccgtcgtcgtcgtcgacgacgacgacgccgcggggcgccagcaacgtgtggcgcagcgtgttccacccggggagcaacctggccaccaagggcatgggtgccaacctcttcgaccgcccgcagccaaactcccccaccgtctacgactggctctacagcgacgagaccaggagcaaccaccgttagatcgatcggatgaggccgaggatgatgaagggcccggcgtctctgtcaggccatcatgtttgctggtccttgtggttatctaaaacgcatgcatgctctattattatagtacttctgcagttctgctgtcgctgttgctgataaagactttgccgtttaattgtcctttattatgtgttattatggagtgatgagtgatatgcagtcgctcctagtagtgagtagtgagtatttacttggtatagtacttggtctggtcagttcctctgactcggcttggccattcaaggggagccctgttgttgctgctgttgtgtgtgtggtgtgtactagctgttctccatcatcttgtaaatattttgctttggccagggcgtgt

SEQ ID NO: 27412 - DNA, 513 bp, Zea mays
  Clone ID: MRT4577_125014C.1
atggtggggtcttataaactgataaaaaatatgggggaggactgaccaggtaaaggaaaacggcaaagacgggcaaggcgaaagaagaagggaaagctgggaaaacagagaggggggctggaagggaaacagaacaggggtgctcatgaacaggaaactgagaagaaatgtccagaaattccaggcagcgcggtgacattttggccgtccaccaagctccataagatcttgggcaacaaacaaaccccaaaaggccattaggaaaaaagggaacccgaggaccagccattaaaaggagcaagacgttgaccgggcatcaagctcaacaggagaagagaggacgccctggctgacacggggaagagaggacaggctaacggtcaacggctctgggaaggagacaaacgtggaaatgctgtgggatggtgtgcaaccgggggagaccaacccatcagaggcgattgcggacgacaaacccacaggagttggaggccgaatgccgacaaaagttga

SEQ ID NO: 27413 - DNA, 346 bp, Zea mays
  Clone ID: MRT4577_125015C.1
aagtactctctccgtcccaaaatattagttgtttaaactttttaacttttatgtctatgttcaaatagatgatgatgaatatagagacatatataaaataaatacattagttattgtatgaataactaaaaaggtaaaataaattttattttgggacggaggaagtatatatagagatagttcggtgagatctttctctgatatgcaatgtggactttctgttaatcaaagatgagattttgcataaaaatgatcttgtatgtatctgaataatcacatgggatcatcttttttgtaagctgaggataagatcctgcattcatgcttgttgaaataaccttttgat

SEQ ID NO: 27414 - DNA, 1234 bp, Zea mays
  Clone ID: MRT4577_125016C.1
cattgggtacctcgaggccggccgggaaacctcattccatgctctcttcattggttcatacttcatagctagtttgcctcccaaaaacacctgccctcgtgcgtggcaggagcacgggcacgatgatcagcacagcgcacagccggcagcagcaccatgccttcgagaagagccctggcaacagccacatgaagagcatcgacaggaagctgcagcaggccatgagccaggcggccagcaagtacatgcagaggatctaccctctaggcatgcagaggagcagctccagcctcacattgtcgtcgctctcgctgtcgcagaactccaacgactcctccatcagcagctccaacgccagctgggagcccaaggtgccgctgctctacggcggcaccttcagcccctggggcgacgtcatggtgtctcgggagatgaggcgggaggacgacgacaaggtcagtgaccatgacgtcgaaggaggcgaggaggacttggactgcagtgagccggggagcctgcgtaggtgcagctggatcaccaagaacagtggtaagaaattcagtagtgctagctaactttgtttatgtcagtcctttttttgtttgtgatgttcgttcatctatttagtactacctccgttcttgaatatttgtcgctcgctagtttatttttaaactaaaacgcgacaaataaaaaagaacggatagagtactttatttcacatgcactacattatgatggacagtttctaatccaaacctatcatctcatccaatttgacagagctgggcttttgagaacatcggtttctttgcacaggagatgtgcatatattttttattatctaaaaatatgaagatgcatatatatattgttatcttaataaaaggagatgtatgtatgccctcggctaactgaatgatgcaaaagaaagtaaatttcaccaaccaatgactatataaagattgttcccaccttttttaaaaaaaaggaaaaaaaaacaaaagagagagagagagagagaggcagagagtttggatagacaaaccttgttgacatcagagagcagacagccctgttgacatcgctgacttggtgctttgatttgactggccaaacctgagtgctggtgagatggagagtactaccagcgttcagttgacaaattcatcagaaagggacttgttgggtgaagtttgttaagcaaactagacttaaactagggaccaaaccc

SEQ ID NO: 27415 - DNA, 161 bp, Zea mays
  Clone ID: MRT4577_125017C.1
aaacacaactgtaaccccgggggggccgatctaatatcgagtatatgcattattatatacaagtttaagccacatagataccgctttctacccaccaaattttccaaaaatatgcattcacagttaaaaccacaatttcctaacaacaaaaaccctttaaa

SEQ ID NO: 27416 - DNA, 229 bp, Zea mays
  Clone ID: MRT4577_125018C.1
ttggtttgcacctgcacgccgacgacccgatcgggtgctttatggaccagctgggggccattcgcgacttgacggacaaacagacgcgctagcacgagcacaacaaagagtcgcagggcctcgacgacgaactatggcatgtggtggcacccgatgtacgagcggccggcgtgggcggagactgggtggacctgaaccgcaactactatgaaccggcattacgaaaagt

SEQ ID NO: 27417 - DNA, 444 bp, Zea mays
  Clone ID: MRT4577_125019C.1
tttctcttcgcgggccttccccggacgtcgagcaaccttctcaaaactggtgcggacaagaaaaatcctactgtttaattaaaacaaattattgcgactgttctttagtattcttactcaattttttttttgtccagtgttttttatgttaaattgttaaaatttaatcattctcgttttttctttctcattatctatttatttattaaattattcttattcattttttttttatcttttttatctatattaatatattatctttatttattattttcttcatttttatttatattattaacttattttttatttatcatttatttttatatttttttatctttttaaattctttattatttattttttatgtatttttatttctattttattttttctctattaattattttttatatatatatttatattttttttattaat

SEQ ID NO: 27418 - DNA, 339 bp, Zea mays
  Clone ID: MRT4577_12501C.1
gtttggggggttttttaaaattttttttttttttttttttttttttttttaatcaggcccttccaagctgggggattagcaaaccacaggcggtacatggaaaataaatggcccaacgatgtcattcaaacagcaatgcaacaaacatgggggggggggggggggtataccgtagccttccaaacattcaagccccccaatatatcgaaaccatcactctagcaaatcccacaaacagaaggtaaaagggccccagctctgccgggggggcattttttatggggcggcaaaaaaggataccctccccggttgcgagggcggttcagcttcctatttccc

SEQ ID NO: 27419 - DNA, 347 bp, Zea mays
  Clone ID: MRT4577_125020C.1
aaaaaaaaaaaacatacaaaaaaaaaataataaaaacttaaaacaaatatataaaaaaagggcaggggctctattagaatccgggctgatttcacagtacatactgaatcataacccgtgctatcgaaggcaccaaaattcaattaactggacctcattttacatcattgaccactgggaaaacaccgtcgttactgaaataaaactgcttgaaccaaattcaagtttactaaaatggcttactatttatcaagctcggatcttagcatttatgcctacaatgctcacccttgatggcaaatgggcaacccccatgagcgacgcattaaaccccgtaggtgcccttt

SEQ ID NO: 27420 - DNA, 233 bp, Zea mays
  Clone ID: MRT4577_125021C.1
ctcctatttgcaacctccaccaccctacaacatgcccctacgcttttcacaacaccaccccccacttaacaaactatgtccattagtatacccccttcctaactacctacttgaatcattcagcagcaatgatatactcataactacccacgcatcaacatccctgccatcatcagtgataccaatgacctgaatgaacaattaaactgaaaaaaaccaaaaaagtccattcc

SEQ ID NO: 27421 - DNA, 115 bp, Zea mays
  Clone ID: MRT4577_125023C.1
cttactcctgcattacagatacctgtgggggaagggcccccactagcgcgagggctaccaccaagagcggcggccgacgaagccatccctgccggcggacgcaaagaagatccag

SEQ ID NO: 27422 - DNA, 713 bp, Zea mays
  Clone ID: MRT4577_125024C.1
attttcggtgggagggaccaaagcagacccgcggagggaaggccatggaggacggaggcctgcgcgcgagtattctcgccaaggatgatgcaacatgccatggcgaagaatcacagtctctactggaagtatctcaacagccagagcttaaacctagaggttctgactggagaccacctgcaatcattcttggacttgaatgcttggagagcatggctttcaatggcatcgcgacaaacctagttgtgtatatccgctcagttctccatggtggcattgcctcaagtgcttcaattgtttctctttggtatgggactagcttctttgtgcctatacttggagcaggcatagcggatgcttactggggaaattacaagactgtcttgatctcccttgttatgtacctacttggcatggtactcattacagttggatcatttataccttctgctccagccttatgcaactttggctcatgctcgtcatcaaaaggaactgagaatctaattttcttctcaggtttgtatctatctgctgttggttgtggaggagtaaggtccgcattgcttccacttggggcagaccaattcaacaatgagaacagtctagatacgccaaagaggaggaatttcttcagtttgttttatatctctgacatctttggtgtgattacttctgaaaccattgtaaactgggttcaggaaaatgtgagc

SEQ ID NO: 27423 - DNA, 166 bp, Zea mays
  Clone ID: MRT4577_125025C.1
cttctttttttttttttcatcacaatgctgtctggtcttattcatcatatactgatagagtccctgcttacagtcaattgcccctctcttccacaagtggccgcggccagctacatgcgcgctgcactttatcgtgacgcttgggccaacccggggggtgtggggg

SEQ ID NO: 27424 - DNA, 591 bp, Zea mays
  unsure (1)..(591): unsure at all n locations
  Clone ID: MRT4577_125026C.1
ggnanatagtattggtgagggctgacatatctagactcccttttgtgagtggttcaattgacgctctgcatgcaggtgctgcaattcattgttggccatccccagcttgtgctgtaagactaatctgaattggcaatttatgtcaaaaagttttcactgctttatgtgttttataattacattcttgtagagcttaacaatgaacccctgtgcttacagtgtttgtaagtattaaccaacttaatttgttactccacattcttctgtgcactcaaaatacatggcagcatgatagtttgactactttcatcatgtattttctatattaacctaagtactagtttgcactttcttatgtgccttaaaatatgtggcagcatacaatgtcaatgaatcttgcgcgttgaacacgcatgcacgttacatttgtgttcacaatcatgtgagtgcatgagcacaacctccaaacgagtaagacaccaacttattcagggtcacttagtacaatctacaagttcacaaagcttgataaaataacaaacaaggaattgcttttatgaacaacttcagcaatctttcaacatctcaatg

SEQ ID NO: 27425 - DNA, 508 bp, Zea mays
  Clone ID: MRT4577_125027C.1
tggcacacccttcaacagtgcaagctgaacaacctcgaggctgaagggcaatatggacgacgacagcttactcttgcccatgatcactcctgccgtcagcggccgactgttattagaagactatggtgcagccacacaacatcgaccaatagaggaccaaaccaacaccaggcgtaagtagttgttcacgcatcagcacagtctggaaatacatcatcaacgacgccatttgagggtacgaacaaagttgctcgtgacaatatggccgatatccgtaggacagaaacacaatatccataggtaccctgctcgcattcgagatctaggagattactacactgtgccaaggattgctgccatcgatacttacctaccacaggtacaaccgttgggcaaggcggaagacgtgatgtccatggcggcatatcactgaatgttaaaatccgtctgctcaccgcattcaatgaactatgcgcacgtcttcgtcgacaacaatgcccgcaccctc

SEQ ID NO: 27426 - DNA, 436 bp, Zea mays
  Clone ID: MRT4577_125028C.1
gtgcaaactagctatagtcagaatgtcatgatgcaaattccgcttcaggatcgtctcactgcaacgtagatccgcattgtctgcttcgtgactacggcaaggcctacaaacaatcaagttgcccgaccgctattcatgatgtcattctgttgccggcttcttccttatcaaggggaccactatacttcctacatataccatatggctgtttcgcctcattcaaatgaggatcgcactgtgcccgaccacttcctttctggctgaagaattctctgaacgtcggtctggcagggagcaccatgttaccagcctatgacgcagcaccctatgcagactcatctgaactcttcaactcacaactgtgcttgggtttgtattactgcttattcctgaccttgcgccgacgacaagttcaggagatgctggaggtgactct

SEQ ID NO: 27427 - DNA, 241 bp, Zea mays
  Clone ID: MRT4577_125029C.1
gacggataatatcgtccttctcgggacaaggcacctcacgagcccttctcatccgcatcagatctagcgccgcctccttcatcccgctggccggcgagctcctcagcacggtgagtcccctttcccctctactctcctcttcccctatgctctccgcgtgctccagcctgctgaccggcgagctgctcagcaaggtgcggtgagtcgcctatcctctgctctcattttcctcctttatccg

SEQ ID NO: 27428 - DNA, 519 bp, Zea mays
  Clone ID: MRT4577_12502C.1
aaaaaaatgtcacctttatttaatggtgatttagaatagaatcacccccaagattcatacttggggggttttattttgctttgggccggaactagtttttatttacattactctgaagtctcactttcggactcattcgaaaatcctggggagtattggtggtgaaatctaggagggaaggccccgggctcttctcccctattggtcttgatgcttcgggcttgctcccgggagatgcgggaagcattagcgaccacatcaactgggaaggcgcggaatactgagttttttcctgcaagggggctgacaaaggcgttagcgtttgtcttgattgcaatatattggcatccttcaccctttgcttttttcaaaacagcataatgttggggaatgatcaatagttgtccagggcgaaggacaccatcgaacacagtctttccaaagttactaaccacttgaactcgaaattgcccttgaatcatttagaccaaactatgagccttgacattccaaaagggg

SEQ ID NO: 27429 - DNA, 382 bp, Zea mays
  Clone ID: MRT4577_125030C.1
attaacacacaagtcgaagcagatgggcaacaacgtgacagcaatgtgataccaagtacataatacgctccttgcgctgcttgggctttttgggaggccaccaaatgcctacattaaaccagagggctgactcactcaaagtaccaatattatacatgcacctgccaccgaacacttaggtgggggcagtacaaccatctgtgctagcctatcggcttccacatataattgcgtgcgagcgcttcacaactatctattgcccacttgcaacagcgatccttggctcatttaacaatgcaaaccatcctttcgcagcagcaacaacaattactacctgaactgaggctgctagccatggtgtaccctgtcgcctacttgcaat

SEQ ID NO: 27430 - DNA, 391 bp, Zea mays
  Clone ID: MRT4577_125031C.1
tagtcggcggccgcgcgttcaccgttggccaggccagtcgatccctatgtggccgccgaagacataagcatagccttctttgatgtggaccgagacaacgaacctgccatggacgctcgctgtgtggccaacgagcatgcggaacacgaaaaatcccagaggacagggcggagccaccagatctgacggtacgcaaactccttccccaggcataatgctcgaccagaccgtggaagacaagactgcacaaaaaggacgacgtgagactcgtttacacacaacatacactagctgacgcttgatcgagaagcccaagctaatgccatacctgtaacgctgaattcgaacggtatctcctgcttgaacagtccgcccggatcgaggcaccgct

SEQ ID NO: 27431 - DNA, 271 bp, Zea mays
  Clone ID: MRT4577_125032C.1
catataaccgagatccagtcatgcaccatgtaaaaatgattttttagctcatgtacattaaaggataacgttgttttttaaagatatcagtcataaaacaagaacttatgacatgctttagaatatgaagtaaaaagtgtacatgtcacaatatcatacataagagtatgcaacaaacacaaattataatatacaatgcaaaaatatgtaaatcaaagtgcatattatacatagaaaataacaaaacatataaaaccaaataatctcaaac

SEQ ID NO: 27432 - DNA, 300 bp, Zea mays
  Clone ID: MRT4577_125033C.1
gcgaaatgttccttccatccaacatccagagtgccgaaaccgacggcagaacctgcgcgagagcttgcttggtagaggagctcgctgctcctgctcgccacccagttcatctcgatcattcccttgtggcgttttcctctccccgttcctttctgccgctgtcacgcaattactaacgccgacgaattgaagaagaaaacgtcactgcagcgagctgtgagcgatcttgcgttgatggagccagtgtcagcctgcgccaatgggaggtcggattttggattacagataggtacaggaggg

SEQ ID NO: 27433 - DNA, 341 bp, Zea mays
  Clone ID: MRT4577_125034C.1
cgggctagacgcggggcccttttttttttttgggttttcgaggaattgtttttgtccgtccgtccatgcaaccaagagaaagaatttccaggccctgggaatctgcaaaaatggctactgcaaaggcaccgtgagttggacagaacaagcacacacagctagttgttcatcagcagggtgactggtgtgaagaagacatttattttgggcgtttctttttcccctttttatgttgaattcctgctggttgaaatgaaataactgttatctggtgtttttggctataataaaaaaaaaataaaattaaacaaaatttaatttttatataatggagtttattc

SEQ ID NO: 27434 - DNA, 656 bp, Zea mays
  Clone ID: MRT4577_125035C.1
gccggcctggcttgcaagagtggtataccatgacgaccggtacggaaacagacacggacgccgcggagtcgatctatagcccgaccatctaaaatacgccttcgactgtgatctgttagtctccttgaactccgacctccttgctatgaatcgcagagaagagaggaacgcaaatgattatgaaagacgacctcactgatcacagacacaaagatgtagatcctccccgcggcaatcaatgttaactcgctcttcggctcgctcgccacgtccctgaactccgactgcgctcggccgccgctacaacaggtttgatgacgaccgccatcttcttcgcgcaggcactactcgtgcggctagccccgacactaatcactcctcatgtagggtccgcttcggtgcggcatcggtgtcgcatctcgcgatcatgattgcccgcgaggacaccgccgagtggtggtccacctccgcgcgcgtattactcatctccttcactcagggattcgataacgttccggatactcctcggctacgtatccaaattcaccttagatggactggccgaacacctcatctggcgcggcatgggcctggtcggtgccgtgcctgccgtattcctccgtgtcggcagtctcgatatgctagagcattggcgc

SEQ ID NO: 27435 - DNA, 313 bp, Zea mays
  Clone ID: MRT4577_125036C.1
cattatttttcctcagtggagcacaaggcttaccgcgtgtgtttttttgtatagcattcgctggatctcaggtgccgaagtcacagatctctgagacatacaagtcatgtgtgggcagtgaaacagtctgagacacggaaatcaagtgaggaagccacaccaaaagttgtggcgttcagtccgttagaagcagttatcgctaaacctagaagtagtcccctgtcaagtgagagctctaaagtaaggcgatcagagatagcaacccaggtgaccttttacatgatcccagtcctgcttattgccttcaagaaca

SEQ ID NO: 27436 - DNA, 261 bp, Zea mays
  Clone ID: MRT4577_125037C.1
ttagacacatggggatcagcaaagccgcagggcgtggtttggatcgaggcacagaacagccctacgatggtcatcgtgcacgccgcgtgcctggctgtggcagctgccagcgcctctggagtgcataggccctgcccatgcgcggggctgaagggcttgtacggcgctggcgcgggcctgactacgatcatgggcaccggcgggctggacccctacactgagcacctgaggcaggcatattgcagaccgatggcggcgggg

SEQ ID NO: 27437 - DNA, 388 bp, Zea mays
  Clone ID: MRT4577_125038C.1
ccgggccgacccacgcgtcagcgtgttcgtccgcgacacagcgaatgaattgacacgccgcgcgcgagctcgctcggctggcttgctgacgcgcagtttctctctgtcctctcgcgccgccgcaggatctctccaacaaggtcctgctcaatgccgtcagagccttctcgccgccgctgctgctccgcctgggagggtcgctgcaggacaaggtggtgtacgggtacggcagcgcgggcgccgggcggccgtgcgcgccgttcgccaggaacgcgtcggagatgcacggcttctcgcatggctgcctgcccctgcgcaggtgggacgacctcaacgccttcttccggagatccgggtgagctccgtccgtccggccggccggcggttt

SEQ ID NO: 27438 - DNA, 448 bp, Zea mays
  unsure (1)..(448): unsure at all n locations
  Clone ID: MRT4577_125039C.1
cgcggggctagatcgcgagcgccctcccttaattttttttaactctttacccttttctattaaaccagacttcctaagaaaattttcaaatcttttttcactctaccaacnggcttcattgaactcttctgcatattttcaacaacaactaccattcattcatttaactgctacctacccccaacaattttttccattcaaccaactttcatcatttaactcttcttcttatttacaacaacaacatctaccaccattcactcatctatcttaatttaaccctatttccttttttacacaacaacaatttgtttcctttctaacttcacactactcctaactctatcacccttttacaactgtttcaaattacttccattcaaccaactttcttttacaaacccaacatcgttctaccaacaacccatcatttgtaatgccctctttt

SEQ ID NO: 27439 - DNA, 565 bp, Zea mays
  unsure (1)..(565): unsure at all n locations
  Clone ID: MRT4577_12503C.1
tcctcagnaacttctgtcactcaactgttngatgaccatttatctgaaacaagaagtgggaaattagatcaatcaacatgcatcacaggattagtctctgacaattgtgttgtctcagaggacaaaacattgatgagtgaagaccatgaagagcaaagccctgtgtctggagaacggagagttagcttggaagcaaatgccaacgaggctgaggaaaagaacctagctaacgtcatatcaactgatctccacaccaaaagtctgcagcatgatattgacagaatagctgaagagactgataaagatgttttgtctttggttttccctattgaagagcatgaagaaaaatatgcagtgagccctacagctgttgagaagagcgtccgccgggaagccagtgcatgtgaatctgcaggaaaacccctaactgtcatcttttctaacgatctccacaccaaacatctgctacatgattgtgatgtgctaattaaggagactggtgaagatgttttagctcaggagaattgtaatgaccagcctgttctggcccagactgacctagaaa

SEQ ID NO: 27440 - DNA, 395 bp, Zea mays
  Clone ID: MRT4577_125040C.1
gaccagcatctagcatatattttactcaggtcgttaacagcaggcacaactctatgcactatatccacaatgacatctaacatggaattgtgagtggctggcagggcaacaaagccacaaatactgaacgcgaagcaccaaacataacaactgccatacgaacttgaactcgccaccgctgatcatcaaagcgatagtgccacctttgaggagtatccggcccatgcgctactagcgctagtcttgacgttggttccctcaccatcttggaggaccaagcccatgtgctcatggaatgcgatgatgcgcccctcaatccgggggcccttctgctcgaagagccagccctggatgccctcttggcctggttggaaacgaacacagaggcctctggg

SEQ ID NO: 27441 - DNA, 396 bp, Zea mays
  unsure (1)..(396): unsure at all n locations
  Clone ID: MRT4577_125041C.1
tcccgtgttgcggttgcttgttggnagnagnagaccaattttcgacctacgctgnaagcagatgcatgctgcgggaaacgatcaagcagagccggcaagaactgatcgtggttgcgtcattggtggaacgcataccaaatcttgcggggctgacgagaacgtgttaggtattcttttttttgggtgacttggtgtgtgtggggggggacattaaatntngntgnctntgnctgacaggtgttgagagaagacggtttggttgttgnntgaaagagtgttntttaggatatggagttttggttgattagtgtgaattgtgataaatggttgtttgtgattgtggtgttggtttttttagtgtttgatttttttttttagttattgtttgattgtggt

SEQ ID NO: 27442 - DNA, 404 bp, Zea mays
  Clone ID: MRT4577_125042C.1
gagctcactatgtcggcggccgcccttttcttttttttttgagcaggctaacaccatacagtataatgctcgtcaaattattaaacacgagggggtgcatccgcgaagattagacgctatctaccggaccaggtgcggaagaccttacaaagaatagcacactgacctagggtctatgcacaacaaacggggaaatggtgggaggcacattaactgaaccaccaacatctaagctcgaatggccaggctctgtagcctactccacgagcaacctcagcctccggattaagacagtcaaggtcatgcatactctgagctcttcaccgcttggagagctcgttgttcacattgacaccattgtatatcccggtactctctggttcctgaggcattcctcaaacaca

SEQ ID NO: 27443 - DNA, 1025 bp, Zea mays
  unsure (1)..(1025): unsure at all n locations
  Clone ID: MRT4577_125043C.1
cgagggccgacgaggacggacggcgtggaaattggaagagaaagagagagagagagagaaagcgatccgatccggtcgtcgtctcgtctcatctctccgtcgccgggccagtgaggaggcgccacggcccccactgacgcagctcctgatgtcatgtctcaagcctgttacccagtcgtcgcgtcgccgctttcttcaattcttcttcccttattttgtttttattttctactgtattaattttgtttttatatatacgcggtcagagacttgttgctcctttcttttctttctcttgcaccacacccttcctcctctcctctcctctcctctcccctctcctaaaccgctcggctggctctacacctgcagctaggcagccgacgtcggacttgggatcttgcatggacaaggcccacctcggaggaggcctgttagctctcgacgcgtcgccgcggcctctcggcttcctcaacctgctatcgccgccgacgtcgtccccgccgtttcacaggacaagaacgatggaggccgacgacgtccccgccgttccaggcaacaagggccgtaggtccatcgaggtggacttcttctccgacgacaaggacaagaagagcgctgccgctgcagctaacgacaagaaggaagacctgacgaccattaaccttcttcccggcagcaacgccaacgacgacgacgacgaggcggcgacccggctccggctgccgaacgaccaagacaggcagaacaggaacaccaacgagctttcggccatgcagtcagagcttgcgcgcatgaacgacgagaaccagcggctgcgcgggatgctcacccaggtcaccaccagctaccaggcgctccagatgcatctcgtggcgctcatgcaggcgcgggccgacggccagccgatgatgcctcctgcagtggcccagacactgccggtgaccgacgccgctgctgtcatgccatcgccgagacagttcctcggnctaggaccagcggcggctgccgaggagacgtcaaac

SEQ ID NO: 27444 - DNA, 845 bp, Zea mays
  Clone ID: MRT4577_125044C.1
gggtatgctatgcaataatatctgctgactttgagactgtgcagagaaatagaagaagaagctatgttatgtaagggtatgattacaaacgagaataccagctaggacttgagaccacaatccttgtgaaaagttacactcttccagatggaagagttattaaagtaggcactgaacgatttcaagctcctgaagctcttttcactcctgaactgatagatgttgaaggtgatgggatggcggatatggcattccgttgcattcaggaaatggatattgacaacaggatgacgctctatcaacatattgtcttaagtggaggaagtaccatgtaccctggtctgccaagtcggttggagaaagaaattcttgaccgttatcttgatgtagttttgaagggaaacaaagatggcctaaagaaattacggctgaggatagaggatcctcctcggagaaagcacatggtgtatctgggaggtgcagtgcttgctgggatcatgaaggatgcacctgagttctggataaccaggcaggagtaccaggaagaaggtgtagcgtgcctaaggaagtgcgggcagtcataagtcttgccacatatcatccacagaagaaatggaggttgcatgtgtaaagaagagctctgttgttggtgttgtgtattgtagtgagctatagctgtcctgaacatgcttggggataaaccatgtttgtattggcctactcaatttgacctctgttattgatcatcctttttagatatggaacatgacggccccctttttttgtaaaaaaaaaaaaaaaaaaaaaaaaaaaaaaaaaaaaaaaaaaaaaaactcgaggggggg

SEQ ID NO: 27445 - DNA, 362 bp, Zea mays
  Clone ID: MRT4577_125045C.1
ggggaccaacggttttttgtttgatccacctccgccccccaaacacggggggcaagaggaagccctttaacttaatggtggcacagaccccaaacgtttcggaatgtttcctttggggtgtttgggactggaccaatttttacaaacctgtgctggttaggccccaatttttttactttgtttaagcaaatgagggttggggacccaggtttgttacactccacgcaacaccacttgtccttcttgttttgggttggacgaataagccttggaacgagtttagggctttaataacatgtacatacacttggatgcccctaaggaacactttgttttccaaaaactttttttggtcatttaac

SEQ ID NO: 27446 - DNA, 458 bp, Zea mays
  unsure (1)..(458): unsure at all n locations
  Clone ID: MRT4577_125046C.1
cccacgcgtccgattcatgtcagcattaccaatttagcatgttttctctgtttcctgtggtgagacattctctaattgtacacagaaattacggctgaggatagaggatcctcctcggagaaagcacatggtgtatctgggaggtgcagtgcttgctgggatcatgaaggtaattcttgtatatgcgaatggcgtttacactgtgatggattgatagcaatatacttccccgcgtattgtttggaacgtgcaggatgcaccggagttctggataaccaggcaggagtaccaggaagaaggtgtagcgtgcctaaggaagtgcgggcagtcataagtcttgccacatatcatccacagaagaaatggaggttgcatgtgtaaagaagagctctgntgttggtgttgtgtattgtagtgagctatagctgtcctgaacatgcttggggataaaccatgtt

SEQ ID NO: 27447 - DNA, 716 bp, Zea mays
  Clone ID: MRT4577_125047C.1
gccggccgggtccggcccctacccgagctcgccagccccttgctcctgtttatttgcacagcgtcgcaccctgcttgctgctccctgcctgaggctgctgcacagtcgctcgccattttcgccgtcgtctgggctcctccgtgcccttctgccattggctggcagaagtacgccccgtagtttcctatcgcgccacagttgatttcttgctccaactcggctctgcctcgtgccccgatgccgctaccgaaattccttgctgttgtgctgccgcaactgcttctttgcttgccaccgtctgacaccaccgtctgtcaccgcgctcgccggtgatcttgacgccgcccgtcgacctcctactcccacaaccgacggtcgtccgtgccactgctccctcgctggccccttctgcttgttggcatccctgcgcaggaacaaagacgagtggttgatctagtagttaagaatcaagatctattcagattctgtggaagagtctcaagttttcaataagcaagaagtttgcagatgaagatatgatgctgaactccatggatgctagtttagtgttaccccggtcatcttcctgtggatggatgtccttgtttcgctgtactttgatgaataaaggttaagacattttgtatgttcgaagtgtaatatgttaatataatcgttatttacgctctgaaaaaaaaaaaaaaaaaaggccccta

SEQ ID NO: 27448 - DNA, 858 bp, Zea mays
  Clone ID: MRT4577_125048C.1
ggaaaagttagagatactgaagaactgaagagtgcaaaaggaatggtttcagattttggggtttatacttcactaatcaatgaatttgtcaagaaaaagtcagctaagagttaccatgataatggatagcttggtgggtaaagatacttattttgcttcctacctgtgacaacatcagagcttcaaggttgacaaggcaacatgaatatgatttccacactcagattgatatatatggtaaaagtaccttattgggcagtgagcacacatactcggcttggaagtttactgtcagggagggggaaagcggatattctagcaaatcaagttttatgaattactgcaaagccattcagaagtgtagccaagcttgagggtttcccctaccgtcgatgacagggccatactcctgaggttcaagcccatactgcaacatggtctctccaatctcagtagcctctataacggatgaccaaatcaaggattcagaacaccaacgggtcagaatggcagtcatatgcacacacaccaactgtcatgagaaacgctacataatgaactgacctccatgtaccagtgtctgggacggtgatggtctcctcctgctcccttttcatctccacatggcgcgggcgcagatcagaaattcagaatcatgcattaatgcacacctttttttaattgaaaaaaaatgtggtgtttgtcatgttctcagatttgcaagtagagctcgtgcgcatgtccatatcggctgaacagtgcaacatacaggctcatggttttccagtttagcgatcgctatgctatgagtgctggtgctatactcagattctatggtgagaagtcgtgaagactgaa

SEQ ID NO: 27449 - DNA, 415 bp, Zea mays
  unsure (1)..(415): unsure at all n locations
  Clone ID: MRT4577_125049C.1
accgggccggaattaatttttgggtcgacagctttctcacggcggccgccccccntncaaacggtgggttttttttaaggattttttcggatcatttcacctcagaacaaaaaatattgatgttggtcgacatgggttgttttgttgaggagcgtaaaggctttaccccggccacaattgtttatggttggcgcaagactaccccccctgatccgggtcgcgtttttttggggtgccagaaaatttcaccaggctaattagaaagggtggtaaaacccccaaaccttcccgatttcttggtttatggcctggcaaaccaaagggtgaaataaagcaaggttgttttagaataccaggtttggccccccaaaaatttggaagcttaattcgtgcccattttgcttttttgatattt

SEQ ID NO: 27450 - DNA, 183 bp, Zea mays
  Clone ID: MRT4577_12504C.1
actaatctcgccttccgaggaaactaccagcccaccatagacccgattggaataagccatgtccttgctgcggtatacggtgtcaagggtctcggcaagggcggcgtgaaccgtcaccgcacggtgctccgccccaaacatccacgggcccctccacgccggtcacccggccgtcggcgacga

SEQ ID NO: 27451 - DNA, 1012 bp, Zea mays
  Clone ID: MRT4577_125050C.1
gagaaagtgggatgcaggtgctatagcgaaggctattgagaataatggagggggttggcatgggtttggttggttggggagagggaaatggacagtggcacactcaaatatcaacgagaatggtgtctgccttgcttgtggagaaaagctggctattatagatcttgacccaaaagaaacagaagattttgccacatttgtggcaaaattagctattaagagagagaggaaatcgaactttgagaacttccagaaatggcttgaaaagcatgggccttttgaggcagtcgtggatgctgccaatgttggcctgtttagccacaaacacctttctttgagtaaggttaattctgttgccgatgcaataaggctaaggtttacgtcaaaaaaatggcctttgatagttgtacataacaagcatctcattggagagcgcatgataaaacttaatgatcacaagttggtacaaaagtggcagcaagaaaattcaatatatgcaacccctactggttcaaatgatgattggtactggctgtacgctgctatcagatgcaaatgcttgatcattaccaatgatgaaatgagagaccacacatttcagattttggaaaggaatttcttccccaagtggaaggaaaggcatcaggtacacttcactttggaagaccgctgcgtcacatttcaaatgccacctccatactcagttgttatacaggaatccgataaaggtcgctggcatatccctgtctcggaggaaggcttgctagagaaggaccgaacctggctatgcgttacacggcagaattcacaggcacagtgactaacgaagaagacagttgttcgatggcaaacattaacggtgtttttttttctgaacactcaagtcagtatcgcatccgccctctcttcgtcagtctgagaaacttcctctattaagtactcattatgatttctacatggtcttattcagttttgttactgaactgctgcatatgttgtaattctgtcttat

SEQ ID NO: 27452 - DNA, 725 bp, Zea mays
  Clone ID: MRT4577_125051C.1
cattgggtacctcgaggccggccggggagccatcccacaggcggactgtcttctcctcgcctccggatcatgatacccgtatgatgtcgaggttcataaagaacaggaggggcgggatcatcctgaatagcgctgcttccgtggagaactcgcctgatccacgactaccactccatcaaacacgccttcaccactaacggcaatgtcttctagtcgaacagcatcctgaatccaaaaacgcgagactcacgcactcttccattagacaccttctcaacggaggaggcaatgcttaatgacattcaggaaattaacccaaatgatgtccacccgctaaacattacaggtaaacatgaccaaccccgccacggccgcggacgaggcgctgtccacataccgagaagaagggccgcgattgaaacggctacaaggctggcctcgacgactacttaaagacccgtgaaaactactgggtctttaccgaggtacacttcgataggaaccgcgtcccgaatgacggccaccacgatcttgaatggaacacattacaagccatgtctctttacgcatagccatgaatacttcttctggtatagtgctgacgctatcatagatattgtgcatgtgcacttctaatgtttgcgcttgcagtcgtactgagttgatggatgtgcaaattttgatgacctcaggattaacagcgaatattgcttacctgaatgtgg

SEQ ID NO: 27453 - DNA, 321 bp, Zea mays
  Clone ID: MRT4577_125052C.1
gtgacgggtgtgatcaaccttcaaggccaacacaggtgcatgcgcactcatttccttctgtacgtcggggtactgctcatacagctacagcgacagaagagtctgctgagctagaacccgctattggcacactaaccagactattatgcgagacaaccactgacctgggaggatcacacgctgctcatgcataaaaacgcataagttgcgacttttcgtggccaataggggcattatttgggcgctcgatcttgaggacatatcttcaaacggctcatcaaaactcatttaactgtgcagtgcgagtgacgctagcgaatt

SEQ ID NO: 27454 - DNA, 112 bp, Zea mays
  Clone ID: MRT4577_125053C.1
gtctgattaaatttatccacccatctgtcatctacaaaatgctcattcctgctgatatcgaggttgtttttttccttctgatcactcaccttactccttacattaataaaca

SEQ ID NO: 27455 - DNA, 423 bp, Zea mays
  Clone ID: MRT4577_125054C.1
atgaccaggggcttcggagggagagtccatcctaggcacgtcagatcaattcattccactcagaatgaggacagaggaagccagcaacagaggccacaatattcctcccaggcttcggggcagcaacagagctatcctcggcccccagctccaaggggcagaggcgccaggggcttcggaggaagtgaggacaagggccatactaccaggatgtgccatgtcaccatccagaaacagaaagagatagcagaagctgcagcacaacagagccagccgaagcaagttatgcatactgcttcgtaccactcaccgtacattccagaatatgtgggtaaccattctgcagcttctgttgcttcagcaagccaatctcaggcatcttggcaacagcttccacctccaccaccaatacaacgaggctag

SEQ ID NO: 27456 - DNA, 816 bp, Zea mays
  Clone ID: MRT4577_125055C.1
atggcgaaatctttcgtcatggcagtcaagaatgttgcacaaacctggtactcctctcttcggccaggaacaatcacatcatggcagaagctgaaggacatgttgatcaccagtttccaagggtttcagacgaagtcggttactgctcaagctttgttccagtgcacacaagatcacgaagaataccttcaggcgtatttccgaaggttcttgcgtctgagggcacaagcgccaacagtgcccaatgaaattgtcattgaggccatgatcaaggggcttcggccaggacctatggcccaatactttgccagaaagccccctcagaccctggagaaattgcttcagaagatagatgaatatatccgcgctgataatgacttttggcaaagaagtgaggaagcttacaggttctccgagatgaccaggggcttcggagggagagtccacccaaggcacgtcacatcaatccactctactcagaatgacgacagaggagctccaaggggcaaaggcgccaggggcttcggtggaaggtttggggatcagcccaggaaaatttattgcctattctacggtgagaacaagggccatactacaaggatgtgccatgtcaccatccagaaacaggagatagcagaagctgcagcccaacagaaccagccgaagcaagttatgcatactgcttcgtatcattcaccgtacatactagagtatgtgggtaaccatcctgcagcttctgttgcttcggcaagccaacctcaggcatcttggcaacaacctccacctccaccaccaatgcaacccgcatatctttaa

SEQ ID NO: 27457 - DNA, 1002 bp, Zea mays
  Clone ID: MRT4577_125056C.1
atgagcagaaccgaaggccccagcacagagagctgcaccaagaaggcttccacaacgaggatgactgagctgcaggctacaccttggcccccttcttacaagccactccagctccccatgtatgacggacactcagatccgaagcagtttttgatgagctacgaagcaacaatatcttcgtatggtggcaacactgcagtcatggcgaaatctttcgttatggcagtcaaaaatgtggcacaaaccaggtactcctctcttcggccaggaacaatcacgtcatggcagaagctgaaggacatgctgattaccagtttccaaggatttcagacaaagccggtcactgctcaagctttgttccagtgcacgcaagaccaagaagaatacctccaggcatatgtccgaaggttcctgcgtctgagggcacaagcgccaacagtgcccaacgaaattgtcattgaggccatgatcaaggggcttcggccaggaccttcggcccaatatttcgccagatcaaggggcttcggaggaagatttggagatcagcccaggaaaatttattgtctattctgcggtgaggacaagggccatactaccaggatgtgccatgtcaccatccagaaacagaaagagatagcagaagctgcagcccaacagagccagccgaagcaagttatgcataccgcttcgtaccactcaccgtacattccagagtatgtgggtaaccatcccgcagcttctgttgcttcggcaagccaacctcagagcttacagcgaaaaataaacgctgattccgctgaagtaaaaggcgaagaagctcctaagggaggcttacagcgaaaaataaacgctgattccgctgaagtaaaaggcgaagaagcttctaagggaggcttacagcgaaaaataaacgctgattccgctaaagtaaaaggcgaagaagctcctaagggaggcttacagcgaaaagtcagcgctgctacaccgaaaaataagcggtga

SEQ ID NO: 27458 - DNA, 1035 bp, Zea mays
  Clone ID: MRT4577_125057C.1
atgccgccaaagaaagcttcagcaacaggggctgccgctctgcagccgctggaccccaaccaggagaccctctctcttcgggaggcccgaagccagaagaggaaggccaccagtctaacgcctcaggaggatgacttggatcaagagattagaaatatggagatgctccatcagcaggctacaccttggcctccgtcttacaagccacctcaactccccatgtacgacggacattcagatccaaagcagttcctgatgagctacgaagcaacaatatcttcctatggtggcaatactgcagtcatggcgaagcctttcgttatggctgtcaagaacgttgcacaaacctggtactccttccttcggccaggaacaatcacatcatggcagaagctgaaggatatgctgatcaccagtttccaagggtttcaaacgaagccggtcaccgctcaagccttattccagtgcacccaagatcacgaagaatatcttcaggcgtatgtccgaaggttcttacgcctgagggcacaagcgccaacagtgcccaatgaaattgtcattgaggccatgattaaagggcttcgatcgggacctttagcccaatactttgccaggaaaccccctcagactctagagaaattgcttcagaagatggatgaatacatccacgctgacaatgactttcgacagagaagggaggaagcttacagattctctgaaatagccaggggcttcggagggaggtttcatcccagacatgtcagatcgattcattccactcagactgatgacaggggaagccagcagcagaggccgcaatattcctcccaggcttcggggcagcagcagagctatcctcggcctccagctccaaggggcagaggtgccaggggcttcggaggaagatttggcgatcagcccaggaaaatttattgcttattctgtggtgaggacaagggtcacaccaccaggatgtgccatgttaccatccagaaacaaaaggagatagcagaagctgcagcccaacagagctag

SEQ ID NO: 27459 - DNA, 822 bp, Zea mays
  Clone ID: MRT4577_125058C.1
atgccaccgaagaaagcttcagcgacaggggctgctgctctgcagccactagacccaaaccaggagaccctttctcttcgagaggcccgaagccagaagaggaaggccaccagtccaacgccccaagaggatgagttggaccaagagatcaggaatatggagatgcttcatcagcaagtgcaaaagaagaaggaaaaaatggctcggctagctgacctacaaaggaacaatcacatcatggcagaagctgaaggacatgctgatcaccagtttccaagggtttcaaacaaagccggttaccgctcaagctttgttctagtgcacgcaagatcacgaagaataccttcaggcgcttcagggcagcaacaaagctatcctcggcccccagctctaaggggcagaggcgccaggggcttcggtggaaggtttggggatcagcccaggaaaatttattgcctattctgtggtgaggacaaggaccatactacaaggatgtgccatgtcaccattcagaaacagaaggagatagcagaagctgcagcccaacagaaccagccgaagcaggttatgcacactgcttcgtatcactcaccatacataccagagtatgtgggtaaccatcctgcaacttctgttgcttcggcaagccaaccacatgcatcttggcaacagcctccacctccaccaccaatacaacccgcatactcccgaggccaacagccagaagggagccagcacactcaccagcagcgagacttcagggaggagtccgaagctcgcacagtcaacaatactatgccagaatcgaagcatatctactaa

SEQ ID NO: 27460 - DNA, 162 bp, Zea mays
  Clone ID: MRT4577_125059C.1
tactactccctgaggtgagtcgtattagcataccattggagcagctccaacgcttgctactactacatgtcatcagggtccttgtccaggagtccattgccatctgctggtaggtggtccggcactacacttcaatcgtcaagttctcctccagagttgact

SEQ ID NO: 27461 - DNA, 295 bp, Zea mays
  Clone ID: MRT4577_12505C.1
acccacgagtcaaaggctccccaaggatagcatagcagcagcactcacaatagcaaaaaccaccatccgtcgtcgccaagcgtaccaatgagccaacgacatcaccaccgcccagcgggaatggggcacaacatgaggattgtcgcgctggccttggtggacctgctggtggtggcggcggcgccgcccgtcgccaccgcgtacggctgctacgaccactgctacgatccctgctccaacgggagcagagacccctgcctgcatcaagatgtgcaaccaggcatgcggctctact

SEQ ID NO: 27462 - DNA, 1008 bp, Zea mays
  Clone ID: MRT4577_125060C.1
atgccgccgaagaaagcttcagcaataggggctactgctctgcagccgctggacccgaaccaggagaccctttctcttcgagaggcccgaagccagaagaggaaggccactagtccaacaccccaggaggacgagttggaccaagaaatcaggaatatggagatgcttcatcaacaagtacaaaggaagaaggaaaagacggctagactagccgaccttcagaggcagattgacgaagctactgtggaagtacgccatctcgctcaagatgagcaagagcgaaggccccaacatagggagcttcatcaagaaggcttcttcaacgaggatgaatggtatgagaatttccatcatggaaattttgcttttgatgatgcttctcctctgtcagtagaactacaggctacaccttggcccccatcttacaagccaccccagctccccatgtatgacgggcactcagatctgaagcagtttctaatgagctacgaagcaaccatatcttcatatggaggcaataccgcagtcatggcgaaatctttcatcatggcagtcaagaatgttgcgcaaacctggtactcctctcttcggccaggaacaatcacatcatggcagaagctgaaggacatgttgatcaccagtttccaagggtttcagacgaagtcggcgtatgtccgaaggttcttgcgtctgagggcacaagcgccaacggtgcccaatgaaattgtcattgaggccatgatcaaggggcttcgaccgggacctatcgcccaatactttgctaggaaaccccctcagaccctagagaaattgcttcaaaagatggatgaatacatccgcgctaataatgactttcgtcaaagaagggaggaagcctacaggttctctgagatgaccaagggcttcggagggagaatccacccaaggcacgtcagatcaatccactcctcccagaatgacgacagaggaagtcagcaacagaggccacagtattcctcgcaagcttag

SEQ ID NO: 27463 - DNA, 400 bp, Zea mays
  Clone ID: MRT4577_125061C.1
cacgggtaaacttttaaatgaagaaaacttggggtttcacaaaatgcccaaaaaatcccaaacccgcccaaattttaaccggggggtaggaggggttccccaatcaactttcaccctaaaaaaagggcaaacttttccttagggaaattcaagggctaaacagttttttttccaggcaagcccccttctttgagacattttgggtaaagcaaggccccccccttaaagggctcctgggcctcaatcattggattgaccccctctttttgggccttataaaaaatgtccaccttggccccctcgaaaagccccatgttataaacctcggcctttcaaacttgggaacatcctggccccggaaaaaccaaaggccctttattttgaagggggggtcaaaacc

SEQ ID NO: 27464 - DNA, 1077 bp, Zea mays
  Clone ID: MRT4577_125062C.1
atgccaccgaagaaagcttcagcgataggggctgctgctctgcagccgctggatccgaaccaggagaccctttctcttctagaggcccgaagccagaagaggaaggccaccagtccaacgccccaagaggatgagttggaccaagagatcaggaatatggagatgcttcatcagcaagtgcaaaagaagaaggaaaaaatggctcggctagctgacctacaaaggcagattgacgaagccactgaagaagtacgtcatcttgctcaagatgagcaaaaccgaaggccccagcacagagagctgcaccaagagggtttcttcaacgaggatgaatggtatgaagatttccatcatggaaattttgcttttgatgatgcttctcctctgtcagcagagctgcaggctacaccttggcctccatcttacaagccacctcagcttcccatgtacgacggacactcagatccgaagcagtttctctccatcttacaagccacctcagcttcccatgtacgacggacactcagatccgaagcaaccatatcttcatatggaggcaatactgcagtcatggtgaaatctttcgtcatggcagtcaagaatgttgtgcaaacctggtactcctctcttcggccaggaacaatcacatcatggcagaagctgaaggacatgctgatcaccagttttcaagggtttcaaacgaagccggttaccgctcaagctttgttccagtgcacgcaagatcacgaagaataccttcaggcgtatgtccgaaggttcttgcgtctgagggcacaagcaccaacagtgcccaatgaaattgtcattgaggccatgatcaaggggcttcggccagaacctacggcccaatacttcgccaggaaaccccctcagaccctggaaaaattgcttcagaagatggatgaatacatccacgctgataatgactttcgacagacaagggaggaagcttacaggttctccgaaatgatcaggggcttcggagggagaatccacccaaggcacgtcagatcaatccattccactcagaatgacgacagaggaagtcagaaatag

SEQ ID NO: 27465 - DNA, 1068 bp, Zea mays
  Clone ID: MRT4577_125063C.1
atggctaggctagctgatctgcaaaggcagatagacgacgcctctgaagaagttggccatcttactcaagatgagcagaaccgaaggcctcagcacagagagcttcaccaagagggctttttcaacgaggatgactggtatgaggatttccatcatggaaattttgcttttgatgatgcttctcctctgtcagcagaactacactcagatccgaagcagtttctgatgagctacgaagcaacgatatcttcctatggtggcaatactgcagtcatggcgaagtctttcgtcatggctgtcaagaatgttgcacaaacctggtactcctctcttgggccaggaacaatcacatcatggcagaagctgaaggatatgctgattaccagtttccaagggtttcaaacgaagccggtcaccgctcaagctttattccagtgcacccaagatcacgaagaatatcttcaggcgtatgtccgaagattcttacgcttgagggcacaagcgccaacagtgtccaatgaaattatcattgaggccatgattaaggggcttcagccaggaccttcaacccagggaagccagcagcagaggccgcaatattcctcccaggcttcggggcagcagcagagctatcctcggcccccagctccaaggggcagaggtgccagatgcttcagaggaagatttggggatcagcccaggaaaatttattgtctattctgtggtgaggacaagggccacaccaccaggatgtgccatgtcaccatccagaaacaaaaggaaatagcagaagctgcagcccaacagagccagccgaagcaagttatgcatactgcttcgtaccactcgccttatattccagagtatgtggggaaccaccctgtagcttctgtcgcttcggcaagccaacctcaggcatcttggcaacaacctccacctccaccaccaatgcaacgaggccagcagccagaggggagtcagcatactcaacaccaacgagacttcagagaagagtccgaagctcgcacagtcaatagtactgtgccagaatcaaagcacatttactaa

SEQ ID NO: 27466 - DNA, 221 bp, Zea mays
  Clone ID: MRT4577_125064C.1
aaccagcaggaaacaaaaaccaccactattgcacaaacatggttcatcttagtgtacaacgccaactcatcatctcgacttgcctatgcaatgcaacgtgaaacaaaagacacacatgcgtcttgcagcatcaatcaatccacgtacgtacaccctctccgatccgaaagacaatgaaattgcataacataacccttgagcttaattgctggggaccaaat

SEQ ID NO: 27467 - DNA, 177 bp, Zea mays
  Clone ID: MRT4577_125065C.1
acgcttatgcatccgctacacatcaagctcagattcaactatacataaacactatacatcgccacggcaaatttgcacagtattatcaatactatctatactataatacctcatactttataacgtatgtactatcctactatatatactaaatctatactaatgcatcatacatat

SEQ ID NO: 27468 - DNA, 951 bp, Zea mays
  Clone ID: MRT4577_125066C.1
atggctcggctagctgatctgcaaaggcagatagatgaagcttctgaggaagtttgtcatctagctcaagatgagcagaaccgaaggcctcaacacagagagcttcatcaagagggcttcttcaacgaggatgactggtatgaggatttccatcatggaaattttgcttttgatgatgcttctcctctgtcagcagaactgcaggctacaccttggcccccgtcttacaagccaccccagcttcccatgtacgatggacactcagacccgaagcagtttttgatgagctacgaagcaaccatatcttcgtatggtggcaatactgcagtcatggcgaagtctttcgtcatggctgtcaagaatgttgcacaaacctggtttcagacgaagccggtcaccgctcaagctttattccagtgcacccaggatcacgaagaatacattcaagcgtatgtccaaaggttcttgcgtctgagggcacaggcaccaacggtgtccaatgaaattgtcattgagcccatgatcaaggggcttcggccaggacctacggcccaatacttcgccaggaaaccccctcagaccctggaaaagctgctccaaaagatggatgaatacatccgcgctgataatgattttcgtcaaagaagagaggaagcttacaggttctccgaaatgaccaggggcttcggagggagaatccacccaagacatgtaagatcaatccattccactcaaaatgatgacagaggaagtcagcaacagcggccacaatactcctctcaggcttcggggcaacaacagagctatcttcgaccgccagctccaaggggcagaggcgccaggggcttcggaggaagatttggggaccagcccaggaaaatttattgcttattctgcggtgaggacaagggccatactaccaggatgtgccatgtcaccatccagaaatag

SEQ ID NO: 27469 - DNA, 291 bp, Zea mays
  Clone ID: MRT4577_125067C.1
ctttgcacggaagttagtcggaattgaccgattcggcgattcggtcggtcacgcagcaagacatagtctggcatattcagtcatttcatttctttcactttctcatgtcacacctgtttcatctgttgattgcaccaatggtctactgtttgttgctgagagctgtttgcatttggttgaactggttcatgggaagcgattgaatgcacaaaagttttcaattggagggactccaaggacagtgctataccataatgaaagcagaccatgttggtactgagaactgggcta

SEQ ID NO: 27470 - DNA, 230 bp, Zea mays
  unsure (1)..(230): unsure at all n locations
  Clone ID: MRT4577_125068C.1
gggaccctcgaggccggccgggccgggattcacggaatctctcccagctgtcctgtttttccttcatggatncccctcgctagctgagcccgctggtgctcgcggtcgcgggtggtgagcgcggcctcgccggcggcgcagcggcgatggacctcccgtggctggatctgcccttcaccttcctgacgctgctccttgccacccgcctcgcctacgactactatggcgac

SEQ ID NO: 27471 - DNA, 829 bp, Zea mays
  Clone ID: MRT4577_125069C.1
ggatcaagggacgacgactacagcgcgcgcaagccgtccggtcctctcctccctgccggcgccggcgcaatgacgttcgcgtacgacacggacgtcgtcatggacgacggcaccatcatcaaaactaccgtcaccaactccggcgacgccaccaagctcttcctccgcgaggtgcgccagaccagaaagcccctgatcgtgggtctggacaccgagtggcgcgtcattcgccgacagggccggcgcccgcgcaaccggatggccgtgctgcagctctgcgtgggccaccgctgtctggtcttccagatagtcgcggccgactatgtcccggccgcgctgaaagccttcctcgccagcccgcagcaccgcttcgtcggcgtcgtggtcgacgtcgacgtagagcgcttgcgctgcgactgcaacattgtggtcaataacactgtagacctgaggtatgccgcggccgacgtgctcggccggccgcacctcaggacggcggggctcaagatcctcgcccgcgaggtgatgggagtggaaatagagaagccgaagcacctgacctgtagcgagtggggcagacctctgtcgcaggcgcaggtccgctacgctgccattgacgccttcgtgtcatacgaggttggccggctggtgctcaccagggagcacgcgcaagatgcggccttcaccggtgcaatgacgatattgccgtcgcagttgccgtaaatgtgcatagttttacttagttagtgtagggattgtttacatggtgtatctcgcacatttattcattggtttaaagaaaatttggattctaaaaaaaaaaaaaaaa

SEQ ID NO: 27472 - DNA, 571 bp, Zea mays
  unsure (1)..(571): unsure at all n locations
  Clone ID: MRT4577_12506C.1
ccgtcgccgttcttgttgttctacgataccaaaccccaaacatgctccaccggcacctctgctaccacacaacaccgatggcccgcacgaagaagacggcgcgcaagtccaccggtggcaaggcgccgaggaagcagctgacgaccaaagcagcgcgcaagtcggccccgacgaccggcggcgtgaagaagccgcaccgcttccggccgagcaccgtggtgctccaggagatccgcaagtaccagaagagcacggagctgatcatccggaagctcttcttccagcgcctggtccacgagatcgagcaggacttcaagaccgacctctgcttccagtcctccgccgtcgccgtgctgcaggaggccggaggaggactacctcgtcggcctcttcgaggacaccaacctctgcgtcatccacgccaagcgcgtcatcatgatgcccaacgacatccagctcgcccgccgcatccgngaggagcgcgcttaggcgattacggatgattgttactactggagatgattaggctatgtnctcaccatgtactaggtctgcttcgttattatttgtt

SEQ ID NO: 27473 - DNA, 306 bp, Zea mays
  Clone ID: MRT4577_125070C.1
tctccccgcgtccgtccagacgacgcccagcgtccgaccatccggaggaaccgccggcctcgcggacccgccgcccgccgcctgggggccggtccgccccaccacggacccggagcgcccccagcagcagccgggcaggacccggcagctgttgcgcacgcggcggacgtccataggggggtggccatcatgcggcgcatgtcgtcccgcggcggcggcgccgtggtgcggctccgcgaggcctgctgcgaggactccgccggcgccgtgccccttggcgtggagctctgcgggggcggcgggctc

SEQ ID NO: 27474 - DNA, 307 bp, Zea mays
  Clone ID: MRT4577_125071C.1
gtggcaccagcggtttccgtgcccttgtaatagtattatgacctgccccctctttctcttattaacgctacagatttattcaggaagtggtgtgttttaaaaaaaaaaaaaaaaaataaaataaaaaaaaatagaaaactaaaaaaacaaaaaaaaagaaacatatataaaaaaaaaagaaaaaaaccaccgacaataacaagattatatgtccgggatggttaataaaaaaataaaaaaaaggggggacgcttttaagggagtaaaattaaaccaccggcaaatgtgaaaatttttttttttaatg

SEQ ID NO: 27475 - DNA, 365 bp, Zea mays
  Clone ID: MRT4577_125072C.1
cggaattcccgctggacgcacgcatccgcagtacgacgtctctcctctgggtctttggcctagacaccgagcacgtactaccatgaggagtgtgacgtctcggagagtcaagcccatcgaggagtgctgctcggaggggcggtcggagcatacggtggccgacgacctggacggcacgctgctcattttcaggagcgcttttctctactaccttcttgtggctctttagtgcctcagctttcttttctccgtgcttttgctactgtctttgctctgttgttttttgttattatatttttcttatttcttattatttttttttttttttgttttttatttttttattttttttttttttatttttt

SEQ ID NO: 27476 - DNA, 287 bp, Zea mays
  unsure (1)..(287): unsure at all n locations
  Clone ID: MRT4577_125073C.1
ctcacctactcccctttctctccttctcccccaattccagatcgagatcccagggcattacaccaccgagctccacggattcccggtgccgcgcccggtgagcgcacgccgttccagatccgccccctgagttgcagggcctgatcgttgggcccttggagaaatcactcgaggttgcgggtctcggatgcggccatgagtttgccggggaagaaggccgcggccggggctgggggaatccggcggnggntctccaccgccgngctgncggcgctggcgctggngct

SEQ ID NO: 27477 - DNA, 244 bp, Zea mays
  Clone ID: MRT4577_125074C.1
aacagaaaaaggggtttgaatcaatcctcaatttttttctggacaagaattaaaccctgacattttcacaatttattaacaaaggtcaaacccccataaaaatttttgaaatctaaaaaacacatgctttttttaaatgccccaacaaaacggtacattttttttttttttttacccaaacaaaccgcacccttggattttttttttttttactggcacccttttcaagccctttttttccctt

SEQ ID NO: 27478 - DNA, 411 bp, Zea mays
  unsure (1)..(411): unsure at all n locations
  Clone ID: MRT4577_125075C.1
aattcggcacgaggcccgcaccgactcctccacgcgcgcggcggcggcggcggcggcggagtcgggagaggtcccttgtgctgcttctcgctcaacccgtacgccactccttcctctccgtatggcttccgccgccgtggaaaccctcgtctcgttcccaatcgcatcccgtccccgcttgctcctacgccccctcccgcggcgacccgccgccgccgccgccgccgtgcgcgggtgcgacgtcgtcctcctctcccgcttgcttgncgtcctccctggccttcccgctccggccctgccccgcttcntgctggcctgctgcgcgctctcggcggtgctccngcccggccctnctggggctcggcttggcgctctcggcgttccttcctcccngcctgccgccggggggct

SEQ ID NO: 27479 - DNA, 729 bp, Zea mays
  unsure (1)..(729): unsure at all n locations
  Clone ID: MRT4577_125076C.1
ccgggcgccctcctttgggcttgtctctgcctctctctcctcccttctcccacccacccctctctcttgctgtgggtgtgctgtggagaggagaaaggaagtagagcaagaacaagaactaataacaccaacaagagctgctgccaactcctgcacagcctgggctctcatcactgattgcccacctattaccttcctcttttgcaatttagaatcacccatatatctacctgctctcggtcctctgtgaactctctcgtcttctaggtttcccaggcctcaagataagcctctggaccaaagcttgaaagcagctgccgttcttgcctctttttttaattcttcatttcgtggttcctggatttttgggttcttaggtttcttgtatcttcccccaaccttgcaaaatcttgtggtgaagtttcttgcgttcgctgtttcgggaccatggacgaaaggattccgccgccgtccctcttgcaatactcgcagtcccctgctcattcttccccccatcccctcaattctatgaggtattcttcctctgaaagagaaagtagtgttcttgtttttatatctggctgagttgcttgcagagaggcagaaattggccccatttgtgcaagttcttcctttctgtaccaggctcttgaaccaagagattttgcgcgcatcttctatggcgcctaaccataactntgntgatcctgagagaaatgagcatggtag

SEQ ID NO: 27480 - DNA, 1199 bp, Zea mays
  Clone ID: MRT4577_125077C.1
gtctctgcctctctctcctcccttctcccacccacccctctctcccgttgtgcgtgcgccccggagaggtgaaagggggtagagcaagaacaggaaaaagtaacaccaacaagagcagcagccaacacctccacaacctgggctctcaacaccgattgccccccggttaccttcctcttttgcccttcagattccctcctatttttacattttctaggtccccatatatctacctgctctcggtcctctgtgaactctctcgtcttctaggtttcccaggcctcaaaataagcctctggaccaaagcttgaaagcagctgccgttcttgcctctttttttatttgggctcttaggtttccctggatttcccccaaccttgcaaaatcttgtggtgaagtttcttgcgttcgctgtttcgggaccatggacgaaaggattccgccgccgtccctcttgcaatactcgcagtcccctgctcattcttccccccatcccctcaattctatgaggtattcttcctctgaaagagaaaggtgagtgttgttcttgatttttttttatttcttttgtcactattgttctccctgttgttcttggtgagttttgttttgtttttgatcctgccctttcggaatccttctgaggagcacgagatttgatgctgcggtggagatttccgcttaattctaaacttccggatgccatgtttccccttgatcaatgctgccgattgttatggaggagtgatctgtaatcgtagggacttcttttgtgatggctcgctgatagatttgttactgctgtcctaaacggagctgtatggttgactcgctgctaatgggtgtaaactttgtgtgtaacaaatcgctcattggcgatagtcacatgtaaattttaatttgatggatcgttctgtatatatcatatcaaagtttccttttacatttcatttctgcgggattatagctgctttagttttagatcctccaaattatgtttcttcttttgtatcacatggataataaatttagcattggctactgttatcctaacgttgattcttgtttggcagatatctggctgagttgcttgcagagaggcagaaattggccccatttgtgcaagttcttcctttctgtaccaggctcttgaaccaagagattttgcgcgcatcttctatggcgcctaaccatacttt

SEQ ID NO: 27481 - DNA, 766 bp, Zea mays
  Clone ID: MRT4577_125078C.1
ccgggctccctcctttgggcttgtctctgcctctctctctcctcccttctcccacccacccctctctcttgctgtgggtgtgctgtggagaggagaaaggaagtagagcaagaacaagaactaataacaccaacaagagctgctgccaactcctgcacagcctgggctctcatcactggttgcccacctattaccttcctcttttgcgatttagaatcacccatatatctacctgctctcggtcctctgtgaactctctcgtcttctaggtttcccaggcctcaagataggcctctggaccaaagcttgaaagcagctgctgttcttgcctctttttttaattcttcatttcgtggttcctggatttttgggttcttaggtttcttgtatcttcccccaaccttgcaaaatcttgtggtgaagtttcttgcgttcgctgtttcgggaccatggacgaaaggattccgccgccgtccctcttgcaatactcgcagtcccctgctcattcttccccccatcccctcaattctatgaggtattcttcctctgaaagagaaaggtgagtgttgttcttgatttttttttatttcttttgtcactattggtctccctgttgttcttggtgagttttgttttgtttttgatcctgccctttcggaatccttctgaggagcacgagatttgatgctgcggtggagatttccgcttaattctaaacttccggatgccatgtttccccttgatcaatgctgccgattgttatgga

SEQ ID NO: 27482 - DNA, 505 bp, Zea mays
  Clone ID: MRT4577_125079C.1
agcgggggggggaaaacagccacatttttgtatgaaataaacttggaaacaatgctgggtggcccgttaattcctgggggatttgaaagttgttctggtttaacagtaccattcaaagacttattttcaacaatgctgggacccccattcaacttggcagtttttaaaaagctaccaaaagaaatctggctaggaacaattgcaaaaacatttttctccccttttggtcgaggctgtaaaccaatcctatacacaaaacctgtatgaacattttcgaaaccatcaaccattaatttcataaaaacgggtttcctgcaactactttttttccttacatttgcggaccttcctctaatattaactggttgccacccttaataaaaatattcttctggggaaaaaacatcacattgcttttgcttttcatgggcaacataatttttttctaatacagcaggaggatgcacatcaggtttttttttttaaaaaccgtttttacttgctc

SEQ ID NO: 27483 - DNA, 464 bp, Zea mays
  Clone ID: MRT4577_125080C.1
ccaccaccccttggggcttttttatgggggaaaaaaaaaaaaggccctggcctttaaggttttaaaaaaaaccatttccttgggccaaacatataaagctctatgggctggacccctaaattctcacgggtggaaattcgccattaccttgtttcgaaaataagccaccaaaaaaaaaaccatgccccatggataataaaggaacattccatcatttttttccgggggcaaaaaaccccccacagggacttacccaccctgtcacaatcatagaacaacatgccccttgggggaaagcccggctccatataaacaaccaaacttttttaatatcctcaaaacccggttttttgtcctcttcccaaataaagggcctaccggcaaaggcaaggatgggggcttaaaatctgaataatagggtatgggaactgaggcctggccctaaaaggggcaggaaataaccc

SEQ ID NO: 27484 - DNA, 242 bp, Zea mays
  unsure (1)..(242): unsure at all n locations
  Clone ID: MRT4577_125081C.1
cggccgcagcgagggaaggctattcaggaagcaacccggaacaaatcaaatgtnntcntggttgaaactnntggncgtatgcnggacantnagccactcatnagggcactntccaagcnaatcattctcantagcccagacctggtttantttttgggagaagcattggttggaaataatgctgtggttcacctcannaatttnaaccagaatttagcagacctatctccngtccctactgg

SEQ ID NO: 27485 - DNA, 579 bp, Zea mays
  unsure (1)..(579): unsure at all n locations
  Clone ID: MRT4577_125082C.1
ggctgactgcgcatgcggntccgctcggctgcgcgcgcgggcaatcagaaccgcggcacagagcattcaattcactcggggtcggtggatcagctcagcgcggcggcgaccttgagatgagtcgcgcggcgcagacaggaggggccggggccggggccgggggcggaggcgcggcgaggttcaaggcgtcgccgcgtgcgctcttctcctgcggcatcttcagcacctgcacgcaccctgcgctgagcccgacggcgacgcccaacaacaatgtggtgccggggagcggtggcggcggctcgggcacgccctgcgccgaggcgtcgaccgcgttgccggtggcggtggagtctgcggcggcggcgtccacaccaccgcctccgcagcggcagccgcaccaccagcgggcgcagcggaacgtcgggccgtcgtcgtcctcctcctcgtcgtcctcgtccgcgtcgcagagcttcacgcagtggaggctgccggtgcaccacccgcagcagtcgcaggcgccggcgtcctcgagcggggggggacgcgctgctgggcgcggaggagaagttcgcggcgggg

SEQ ID NO: 27486 - DNA, 2098 bp, Zea mays
  unsure (1)..(2098): unsure at all n locations
  Clone ID: MRT4577_125083C.1
cttaagcatcaaaaatcctttttataaaagggtgtcaaggaagggtattcaattttccaaggaaggaaatgcatcaacggtttagcacacaactcctatcacctaatgcatcaaacaaggtgataaagatttcaaaacattaagtaggtggcaaatgcaccggggcttgcctgaataacactaggttagtgtttgttaggtgacgtcgacttgacgatcatccttgtccaagcacttgatcaggcaagttcgtccgtcagcatcaccatgcggagtagcccgcgcttggggtcgacttggctcaggttctctgcattatgtggttaattcacgtaccctgactaattcgacgggatagtcggaagcacgacgacggtttccggttgacgtctttgatgaagcacacaatttctattcttgacccgatatccatgggattccttttgttgagctggtgacgcgtggccagcaaaagagcgtcttcacggcttgggagttggcgtanacgaggatggcgatcgacgatatcgacgtgccagcgcaacgatttccatttgacgaagatgatggcagtacgactcgttcgagttgaggcaagcatgatccaggtaccatagcagtacgccgacaagtccacgacgacgcaacgaggtgaacgcggcaacacacgngctcaataatgggtaaagagggcgcgacggcttgcgagctgggctagctcggacaggaacaaccgacaggatgaccatggcgaataggaaatcgacaatcggcaaaaccgatagccgaacaggaattgtacagatcgacgacacgaggtccgatctggtgagcacgacgcaaaggagggtgttgctaccattgcttcgacacgaagtacttactaccgaggcaggtgagcacgacggaggctggggtctaggcatcgagccagcgcatcacgcggtttgggaaccacaccacccacacgaagcgcttgccgcagagcaccaaatcgcacgtcattcgcgtagagctccaaaatcgtgcgtcgaactgggagccgaggcgagtgtggcaagtgagctgagggggcgcaccagggaactcaacggcggccggactgggcaagcgctgatgaggaagcaggaagccgcgacgagggagctcggcgcgcagactgggcgagctgggcacgcggtcgactggagcagcgcgcgagcagaggacagggagggagaagcaagggaattcgatgagctggagatggacagaggaaactccgagctgggctacggtcggacgatggggagaagacaagggcgtgctacaggggcacacgacggccggcctgtgtcgccatggcaaggtggtttctgcagctcgattcggcttgggcggtggcgcacctcgtccaccactcgacgagctgcgtgaaccccgcgaggaaagcgcccatgggaagtaagaggaaggagccgagagggaggggcgtgcgccatccgagcagggacagagagactcgactggcggccatggacgaggtggatcgcagacgggcgagccaggcgcgcggcgctggggtggtccgagcaggcactgggcagttcgacgcggcgagctgagcagggagatgggcgcgcggccatgcgcaaggaagaaggccagaggccgggcgaactgctcggcagagaggagcttgggcgcgagctgcgcgccatggaacttggggcagtcgtccgtgctagcagagggaggagcgccggcgaggttggggaaaagacagggcgccggcgaggagaaccaaggagccgggggcgagctcggatggagaccagagagagagagaggcgcggtgcaggggagcttcagggaagaacggcgccctgggagcttcgacgtcggccatggatagcgaaagttctgtgcggccagccgaggagaaaggacgaccgcggtctggcgagctgaccagagacggagctggggcgcggcggggaagggagacagcggaggggaggggtcggacgctgggggctgaggaaacgacgtcggagcaccacagcacacgaccatgggagataggtgcgcgcaccatggagctcagggaggcgcggct

SEQ ID NO: 27487 - DNA, 185 bp, Zea mays
  Clone ID: MRT4577_125084C.1
gttctagatcgcgagcggccgccctttttttgttactttaacccagcaaagccatctcaaacataccgtctcaggttcacaatatccccgatgatgatttaacagcaggattggcggacccaattggtttcacatcacggataataaggaagcagagcactgtacagttacggaatcagacatta

SEQ ID NO: 27488 - DNA, 155 bp, Zea mays
  Clone ID: MRT4577_125085C.1
cgcgtccggccatgcataataaaactgcctaccaatccaatatcatcttcccattttaacttcataccggatgctaccttccttggggagagggtagtcaattgaggatcctgatctcaccatcactacaactgccatgccatgaaccatataaa

SEQ ID NO: 27489 - DNA, 367 bp, Zea mays
  Clone ID: MRT4577_125086C.1
aaaataggggggggacacattcatcacccatgttttatttcccccaataaaatcccaacggggataacccccaccaaaccgacaaaacccaagcaaaaagggttcatccctctctaagaggggggcaaaaccctttttcaactaaaaaacccaaaccaactacaaatccccccacccaaaattgtcagttgacccattattcccccccctgaaaaaaaaaaaaaaattgtttccttaattaaattggccgttcttttttttaagccctttcctaaaacaacatttgatcaaaatgccacaccccgtgccccttgcccacttttcttaagtggggaaaaaaattggaaaacttgtttatgggttccac

SEQ ID NO: 27490 - DNA, 353 bp, Zea mays
  Clone ID: MRT4577_125087C.1
cccgggtcaacaagcatgcactctgattgagcaagacacgaaccttggcagcaacgtaagctgtaatagtactgtcgatgaacccagcctgggaaacgcaccgaggattctggccctcggactgctagcgctcctgtgcgctgccgtcagactggccgctgcacacaactgctgatggcacccaaacttataatgcatcatgctcggctactgcggtacgacccacgcctactacggtgactggtgacaatactgcccgtgacaaatgcgcggggggcgcggaaactggtgacggtctatgctggaaaggcaataaaactgctaacgttgctaatgggggcaccgacgcgatc

SEQ ID NO: 27491 - DNA, 397 bp, Zea mays
  Clone ID: MRT4577_125088C.1
gagctcactagtctgcggtcgcccttctttttttttttttttttttttttgtttttatttattattacctcttaaatttcgtttaacgttctcccgaacggaaaaactctttttttgccgcctggcgctgaagctaacgccatggggggccacacgcggtattgcttataaatcggacgcagaaaaccttgtgctcagcactggctactttaactgcagatacacgggtccctccacgaaaatcgctggggcccagtcaaaaactcctactcgaaggccgccccccccctgctaaaactgctgcttaacaaagaagaccccccatctattctaaagaaaccctaaaaggaggcgcttttggttttgggtttgtccactccaaaacaactgctggggg

SEQ ID NO: 27492 - DNA, 269 bp, Zea mays
  Clone ID: MRT4577_125089C.1
aacatgtgggggcgttgcatgaatggaatgggggctgatggtggagggaaaagataaatgaagatgggggggtggaaaaatggggagcagtgatgctggtggatggcggctgtgtgaaatgggatgcggaaatgggtcacaaagaggccgactgggttcccatggattctcggaaagggggggggggggccatgggtgggtgtggagcgccgggatggggggagaggggggcggggggggggtgggggggggggggggggggggaaggg

SEQ ID NO: 27493 - DNA, 489 bp, Zea mays
  Clone ID: MRT4577_12508C.1
ggtttggtggttttttttttttttttttttttttttttttttttttttttttttttttttttttttttttttttttttttttttttttttttttttttaaaaaaccacagggggaacagctttttctttttttaaaaaaaatttttttccgggggggggccacaggtgccaaaaatgtaaacaaaaatttttacggttttaaacccctccttacccatttttttttttgaaaaagtaacttgggaggggctcccctaaaaggttttattttaaaccccaaaagggtttaaactggcctggaaagcctaaggtctgctttttttgggatttgtttttttgaaaaaaaaaagggccctccacccacttatggatgtgggcataagttgttccagttccaacccccacctggggggccttttttgtttttttaaaaaggtgttgaacctggccatttgcccacaatccaaacagaccaaaaagggcaaatcc

SEQ ID NO: 27494 - DNA, 297 bp, Zea mays
  Clone ID: MRT4577_125090C.1
agggggggttggattaactgccgagggggttttaaatagagtcttcagggggtccttttgaaacaaattttgttatttgaatatccccactgggtataggtgaccgggacaaatgtcacaaggggtcccattttgggcaatttataggccttttaaaaacttttttcaaacaccttcttccattaatttgatttccggggggcgcttttaaaagaataatgtgtcaactgacaaacctaagctgggaaaaaaaaattttattgggcaattccctattctggacttgaattgttttcg

SEQ ID NO: 27495 - DNA, 562 bp, Zea mays
  unsure (1)..(562): unsure at all n locations
  Clone ID: MRT4577_125091C.1
gttgcagtgcagngttctccaaactgccgtcagcatctgcatccatcaatagtggtttcctgcttaatgttgcatcacccggtgggcgcattggtactgagaataaggaaatgctcaaaactatagagcaaaacatgcctcagtacattcaagttctactagaggttggaattggggggggtatgctgcgttgtcttgactatgttgacatggaagatctagcaaataaggtgatccagctcgtggttgacaggtgttctgatcctgacaagcgcacacgaaagtttgcatgttttgccgttggaaatgctgcttatcataatgatatgctgtatgaagaattgagacggtccataccttaactcaccaccttacttcttggtcctgaggaggataaaaccaaaggcaacgctgcaggcgcgctcagtaatctagtgaggaactcagacatgctttgcgaagacattgtctcccaaggcgcaatttatgcgctgctgaagatggtgggcagttactctactgttgccctgagccccaggcgacgagattgctctaacctaat

SEQ ID NO: 27496 - DNA, 2605 bp, Zea mays
  Clone ID: MRT4577_125092C.1
aggcatgcaaggctatttggtacctagctcatgctgttgacattatgtccattggtgcacaccatttttcatttcccttagctaattcatggcgacagatacattcaatgcaagagcaaagttcaaaggcagattcaaactctaccaatctgattaacatatttgtcaaatcatttctcgcctcacgaccaattcaggttgcagtttaccactgcttgcataatggtctagaatcagctattcatgcttgtcttcagcttatctcaagggcctgtcttcagaatgtgactttctgtgccattatgtgtcgtccatggaattcaccatctgatgttgacgtagtagaatatggtggagatggaacaatagtatctgacatgttttccttattgtcactgtgtggatcatatttaaataaggaatccaggcagaatagcaatcagaaatgcaaactatccaaccctcatgctcttgtagtgcactgctgccttgcactagcgacaatagctgcatgtttgaaatcagagggaggatcttcagcatcacttgtcctaacaagttcccagaaaaaacagcggtcccggctctcagttcttgcacacctctcatcagttgatgatacagtgaagagttgcctgcagccacactgtgcatcagcaatgcttgcgctctcatcacttgtttctcttgaaaatggtggacaaaccagatcgtctctttgtgaaactgcccttgctttgtttcctcgtatggcaacactgcacacactgctgaagctttggttatctgatggaagcgaggcactgtgtcgatataatgctggtcttctgaatctttttggactccgcgatggaagtattggactgctggagacaaggttgaaatggggcggaccattggccattgaacaagcctgctcagttggcatcccacagctcctaattcgcttgcttactgatggtttcataaaagaggtttctgacggaaaagatggttcgacgagccgcagtgggttgtctccattgggagttgtctggactctttctgctttatctcaatgccttcctggtggagtttttcgtgaaattttgtacagaagggaacagttaaagctcttaaccgacttgttgtctgatacacatcttaaggcattggccgcctggacgggtcttggtggtgggaagaggggagttcgggaactgataaactcagtcgttgatatcttggcatttccatttgttgcagtgcagagttctccaaacatgccgtcagcatctgcatccatcaatagtggtttcctgcttaatgttgcatcacccggtgggcgcattggtactgagaataaggaaatgctcaaaactatagagcaaaacatgcctcagtacattcaagttctactagaggttggaattcctggatgtatgctgcgttgtcttgactatgttgacatggaagatctaggtaggcccttggccattgtggccaaaatggcaggctacaggccacttgctttgcagcttcataaagaaggtcttctagatccaagtagagtagcagcattactcgagggtcctatagcaaaggagactttgcttgatttcctcatgattatttctgaccttgctcgcatgtcgaaggacttttatgtgcccattgataaagctggacttgttgttcttctgaagaacttcttatcaaatggagaccctgatataagggcaaaagcttgtagtgccattggcaacatgtgccgccatagctcctacttttatggcccacttgcagcaaataaggtgatccagctcgtggttgacaggtgttctgatcctgacaagcgcacacgaaagtttgcatgttttgccgttggcaatgctgcttatcataatgatatgctgtatgaagaattgagacggtccatacctcaactcaccactttacttcttggtcctgaggaggataaaaccaaaggcaacgctgcaggcgcgctcagtaatctagtgaggaactcagacatgctttgcgaagacattgtctcccaaggcgcaattcaggcgctgctgaagatggtgggcagttactctactgttgccctgagccccagcagacgagatgctctaaccgaatctccgctaagaatcgtgctcttcgccctgcgcaagatgtgcgaccacgccatctgcaggaacttcctacggtcttcggagctgctccccgtcatcgtccacctcaggcagtcacctgatccaacgatctccgagtatgcttctgccatcgcgaccagagtgagccaggcctgacgtttctctggacaggcgcagcttaaggtgtgccatcctgggctgggcatgatcatgccacagcggcccaaatctacgatccatctgcagctgtaatgtagtgtatggtttacggatcaagcaagctagcttaccagcttgtgcatatgcataagacttctgaaaaaagagcgattccattcgctgtctgtacatacgctgatacgcaccaccagaactgaagctacatgtcatgtgtgttgatgtatgtatatgctgctagggtcgtggccatcgaatagattcatattttgcaaaaaacccacccc

SEQ ID NO: 27497 - DNA, 1115 bp, Zea mays
  Clone ID: MRT4577_125093C.1
agtccccctcccctcctctcccccccggccccgccgaagaggagcagcgcagccgcgatggaccgcgtccagctcgtgctcctcggcctccccatcctcctcttctgctccgacgtcgttatcctcttcgcgcctctcccgccgccgggccccgggcccgacaggggcccccacgcttttcagcccggcgccgaatcctcctccgccgccgacgcttccgcacatgaggtttgtactagtacgggacctggttgggtggtttggtgcccgatctaactgtccgagctgatgcggttcttgtgctttgcttccttttatttttctttgcacgacccacaggtggacggaactggctccggcaccaccgtcgacttcaagttctgcgcctcctgctcgtacaggggaactgcaatgaccatgaaacggatgctggaaacctcctttcctgggatccatgatgtctgggaaaattatcctccgccgtgccgcacacgcgctctcagtaaagctgtaccccttctgcaggaccgcgcgatggcaacgttaatggccggcgattggatcttccccgggattggaatgagaccgccaccttggtgctactcacgccgcgctaatagatttgggaccatggcgtcaatctggctgtttggcaatttcgcccattcatttctacagagttctggtgcctttgaagtttattgcaacgggcaactggttttctccaaactgtctgagcagaggtttcctagtgaacttgagctacaggagctcattggcagtaggataccggattctcagattgtagaaaatctggaaaaagatctggtcctagaaaaagatctggtcttagatgatgttgatgccgatgatgccatgagagactagcttcgcctgtttgtttgttactaaatagacagaacttgagagtttcacaacttaattgtcaaaaacatattgccttataatttacactttattttcctcacttatgtacatatttataccatagttatgtaatatctgttgaagtcgtcgaaaaaaaaaaaaaaaaaaaggggcggagtactctgcgttgttaccactgcttaagggcgagatccagcacactggcg

SEQ ID NO: 27498 - DNA, 414 bp, Zea mays
  Clone ID: MRT4577_125094C.1
atgggcacggcccgggctagtaaatcttgtagcaatgataactgacggcactgacctacctcggtagtgtgcgggggtaataaagatgtgtccaggtagatcttagataataaagaatggcctgatgtagtagttgtccttggacttggtgggggtggtggtggtggattagtccgcctccgtggaccggtactggtggtccaactggtatcctgtggtgggggtgggggtggaccccgacgagtgctgctattcggtgttgttgcgcttgttgttgttactggagctggtgggggtggtggtggtggtgtacggttacctgtactggtgttattactaatcggccacccgggagttatcgttaggctagtattagtacttggccggggccgtggtgggggtggctggggtggc

SEQ ID NO: 27499 - DNA, 180 bp, Zea mays
  Clone ID: MRT4577_125095C.1
acgaggacgcatggtcggacgcctgagcggacgcctgggcggacgcgtggaggccaaaaggtctgaataccagtttacaaaggagacgagctgtttaaaaagctgccccaacagctgggttcagggcctgcatgtgacatcagctaacaacagcttcacacagttatatgggcaattcta

SEQ ID NO: 27500 - DNA, 694 bp, Zea mays
  unsure (1)..(694): unsure at all n locations
  Clone ID: MRT4577_125096C.1
ctcgaggccggccgggatcaggattcccaacgtgcctgtgtacggtcgtgtgtcgtcaagcgttgcattaccgtaggccgctcatgcgccgtccgctcggccgtccgtcgtctcgcgaagcccgtggccatcaggggttggcgcccgggagctccatcttcccgcgaaggaatgtcgccggcgccatgagacgctagcccgctccatccgcaagccccgcggagtcgacggggaggacaagtacgatgacaagtagcnacttagctttgacctcgaccacatctctgacaccacaggataggggaacctctacggatctgacccggcggctgcctatcatccgctacagagcatgttcttcaagacgctatgggctccggtcaccgacacaggtctgctggtcaagtgcctgctgctgatgcggtgtgtcacttctgggctacgtgagcgcgtgggtgtcaccggatctcctggcgatcaagaagggacctcaagagccgacgcagtcggtgccgcgcggcaagatctaagctcagcttctccatttgcatggactagtagcttgctttgtactgctagcgccggtcgatccgtcgcaatcgtcatggatcatctctctatcttgntgtgacgctggtcataatttgccatatttgacattccgctattgtgtactctttggcatacatacgat

SEQ ID NO: 27501 - DNA, 896 bp, Zea mays
  Clone ID: MRT4577_125097C.1
ccgggtttttttttttttttttttttttttttttttttttttttttttttttttagaataaaaaatgaaaatatatggaatagtgtaaaacggtagtagcagtaatgaaaccgtatgaaacatctagtttcaagctagggaacggcttgattaaaccttagttacacaggcacacggtcgctcgaatatagccgcagcagcagcagctaataactaataatgcgaaaatcccatcacctaataaacaaactcctacatgaaatgacatacacctgagcagcagcacctcagtgaagagctagcagtgtgtgtgtgttaagctcgcacaccttacctcgtagtcgtagttaagcacgtacgttcatcactctctcatcgtttcgcttccttgctcctcctggccctggagccagccgacctgcccagccatcgccgacggctgctggtggatcgcggccagagggtcgagccaagtgcgggccgcagacggccagccgccactggactgaaggggttccccttgggagaagagctgcccgccctggtggtctagccccccttgccgtgggggcacgccgaacatgtagctgtcgccgccattgccggctcccgcgccgttctccgaagcatgctgccacgacggcattctctggccgtgttccgccgcccagccttggacgcctgctgcaccagagatcataccgtgctggttcggggacacatggccgaagaactgctgctgctgctggtgggcttggtggctattagcggactggagagtgaggcaaagctcctgcggctggtggttggtggtcgtgcgcgacaggaggtccggcggtgccgacctgtactcgtcctgggtaggggtggtgctggctgccgacgtcgatgaaaac

SEQ ID NO: 27502 - DNA, 396 bp, Zea mays
  Clone ID: MRT4577_125098C.1
gaacaagttcaaggagaagatcctcatcttagcaacttcaaagctagcgacttgaaacaaaaccataatgttctagtactccttaccatgtatggtttcggtaataagtaagttatatgcatctccatggggcttttggattgataactttccaagaatacttaattaacgttagtactagttaactttccagtatcatccaattactaactgttagaatttggcccacttatgtgttagttcaaataaaaagccaacatggtgtgtacagatgacatgagggttttagttacatattgctcatctagatacgagagaaccaacttatatgcggatggtgttcactattcttcatattagacaaataaaaggttatgaaagttgccatgcgcgtgc

SEQ ID NO: 27503 - DNA, 517 bp, Zea mays
  unsure (1)..(517): unsure at all n locations
  Clone ID: MRT4577_125099C.1
aggatttgttgtctagtttcaagctagggaacggcttgattaaaccttagttacacaggcacacggtcgctcgaatatnnnnnnnnnnnnnnnnnntaataactaataatgcgaaaatcccatcacctaataaacaaactcctacatgaaatgacatacacctgagcagcagcacatcagggaagagctagcantgtgtgggtgttaagctcgcacaccttacctcgtagtcgtagttaagcacgtacgttcatcactctctcatcnnnnnnnnnnnnnnnnnnnnnnnnccctggnnnnnnnnnnnnnnnnnnnnnnnnnnnnnnnnnnnnatgaacccgccgccggggccaaccagatggttgaagccgacctgcccagccatcgccgacggttgctggtggatcgcggccagagggtcgagccaagtgcgggccgnagacggccagccgccactggactgaaggggttccccttgggagaagagctgcccgccctnnnnntctagnnnnnnttg

SEQ ID NO: 27504 - DNA, 579 bp, Zea mays
  Clone ID: MRT4577_12509C.1
aacccatggaagtttttttttgtcgtttggaagatcctaaagctcgtgtccaaaagctttaaagaagctgataaccacgaataccttaggagttactgcagatgtgtacggcacgcttcagttagactagagtcgattgaagtggacatggatactggtactcccgtgcaagcaacagcctctgcctgacgagttcagcaaaggatctcccaagctcagaggacggcaggtcatagacatccataacttctaatggcatattgttgaatccaaatataatacaggagtacaggacatcgtcatcactgagaaatgggaatcacctgtgcatctgcattcacagctaccttttcactacaccagtttcaaaaatctggtgtggcagttgaagaagctgcttgtgtgttagtctgaagaatggcacgaaaagttgaggtttgctagtcttgaaaacacatatgctcttgaagaaattatccgggtatttatgcgaggtgccacttggggatctaaaaattctcctgtattcctgctctcagactggtgtgcataatcttctttcagaacaattacatgaat

SEQ ID NO: 27505 - DNA, 684 bp, Zea mays
  Clone ID: MRT4577_1250C.1
cctcgaggccggccgggaattcatacatccttggcacatgctctccggtttaaattgtggcttgctggctgtctctgtcttgctgattgctacttacctgatcttgatgtacctatgccgttcttcccggaaatagcatcccccagggtgacacttccttcctcgtatcgtaccacaacctactagcacaacatcttgcctgataccattatactaccctgcctacttcgccgttcgaaatttcaagaacatgattacttctgatacacttaacatcaccgccactggctgcagtaacgacatctgccagcgataacatttaccttccccttctaatgcgcaacatgccatcagaccagctacggagctctcagtgcacgctagtatgatcatcaatggcgttctgcactgcgcgcaccgaatgctgaaaggcttcctcgaacagactccccgacgacgcactcttacatgccgactccaacaactacggtactgaggaatcccccgatccaggcttaatactctacacttactgcacacatactgacctccagtgcaactatttgaactctgtcaattaagcacattcctgctcgctgaaagatatagtaagactctttgttaatggcctgataatgcaggacgcatcattcctgtagtacgctgatgcttaggctctactgt

SEQ ID NO: 27506 - DNA, 456 bp, Zea mays
  Clone ID: MRT4577_125100C.1
gagctgactattcggcggccgccctcctttttttttttttttgttgttgaatcggtgttttttttgattgaaatttattttttaggcacaaaggtatggcgagcaattaatcatgcttgcgggccctagagactggtgttacaaaatatatatgttatatttacaaaaaggagacatacctggttgcagatgcatttacagggtccttaacaggttaaggggatggagctacattctgacaatttttcctggtgggactgaaaagaaaaaattagggcgacaaaacaaaaccttatagacacagaaaaatggaagcattatttccaaaattgcataacttttattaacttgccacaaagactacttttattcattttaaacaggtttgcgcccattttcttcgacaatagccgcctgtaccttggcctgggggtagaggaatacatgggattcacc

SEQ ID NO: 27507 - DNA, 231 bp, Zea mays
  unsure (1)..(231): unsure at all n locations
  Clone ID: MRT4577_125101C.1
ggtgtggtttttttttttttttttttttttttttttactaccatttctggcatatgcaggtggcatgcttgccagcatcttttcattgcggaaaaaaaatgggttgcatccgggaacgctgtttccctttggcccncagcgtcctagagggggggggggggggtncnttcccctgcttccaagaggcgcctagtctccgtttccgttgggggggcgggcctggcgcttgtg

SEQ ID NO: 27508 - DNA, 371 bp, Zea mays
  Clone ID: MRT4577_125102C.1
ctctgtgcttttccgcatgtctgtgaggtattttggtgtttctcaaaactatataacctgtacaccaaaatatgaaaggccaaacaccaaacctatttatatttgcaccaccatcgtgtaacatgtctgttcatacctaagcaagcaaaaaagactatcttaatggtgactcctacaaacaaaagtttgtgtgagattatctaatcatcacaactgctgcattttacatatgcaaatttttttatatataggcctttaaacatacaccaaacaattatccgtggcatgccaatctgagtttaaaaccactttataaacccaactatttcttggttccatgtaaaatcccgttccacatataatgaatctgc

SEQ ID NO: 27509 - DNA, 450 bp, Zea mays
  unsure (1)..(450): unsure at all n locations
  Clone ID: MRT4577_125104C.1
cttgtttcttgtgtgttttatggttgnnttgggttatcggagtacacatgccattcattacttaacttatccttgggctcaacgacatctcctttaacatagccctcgagtctctttgccttcaataatcgcaatgctcttctagaccatgccaaataatttttcaccccttctaacttaatctcatttggcattaggtctatcttctgaactggttctatatgagcaacattgtctttaattgatgatggagcctcatccctttttgctgacagtaattcgaccaatttaccaagaacctgctcaattccttgattttcccccataatatatatgtaataataactaggaaactacttgggcagctgcgtcaagatctgggtcacaacgtctagaagccaggaccaggagcgcctcctcttcctccggacgcgtgaaagtacgcgtggg

SEQ ID NO: 27510 - DNA, 274 bp, Zea mays
  Clone ID: MRT4577_125105C.1
tcccctttgctcgctcgtcttcattgcaaccaagctccactttggcttcgggccattggagctttttcccgagctgcctggcctggtgccgcgccccttcctgttcggccggtatttcctctctgctactcacagattcactttctcccatgctgcaacacattttcatggctggcggggaccatttccccaagttgggcaccgcattccaatctctttagcgaggatcgcctttccttgcccaaacttggcttcattgtggtccttgcccttt

SEQ ID NO: 27511 - DNA, 691 bp, Zea mays
  Clone ID: MRT4577_125106C.1
agagtacgtgtgaggcacatactacaaagcaagtgagctgagtgagctgtgagcagctagctagtgagcggcgacgatgagggtacccgccttctcgctgtgcttgctcttggccctcgtcgcggcaaatgttgctagcctcgccgtcgctgggagggcgccggagctgaaacatgagcccagcctagagccgaagcctacgccacagcctgaccccaaaccagacccgcagaccgaccctaaactcgcgccgacacctaagcccgaccctaaactcgcgccaaaacctgacccgaaaccagacccgcagccagacccaaaaccggcgccaaaacctgacccaacacccaagcccgaccctaaaccggcgccaaaacctgacccgacgcccaagcccgaccccaaaccagacccgcagcccgaccctaaaccggggccaaagcctgatcccaagcccacgcccgacccaaagcctgccccgggccccagcccgaagccggacccgaaaccccagccgccggaacagtcgtcctcgcagccgaagcagccgccacgttcgccgtcaggctacttcaactgacgggagggaggctcgtcagcagccgcttggtaatggagaactagcctgcctgcatttgcatgggtgttggtgcttaatttgtctccggtgatggttactaatgtattgcat

SEQ ID NO: 27512 - DNA, 111 bp, Zea mays
  Clone ID: MRT4577_125107C.1
ctggaatgtgatcatatcacaaaggctcaaacgctgaatcaacatgtgctgctcttgctggggccacaatctgagaattcggaagcaaccacgaatctacgccaatggaga

SEQ ID NO: 27513 - DNA, 617 bp, Zea mays
  Clone ID: MRT4577_125108C.1
ttgggatcctcgaggccggccgggattgcgtttgatccgtacgcaccgcgatcgcatcccaagcacacaaccatggatcgactgtctcctaccgccgctctcctcctcgtcgacctctccctcctcgacgacaagactgcgaggtgctcgaatcgaaggagagcaccatgcgaagccgaatcaaccgacgccgaggacgactgctgcgacgacgtggtatccgaccccacacgacgacgactgaggtgctgaacgacaacgccgctgaagatgatgtcatgctggcgtacaatgacaaggatgctaccgaagtcctccaacaggtgtctcaccggatccaccaccacgaccagatgtgggagaaactccaccacgagatctaccgtgacgcgacacgcaagatcccttgttctggccacggcgcgaggcgcgagaaggcaatgagacaacttggcatcttgcccgcatcagcataggtggtcaggtaggcgtgggaggacatgccctgggtcgagccggacccgtatcgctccctcccggacagcgacagacatgtgaagctggttattacgagctagatctcgtctacgatagccgaatgcgacaaactcgaagac

SEQ ID NO: 27514 - DNA, 117 bp, Zea mays
  Clone ID: MRT4577_125109C.1
attcagcacgccgcccgttgggaagggagcttcgaggcggcccgctgctgaccgtcgggcgggctggtgttgccaatgctgcgatcttgggcgcgaacgcttacgtggtcggtcggt

SEQ ID NO: 27515 - DNA, 1840 bp, Zea mays
  unsure (1)..(1840): unsure at all n locations
  Clone ID: MRT4577_12510C.1
cccacgcgtgcgcttgtataagctcgtctgcttgggcataattatataggatctgaacacttactccttgggctacttcgtgagggtgaaggtgttgctgctcgtgtgcttgaaagccttgatgctgatccaaacaacatcacgcgggaagtcatagtaacaacgcaggaaagccgggaagctgttggggctggagttggtggaggaagcagtggccagaagatgcccacacttgaagaatacggtactaatttgacgaaattagcggaagagggcaaattggacccagttgttggtagacaggatcagattgagcgcgttacccagattttaggcaggaggacaaagaacaacccctgcttaattggagagcctggtgttggaaagactgcttattgctgaggggcttgctcaacgtatttccaatggtgatgttcccgaaacaattcggccaccaggatctgaacaatgaggctgatgaccatgcacgggatgatacttatgtaaatcaagttcaagacgagaatgcagaggataatcacctaccagaggatgggcatggtttgatgaagtatgatatgaacattgaggctggtgagcctgcacatgataatcaccaaatgaacaatgcggaaatacatctaaatcatagtatggttgcacatatttcagataattgccatatgaacaatgagaaaatgcttctaaagcaaaatgtggacgagcaacagatggagaatgagcagatgcttatagatcaggtcactactgttcatgttttggatagtcaccatgtnnnnnnnnnnnnnnnnnnnnnnnnnnnnnnnnnnnnnnnnnnnnnccaaatggagccaaatcccatggctttgggtgttcataatttggataactactatctgnnnnnnnnnnnnnnnctcctgaataatgatgcagaccaacatgcaggagatatacaccatttgaaggatgggcaaattattttagatgaggctgcagatggacaagctagagttaatgggcaaacaattcatgtaattgatctggaagaagattatgcacagcagtctgagagcaggaatacaggagaatatctagaatccactggcaccttgcataaatacacggatgatgttcttcaagagcatatgtgttctcaagactagcaaacctcaacttttcgtgacaatcttcagactaacacacaagcagcttcttcaactgccacaccagatttttgaaactggtgtagtgaaaaggtagctgtgaatgcagatgcacaggtgattcccatttctcagtgatgacgatgtcctgtactcctgtattatatttggattcaacaatatgccattagaagttatggatgtctatgacctgccgtcctctgagcttgggagatcctttgctgaagtaagttagttagtcgactggtcactattctgtatattgtgcagtagtgtaatcccttttagatttcctgagtgctcgcgttttttttcttcaaggctcctcgtcaacaagttggttacctctgatccccgagatataagatgcgatgtcagtatgtctcggtagctgaatagatcgttcttttggctagaaatgactcttgctctcctgcttttcaatggaattgtggagtgcacagagaattatggttatggatgcttcacgtgcagctcgtcaggcagaggctgttgcttgcacgggagtaccagtatccatgtccacttcaatcgactctagtctaactgaagcgtgccgtacacatctgcagtaactcctaaggtattcgtggttatcagcttctttaaagcttttggacacgagctttaggatc

SEQ ID NO: 27516 - DNA, 531 bp, Zea mays
  Clone ID: MRT4577_125110C.1
ggggttcaaacaaaaatttctcagcatccaaagttcaaaggcggggtagggctgggggccttttgtttttcaacaaaccccgcccccagtcccccccgaataggccaaaactggaaccaaaataccggtaaattaccggcgaaattcccgacccaaaaaggaaaaaaaatgtttgtctatgggctgggggaaacaagctaacccgcctggcatccccaactttatctctttttctaaagaccaccaggcatgcgggctcttgggtggggctaatacccaaaacacagcctaacctatgcccccttgaatttgcgggaaggaggcccccggaatatgttaatgagatcatcaaccccccggggggtaatctcttggaaaccgaagagaaccatccggtaggagcccggcccccaaagggaccgccgatcaaaagtaacccccgcaacctgggaaacattaaaaggtgctttcgtcccatcataaaaagggaacatggcctcaagcgcggtactttgaacatgcccctcaata

SEQ ID NO: 27517 - DNA, 1014 bp, Zea mays
  Clone ID: MRT4577_125111C.1
attggtacctcgaccgggccggccccggccgatagtaacctccctacaatagcctccagttcaaggaatcaaggcacatagaaagcagtagcagcaaacaagcaagcaagcaatggagatagaatcggtcaagtgcgagtgctgtggcctgaaggaggactgcaccccgcactacattgccagcgtgagatcaggcttccatggccaatggttgtgtgggctgtgctgtgaggcggtcagagatgaagcatgcaggaggaaggctcaccatggagtagaggaggctgtgagggctcacatggcgttctgcaacatgttcaagttgaaccccgccgtccgcgtggccgacggcatgcgccagatgctccggaggcggtccggtgatatgtcaaagccagaatcggccaagaagtacgaatcatcagtgacactgtattgaagagttcatccatcctaaggcctgtagaccgtctagccctcttctcaggctgaaataccttccaccttttgtcagtttgctgtatgttcttcttatcatgcctatgccttcttggaatgtacatacgattcatgcaaacagatgctagtactgtatggctttttgatgatatggtcttctttctgtgctcacaacacaatcattgagctgataagatatgcttagatcatactaattctgtttctatctgggacctgcgctgtgcgtcttcctgtgccctcgcaatccgtcaagcacctggtgggagcgcgtgacccggggatgcctgcatctcctgccgccagtctacacagcctttcatacggcgagctcccgtcacgatcgagtgaacgacacatgcatctgccaatccaattgatagattgcgagagcatcatggcatcaggtaccggagaggcagcgtcgtctccgcgcgaggagatcgtgcacggcatggcatggcatggcatggcacgtggtccgtcgccgtcgcgcttgacagcgcaacggccgacggggatgggaatcccggccgg

SEQ ID NO: 27518 - DNA, 491 bp, Zea mays
  Clone ID: MRT4577_125112C.1
ggttgctgcactgccacttctttcttgctcatttaatccttgtttcaggtacaaccgtacaagagctgcagctcaacaaaacattgggagtgggacagccagcaacaacacctttatttccatcaaaactcacaaagcactagcaattttaaattgcgtgctattatacaattatacactatataagtatgtgtgtgtatatatgtatatgtatatatatatatcggccctggaggaggtaggacgactaacagctggctagggtcgactagaggtgactagtcatcgactagtcgtcttattcgaccttatcgcccctaaggcgactagggtcaactagatgatttgaaaacaatgtttcactgtcacctaaacttaccagaaatattaccagatggtccaggtctgaaaccttgaatctgatacttcgatgcaaactgtttcctctccaattcaagtgcatgaagaacagcatcttctctccgtgcata

SEQ ID NO: 27519 - DNA, 431 bp, Zea mays
  Clone ID: MRT4577_125113C.1
ttttatgccaaaaaggtgcttataactaacttgttatttgaaaaatatcaaacaacagatttcatatttttcctatgttcagaataacaaaacattagttatcccaaggtttggggtgttttccccttggggttatttttctagggtttttctaagttttccacgttttcctaaaataaaaggtatctcacttattctgtactaaacaagggtataataaatttttctagtgaactatactgaataagtaaactaacaaaaatgtgggtgctccctggttctttatttaaaccacctttaatattttctctaactttaagcaaaaagtgttttaaaatggcaaatcctatcttaatggggtgtacagaagggtttattatttttaaacaggttacgaattgattaagtacctctctaaattttcttaaccc

SEQ ID NO: 27520 - DNA, 376 bp, Zea mays
  unsure (1)..(376): unsure at all n locations
  Clone ID: MRT4577_125114C.1
attatattaaaaaaaggcttgaatccaaacgcancgttattttatgataggacgcactacaccaaatggaatgcaaagctctttgtgccctaatagttgccaccaaatttccagtgtatgaagccactgttcctcaacaagatcagtggcaaattaccagcttctgtcagtctagtttcgctccgcattgtattaccattcagtatactgccaaccaacttgcatatgtgaagctggtgaaagtttaaatcccattgtgaaagttataagaattatattaatatataacgtattttcatgagaacatcctctacagctctgaaaacgttgcatcattttttttttgtcaggttggtggcggtcactgcagcaatct

SEQ ID NO: 27521 - DNA, 377 bp, Zea mays
  Clone ID: MRT4577_125115C.1
aaaaaccacgggggggtaacaaaacccaactccactgggtttgaaacaaccaaacggggttttgcctaataggccacccaaggaaaaacccaaaaccccttccggaaattgtggacaaaaaatcccaaattcccgtttcgggcccccaaccaggccaaaaaaaccccatttttttggatccttttggcccacccccccggtttattaacaattatccccaaaaggggttttttttccttccctgggggggccccccctttgctttttaccaaaaacccgggcaccaagtttttgggccccttccctacccccacgttgggcaccaaatttggcagcaccatccctggccccagattttttaccaaaattaccccccc

SEQ ID NO: 27522 - DNA, 569 bp, Zea mays
  Clone ID: MRT4577_125116C.1
tttttttttttttttttttatccgtgtgggctttctttcaggaaaaaggccggaaaatctgtggctttttgggctgccaaactagccttagttttaaaatagtgaatgttgaccacagccacaagtttatctttgtcaaagcaaacgctggtaggtaaagggatcatgcatggatacaggatgtagctgaaaaacaaggagttatggataagctactcgttcagatatttccactgatgtttgtgagttaactgttactacatgaagcaaaatatgcccaaataacacatcctgggcaccaggctgcacagggcagacacgacgggatcaagatgcactgtcacagttcgaaaatctgcacaggtcagtcagaggaattgtcagacacaaataacctaaagttgtaaatggttgcctgaccagcccccaagtcagtgtaaaccttaaagcggggccaactaaactgggatttgtcaaagcacgaagtatacaaacacgcgctgctcaagacctatagaaatcactgagcatggataaatcaataatttgaatccactcgtgccgaattc

SEQ ID NO: 27523 - DNA, 348 bp, Zea mays
  Clone ID: MRT4577_125117C.1
atcttaaaaagcaaaaatggtgttacagggggacccccaatctgaaagttaagagattttagtaagtcagccttcattttcaccaccttcattttagaagacttaattttttaatacttggcaggaacgagtaatgcagtggcagacagtagatgcagattgtccccagcaacctcattcattgggaggaagcggtaatgttgaaaaaagggtgattaagcgcccgcctaatcacgattagacgcaaagggggatgggaaccctgcgcttaggccctaggcgggtgtctccttgttgcgcccgtgaaggcgggcctttttttgcgttgccctcgctgaggcggtaaaa

SEQ ID NO: 27524 - DNA, 177 bp, Zea mays
  Clone ID: MRT4577_125118C.1
gtgtgtcagccatcaaagtgctgatgttcgtgcagacactgactggataggccgtaactctcgaagtttaatcctcagatacgatagaacatgtgctggcaaagatgtaggataaggaatgcgttcatcctgttcagcagtcactggtctgtgctggcgagcagctggcagatgtat

SEQ ID NO: 27525 - DNA, 310 bp, Zea mays
  Clone ID: MRT4577_125119C.1
attcagaaacacaccaagcgaagcgcactattttctacctaacaacaatggctaccaaggggtttgcctttcttgcgcttcttgccctttttgtgagcgcaacaaatgcgttcattattccacaatgctcacttgttcctagtgccattatttcacagttccttccaccagttactataatgggtctttaacacctagctgtgcatgccatcatgctacaacaagcgcttgctttgtgcttttttcatcatccaatttttctattgcatcaacaatttcatgtcacatttatcattacaagtctttatat

SEQ ID NO: 27526 - DNA, 617 bp, Zea mays
  unsure (1)..(617): unsure at all n locations
  Clone ID: MRT4577_12511C.1
ccggccgggatccgactttatactaacacgacttgcattcatcgtcgcttagcgtgagccagttgactttgactcaagaaaaaagagcaatccgcgcaaccacacttcaacatgccgatgcttgcagagccatggaaaaagtaccagccatttaagccattacatctgccggacaggacatggcctaacaagactattgacaagccgccgcgctggctgtcgaccgatctgcgagatggcaaccagagtctagtcgaccccatggacggagcgcaaaaatgggactacttccagatgctcgtcaagcttggctacaaggaaatcgaagtctcgtttccctcggcgtcgcaaactgactttgactttacacaacgcctcatccagacgcccggcatagtccccgacgatgtcgccatacaggtcctctcgccctgccgcaaggagctcatccgccgaaccgtcgactccctcaagggcgctcgcaacgccatcctncacttgtaccttgccacgagcccgtgcttncagcagattgtcttcgacatgaacaacgagcagacgattgctcttgccgtcgagtgcacaaagtacgcgcgatcgattacaaaggacgatcc

SEQ ID NO: 27527 - DNA, 200 bp, Zea mays
  Clone ID: MRT4577_125120C.1
gtttatggttgtttgctgacgaagcttactcaggggtttcgagtagacacccatacgatgtgggaagaggcaagccaggattctaccgacgcattgggcgtagtcagaccacacccctacaccagagctgactagattgtcaggcctcacagccaaccagaaaggtgaagttactgtcaaacagtactcagactgacctt

SEQ ID NO: 27528 - DNA, 697 bp, Zea mays
  unsure (1)..(697): unsure at all n locations
  Clone ID: MRT4577_125121C.1
gggacctcgagccggcggggcccctcgtctagtggtcaggacatctctctttcaaggaggcagcggggattcgacttcccctgggggtaccaaaaaaaaacacacggtgcggcggaaggaagcagccatggcgctcacgcctgtcttgctcctcctgctggcctactgcctctcgggcgtgagctcatctgcaggcccgccgccacgcagcttcacctccctgttcgccctcggggactcgtacatcgacgccggcaacttcgtgaccatggccacgccggtcgctccggtgtgggtcgacaagcctccctacggcatgaccttcttcgaacgcccgacggggcgcttcagcgacggaagggtcatcgtagacttcgtagccgcggcgcttggcgtcccgttcctcccggcttcgctagccaacagctcggacgacgacgtcgcgcgccgcggcggcgtgaacttcgccgtcggcggcgcgacggcggtcgacgtcgccttcttcgagaggagacggctggtgccgttcaagctgctgaacaactcgctggacgtgcagctgngctggttcgaggaactcgagccgtccctttgcaacgccacggcggaaagttcttatggtggcggacggtgtttcagcagatcgcttttcttggtgggcgagtttggggtcaacgactacacctttctatggacg

SEQ ID NO: 27529 - DNA, 239 bp, Zea mays
  Clone ID: MRT4577_125122C.1
tgatgtcactatcaaggagctcgtcgaactagtcaaggaggggtgcggcttccatgggaacctggagtggtactccagctagccggacggcacacccaggaagctcatggatagctccaagatacaggggatggggtggaagcccaagatcgccctcaaggaaggcctcgtggaaacctacaaatggtacgtcgatgaatgtcatctcgaacatgacgtagggccgagacatgccagtg

SEQ ID NO: 27530 - DNA, 333 bp, Zea mays
  Clone ID: MRT4577_125123C.1
gaactccaacctggaaaataaaggaaagaaacccgaaaaagatgggtttcaatgggacaggtggaaaggatttacagttttgcaaagggcaaacaaaacttttggtgcctaaaacagggagatgtaaagctttttccttcgtagctttgttatcaagtcatcaaggggctggggcccaaagggcgtggcatcccatattttttttttgggccttgttcgtttgtgtaaaattacatccaaaatttttcccgttgggatttatttaaactagagaagcaatccccgggaatgtaccagtttgggtttatataaactaaaacattccgattagga

SEQ ID NO: 27531 - DNA, 1554 bp, Zea mays
  unsure (1)..(1554): unsure at all n locations
  Clone ID: MRT4577_125124C.1
cattgggtacctcgagtgcggccggggtcttttcccttctctccgtctatttccaagctttctccagatcaaatcagaaaggggaagggaagaacggcccagcaatgccgctctgcagcttctacgcctccacctccgttcccgtcgtcaagccccagcagtccgtcgcctcgtccaagccccccaccacggcggtggcctccgtggcgacaactgtgccgatgcgcagtgcagcgacggtgacgccagccgtggccacaacaacgagcctagcgctgtctctgcacctgccggagctgccgtcgcaggtgaaggacaagatcctgagcctggagctgatgggcgtggactatgggcgcgcgctggagcagaacccggcgctccgcgacgcggcgccggagtccatccacgcggtggtgtcgttcctccagtcccgcgggctccagttcaaggacctgggccgcgtcttcggcatgtgcccgtccgtgctgaccgccagcgtccgcgccgacctccgccccgtgttcgccttcctctccgcggacctgggcgtgccggagtcggcgcaccggcgcgtggtgatcaagtgcccgcgcgtgctggcctgcagcgtccgcgaccagctccgccccgcgctcatctacctccgccgcctgggcttccgggacagccgcgcgctggcgctgcaggacccgatcctcctcgtctccagcgtggagcgcaccctggcgccgaagctggagtacctggccgggctcggcatgtcccgcgacgacgcggtcgccatggtgctgcgctgcccggcgctcttcaccttcagcatcgagcggaactaccggcccaagttcgagtacctggtggacgccatgggcggcggcgtcgaggacgtcaaggccttcccgcagtacttcgccttcagcctcgagaagcggatcgcgccgcgccaccgcgccgcggaggacgccggcgtcgcgctgccgcttccggacatgctcaaggccaccgacgaggagttcagggagatgctcgacaaggagcgggagctgcacgagcaggcagcgacgacggactgatcgatcggggggctagtacagcggtttgcacctgatccgactatccgaagcatccaaccgccgtcttcgtggcgatcgagtgtcctggccatgacggtagccagcacatgtagtcatttgatttgagtaattagtagcctgtacatatatgcattgacattatttgctatagtcacgattcgtagctcatgagagaatatgtctgttctttctccattattccaagtgaataagcaccgagctggaagtcgtgtctttatgtacacacgtgtaccaagtttacaggaatgaatgtaccaagttcattagatattatttgctctgagctgcacgcttgcgcaacacgtcttgtctcgtgtggttgtaattaatggtgtcaaaagatatggttgccatccaaaggacaaccaaacccctgntaatggagcatctccagtagacaaaaaaaagtttttcaagtcactaaaaagtgtagagccgc

SEQ ID NO: 27532 - DNA, 296 bp, Zea mays
  Clone ID: MRT4577_125125C.1
tttgggtactgattttccggaggcttgaatcctttcttgtggggaacgttgtccttcgccaacttggccggacaaaaggcctccagcccctgggcaaccatgttcaattctttttgcttggccttgaagggttcccttaacttaaaggcggccagggagttgccggattccttggccaccttgaacattaagttcaattcaactgtcaagaacggattcacccccttgaaggccttattttacaaaacgaagccttccaaggtcacaacaataaggacaagccccccctttttctt

SEQ ID NO: 27533 - DNA, 1836 bp, Zea mays
  Clone ID: MRT4577_125126C.1
gccggccgggttcaggaatacttagaccacaactccagctttctgctgtcgcggctcccagcttctctcctctgctcgctctcccagttcatggcgcgagcaagctcccacacgtgtcctggcgtctgcgccgtaagactccttgcgtcctccccctgcttgccacagctgccgactatgggcgtggactatgggcgcgcgctggagcagaacccggcgctccgcgacgcggcgccggagtccatccacgcggtggtgtcgttcctccagtcccgcgggctccagttcaaggacctgggccgcgtcttcggcatgtgcccgtccgtgctgaccgccagcgtccgcgccgacctccgccccgtgttcgccttcctctccgcggacctgggcgtgccggagtcggcgcaccggcgcgtggagatcaagtgcccgcgcgtgctggcctgcagcgtccgcgaccagctccgccccgcgctcatctacctccgccgcctgggcctcaagctgccgccgcggccattctgctctaccaccttctccgctacggcggccgtcacggatgtctcctccgctgaccgcttgctggcggtcctgcgcggctgcgtctccgcgccgcacctcccgctgggcctccaaatccacgctcgcgccgtcgtgtccggcgctctctccgaccacaaccacctggcgctccacacccggctcctgggcatgtacgtcctcgcgcgccggttccgcgacgccgtcgcggtgttctccgcgctcccgcgcgccgccgccgcatcgtcgctgccgtggaactggctcatccgcgggtttaccgcggccgggcagcatcacctcgccgtcctcttctacgtcaagatgtggtcccaccccgccgcgccgagccccgacgcgcacaccctcccttacgtcgtcaagtcctgtgccgcgctcggagcgatgtccctgggccgtctagtccaccgcacagcgcgggcgatcgggctcgccaacgatgtctacgttgggagcgcgctcgtcaagatgtacgctgacgctggcctcctcgggaacgcccgcgacgcgttcgacggaataccagagagggattgcgttttgtggaacgtgatgatggacgggtgcataaaggcaggtgacgtggatggcgcggatgtgttcaaaatggccttttcgttgaagcttttggattgttctatgatatgcagaggagtggcgctcgaccagattcgattacgctagaacaagagagagactagcccaagcgagtaggtacgaagggcaccgacatcgcctcttaacacgacaagccccattcccgcagtagtcgtcagcctcgtgaagcggagcgcgccgcgccaccgcgccgcggaggacgccggcgtcgcgctgccgcttccggacatgctcaaggccaccgacgaggagttcagggagatgctcgacaaggagcgggagctgcacgagcaggcagcgacgacggactgatcgatcggggggcgcgccatgctttgtgtgcttacctagcgagatagtacagcggtttgcacctgatccgactatccgaagcatccaaccgccgtcttcgcggcgatcgagtgtcctggccatgacggtagccagcacatgtagtcatttgatttgagtaattagtagcctgtacatatatgcattgacattatttgctatagtcacgattcgtagctcatgagagaatatgcctgttctttctccattattccaagtgaataagcaccgagctggaagtcgtgtctttatgtacacacgtgtaccaagtttacaggaatgaatgtaccaagttcattagatatt

SEQ ID NO: 27534 - DNA, 265 bp, Zea mays
  unsure (1)..(265): unsure at all n locations
  Clone ID: MRT4577_125127C.1
tcccggtcgcccagctccgccgcgctccctcctctcgctcgccggagaacaccgccgttgctgctgccgcgtccacgatggggggtttcgtgaagaccctagnccatgcgttttcaacgtttccagtgaaattcagaaggcgggctggcttgacgactcagggccggataaggctgnttaaccnagacatanccagtccaacacacccaattcagatttgttgtgcgatttaccaacaggtacatcactgcncaaatcatttctg

SEQ ID NO: 27535 - DNA, 2562 bp, Zea mays
  Clone ID: MRT4577_125128C.1
atgcgcctcgctcgctcaggcctcaagctgccgccgcggccattctgctctaccaccttctccgctacggcggccgtcacggatgtctcctccgctgaccgcttgctggcggtcctgcgcggctgcgtctccgcgccgcacctcccgctgggcctccaaatccacgctcgcgccgtcgtgtccggcgctctctccgaccacaaccacctggcgctccacacccggctcctgggcatgtacgtcctcgcgcgccggttccgcgacgccgtcgcggtgttctccgcgctcccgcgcgccgccgccgcatcgtcgctgccgtggaactggctcatccgcgggtttaccgcggccgggcagcatcacctcgccgtcctcttctacgtcaagatgtggtcccaccccgccgcgccgagccccgacgcgcacaccctcccttacgtcgtcaagtcctgtgccgcgctcggagcgatgtccctgggccgtctagtccaccgcacagcgcgggcgatcgggctcgccaacgatgtctacgttgggagcgcgctcgtcaagatgtacgctgacgctggcctcctcgggaacgcccgcgacgcgttcgacggaataccagagagggattgcgttttgtggaacgtgatgatggacgggtgcataaaggcaggtgacgtggatggcgcggtgcgtttattccggaacatgagggcatctggttgtgagcccaatttcgcgactctggcgtgctttctgtctgtgtgtgccactgacgctgacttgctgtctggggcgcaacttcactctctggcggtgaaatgtggtttagagccggaggtggcagtggctaacacattgctggcgatgtatgccaagtgccagtgcttggatgatgcatggagattgtttgaactgatgccacaggatgacttggtaacctggaatggaatgatttcaggatgtgttcaaaatggccttttcgttgaagcttttggattgttctatgatatgcagaggagtggcgctcgaccagattcgattacgctagtgagtttgctgccggctttgaccgacttgaatggtctcaagcagggtaaggaggtacacggttatattgtcaggaattgtgtgaacatggatgtctttttggtgagtgctttggtagacatctatttcaagtgcagggatgtgaggatggcacagaatttatatgatgcggctagggctatcgatgtggttattggcagtacgatgatatcaggttatgttcttaatgggatgagtgaagaggcactgcaaatgttccgatatttgttagaacagtgcatcaaaccaaatgctgttactatagctagcgtcttgccagggtgtgctagcatggcggctttgcctcttggtcagcagatccatggttatgttctaagaaacgcatatgaaagaaaatgttatgtggagagtgcactgatggacatgtacgcaaagtgtggcagacttgacctgagccattatatcttcttaaaaatgtctcagaaggatgaggtgacatggaactcgatgatttcaagcttttcacagaatggaaaaccacaagaagctctagatcttttccgtcagatgtgtatggaaggaataaagtacaataatataaccatatctgctgccctatccgcatgcgcaagtttaccagctatatattatgggaaggagattcatggtgttaccataaagggtcctataaaggcagacatatttgctgagagcgctctgatagatatgtatgcgaaatgtgggaacttggagttggctcttcgtgtttttgaattcatgcctgataagaatgaagtatcatggaacagtataatttcagcctatggggctcatggtcttgttaaagagtcagtgagcttgttacatggtatgcaggaggaaggatataagccagatcatgtaacatttcttgctttgatatctgcttgtgctcatgctgggctggttgaagaaggtgtccaactttttcaatgcatgacgaagaaatatctgattgcaccacgaatggagcactttgcttgcatggtcgacctatacagtcgttctgggaagttagataaggctatacaatttattgctgatatgcctttcaagccagatgctggcatttggggtgctcttctccatgcttgccgtgtgcatcgcaatgttgaacttgcggacatcgcttcccaagaactgttcaagttggaccctgctaattctggttattatgtgctcatgtccaatatcaatgcagttgctgggcgatgggatggtgtatcaaaagttagaagattgatgaaggataataagatcctgaagatacctgggtacagctgggtagatgttaataacagcagccatttatttgttgcatcagataaaagccaccctgagtctgaagatatctacacgtccttgaagaccctgcttcaagaactaagagaggaaggctatgttcccagaccagatctatgtcaccccatgcacccagataacaacacacaggtggaatttaaaaagtacaaagagattgtttga

SEQ ID NO: 27536 - DNA, 2126 bp, Zea mays
  Clone ID: MRT4577_125129C.1
ggcttcccggtgcgcgtcatcatccccggctgcatcggtggccgcatggtcaagtggctcaagcgcatcatcgtcacccccgccgagtcggacaattactaccatttcaaggacaaccgcgtcctgccgtcgcacgtcgacgccgagctcgccaacgcagaagcgtggtggtacaagccggagtacatcatcaacgagctgaacataaactcggtgataacgacgccgtgccacgacgagatcctgccaatcaacgcattcaccacacagcgtccctacacactgaagggatacgcttactccggcggcggcaagaaggtgactcgggtggaggtgacgctggacggcggcgagacatggctggtgtgcactgatcacccggagaagccaacaaagtacggcaagtactggtgctggtgcttttggtctttggaggtggaggtgctggacctcctctctgccaaagaaatagcagtcagggcatgggacgagagtttgaatacgcagccagagaagctgatctggaacgtaatgggtatgatgaacaactgctggttccgcgtaaagactaatgtttgcaagccccacaagggcgagattgggatcgtctttgaccaccccaccctccccggcaacgagtccggcggttggatggccaaggagaagcacctggagacggcggaggcagcagcaccgggcctcaagcgcagcacgtccacgccgttcatgaacactaccgacgtcggcaaggagttcaccatgtccgaggtgcgcaagcacgcgtcgcaggagtcggcgtggatagtcgtgcacggccacgtctacgactgcaccaagttcctcaaggaccacccgggcggcgccgacagcatcctcatcaacgccggcaccgactgcaccgaggagttcgacgccatccactccgacaaggccaaggcgctcctcgacacctaccgcatcggtgagctcatcaccacgggcaccggctacagctccgacaactccgtccacggcggctccgtcctgtcgcacctcgcgcccatccgccgagccgtcagggcccccgcgctctccaacccgcgcgaaaagatccactgccgcctcgtcggcaagaaggagctgtcccgcgacgtccgcctcttccgcttctcgctgccgtcgcccgaccaggtgctcggcctccccatcggcaagcacatcttcgtctgcgccagcattgaagggaagctgtgcatgcgggcgtacacgcccacgagcatggtggacgagatcggccacttcgacctcctcgtcaaggtctacttcaagaacgagcaccctaagttccccaacggcggcctcatgacccagtacctcgactcgcttcccgtcggcggctacatcgacgtcaagggcccgcttggccacgtggagtacaccggccgcggcagcttcgtaatcaacggcaagcagcgtcatgcgagccgcctcgcgatgatctgcggtggaagtgggatcacgcccatgtaccagatcatccaggcggtcgtgcgcgaccagccggaggaccacacggagatgcacctcgtgtacgccaaccggacggaggacgacatcctcctccgcgacgagctcgaccggtgggcggccgagtatccgtacaggctcaaggtgtggtacgtcatcgaccaggtaaaggagggttggaagtacagcgttgggttcgtcacggaggctgtcctccgcgagcacgttccggaaggtggggacgacacgctggcccttgcctgcggaccaccgccgatgatccagtttgccatctcgcccaacttggagaagatgaagtacgacatggccaattctttcgtcgtgttctaagatcgcgcggaagtagcagtagccaattaataattaatttgatatacgtagctaccacggaccagatatatgtatataaccagccgacttgtcagtgctaattcgtgagatgcatggatatgttggaagatactgtagttgaccttgtactcagaatgtgcaacatgtaaattctgagggtattgtttatttacttatgtatgctactactagcgtttaactattattgttgttaaccatcggacataaatatctcaaaatgttctttc

SEQ ID NO: 27537 - DNA, 411 bp, Zea mays
  Clone ID: MRT4577_12512C.1
gcctgcaggagccgggccggaatatatagccgggtcgacgagtttattagacggcggacggccttaaattgagaccattttttgagcatgctgagcaaccacggagatgccattctgttctcgctgctgatgctaaggatcaatacatacaaggtgcgatggctctggccacaccagaccaacatgtggtagcctgtgcagacatagactagcaccatgtcagacggcaagtaaatctgggacattaaccttacaatgggcgaaggggcaacctgagatagtggaaacgagggttcaaaggggtgctgaccaaaaggtttgggaccctacatccaatcaacagccccaggtgaagtctatcgtagaggcctatttaatcatagaccagactgcagatcaattgctggtgtt

SEQ ID NO: 27538 - DNA, 398 bp, Zea mays
  Clone ID: MRT4577_125130C.1
tctgtactctccgctgctcccacataccatacatacgtcgtccttctccctcaactgacccctctgttgttccctcggactgctcgctcgatctgagcatcagatctgtggtctccggcgaccgcgtagccctttcaataggccgaatgtcgctcgcattgtgtattggcgctggaaacaagaatgccgttgcagcacttattgctcgagagaacaacgtgatcaacgttgacgcgaccaatgatcttgtgatgggcgactacaacaagacccctgagcttcttaacaagaacccccttgcgaaggttcctgttctggacactcctgatggcgctggttttgagaagaatgctatcgcacgctatgttgatcgcttgaaggatgacaaccctcttttt

SEQ ID NO: 27539 - DNA, 3711 bp, Zea mays
  Clone ID: MRT4577_125131C.1
tcactagtcggcggccgccaagaacaggcgcaggccaccgagaacaatttctccagccacaagccaagaacaggcgccttggggtagtggagaacaccccaacacacacactgactgagttcgagcgtggcgttcgtgttcaggcgtgcgtttctccgcccgccggctccgtccagtgagcaggcgccatgtcgtcgtccctagtgtccaccccatttgccgccgcggcgcagaagcggctcctggcggcgcccgtgccgctgcactcgttcctcctgagcggccggcgccagccttcgcgccgcgccggcaccatccggtgcgcggtcgccggcggcaacggcctcttcacgcagaccaagcccgaggtgcggcgcgtggtgccctccgacccgcggggcctgccgcgggtcaaggtcgtctacgtcgtgctggaggcgcagtaccagtcgtccgtaaccgcgaccctacttcagggacagacaataataccgagccctctcttccattccagccttcccaggccagctgcaactactggctcatcaccagaaaccagaacgtacgccggcaacccatctccctgaaatggccgctgtggagccccggcagttcgggcgtctggagccgggctcctcgccagtgcgcgtggccacgaacggcgccaaggcgtaccctcctccggcaagccacctcccgcggcgcgctgactcccctgtccgcggctgcagcttccctcccctcgtctccccgccgcgcaggctggacgacgcgtcggacgacgaggacgaggagcaggaggactggcgagagctgtacggctcgcacctgcagctggaggtggagcccgcggtgcaggacgcgcgcgacgaaggcaccgcggacgcgtggatcgagcggaacccgtgcctggtgaggctgacggggaagcacccgctcaactgcgagccgccgctggcgcggctgatgcaccacggcttcatcaccccggcgccgctgcactacgtgcgcaaccacggcgccgtgccgcggggggactgggcgacgtggaccgtggaggtgacgggcctcgtgaggcggcccgcgcggctcaccatggaggagctggcgcgcgacttccccgccgtggagatccccgtgacgctggcgtgcgcgggcaaccggcgcaaggagcagaacatggtgcagcagacggtgggcttcaactggggcgccgccggcgtgtccacgtccgtgtggcgcggcgcgcgcctccgcgacgtgctccgccgctgcggcatcgtgccccgcaagggcggcgccctcaacgtgtgcttcgagggcgccgaggacctccccggcggcgggggatccaagtacggcaccagcgtcacgcgcgagtgggccctggacccgtcgcgggacatcatgctcgcctacatgcagaacggcgagccgctgctgccggaccacggcttccccgtgcgcgtcatcatccccggctgcatcggtggccgcatggtcaagtggctcaagcgcatcatcgtcacccccgccgagtccgacaattactaccatttcaaggacaaccgcgtcctgccgtcgcacgtcgacgccgagctcgccaacgcagaagcgtggtggtacaagccggagtacatcatcaacgagctgaacataaactcggtgataacgacgccggggcacgacgagatcctgcccatcaacagcattaccacacagcgcggctacaccatgaaaggatacgcctactccggcggcggcaagaaggtgacgcgggtggaggtgacgctggacggcggcgagacatggctggtgtgccacctcgaccacccggagaagcccaacaagtacggcaagtactggtgctggtgcttctggtccgtcgaggtggaggtcctcgacctgctcggcgccaaggagatcgccgtgcgcgcatgggaccagtcgctcaacacccagcccgagaagctcatatggaacctcatggggatgatgaacaactgctggttcaaggtgaaggtgaacgtgtgccgtccgcacaagggcgagatcgggctggtgttcgagcacccgacgcagcccggcaaccagcccggcgggtggatggcgcggcagaagcacctcgagacggcggaggcggcggcgccgggcctcaagcgcagcacgtccacgccgttcatgaacaccaccgacgtcggcaagcagttcaccatgtccgaggtgcgcaagcacgcgtcgcaggagtcggcgtggatcgtcgtgcacggccacgtctacgactgcaccaagttcctcaaggaccacccgggcggcgccgacagcatcctcatcaacgccggcaccgactgcaccgaggagttcgacgccatccactccgacaaggccaaggcgctcctcgacacctaccgcatcggcgagctcatcaccacgggcaccggctacagctccgacaactccgtccacggcggctccgtcctgtcgcacctcgcgcccatccgcgaggccgtcagggcccccgcgctctccaacccgcgcgataagatccactgccgcctcgtcggcaagaaggagctgtcccgcgacgtccgcctcttccgcttctcgctgccgtcgcccgaccaggtgctcggcctccccatcggcaagcacatcttcgtctgcgccagcattgaagggaagctgtgcatgcgggcgtacacgcccacgagcatggtggacgagatcggccacttcgacctcctcgtcaaggtctacttcaagaacgagcaccctaagttccccaacggcggcctcatgacccagtacctcgactcgcttcccgtcggctcctacatcgacgtcaagggcccgcttggccacgtggagtacaccggccgcggcagcttcgtcatcaacggcaagcagcgccatgcgagccgcctcgccatgatctgcggcggaagtgggatcacgcccatgtaccagatcatccaggcggtgctgcgcgaccagccggaggaccacacggagatgcacctcgtgtacgccaaccggacggaggacgacatcctcctccgcgacgagctcgaccggtgggcggccgagtacccggacaggctcaaggtgtggtacgtcatcgaccaggtaaagcgcccggaggaggggtggaagtacagcgttgggttcgtcacggaggccgtcctgcgggagcacgttccggaaggtggggacgacacgctggcccttgcctgcggaccaccgccgatgatccagttcgccatctcgcccaacttggagaagatgaagtacgacatggccaattctttcgtcgtgttctaagaccgcgcgggcagtagccaattaataattaatttgatatacctacgacgtaccacggaccagatatatgtatataaaccagccgacttgccagcgtaaatttcgtgagatgcatgggatatcgttggaaggatactgtaaggtttgcacttgtactgtgctctagcctagaattaccagactagagcagcagataacataggccatgcatgttttgattttgccctcggaatgtgcaacatgtaaattctgagggtattgtttatttacttatgtatgctactactagcgtttaactattattgttgttaaccatcggacataaatatctcaaaatgttctttcacttggtttcgacttaaaaagaaaaaaaaaaaaaaaaaagcggcc

SEQ ID NO: 27540 - DNA, 186 bp, Zea mays
  Clone ID: MRT4577_125132C.1
aaaaaaaaaaaaaaaaaacatttaaataaaaataaaaaaaataaaaaaaaaagagaaggggaaaaataaatggtggagagggctaatattgactattattaccttcgcgttcgtgtttcctgtttgctattctctagcttcccctggccgacgttttatcactggttatcttagacgattctcttg

SEQ ID NO: 27541 - DNA, 554 bp, Zea mays
  unsure (1)..(554): unsure at all n locations
  Clone ID: MRT4577_125133C.1
ggggggggggggggggcaaaaaaaancngcnncgnnaaaagcanaaaaaatatatnacgccccgtctcagttcgtctctcctccttggttcattccggccgnatacaagctcttacgcgcggatttttacttgtatcatagggaaacgggatacattggacgaaattgtaattttctctcatgtatttatagatganncactaaaaattcacgannaatagtggaaacagtcaaacccactattcaaattttggagagggttggnncttaacaaattattgnntgtgatggtggggtcttggatcgccaatttcctattggggttctcatccnnnacgtctgaattggatgagcctagccacctacctctgggtggcccatcaccccatatggctggcccttacaacnntcctcccctggtcggccataccactctttctgaggtagagtttcacactcagctttaggngcctgcgatcgtgaccctcctatgagccatccccgtcacctccagttggggtggcctaacatgcactcgggtcctggagccttct

SEQ ID NO: 27542 - DNA, 554 bp, Zea mays
  Clone ID: MRT4577_125134C.1
cccagcgtccgcccacgcgtccgcccacgcgtccgcccacgcgtccggtggcataatgcttgttttttttgtggcactggcaccaacattgtgcaatggttaaaaagtaggtgctcccaaggccatgggttgtgtacactacacctgtttgcttgccgagaaatatgcatgacttctttttcattggatgttctattatagatcacaataaaccccggccattgtacttcaaaaaaaaaaaaaaaaaaaaaaaaaaaaaaaaaaaaaaaaaaaaaaaaaaaaaaaaaaaaaaaaaaaaaaaaaaaaaaaaaaaaaaaaaaaaaaaaaaaaaagggcgggcggtttttaaagaaccaatttaacggacaaagcccctggcaaagcccaaccttttttttttttgccccccaaaatttatttaaacggccggccttttaaaaaccctggggctggaaaaaacccttgggttaacaaaatttaatcctttttggaaatttccctttttcccaataggggtttattaaaaaaggcccccaccgttgcccctcccaaaa

SEQ ID NO: 27543 - DNA, 458 bp, Zea mays
  Clone ID: MRT4577_125135C.1
atccgtcctaatcttatgagggaccaacaccagcttaggctgaatatggtatgattggagccagtgctcaacctgcaccggcctatgttgtatgcagaggcacgatttatggtagatgcaacaaaagcaactccaaacgtgaggactcatgctatgacaattgctcacaacattctgttgacacgtatgcaaacccacctgaatgtatcggctgcaaacacacatttatatggaagaggacctatacaaggcgcctgaccttatgcatgcattgatgggcacattggtgtgcgaactacagctcagtggttcaattgaacagtatactctgatgggcataatataccaactgctaattgcacatgttaccgctacaatagcacttctatgagaagtgctagccagcatacagcatcgaacctaatggctgtacatgcacatatgccttggtttggaat

SEQ ID NO: 27544 - DNA, 1207 bp, Zea mays
  Clone ID: MRT4577_125136C.1
ctcgaggccggccggggaattcctcctgtgcggcgctcttttttttccccattggacgcccctcgcaacactcccattcccagacccctttccctttcccttccccctccggctccgcctcctcgaccactccgacaacccccatcgcctcctctccggcgagctccacccctccaccggcggcggcgaggtgcgggggggctaactaagtctgtaggctgcggcggaggtgatccgggagccggagccggagccgagtctagggcgatggggcagcagtcgctgatctacgcgttcgtggcgcgtggcaccgtggtgctggccgagtacaccgagttcaccggcaacttcaccaccatcgccgcccagtgcctgcagaagctccccgccagcaacaacaagttcacctacaactgcgacggccacaccttcaactacctcgtcgaggacggattcacgtattgtgtagttgctgttgaatcagttgggcgacaaatccccatagctttcctggacagagttaaggaagacttcaccaaaaagtatggaggcgggaaagcagctactgctgcagcgaacagcttgaacagggagtttggatcaaagcttaaagagcacatgcagtactgtgtggaccaccctgaggaggttagcaagcttgccaaggtgaaggcccaagtctccgaagtcaaaggagttatgatggaaaacattgagaaggttcttgaccgtggcgagaagattgaactgcttgtcgacaaaactgaaaatctgcgttctcaggcacaagatttcaggcagcagggcaccagggtgcggcggcgcgctgatctccatcacatgcctgtcggtgtgccacggctgcaagtgcggcagcaagtgaggaggggggcgtgacttacaaatggctggtgtgccctggcaccggcgagaagaaagaccatggggagttttgctctttttggtcgtcttgttgttgagtcctgcgctaattattcttggtgatcgtcagagggagttattcctgatgtcggtgttgattgctgttggttgggaagtgacggtgaaccggggaaagggggaagggggttgtgtcgtgtaattttgaatgctactgttgtgcatgtatagcttgtctgctaccctgttccatgctgtttgttactccgatgccagtagatgttacgtactactacgtttgctcccc

SEQ ID NO: 27545 - DNA, 921 bp, Zea mays
  Clone ID: MRT4577_125137C.1
ttcggccgggaaagtggaagcttttgtgcctcccaaaattattccgccgtcacacgccaccttgcgtgtttcattattgatggcgtggtccagttttttgttttaaaaaaaaaaaaaaaaaaaaaaaaaaaaaaaaaaaaaaaaaaaaaaaaaaaaaaaaaaaaaaaaaaaaaaaaaaaaaaatttccccctcggggaaatccagtccagccttagggtttcgccaggggggagccaaactccacgagcggggaaagagggaaaagcagggacgacgagggggcagccatggggcagaagtcgttgatctacgcgttcggggcccggggcacggtaatattggccgagtacacggagttaaccggaaatttaaccaccatggcctcccagggcctaatgaagctccccgaaggcaaaaacaagttcgggtacaacgctgatggtcacactttcagctaccacagggagttcggatcaaagctcaagagcacatgcagtactgtgtggaccaccctgagaggttagcaagcttgccaaggtgaaggcccaagtctccgaagtcaaaggagttatgatggaaaacattgagaaggttcttgaccgtggcgagaagattgaactgcttgtcgacaaaactgaaaatctgcgttctcaggcacctgcgagaaggaggagactacatgtggagttttttttgcttctttagtcgtcgtgttaagtcgtcctgcgccgataattcttggtggtcaccagataagagtcattcctgatgtcggtgttgattgctgttgggttggtcgggaaatgactgggtgaaccggggggcgaagtgggaggggggttgtgtcgtgtaattttggatccactattgtgcatgtatagccccgtgtgctgtgctaccctgatccgtgttgctactcc

SEQ ID NO: 27546 - DNA, 1323 bp, Zea mays
  Clone ID: MRT4577_125138C.1
ccggccgggccggggaattccatttctttcgtcctcttttttttttccgcattccacgcccctcctcccagtcacagacccctgtccctttccctttccttcccctccggctccgcctcctcgaccactccgacaaccccaagcgcctccggcgagctccacctctccaccggctgcggcgagaagcggcgggggctaactaagtctgtaggcggcggcggaggtgatccgggagccggagccgagtctagggcgatggggcagcagtcgctgatctacgcgttcgtggcgcgtggcaccgtggtgctggctgagtacaccgagttcaccggcaacttcaccaccatcgccgcccagtgcctgcagaagctccccgccagcaacaacaagttcacctacaactgcgacggccacaccttcaactacctcgtcgaggacggattcacgtattgtgtagttgctgttgaatcagttgggcgacaaatccccatagctttcctggacagagttaaggaagacttcaccaaaaagtatggaggcgggaaagcagctactgctgcagcgaacagcttgaacagggagtttggatcaaagcttaaagagcacatgcagtactgtgtggaccaccctgaggaggttagcaagcttgccaaggtgaaggcccaagtctccgaagtcaaaggagttatgatggaaaacattgagaaggttcttgaccgtggcgagaagattgaactgcttgtcgacaaaactgaaaatctgcgttctcaggcacaagatttcaggcagcagggcaccaaggtgcggcggaagatgtggctccaaaacatgaaaatcaagctgatcgtcctgggcatcatcatcgcgctcatcctcatcatcatcctgtcggtgtgccatggcttcaagtgcggcagcaagtgaggagggggacttacagatggccgtgccctgccctgccctgccctggcacctgcgagaaggaggagactacatgtggagtttttttttttttgcttctttagtcgtcgtgttaagtcgtcctgcgccgataattcttggtggtcaccagataagagtcattcctgatgtcggtgttgattgctgttgggttggtcgggaaatgactgggtgaaccggggggcgaagtgggaggggggttgtgtcgtgtaattttggatgccactattgtgcatgtatagccccgtgtgctgtgctaccctgatccgtgttgctactcctatgtcagtagatgttacgtactacgtttgctctccaggatgcagtcgactctgttcgaaaaggctcagttttccagctctt

SEQ ID NO: 27547 - DNA, 1415 bp, Zea mays
  Clone ID: MRT4577_125139C.1
ccggccgggagtaatggcgtaccggacctcagcccaccacaaatgcgcctccgtaccatccgtcgccgccggcgcaccgcgatggctgcctccgccatggccgcgaggactctcgccgggaccgtcatgccgtgtcatgctatcaaatagaaatcgctttgacagaacatacgtgatttaaaggatttcggatgattcaccaaagcacgaaagacagatagaaaatggattgctatttgaagagtgcctaaccgcatggataagctcacattaacccgtcaattttggatacaattcggaatatttctcgcgaagattcgaaaaaaaaagatccgcatatgtttggtaaaagaacaatcttctcctttaatcataaatggaaagtgttcaattagaacatgaaaacgtgactcaattggtcttagttagtcttcgggacggagtggaagaagggcggagactctcgaacgaggaaaaggatcccttcgaaagaattgaacgaggagccgtatgaggtgaaaatctcatgtacggttctgtagagggacagtaaggatgacttatctgtcgacttttccactatcaaccccaaaaaacccaactctgccttacgtaaagttgccagagtacgattaacctctggatttgaaatcactgcttatatacctggtattggccataatttacaagaacattctgtagtattagtaagaggaggaagggttaaggatttacccggtgtgagatatcgcattattcgaggaaccctagatgctgtcgcagtaaagaatcgtcaacaagggcgttctagtgcgttgtagattcttatccaagacttgtatcatttgatgatgccatgtgaatcgctagaaacatgtgaagtgtatggctaacccaataacgaaagtttcgtaaggggactggagcaggctaccatgagacaaaagatcttctttctaaagagattcgattcggaactcttatatgtccaaggtcaatatggaaattctttcagaggttttcccttactttgtccgtgtcaacaaacaattcgaaatacctcgactttttcagaacaggtccgagtcaaatagcaatgattcgaagcacttctttttccattacactatttcggaaacctaaggactcgatcgtatggatatggaaaatacaggatttccggtcctagcgggaaaaggagggaaacggatactcaatttaaagtgagtaaacagaattccatactcgatctcatagatccctatagaattctgtggaaagccgtattcgatgaaagtcgtatgtacggcttggagggagatctttcctatctttcgagatccaccctacaatatggggccaaaaaaaaaaaaaaaaaaaaaaaaaagtactctgcgttgttaccactgctcccc

SEQ ID NO: 27548 - DNA, 799 bp, Zea mays
  Clone ID: MRT4577_12513C.1
ccgggaaaaacgcctactcgcttctcccgtcgtcttccccgctcctacgacctgcgtttgtcgatgctctctccatggcaccctctcctctcccccgttgcacctcctgccatggagctacggtcaccgctgaactcacataactgctcccttacctcctccattagaccaccgccaccgcgctccttggcgcgggcgccccccacgctttccgccaccgcagcggccgtctcgtcgctgtccgccacctcagcggccatctcgtcgccttcctgtccaaagaagaaggttctcgtgcccatcgccatgggtacggaggagatggaggcggtcatcatcgccggtgtccttcggcgggcttccgctgatgtgacgcttgcctctgtggaggacggcctcgaggtggaggcgtcctgcggctcccgcatcatcgcggacacgcacattgcctcctgcgctgaccaagtgttcgatcttgtggctctcccaggaggaatgcctggttcagtgcgattgagagacagtgacatccttcagaggatcacagttagacaggctgaggagaaaagattgtatggtgctatatgtgctgcaccggcggttgttctagtgtcgtggggtctccacaggagaaaaaagatcacctgtcacccatcttttataggagatctccctgcattccgggcagttgaatcaaatgttcaggtttcaggagagcttactacaagtcgtgggccagggacaacatttcagttcgctttatcatttgttgagcaattgtttggggcttcgtgcagct

SEQ ID NO: 27549 - DNA, 528 bp, Zea mays
  Clone ID: MRT4577_125140C.1
ggtacacgggccctcctctcgagtttttttttttttttttttttttttttttttttttttttttttttttttttttttttttttttttttttttttttttgggggaaacggacctccttgcgaaaaggatcccggttccaggttaacagacgggaagcaaaatacccccttgacagaggcgaaaagccccccccaaatggcaaaaaaaaaaggggaaaagagctccggttcctttgtttcttttactcgaaggccattttgggggcaaacctcctcaaccaaatggcaaaagcctggaaggccaaaagggggtttcgggagcccatggggaacatgtccttggcccctttaccgaacggggggaggaccttgtcctggccctggggagccggttgaacaacggggtttggaaaacccccaaccccacccccaaaagggggggactgaccctgcaggtttggcccccccccaataattttgaagtttttccccgggggaatggtcacccggccgcgggaatttgaggcc

SEQ ID NO: 27550 - DNA, 1321 bp, Zea mays
  Clone ID: MRT4577_125141C.1
gccggccgggtccgggtcctcttttttttccctattccacgcccctcccaatcccaacactcccagtcccagacccctgtccctttccctttccttcccctccgcctccgcctcctcgaccactccgacaacccccatcgcctccggcgagctctacctctccaccggcggcggcgagaagcgaggggggctaactaagtctgtaggctgcggcggaggtgatccgggagccggagccggagccgagtctagggcgatggggcagcagtcgctgatctacgcgttcgtggcgcgtggcaccgtggtgctggccgagtacaccgagttcaccggcaacttcaccaccatcgccgcccagtgcctgcagaagctccccgccagcaacaacaagttcacctacaactgcgacggccacaccttcaactacctcgtcgaggacggattcacgtattgtgtagttgctgttgaatcagttgggcgacaaatccccatagctttcctggacagagttaaggaagacttcaccaaaaagtatggaggcgggaaagcagctactgctgcagcgaacagcttgaacagggagtttggatcaaagcttaaagagcacatgcagtactgtgtggaccaccctgaggaggttagcaagcttgccaaggtgaaggcccaagtctccgaagtcaaaggagttatgatggaaaacattgagaaggttcttgaccgtggcgagaagattgaactgcttgtcgacaaaactgaaaatctgcgttctcaggcacaagatttcaggcagcagggcaccaaggtgcggcggaagatgtggctccaaaacatgaagatcaagctgatcgtgctgggcatcatcatcgcgctcatcctcatcatcatcctgtcggtgtgccatggcttcaagtgcggcagcaagtgaggagggggacttacggatggccgtgccctgccctgccctgccctggcacctgcgagaaggaggagactacatgtggagttttttttttgcttctttagtcgtcgtgttaagtcgtcctgcgccgataattcttggtggtcaccagataaagagtcattcctggtgtcggtgttgattgctgttggttggtcgggaaatgactgggtgaaccgaggggcgaagtgggaggggggttgtgtcgtgtaattttggatgccactattgtgcatgtatagccccgtgtgctgtgctaccctgatccgtgttgctactcctatgtcagtagatgttacgtactacgtttgctcctcaaaaaaaaaaaaaaaaaagcggcctaatgtttttcctttttttttt

SEQ ID NO: 27551 - DNA, 704 bp, Zea mays
  unsure (1)..(704): unsure at all n locations
  Clone ID: MRT4577_125142C.1
actagtaggtctaaattagtagcccagatgacgtcagcagcatcgttccccagcagcctcttccccttcccgaccagagcaagcacgccaccgcttccgtcgttgtcctcccgaccgtctcactcccgcccagccccaggatagcaacgcccagggaggggcggagccggccatgaagctactgttcgtggagatgggcgtcggctacgatcagcacggccaagatatcaccgccgccgccgtgcgcgcctgcaaggacgccatcacctccaactccatccccgccttccgcggcgggtccattcccggagtgaacacggaccagatgaagctgcagatcaagctcggagtgcctaggtcgacgcagcacttgctggatgctgagagagtcaaggccgtcttcccctatggcaagataatcagctttgaggtcgttgacggtggcatgatctgttcaagcggcgtgtgcctggaagcaatgggggataagaacgatgactgctacatagtcaacgctgcagtgtatgtcggctactgatgtactgtagtacctggaatggaacagttgatattttttcttcatagaagccaaatattgtgaactntgactaaatattactccctcctttttttttgtttgccgttntggagnttcagttttgcactatttgggcgttaaataaaaaaaggatgtagggtagtat

SEQ ID NO: 27552 - DNA, 1481 bp, Zea mays
  Clone ID: MRT4577_125143C.1
cattgggaccctcgaggccgcattggtcacctcgaggcggggccgggacactcccagtcccagacccctgtccctttccctttccttcccctccgcctccgcctcctcgaccactccgacacccccaagcgcctccggcgagctccacctctacaccggcggcggcgaggagcgggggtgctaactaagtctgtaggctgcggcggaggtgatccgggagccggagccggagccggagccgagtctagggcgatggggcagcagtcgctgatctacgcgttcgtggcgcgtggcaccgtggtgctggccgagtacaccgagttcaccggcaacttcaccaccatcgccgcccagtgcctgcagaagctccccgccagcaacaacaagttcacctacaactgcgacggccacaccttcaactacctcgtcgaggacggattcacgtattgtgtagttgctgttgaatcagttgggcgacaaatccccatagctttcctggacagagttaaggaagacttcaccaaaaagtatggaggcgggaaagcagcaactgctgcagcgaacagcttgaacagggagtttggatcaaagcttaaagagcacatgcagtactgtgtggaccaccctgaggaggttagcaagcttgccaaggtgaaggcccaagtctccgaagtcaaaggagttatgatggaaaacattgagaaggttcttgaccgtggcgagaagattgaactgcttgtcgacaaaactgaaaatctgcgttctcaggcacaagatttcagacagcagggcaccaaggtgcggcggaagatgtggctccaaaacatgaagatcaagctgatcgtgctgggcatcatcatcgcgctcatcctcatcatcatcctaatggttctttatggcttcaggcattagctgcacaggctgcttgcttgagaatatatgtggttcctatcatagcattggtgaaccatgaagcatagtaacttggcaatcctgttaacccattttgttacttcacccttgtaaattcttgtacacttattagtaattcttcgagttgcacattagatattttagatcccaatgcccccaaatcttttactacttgatgagcgcgtgcttattcattgatctccttacattgagaacacctggtaggtattccaatgccgagaaatggggaggtaataacaatagaaagcagcttctttatgcaaacttggatcaatggaagcaagccaatctgcgtacacgtaacttgtgaaaaaaaaaacggtttgcaggcacaggatttcagacagcagggcaccaacgtgcggcgaaagatgtggctccaaacatgaagatcaagctgatcgtcctgggcatcatcatcgcgctgatcctcatcatcatcctgtcggtgtgccacggcttcaagtgcggcagcaagtgaagaggggggcgtgacttacagatggctggtgtgccctggcaccggc

SEQ ID NO: 27553 - DNA, 2333 bp, Zea mays
  Clone ID: MRT4577_125144C.1
cgatctaaaccaatccattttatatattctatttatcatgccaacggttaaacaactggttggaaatgtatgacagccaggtggggaatgctaaaaaatcggccgcgcttaagggatgtcctcagcgtcgaggaacatgtgctagggtgtatacttcaaccccaaaaaacccaactttgccttacgtaaagttgccagagtacgattaacctctggatttgaaatcactgcttatatacctggtattggccatattttacaagaacattctgtagtattagtaagaggaggaaggtttaaggttttacgcacgattttcccgatctaaatcgagtgggtttccatgaagaagatcttgttcagcatgttctatgccagcagcatcgttgaagaaccccctcttccccttcccgaccagagcaagcacgcaaccgcttccgtcgtcgtcctcccgaccgtttctctcgcgcccacgcctccgcatttgctctacgaaatgtaataatccttcttttcaatttccattcaagagtttctaggtgtttccacgccctttttttgagacctcgagacatgaaatggacaaattccttctcttaggaacacatacaagaaaaaggataatggtagcccccccattaactaatttatgaatttcatagtaatagaaatccatgtcctaccgagacagaatttcgaacttgctatcctcttgcctaataggcaaagattgacctctgtagaaagactgattcattcggatcgatatgaggacccaactccgttgcattgccagaatccatgttccatatttgaagcgggttgacctctgtgcttctctcatggtacaatcctcttcctgctgagccccctttctcctcggtccacagagaaaaaatgtaggactggtgccgacagttcatcacggaagaaagaactcacagagccgggatcgctaactaatagaatagtactactaactaatactaatatatagataactaatactaatatatagatattaatactaatatatagatatatagaaatagatatctagaaatagaaacgaactaatatatagataatcgaaatcgaaaagaactgtcttttctgtatactttccccgttctattgctaccgcgggtcttatgcaatcgatcggatcatatagatatcccttcaacaatataggtcatcgaaaggatctcggacgactcaccaaagcacgaaagccagttagaaaatggattcctatttgaagagtgcctaaccgcatggataagctcacattaacccgtcaattttggatccaattcgggatttttcttgggaagtttcgggaagaaattggaataatatcgattcatacagaggaaaaagttctctattgatgcaaacgctgtacctagaggatagggatagaggaagagggaaaaatcgaaatgaaataaataaagaataaagccaaaaaaataagtcgaagatagaagagcccagattcaaaatgaagaaatggaaactcgaaaaggatccttctgattctcaaagaatgaggggcaaggggattgatacatcgttccccagcagcctcttccccttcccgaccagagcaagcacgccaccgcttccgtcgtcgtcctcccgaccgtctcactcccgcccccacctccgcatccgatctccgaaacctaataatccaacggtcgcgcccgcgtcctctcggatggaggtggcccagccccaggcgagcaacgcccagggaggggcggagccggccatgaagctactgttcgtggagatgggcgtcggctacgatcagcacggccaagatataaccgccgccgccgtgcgcgcctgcaaggacgccatcacctccaactccatccccgccttccgcggcgggtccattcccggagtgaacacggaccagatgaagctgcagatcaagctcggagtgcctaggtcgacgcagcacttgctggatgctgagagagtcaaggccgtcttcccctatggcaagataatcagctttgaggtcgttgacggtggcatgatctgttcaagcggcgtgtgcctggaagcaatgggggataagaacgatgactgctacatagtcaacgctgcagtgtatgtcggctactgatgtactgtagttccggaagagttgctttcacctggtacctggaatggaacagtagagattggttatggttcctccgttataaaaaaaaaactgctacctccgtcctaaaataaaatagttgatattttttcttcatagaagccaaatattgtaaactttgactaaatattactccctccttttcttt

SEQ ID NO: 27554 - DNA, 1281 bp, Zea mays
  Clone ID: MRT4577_125145C.1
gggtacctcgaggcgggccgggcccgatgggctccgcgccgcccactcccagacccatttccctttccttcccctccggctccgcctcctcgaccaccccgacaaccccaagcgcctccggcgagctccacccctccaccggctgcggcgagaagcggcgggggctaactaagtctgtaggctgcggcggaggtgatccgggagccggagccggagccggagccgagtctagggcgatggggcagcagtcgctgatctacgcgttcgtggcgcgtggcaccgtggtgctggccgagtacaccgagttcaccggcaacttcaccaccatcgccgcccagtgcctgcagaagctccccgccagcaacaacaagttcacctacaactgcgacggccacaccttcaactacctcgtcgaggacggattcacgtattgtgtagttgctgttgaatcagttgggcgacaaatccccatagctttcctggacagagttaaggaagacttcaccaaaaagtatggaggcgggaaagcagctactgctgcagcgaacagcttgaacagggagtttggatcaaagcttaaagagcacatgcagtactgtgtggaccaccctgaggaggttagcaagcttgccaaggtgaaggcccaagtctccgaagtcaaaggagttatgatggaaaacattgagaaggttcttgaccgtggcgagaagattgaactgcttgtcgacaaaactgaaaatctgcgttctcaggcacaagatttcaggcagcagggcaccaaggtgcggcggaagatgtggctccaaaacatgaaaatcaagctgatcgtcctgggcatcatcatcgcgctcatcctcatcatcatcctgtcggtgtgccatggcttcaagtgcggcagcaagtgaggagggggacttacagatggccgtgcccttgccctgccctggcacctgcgagaaggaggagactacatgtggagttttttttgcttctttagtcgtcgtgttaagtcgtcctgcgccgataattcttggtggtcaccagataagagtcattcctgatgtcggtgttgattgctgttgggttggtcgggaaatgactgggtgaaccggggggcgaagtgggaggggggttgtgtcgtgtaattttggatccactattgtgcatgtatagccccgtgtgctgtgctaccctgatccgtgttgctactcctatgtcagtagatgttacgtcctaaaaaaaaaaaaaaaaaaaaaaaaaaaaaaaaaaaaaaaaaaaaaa

SEQ ID NO: 27555 - DNA, 1978 bp, Zea mays
  Clone ID: MRT4577_125146C.1
attgggaccctcgaggccggccggggaccgggtacacataagcgccgtctgtccgtccgattgtccccgcgtcggcgcgtcccgcacaccgcgctcccgctcggccgctcctgccggcgcgctgcagcagctcggctgctcgcggtcgcttgtcccgtgcgcccggcggtcggctgcttgccccgtcgacctattcgggtgcttcctgcttagacagcttcgcccacgcgtccgcccacgcgtcgtggaagccgggaaacacccgtccctgacccatagatattaggcctaatatatagatatatagaaatagatatctagaaatagaaacgaactaatatatagataatcgaaatcgaaaagaactgtcttttctgtatactttccccgttctattgctaccgcgggtcttatgcaatcgatcggatcatatagatatcccttcaacacaacataggtcatcgaaaggatctcggacgactcaccaaagcacgaaagccagttagaaaatggattcctatttgaagagtgcctaaccgcatggataagctcacattaacccgtcaattttggatccaattcgggatttttcttgggaagtttcgggaagaaattggaataatatcgattcatacagaggaaaaagttctctattgatgcaaacgctgtacctagaggatagggatagaggaagagggaaaaatcgaaatgaaataaataaagaataaagccaaaaaaataagtcgaagatagaagagcccagattcaaaatgaagaaatggaaactcgaaaaggatccttctgattctcaaagaatgaggggcaaggggattgataccgagaaagatttcttcttattataagacgtgatttgatccgcatatgtttggtaaaagaacaatcttctcctttaatcataaatggaaagtgttcaattagaacatgaaaacgtgactcaattggtcttagttagtcttcgggacggagtggaagaagggcggagactctcgaacgaggaaaaggatcccttcgaaagaattgaacgaggagccgtatgaggtgaaaatctcatgtacggttctgtagagggacagtaaggatgacttatctgtcgacttttccactatcaaccccaaaaaacccaactctgccttacgtaaagttgccagagtacgattaacctctggatttgaaatcactgcttatatacctggtattggccataatttacaagaacattctgtagtattagtaagaggaggaagggttaaggatttacccggtgtgagatatcgcattattcgaggaaccctagatgctgtcgcagtaaagaatcgtcaacaagggcgttctaaatatggggccaaaaagccaaaaaaataagtgattcgtttttagcccttataaagaaactcttgatcgctcatcttatccaagacttgtatcatttgatgatgccatgtgaatcgctagaaacatgtgaagtgtatggctaacccaataacgaaagtttcgtaaggggactggagcaggctaccatgagacaaaagatcttctttctaaagagattcgattcggaactcttatatgtccaaggttaatatggaaattctttcagaggttttcccttactttgtccgtgtcaacaaacaattcgaaatacctcgactttttcagaacaggtccgagtcaaatagcaatgattcgaagcacttctttttccattacactatttcggaaacctaaggactcgatcgtatggatatggaaaatacaggatttccggtcctagcgggaaaaggagggaaacggatactcaatttaaagtgagtaaacagaattccatactcgatctcatagatccctatagaattctgtggaaagccgtattcgatgaaagtcgtatgtatcggcttggagggagatctttcctatctttctagatccaccctacaatatgggggcccaaaagcccaaa

SEQ ID NO: 27556 - DNA, 239 bp, Zea mays
  Clone ID: MRT4577_125147C.1
cacaggtgccgctctttagtgcagcacttcttaattttctagagccctgcgcaattctgcgggcatacatctccgcggctttgatttcccaaaagctaccgtacctggatcgttcgagatgtttacgcatagcttctttggaagaggagccgctcaaaaacgtttatttggatcagatggcctcacgaaatgtgggtatgttttcaaaaaagaaaaaccgacagactctacgagagctc

SEQ ID NO: 27557 - DNA, 1327 bp, Zea mays
  Clone ID: MRT4577_125148C.1
attgggacctcgagccggccgggacaaagcttgtctagtctagttggtagagcacaagctcctcaccttgtggtcctgagttcaagccccatagttggcatttcaatataccttttaaaaaaaaaaaaattgcacgcccctcccaacactcccagacccatttccctttccttcccctccggctccgcctcctcgaccactccgacaacccccagcgcctcctctccggcgagctccacctctccaccggcggcggcgagaagcgggggggctaactaagtctgtaggctgcggcggaggtgatcccggagccggagccgagtctagggcgatggggcagcagtcgctgatctacgcgttcgtggcgcgtggcaccgtggtgctggccgagtacaccgagttcaccggcaacttcaccaccatcgccgcccagtgcctgcagaagctccccgccagcaacaacaagttcacctacaactgcgacggccacaccttcaactacctcgtcgaggacggattcacgtattgtgtagttgctgttgaatcagttgggcgacaaatccccatagctttcctggacagagttaaggaagacttcaccaaaaagtatggaggcgggaaagcagctactgctgcagcgaacagcttgaacagggagtttggatcaaagcttaaagagcacatgcagtactgtgtggaccaccctgaggaggttagcaagcttgccaaggtgaaggcccaagtctccgaagtcaaaggagttatgatggaaaacattgagaaggttcttgaccgtggcgagaagattgaactgcttgtcgacaaaactgaaaatctgcgttctcaggcacaagatttcaggcagcagggcaccaaggtgcggcggaagatgtggctccaaaacatgaagatcaagctgatcgtgctgggcatcatcatcgcgctcatcctcatcatcatcctgtcggtgtgccatggcttcaagtgcggcagcaagtgaggagggggacttacggatggccgtgccctgccctgccctgccctggcacctgcgagaaggaggagactacatgtggagttttttttttgcttctttagtcgtcgtgttaagtcgtcctgcgccgataattcttggtggtcaccagataaagagtcattcctggtgtcggtgttgattgctgttggttggtcgggaaatgactgggtgaaccgaggggcgaagtgggaggggggttgtgtcgtgtaattttggatgccactattgtgcatgtatagccccgtgtgctgtgctaaaaaaaaaaaaaaaaaaaaactcaagacctcgtgc

SEQ ID NO: 27558 - DNA, 370 bp, Zea mays
  Clone ID: MRT4577_125149C.1
caaaagcaagactactgttatatttgaagcaacttatgtccgaaaagcacatacatacggtacacactagtagggaatgacacacatgctaacaacagtgttttatccgaaccgctcgacacgaagacgcgcacataatacacatgctcgacgacatggtacatgcatgcacagacaacgactacaagaacattttaattatttcgaccacacacagtattgataggcacagcagacaagatgagagatagaaagttacacgtacgtcccgtcccctgcctgctccctggtggagatgcacacacagacacgaacagatagtattgccgggggcccttctccttggcttggctaggctagcacacttgct

SEQ ID NO: 27559 - DNA, 618 bp, Zea mays
  Clone ID: MRT4577_12514C.1
tcgggctttcaccccccgcatcgaacctcacccccgatctgatcgaatcaaaggctgcgtcgaaaatgggcggtgaccatgaaggggcctcacttcggccgccgacttccgccagaaggcatggagcatgacggccgacccctactgccgccccgtctactgctcccgtaacaccgccatccacatgtgctccgccttcctcatctgcatcccacatcgctatgaattccacagagctcaagaaacgacggcatcacccagtcccgccaatcacatatcaactgtgatgcaaaaactttgctaagaatgaatactgaaccagcctcacactattatgaagtgagggaaccttgcttttgccttctttttgtgcaaacctgtggctatccataatgaaggagtcagcgccaggagaatccctgaaaagaatcgcgtaataaatgttgattcttatattcctttgatgtctccaccgaggtacatgacaaaagtctgataaactcctataactgaacggagactctacagcctgtgatgaattcactcctatgttttcatgcaaaaaaaaagaaacaaattcccctagggtctattcccctctaaaaatacagaaatccc

SEQ ID NO: 27560 - DNA, 431 bp, Zea mays
  Clone ID: MRT4577_125150C.1
ggggaaacccccccaaatttcccaaggggtttggggcattaatttacacttggcccaacaaccgcaaaaaagggggttaatggccccccccagggggggccaaaaggttggcgaaaacaagtccgggggggtaaaattggggggggtaaaaaaaccccccaattccccaaccccaggtgggaatttaacccaaccgggggccaatgaaccgggttttcattagcaacttgaaaaaaaaaacggggcccctaaaaaaacaaccccccccggaactcctgggggtaggtacgttaaaaaaaaaggcccggacccctgccctaaaattttaaggggaggtccagggggggggacccaaaaaccttgggggacccgttgcccttccagggccttaaaaacccggggggctttttggcccccttggggttgtttcc

SEQ ID NO: 27561 - DNA, 323 bp, Zea mays
  Clone ID: MRT4577_125151C.1
cagacgcgtggacgtacgcgtgtgctctgatagcttgctccaggacgtacgtacgtacgtagatcgatgcagcgatcgcgagctacctgatgaccatggcgtccctctcctctgctgccattaccgctccttccttcacggccgcgcccgctcgcgcagtggtcaacaggaggttcttcaccgtgcatgactcgctccacaaggccactgtcaccgccgccgtggccgttgctgccagggttctgcttgctggcggcggcgccatggccgacgaggtgctgctcggcgcaggttacggcgggctcgtcttccagccaatccaa

SEQ ID NO: 27562 - DNA, 259 bp, Zea mays
  Clone ID: MRT4577_125152C.1
ttatatagagcccacccactttttttttagttctacatacgttgtctaactgcatttttaattcgggagggcggcctccctattccaaaccctaaacctaaaccttttacccgtcgccgacaacatcacctacacctccgacgaccacaggccctatcccatctaaaccgacattcttctcggactgaaacaatatcccaccactactatgtcagtaaggagaatgagctcgacctctcctccaactatgtctttacca

SEQ ID NO: 27563 - DNA, 275 bp, Zea mays
  Clone ID: MRT4577_125153C.1
gcgaacacacctgcttccacgcctcaagccactcgtgcttgcggcgatgcaaaccagcaccgcgaacatggtcacagcgaggttgaaggagaggcttgaccatgcgtacgacgtgaaggacctcaactccatctttgacttgaagttccgcacccactttggaggaggaaagttcactggcttatgactaatttacgataacctacaggctgacaataagttggagcccgaataccgcctttataggaatgggcttgctactaaggttgagaagt

SEQ ID NO: 27564 - DNA, 581 bp, Zea mays
  unsure (1)..(581): unsure at all n locations
  Clone ID: MRT4577_125154C.1
gggggggccgcccaatacctggaatcataatnngtccgatgtcggatacaccccgggataggggcttagagncggggccncnggctttaacaaatgccnnntcgtagccaatgcagtgtaaaaattggcgggtaaactcctcaaaaaaaactggaacttaaaatgcacccactcaaattcgtgtatgataactgtattatgccgatggctgccgaccttatattcgaaacttttggaattcaaatgcaaccactccaaattagaatatgataacggtatgccgatgagaattctgcctcatcccctcctctgtggtacttttccggctgcatgcaagatcttatgggcataccttgctttgctacgggtcatgccggtaagtctggagccttggtgtcactcatgtcgtcgtggccaaaggtcnatagccgtcaacttatcccaatttttccggtggggcgtcatcctaaattggattcagctaagtggtcatcctttcaacaaattgtctaacgtcggggtcgttatcggttagcacaccggcttaatagagcttcacacctacttggtccatggtggcc

SEQ ID NO: 27565 - DNA, 371 bp, Zea mays
  Clone ID: MRT4577_125155C.1
tgtatacatagtgcgtccgccgcaccacatccaggatcgtcaccagcctaaggaccgccgcgccgtcatcgtcctcccgctacggccgccgcaagatcaggctcaggctcatcagaaacgccccagactgagctgaccccgccaccgccttgtaaacgggacgttggacccctgaccagctaaaagaagagagatcgaaagaaagaatggtaggtcatccatgagccgacggggataaaaggcgacgacagagaggccagacataagtatgacaagaaaaacacaaagaacaactgcctctgcataccgaaaaaaacggaaggaccgtagacaggagaagtcgtcgacggatacccccacctcgccactcc

SEQ ID NO: 27566 - DNA, 288 bp, Zea mays
  Clone ID: MRT4577_125156C.1
gttaggccccaaaatatccacaaataaggttaaactttgaaccacccgatgcataaatggtaaatcttataagttttaaccgtgcaatactacaccaccaaaaatttgccaaaatttttgggtccgcataaaaatataaaccccatgggtgggactcccctatttttggggattaacataaaaaggggtcgggaataccacccaccctagatttgaacctgatattggctcgggttttacccttataaccaagggggtttatgctacaaaacttaaaatttttacggt

SEQ ID NO: 27567 - DNA, 365 bp, Zea mays
  Clone ID: MRT4577_125157C.1
ggaaaaggcccaagagggccatatattaaaacagcatccaggttttggggccaaacccagaaaacggaaaaacaatatttctctcataaatccaaagcaaaaaaacccaatggaatatgctgacaggcccccttgctggagctttaaaaacgggggcccccggaaaaagggggaccaaaccctttttcttcaaaaacttctgggggggtttcttcgggggctaaacctaataaaatttcgaggacaggcctttctctttccttctcggcttccccttttcaaccttgaacattgaaatggcctggccgacatcaaggggttcatcaaagtttctggcaagaaaaaagtccaggatttggccattc

SEQ ID NO: 27568 - DNA, 211 bp, Zea mays
  Clone ID: MRT4577_125158C.1
tacggtccggattccgggtcgacccagcgtccggtacgaggctaaatgaaaggcttagggttatattgcgcaaggagataccggggaccatggaagggattcagacagtgattacaagtagcaacgacgatacttaatcactgaaatttgcctagtgtaagagctttgataaagttgaaggcagagaatggtatgagatggttatgagaag

SEQ ID NO: 27569 - DNA, 287 bp, Zea mays
  Clone ID: MRT4577_125159C.1
gtccggcgtaacggacttggagcgtgggtttattaaaggctaggggtggttttccaccctggcgacggtgaaaggccgcaagagtcacggggttttcacattcaatatggaggctgggagcagatggtcagtcaacacaacacaccgtgtgtttgtaagcatgatactgcgaaaggtgggcatagattggctgaaactcttactacttgcgaaacccttgactgacattgtctgggttttcctggggttcgctagtagcatagaattgatgtttgtgaaaaacttct

SEQ ID NO: 27570 - DNA, 334 bp, Zea mays
  Clone ID: MRT4577_12515C.1
tttgtgttgtttataacaagactattacattcgacccctgacaaatctgaagaatcagccctggaggaaccatatagaaacacggagggggacataactaaaaacgagaccggcatttttccctcccgaaacactgacaaaaccagacaacgcaactttctactgaggaccgaccacgtgacattgacggcttcagctcactgaggtctgaacacaacatcctctagccacgggattaagcccggaagccaatccaccaagagggtccaaacagaactgctcaaagctggaatgcctctgggtctgtaagcacaacaaccatcctaagaaaacc

SEQ ID NO: 27571 - DNA, 305 bp, Zea mays
  Clone ID: MRT4577_125160C.1
gcattatggtgattcttgtgctacatcgctgggtaatctgcctaatgatgcaagtccaacatcagacctagaagcatccatatcaaatgatacgttccttatgaagcgcacgtgaaaagaatgaacacaaagacttcattgcgtaaatcgagaacaagatgggagatctatacaatatccagtgctgacatcatcagattaacaatgtcaattgacacaaggaaaactgtcgatgcagaaacacactatggcatatgcaagatatcatggtcacacaatctgatagcacatgattaccatatctt

SEQ ID NO: 27572 - DNA, 665 bp, Zea mays
  unsure (1)..(665): unsure at all n locations
  Clone ID: MRT4577_125161C.1
cattgggtacctcgaggccggccgggatcttgncncgatcctctgagtccgcgggcatggcagtcgtccatagctactccgctaccaacgtgccactccagcaggggggcggtctgtacgagatctccagagtcacgcagacatccgcgtagctgtccatgcgccggaatgccacctccgacaacttcatgtccggcgtctccttcatgacccacgccctcggcacgagcgggggatcgcgatagggcgccgactgaggcaaagctgatggtggccatcaatgagttctgccgcatctggcgcaacttcctgcggtgctggcacgggcgcggcgactcctcacccctcgacgtcatcgccatcaacgacaccggaggtgacaagcaagcgtcccacctgctcaagtacaactccacgctcggtatcttcgatgccgacgacaagtccgtcggagacaactccatctccggcgacggcaaggtcatcaaggtcgtggccgaccgctaccccagaaacctgccgtgtggatagctcgggatcaacctcgtcatctagggcaccggagtcttcccttacgcgaggtggcggggaagacatccaggcgggggccaagaaggtgctcatcacagcgaccggtaagggcgacatccccacctacgacgtcg

SEQ ID NO: 27573 - DNA, 383 bp, Zea mays
  Clone ID: MRT4577_125162C.1
aattcggcacgagggcgcgccgcagtgcgaacaggaggaccaccgaaggccggctgcaccgccgatgcgctcgcttgcttccccccaccgtgagcgttacctaatagtgagcacccctcaacgggcgaggagctgctgaccactcggcccaagcctgcggatgtaactacgcccgcatggagcgagacacctccctctccgcttttgtcgtggacgacggtggaaatgacagcgctcacgcaggactctacgacgaagacggtggagtgcacctgtacgcaggcatccctctacagaaggagagctacaacgactgtcttaaggactcttaccccgagctctgccatacatgctgtgctgacaaaagactctgctccatcact

SEQ ID NO: 27574 - DNA, 359 bp, Zea mays
  Clone ID: MRT4577_125163C.1
aacaggggaaagcgggccccttaatttatagggaggatttcaaccataggcctggccggggggggctctcttggccttggccccaatcaaaattcaggacccaaacccaaggttcatgggtggagtaaagaagaaagaaattaccggagggttacaattagccgcacgtacatttttaacccttgccgcgcaaaaacccccaaatggctcccgaaaaaacaaagggaggccccggggactggacccacaaaactgggccgggcacaacgcaacgagctcttgtttaaactaaactaaaggagggagggggggcgaacgggttaaattactcccttgttcccgggtcccccgatcccttt

SEQ ID NO: 27575 - DNA, 316 bp, Zea mays
  Clone ID: MRT4577_125164C.1
tcactcgttacgcctacacatatcctctctacctggctcaatcactaaacaccacttacatatatggagggtagggctccatatgcctaacgcgcttgccactacctccttcataacataccaatatcctagcacacctcacgtataactggatccctgacacatgacatcttcgaagatacactcaagtgacacaaacttcacgctcttcagacgacgagaaccgacacttctaataaacacccttaggctccccctgctcataccgactgatatacctatacaccatactcatcatgatcgcgtggaacagcac

SEQ ID NO: 27576 - DNA, 743 bp, Zea mays
  Clone ID: MRT4577_125165C.1
atccacacaaaacaatctgccgtgctccaccttctgctccccctccggctacggcggcgctgatctccgagatctctagcttttctgcgggggcgcgaatccggggggcggcgccatggccgagcacctcgcgtcgatcttcggcacggagaaggaccgcgtgaactgcccgttctacttcaagatcggcgcgtgccggcacggcgaccgctgctcccgcctgcacaacaagccgtccgtctcgcccacgctgctgctctgcaacatgtaccagcgccccgacatgatcaccccgggcgtggacgcgcagggcaaccccatcgaccccgtcaagatccagggcgacttcgaggacttctacgaggacatcttcgacgagctcagcaagcacggcgaggtcgagaacctgcacgtctgcgacaacctcgccgaccacctcatcggcaacgtctacgtgcagttcagggaggaggaccaggccgccaaggcgctccaggcgctgcaggggaggttctactcgggccgccccatcattgctgagttctcgcccgtcaccgacttccgggaggccacctgccggcagttcgaggagcacaactgcaaccgtggagggtactgcaacttcatgcatgtcaaggagattggcagggacctcaggaagaggctgtatgggcacctgcataggtccaggaggagccacagcaggagcagccggagcccgagcccctaccgtcaccacgcca

SEQ ID NO: 27577 - DNA, 216 bp, Zea mays
  Clone ID: MRT4577_125166C.1
aattgcttggccgaatttgaagatgccttgcaatatatgattcagctatcacactctcctgggacctaaaaacaaaaaaatccctcacgcatgtttttcatgacttttctttacaggagcatgacactgttgtctccggcatacgggcaagattagggtgcacctgcagtggtcttctttggctgaaccaatgcagcctgtgtatctcttatattt

SEQ ID NO: 27578 - DNA, 358 bp, Zea mays
  Clone ID: MRT4577_125167C.1
cctctttttttttttttttgtttttttttttttgttttctggaaactgcctaatttttttaaggcgctgcaagcagccggctttgtggggcactttccaaaaataaggagaggggatttccatgcaaaaaaacctttctgcaggcacaccaacgccaacggggccaggctttaaagcaaggaagggcccatcccgcacgatacccccaaaaagcacggcatgaaccccccactgagctcccccccgcgggaacaaagtaacccactgtcccgaagacggacgcgaacgccacacacactaattaacccttctataagaggaatgctgggcttaacccggggagacccaaccccttgag

SEQ ID NO: 27579 - DNA, 356 bp, Zea mays
  Clone ID: MRT4577_125168C.1
cccacgcgtccgcccacgcgtccgcccaaaaccagcttggcactcgcatcgccttcatcatactcctcgctgttcccatgacggtctggttgcggcgttccaccacgccgttttgctgaggacagtacgacgcggtgagatgcctggcgatgccttgcgcggcgcagtagtcggcgaagctccttgccgtgaactcgccaccgcgatcggtgcgcagagtccccagcctccgcacggactgcgtctccacgccgccaagaagcctgatgatcgactccgccgcccgatctttagaactcagcaagatcagccacatgtagcgactgaaatcatcaaccaacaggtagaaaaatctg

SEQ ID NO: 27580 - DNA, 247 bp, Zea mays
  Clone ID: MRT4577_125169C.1
gtcgtagacattcatgcctctaccgagagggaggcacatccagaggcggtggctgcgagcccatctgtggcttatacagtcgccaacaggacatttactgctgctggggagacagccactgctgatgatcatggctgccggccacaacaggaacatcatggcggggaacgctcactgcctcagcctgaatagtaccaggctggggcttacaatccgccctaagaagcagttgtgcatgaggaacagc

SEQ ID NO: 27581 - DNA, 213 bp, Zea mays
  Clone ID: MRT4577_12516C.1
gccgccggtgccataaacccgcgggtagcgggttgggctatacttacgctatccgtcccgggtagcggcttttgtttctgcttgaatattaatctggcatgtacgggttcgcaatctatgtacccgcgggttttaaactcgtcggatcattgggtccaccgatatggcacaaggcagggaatgcgagaagtacagtgagcgatttgttggggc

SEQ ID NO: 27582 - DNA, 2026 bp, Zea mays
  Clone ID: MRT4577_125170C.1
ggaagattgccacttccataacaggatcaataaggcaatctgaagcgcttttgtaaaggccgacattgcaattgcggattcccattctgttgaccggaattctggcaccacagcattgacggtccttatatttggcaggacactgattgttgcgaatcccggtgactgtcaatctgtattacgaatgccaggccggactgttgaaccctcgtagagaccacaaacccagctgcatagttgaaaggctcacaatccctaacctggctggtaccggctctgatcgctaccccaacgcacatctggctgcagcaaggacaatcgttgattgcccgacgtacctcgcggcggcctcgcgctaacgtcccgctccccggtgagtaacggagagacggagccatgagcggaggggtggagccggataccccgcccggtagcagcagcagcagcagcaggagcgggggcagcacgcccgtgggcggcaagccgccacgccaccacctcacgtccatccgccactgcgccagcagcgcccgcatcgccgctgcctccgccgaattcgtaagcaagctcgctgccgcccaagccatctatccctaacacgaatttgatgtctgcccttctgttctcctgcaggggctggagtcggggacgctcagcttgatttcacctaccgcagacatccgtccgggcttcttgcctgtgttcaggtcggggagtttcgcggatattggacccaaatccttcatggaggacgagcatgtctgtgtggacaacctcgtcgagcaccttggactccgtggcccgggcatccctgcaccgggtgccttctatggggtgtttgatggccatggtggtagtgatgctgcctgttctgcccggaagaatatactgaagttcataaccgaagattgccacttccccaacagcatcgagaaggcaatcagaagtgctttcgtaaaggctgaccatgcgattgcggattctcagtctcttgaccggaattctgggaccacggcgttgacggtccttatatctggcaggacactgcttgtcgcgaatgctggtgactgtagagccgtattaggaaagcgaggccgagcttttgaactctcgagagaccacaaacccagctgcagcgttgagaagctcagaatcgaaaaccttggcggtacggtcttcgatggctacctcaacggtcagctggctgtagcaagggcgatcggtgactggcacatgaaaggctccaaaggctctgcgtgccctctcacaccggaacctgagtttagggaggttaggcttaccgaggaagacgagttcttgataataggctgcgatggcctctgggacgtgatgagcagccagtttgctgtctccatggtcaggaaagagctgatggaacacaatgacccacagcggtgctcgcgggagcttgtccaggaagctcttaggcgcgactgctgtgataacctaaccgtagtcgtcgtgtgcttctcagatgacccgccccctcagatcgaggtcccgagattccgggtacggagaagcatctcaatggaagggctgcatacgctgaggggagctcttgacagtaacgtttgagctccgaaagtgtaccttcgcctgcaacttgtgtcgtggaggatttttctctcttctttgttgtttggtctgttggaagttttgctccgctcggctcatcggtgttttgcgatatagatctcggaataagttttgtagaattattttggaaggaaatttttgttgaggtgtaggctaattaatcttcctttgttgaggccaccattttgttgttggttgctcacaatgtaatcgagcaattaaccggcacgttgttctggtacgaatgagagttatagcagctgatcgtttttggtctttgttcaaaattccacttgtatagggcgacgagtcccctgttcattattatcagaaccaaaagagaataaagttatggtacagattttgttcaaaaaaaaaaaaaagggcggccgccaccgcggtggag

SEQ ID NO: 27583 - DNA, 1691 bp, Zea mays
  Clone ID: MRT4577_125171C.1
gttcattaaccgaaaatgccacttccccaacagcatcgagaagcaatcagaagtgctttcgtaaaggctgaccatgcgattgcggattctcagtctcttgaccggaattctgggaccacggcgttgacggtccttatatctggcaggtaaattcccatgatagtgcgttaatatgtatgctttacaaatttattggcacttcaacatattggtcaatataattatgttgccatatatgtatagtcctaatatttgctggtaacataataaattgagtagtagtccagaagatttggtgtggcgaagatgagtaaaacgtttgaagttaatgtttctatgtacttttttttgttacatgaaattactcagttgatgacaagtttggtttccaagagaaactattagttgaagccatgttcacggatttatgaatcagtagaggcacttcctttcattttaaatttatgagtttcgtttccaggacaaactatcagttaaagcccctttcatagtacctttattctgacagtctcttcacatttactgcctcaacctccaatatcacatctgtacataaaaggtccattgctggaccaagctgttcttggggccatattgccactatgggttgataaattccaacattacagcctgtatgctgttgacaacctttttgattaattactatgtactatgtactatggcatctcaaaagtatgcactcaccaacctcattaaaatggtgcaggacactgcttgtcgcgaatgctggtgactgtagagccgtattaggaaagcgaggccgagcttttgaactctcgagagaccacaaacccagctgcagcgttgagaagctcagaatcgaaaaccttggcggtacggtcttcgatggctacctcaacggtcagctggctgtagcaagggcgatcggtgactggcacatgaaaggctccaaaggctctgcgtgccctctcacaccggaacctgagtttagggaggttaggcttaccgaggaagacgagttcttgataataggctgcgatggcctctgggacgtgatgagcagccagtttgctgtctccatggtcaggaaagagctgatggaacacaatgacccacagcggtgctcgcgggagcttgtccaggaagctcttaggcgcgactgctgtgataacctaaccgtagtcgtcgtgtgcttctcagatgacccgccccctcagatcgaggtcccgagattccgggtacggagaagcatctcaatggaagggctgcatacgctgaggggagctcttgacagtaacgtttgagctccgaaagtgtaccttcgcctgcaacttgtgtcgtggaggatttttctctcttctttgttgtttggtctgttggaagttttgctccgctcggctcatcggtgttttgcgatatagatctcggaataagttttgtagaattattttggaaggaaatttttgttgaggtgtaggctaattaatcttcctttgttgaggccaccattttgttgttggttgctcacaatgtaatcgagcaattaaccggcacgttgttctggtacgaatgagagttatagcagctgatcgtttttggtctttgttcagaattccacttgtatggttggacgagtcccctgttcattattatcagaaccaaaagagaataaagttatggtacagatt

SEQ ID NO: 27584 - DNA, 358 bp, Zea mays
  Clone ID: MRT4577_125172C.1
atccacttcatccgtgagaaggtggctctcggtgaggtccgagttctccatgtgccgtccaagtatcaattcgctgatatcatgactaaaggcctgccaattcagctatttgaggatttccgatccagtctttgcatccggaatcctgacgcttcgactgcgggaggctgatagatatatatagcgagtgtatattatgcaagttcatattatgcaagtcctcaatcagtgtgattagcacctgccatgtattgtgattatcacctgccctgtactgtgattggcacctgccctgtattgtgattgtcacctgccctgtactgtgattgggacctgccctgtacactcagccacattg

SEQ ID NO: 27585 - DNA, 1077 bp, Zea mays
  Clone ID: MRT4577_125173C.1
ttgggaccctcgaggccggccgggaacgaccccttctcctctcgttctcgcccagtcgcaccgtcccgtctcaacccgactctggaatccacgagctcttccccctcgtcctcaccccgcccctccctgctctccgcctccccgtccccgtccccgcccccgtcgctacccacaagcacctccggaggctccaggcacccacctcctgcacccggcgtacctcgcggcggcggcgcgcgaacgtcccgctccccggtgagtaacggagagacggagccatgagcggaggggtggagccggataccccgcccggtagcagcagcagcagcagcaggagcgggggcagcacgcccgtgggcggcaagccgccacgccaccacctcacgtccatccgccactgcgccagcagcgcccgcatcgccgctgcctccgccgaattcgggctggagtcggggacgctcagcttgatttcacctaccgcagacatccgtccgggcttcttgcctgtgttcaggtcggggagtttcgcggatattggacccaaatccttcatggaggacgagcatgtctgtgtggacaacctcgtcgagcaccttggcccccgtagcccggatccccctgcaccgagtgccttctatggggtgaatgaagggcatggagaggctgaggctgcctcttttgtccggcggacgtggctcaaaagtgtaccttcggctgcaacttctgtcgtcgttggtctgttaaagttttgcccccccccattggtgttttgcgatagtctcggaataagttttgtagaattattttggaaggaaaattttgttgaggtgtaggctaattaatcttttttttgtggcagtgatttattgttgcggccaccattttgttgttggttgctcacaatgtaatcgagcaattaaccggcacgttgttctggtacgaatgagagttatagcagctgatcattttttgtcttaaaaaaaaaaaaaaaaaaaaaaaaaacagcgctccagctcccctccatcctcggccaaaaattctgcggcgagctccgatccggtccgactactaacccac

SEQ ID NO: 27586 - DNA, 598 bp, Zea mays
  Clone ID: MRT4577_125174C.1
cgggcacataacggaccctcaagttgggaggacacatactgcccagggatacccgcactctgatgcagatacttagctacagcatagatgaccactccacagtctgaggcgcgaggaacaacattgatgcggcttactgaccacgcccgacaaagtacactggcaggctcactctgcgcacttggtctaagggaccaggacctttcttccgtccctaaaccagttaccaatcgcgcagaactgaacgatgttggcaaccaccatacacaaaacatacttggatgatggagatctactagaagcatcacacggcgaccagcaccgactcctctgcagctcagatggctttctttgcggatagggctagcacggactaagctttcgcgatggagagctcagagaggagctttgagacatcataatggggcgcaactggcctgaaggactcctctggcaacggcttgcacagcttcctaatgcagaacctcgactgctgctgggaatctagattgagctttacactgcttatgctcccatgcagaagggatcgagattgcgacccaccgaaactggcaggctcgaataccccatgaagctg

SEQ ID NO: 27587 - DNA, 464 bp, Zea mays
  unsure (1)..(464): unsure at all n locations
  Clone ID: MRT4577_125175C.1
gggcagcggcggcgctgctggcgtcgncgtcgtcggttccggcgcgggcggtggcgtacggcggcgcccaggcccagttaatgccggtgccgctggcgatgggcccgcgcgcgccccggccccaccgctgccgatctgctggctctgccgctcgtcgctcaggcgccgctgctgggtcgtccggccgccagtacgtgtttgcgcacaaaaaagggggcgggaccgaagcaacgatcggtggttagcatgcatgcatgtgctgtttgttgttcatcgtcatggatcgaatcgaatcgatcagtgatggtacgatcggtcgagcggcgtaccatctggagctgcgtgccgtccctgctgctgccattgccggtgtggcggcggtgctacgtggacgtggccgtcagccgggcgcccgaacatgccggcagcaggcggagtttgttactccttgcttgctgctgctg

SEQ ID NO: 27588 - DNA, 374 bp, Zea mays
  Clone ID: MRT4577_125176C.1
cgatattaaatcaaattattgagcttaaaatgtcagaaaaaaaagaaataattcacgaacaaaaatttatcacaagaattcctaatgaaagtactgaacaaaatgttacaattcaaagtgaattcagtggtgatgaatcatcttccatttcacaagaagaaaagtcgaatcaaagtgaaatgaaaatagaaccaatcattatgtctccagaacaaggaatgatacaacaacaaggaatgatacctcaacaagaaggaatgttgaatcaaggtggaatgacaggacaaccaatcattttgcccccagaacaaggaatgattcagcaacaaggaatgattcctcaacaaggagaattgacaaatacttccaatcct

SEQ ID NO: 27589 - DNA, 410 bp, Zea mays
  Clone ID: MRT4577_125177C.1
ctcagcatacgctcagcgttcgttgaagatcaacgtgaactgtctaacaatgagacgagtgtacttactcaacaatgtagattggttattcagaaacacttggatggttagaaatttaccgtgtattccagatgaaaaaggaacactgactcctgctgatttactaacacttactctagggcataacatgtgggatcatgtgagaacaaacctgtgggataatgtaaaaactggtccatggtaaactttaaaccaatcttcaatgtacatagtaaagccacagtaaatgttaatgctaattctacactgatggagatttcaccttccaataagtaacaagtatacccatacaattattaagaactacatgcttatttctaagaaatatcaatatgcttataatgaagaca

SEQ ID NO: 27590 - DNA, 1876 bp, Zea mays
  Clone ID: MRT4577_125178C.1
cattgggtacctcgaggccggccgggaagaacatctaacttgtctacttggtcactgtgatatggctctggttcgcagtgcagcggggcaggttcgagcccggcgcctgcacctttaaaaaaaaaaaaaaaaaaaaaaatcccaaagccatcttccttccgcggactagttttttctgaagattcggcgatggcggcgacgatccaatccgtgaaggcgcgccagatctttgacagccgcggcaaccctacagtcgaggtcgacgtgttttgctcagatggaacctttgcaagggcagctgttcccagtggagcatcaactggtgtatatgaagctctggagttgagggatggtggctctgactatttggggaagggtgtctccaaggctgtgaacaatgtgaattctgttattggacctgctctgattggcaaggaccctacagcacagactgagattgataacttcatggttcaacaacttgatgggaccaaaaaatgagtggggatggtgcaagcaaaagcttggtgctaatgcgattctggctgtgtcattagctgtttgcaaagctggggctagcatcaagaggattcctttataccagcacattgccaacctagctgggaacaagcagttagtgttgcctgtccctgcattcaatgtcatcaacggtggttcccatgctggaaacaagcttgctatgcaggagtttatgatccttcctactggagctgcctcatttaaggaggctatgaagatgggtgttgaagtttatcaccacctgaagtccgttatcaaaaagaagtatgggcaagatgccacgaatgttggtgacgaaggtggttttgctccgaacatccaggagaacaaggaaggacttgagctcttgaaaactgcaattgagaaggctggatacactggcaaggttgtcatcggaatggatgttgctgcttcggagttttacagtgacaaggaccaaacctatgacctcaactttaaggaggagaataatgatggttcacagaagatatctggcgatagcttaaagaatgtatacaaatcttttgtgagcgaataccccattgtttcgattgaagatccttttgaccaggatgactgggttcactatgctaagatgactgaagaaattggagagcaagtgcagattgttggtgatgaccttctcgtcaccaactcccactagggttgctaaggctatcaaggagaaatcatgcaatgcccttctgctcaaggttaaccaaatcggatctgtgactgagagtattgaggctgtgaagatgtcaaagcgtgcgggctggggtgtgatgactagtcataggagtggtgagactgaggacactttcattgctgatctggcagttggtttgtccacgggtcagattaagactggagcaccctgcagatcagagcgtcttgccaaatacaaccagcttcttaggattgaagaagagcttggcgctattgctgtctacgcaggtgccaaattccgtgcacctgtggagccctactaaacgggcgggatgcaagtgcttttatgtctgcacaagtcctgtgaaactgtttactgcgacctgcagattttactcttggagtgccctgagtagattttagcaataatatccaacatgtaacatgtaacatgttacggacatgtacccaaacgtgatccagttttagttaatgtgctccatgcttgacgttttgtgctgctgtggttacatcgttgcccttctaccttacatagttgtgacggcaattgtttcattttggttgaaggtgaaagaatcgagtgggaagggtgaactgtggtaatctaaatcttttctcgcaacaattaaaattcactgcttagtct

SEQ ID NO: 27591 - DNA, 377 bp, Zea mays
  Clone ID: MRT4577_125179C.1
ggcgctcttgtcgcgcgagcccgcatgacgcggtggatgccgccggagtattgcgggggtgttacgctcgctggagggctgggcggcgcggtcgctgctgcccctcctcaagcccgtggaggaatgctggcaacctacggactgcctaccagactactcgtccgagatgttccaacacaaggtacacgagctgtgcgcccgcgcctggatgctccccgacaagaacttcatcgtgctcgtagcccacatgtacacacaagagccgctgcacacgtaccaaaccatgatcaacacgctagacggagctcccaactagaccggcgccaacaactgcccctggacagactggacgcgctcctggaccgacgaggacaacc

SEQ ID NO: 27592 - DNA, 227 bp, Zea mays
  unsure (1)..(227): unsure at all n locations
  Clone ID: MRT4577_12517C.1
ttnntttttttttttttttttttttaagcttaggtgaagggccaattttagcgggcggttctgccacagatgatggcagaaatggaacacaaaagcgcaaaatgtgtccagtctcagtgtgacccgggcgacatccacatttattctggggatacacaagcagcacccatccatgagaggcggggggaaaaccctctactgggtcttgaacatgtggcggatcaggt

SEQ ID NO: 27593 - DNA, 362 bp, Zea mays
  Clone ID: MRT4577_125180C.1
tttaaccgttgactttcagcttttgacaacgtcgtattttggggggcgccaccagagcatacgtctataaccatgggatataactaatgccaaccgtagacaaaatcgcatcacctggacatgaaaagaactgaagtcacacatccatcaagttcagatatattatagactctctcatcaacaatgtattctacggcaaacgagatagaggcattctttgatgtaaccaaagccctaaacatgtattggatgaaccaaaagtcggtattgcaaaactttgatctcaaatggagagatatccattacaggtagatgatgccactgcctaggtaataataatgaactgttgagtgtatttatag

SEQ ID NO: 27594 - DNA, 303 bp, Zea mays
  Clone ID: MRT4577_125181C.1
gctccgatcgatttgttccctccccaccaccgagcccatggcggaccagctcaccgacgaccagatcgccgagttcaaggaggccttcagcctcttcgacaaggacggggatggttgcatcacgaccaaggagctggtcactgtcatgcgctcgctgacacaaaatcatacagaggctgagcttcagaacatgatcaacggggggtgggctgtcttcaaccgcacgatgatgctgcaagcaaccggagcctgagcgcttggggggcggacgacaggataacctgtgaccgcttcctcctattg

SEQ ID NO: 27595 - DNA, 1116 bp, Zea mays
  Clone ID: MRT4577_125182C.1
aaattaataaaacaaaaaacacccaaatttttttttttttttttttttttattccgccttagttattttttttttttatttttttttttttttttttttttttttttgaaaaaatctatatcgttacaactataaggagggatcaggaaccagtccacgtgtctataccttcatgtacaacatttcctttccaagcaggatttgcatggatcttattctaaagctaagagttacaagtcgaacactgtactatcagaaaaagagtaacaaactactaccgtcttccatgtttcgctttattttgcttatagtatgaatggcttgccaaactatacaaagggattgatttctatctcggtggttcctacaaattgctaactaacaaagaacgctggaattccctcacagaagcttataataccattggaacaaaaaaaaaagatcctccgatgcatatcaggtacgcatccttaatttgctttccaggttattctgttgatgcagattcggaggacccagacagtgaaaaactattgaatcaaggaatttgtaaatactcgtcaaatatggatcattgagttgtttctcagcattcttttgctattgatgccgacctggaggtgccaactactgaaaaaatccattggcaactgccaagcgtgtactgacacggctggttcatgatcaactactccggtccaaaatagtagtcatgtattgacagccggtcaaaagcatcaaaatttgcccttcaaaccaacaaactgacttccaagctgtgcacacggagcatctggccatctgcacccttctcttgtgcggaaggggcagaatgattcgcaaaaatggtccgccggtgcatccgggccaagccacgagacaccccactcgagacagctccgattcttcaccagcgagacttccaaaaccttgatcctctgttctgcccccgccagcagtagcgacgccttcaggaagggagtgacgtcggggacgccaccgccgtcggtccgaaatggacggggctttcgcccatggaagacagcgctgagaagcacgacgccctcaccaggggaagcgacgcccaggggcgtcaccgtcgtcaaggcttttgcc

SEQ ID NO: 27596 - DNA, 784 bp, Zea mays
  Clone ID: MRT4577_125183C.1
ccacaacccgcctgctagcctagcgcaaccagcaagccgctcgccacgcgtgcgatgccgtgtttggccggttggcccccaacgccgttcggccgccttcctcgccgtcggtccacgcgtactcttctttgctagactgctccccttctccatcgatcacttgcctccactacgcgcaagatgcaaccgtgcctacgacctgctagtacctagcttcctccccctctctatgcgcgccactccaggcgtcgagctcgcctctgcgggaccgtagcccccacccctcattggctctctgcgcgagcgtgatcgtgcctccgcatcccatgttcaatggatccctaaaggttgtgcttctacgaagatccaaaattccttggactaaaagcttcagcttccaatagtcgttaagggccttgtactacgaactctggacaaggtttcatgctgctacaaagtgctctgcatacctggtgagtgtttaatcaatctcggtgctgatttgttagttgtctttgagagggagttgccgagctttctcaacaatagcgatcgtggaaggcgtcaaccagattgtggatgttcaaactatctacttttggatctaagttataggatatttaaacatttttaatgtttgatacctggatgctttatgctttagttatatgtggatgctagaaaaagttgtgtacacatgtttttgacaaaattgtacgcacgatttggattgcattcaattgaatgatcgttttattaactgatggtgaattaaatacgttat

SEQ ID NO: 27597 - DNA, 534 bp, Zea mays
  Clone ID: MRT4577_125184C.1
ttcagatatggttgagggagaagcagcagaaagtaggaaggctatccgcagaagcaagataacgagcttgttcactgcaaacgacatggttttctgtggtacagaaactgggttaattaaggcatggataccgttgtgaagtgtagaagcaagaaggagcaggtggaaggcttaatcttgtaaatgtacaggaaagctagagtgtacaggaaacatgaaaaagaggagcataccattgtacaagccctcaggacacaacacagcagccagcgcggttcgttcataaactccatggatcagcaagtttcttcgaaatggatgagtagtaggttcataatgtaaatactaactagtgtgtgcgtgtttgttttagttttgcgaagggatgagttgtggatgttaataaagggtagagtaaatttcttagatctacatatatacttgcctagaactggaaaattaagaggacactaccactataacaaaaaaaagccatgtcattttggacaatgagaagcctccaaagctttattc

SEQ ID NO: 27598 - DNA, 322 bp, Zea mays
  Clone ID: MRT4577_125185C.1
cacacgcctcgtcgtgaccgaggcagccaaatgccgtattcaacatctgtccgagtccgcaccttcgactgctctatccgcgccagacgatccgggggagttctctagcacgacgcctttatgggaactcataccactgttggcgagactgaggcttaatatgcagcaactagcatggctacacgcactaggcttgaaaccaggcttcctatgttgccagatcggccggagcagcgcgactgtgccatcgatatgacgcactgatacctgtatgtatggatagacccgcaaatttgcctatccacaagcggggttccaaagg

SEQ ID NO: 27599 - DNA, 1004 bp, Zea mays
  Clone ID: MRT4577_125186C.1
gggttctgctcggaagggaccaagagctgttggtgtacgagtacgtggagaatgagtcgctggacaagtacctctttggcgagagaagcgccgaaagcctgcttggctggagccagagatacaagatcgcactgggcacggcgagaggcctcgcctacctacaccatgagtgcctcgagtgggtcgtccactgtgacgtgaagccggagaacatacttctgacccgggatttcgatgccaagatagcagactttgggctggccaagctcgcgaagcaagggagcactagtctgaacttcacccatatgagaggcaccatgggctacatggcgccggaatgggcgctcaactcgccgatcagcgcgaaggttgatgtgtacagctacggggtcgtgcttctggagatcgtgactgggatcagggcttcgagtggcatagtgctagatgagaggcagatagactttcggcagtttgtacaggaggctaagcatatcctgtctactgggagtgtcagtgatatcgttgatgatagattgcaaggccattttcacgcggaccaagcggttgcgatggtcaaaatagccttttcatgcctcgaggaaagacgcaagaggccaacgatggatgagattgtcaaggtgctcatgtcgtgtggtgatgacgatgactaccatcctgcttattcatattgacttgcaacagatgtgaaggtttcccaaaagaaaacagatgcaaagatttgagaggcagaggcaagtgtacctttgatcaatgatagaagctgaactgaactgactgatgaaatatattcgaaagcgtgccaaattgtgatatttgtgtagagtatgttggggtatctccatatctggtagattaaaattgagtaatgttgttttgctctatttctaagggaggtgtcttgccctataagtggaatactataaaacttcggagggcccatataataggtcctcgagactcagtaaccccattcaattagggtc

SEQ ID NO: 27600 - DNA, 330 bp, Zea mays
  unsure (1)..(330): unsure at all n locations
  Clone ID: MRT4577_125187C.1
tcccgtttctacccacccgccctgatctagatcgcgagcagccccccttttgtttttttttttatgacagatagtactcctccatttaaatttcaacctcaaacagatctacattagatacatttnnnntaaccaacacctgcatgttccatacgttatttcaaataaagcaaatcggggcaagcaatatacctttatcgcccttttcgtgtcaacaatcccaaccctaactctactgcaatcattcatacaaaccatcttttcacaccatctccattaactcaggctacctaggatcaaccaagaacctatggcaaacctttttcctta

SEQ ID NO: 27601 - DNA, 695 bp, Zea mays
  unsure (1)..(695): unsure at all n locations
  Clone ID: MRT4577_125188C.1
ccggccgggacggttctgcccacagtgccttcccctcccagaaccttccatcgacgccgctccccgaattcctccatgccactccctgaaatcctccatgcccccgcgcctgaaattcctccttcccctcccagaaccttccatagacgctacgccgtgatcccctccaccggccattcaaccatctgcttccatcgttgctgcccaccttccgcgaccgctgaggcagctcgccccgcacaagcagggggaagttccatttccaaccttccaacgatggagcaacaactcctcgccgtctaggttgtccacaatccgcgaccgctgaggcacctcgctccatgcaggcagggggccttccatccatggctccacacgatccacagctcgtcctcgccgcaatccacgccctgccttccccgatgtacctgctctagcaaaagcaaggaatgccgcaaggaaggcacgctatccacgtgttccacagctcgtcctcgccacaatccatgccctgccttccatggagacgccatcgacccgcacgcatcttctcgtttttgncgcgatccatgccctgccttccttggagacgacaccgatccacgcgccgacccacgcatcccgcaaccaccgaccaacctgcgccctaatcctccgctgctcgggtataaaaatgacgatgcctctgattctct

SEQ ID NO: 27602 - DNA, 831 bp, Zea mays
  Clone ID: MRT4577_125189C.1
cgggacatctcagcatcgatcacatcacacatattcatcgagttctttcccgctctctcatcagtctctgtagtcagcttcgagctagccacactctgttcttcgaccacgaccgcaagtcctctgaaatggcattcgtttgtgcgaaggcagagctgcttgcagcggtgatgcttgcgagcgccgcacaactttgcatgggcgcgaggcggcgcatggagctgtaccggccggacccggccaacatgctctcctaccacaacggtgccgtgctccacggcgacatttccgtgtccgtcctctggtacggcgacttcaagccggcgcagaaggcggtgatcctcgacttcctcctctcgctcaccgccgagcctcaggccgcatcgccgtcggtcgcgcagtggtggagcaccatcgaccagcagtacctgtcccccgcgagcgccaaatccaacggcgcgagcgagaagacccgtgtcctgctcgcggaccagctctcggacggcgagtgctccatgggcaagtccctcaccctcgagcagatcaccgccctggccgcgacggctagccccaagaaaggcggcgtcgcagtggtgttcacggcgcaggacgtgacggtggagggcttcggcatgggccgatgcagcctgcacggctccgacgccagctccggcacgacccacatctgggtcggcaacccggagacgcagtgtcccggcgcgtgcgcgtggcccttccatcagcccgcctatggcccccagacgcgcccctcgtggcgcccaatggcgacgtcggggcggacgccatggtcatgaacttcgcgagcatgct

SEQ ID NO: 27603 - DNA, 649 bp, Zea mays
  Clone ID: MRT4577_12518C.1
tcggccggggctgatatccatttgtaaatgggggagaatggagaactgttcataacgtcacagccctgtgcatagggaatgccaaatacttcggtggtggtatgaagataactccaacagctgatccgtttagtggcaaccttgaggttgttattcttcaagatttcaaatggtacgactttattctgaagctacacaggctctatggaggtacacatctatcagtgaatggtgtttcgtcaatgagggtccaatcaattgaagtagcagaggtggtggctagcggtggcgtctttgtgcaatctgacggagagcatttcggctttctgccgaccaagttttcagtccttccccgtgcagttgatttcttctgctagatcaccaagtgggctgcattcatcccctgcgcatgagacaagttctgccgtgctgttgagaactgcagcacgggtatacaatggaatatgtactcctataaggtttaagtgttactggcagaatatccctattgtgccagaaagacatattataatgatgtatcttatcgatgaataatccctaatggattacaatctttgatgagcttttgttacaccatcatagatattgcaatggatgaacgtccggagtgatatgtcacaattggaat

SEQ ID NO: 27604 - DNA, 128 bp, Zea mays
  unsure (1)..(128): unsure at all n locations
  Clone ID: MRT4577_125190C.1
gacgaggngattgacgncgagagngggagcgatagnagaactttgcaggggatatncctggnaggncataacgnggggaccgggattgccaacaccttgtaanagttcatcnacnantccctgntcat

SEQ ID NO: 27605 - DNA, 579 bp, Zea mays
  Clone ID: MRT4577_125191C.1
agtcaagagatggctgtaacaacagccctcccctctatatatagagggttatttccactttctaaacaacccctatttacaagcctatcagctccaccgagggcgaaatgaaccaactccttggttttcgatccgacgtccacgcgctccacacgaagttacttcgccctgacgcacccttcgctgtgatgccacatggcgccaccaattcccgttggaaccgccgctacccaagttttgaggcccaaactcagcaaaacccaccatgcgtagcgcttgtggttttgagacccaaaccaccaaaccgtcgtgagtatcgcaccgcgggcgcgtcctccatgttctggacacgtgtcccgccagtcctcgaccgcgccggcaatacggcccgctccaccatgtcctcgcgcgattgggtgtcccaggtgtcagccaccatgactggtcacccggctgctctggcccgttagccaagatccaacacacgtccttcagcgctcccggccgatcagcacgagctcgtatgaccttcacctcagccgtcgaccaccgtccctgtgctcgacaccagcatatcac

SEQ ID NO: 27606 - DNA, 701 bp, Zea mays
  Clone ID: MRT4577_125192C.1
aattcggcacgaggcactcatttaccaccatcttcttctccaagcttctctcctacctgtgcttccctgctcttccctctgcctccgtagcctctgctaacatattggtatcaaaggtcatcgatccctggatctggatccgatccactacacccgtcgagccaagcgtctcggtgccatggatccacaggttaaactcgccctggaagctcagactcgatcgttcctcgccgagctcgacaagaaattcgccgcgctcgacaccaagtgggagtcccgcatcggcgacctggagcgctcggcggcggctgcagccgatcagttctatgacctcaaggccgacatccacactgatgtgacggcccagctggaattcttcgtccactccgcgaccgagcgctccgatcagatcgcggccgcaacggcgtcgcgggtggaggtcctggagtcggcgtctgcgtccttcgacgcatggcgtcccggcatcgaatcatcgatggcagatgtcaaggtcggcatcgaatcggtccgggaggcggtcgccaaactggctcgaccatgggatccgtctccgcctgtgccagcataccttcaacctggcatcctcggcgagtttcgggtcagcccccgcgcgccccactgccggatgtcggaccaacgggccagcagggcacggcatcgactctcaacgtcgggaggct

SEQ ID NO: 27607 - DNA, 538 bp, Zea mays
  Clone ID: MRT4577_125193C.1
gggaccggaaaaggtcctcatatttttttaaacgggcaaaaggggtcctgacaacaatttcctcctcctggacccctggtgacccttcgaacggcccaggccgttgaaaaactaaaacatcccctaaactccatgggaaaaaaccccctaatggtcaacgggctgcccacccttaatcgcccattctgcttcctccagggacaaactagggctccattttagtggacctacctgggggggcccccaaaacccaaacagggggtcgtgggctttacagggccccaaacaaaaccctagggtcaaaactcgaaattgctgcccccatggacagccctgccttaggagggcatccgggagaccttttaaaacaatccatggagggttccttccatctcctaaggtatcccatcatcctctggctcggggggttaatttctgacaccgacccacttggaagcccttatgcttgccctcttcaggtagctccaagagcttaaccttgggggtttcacatcatccatgtgagcatcctttgacc

SEQ ID NO: 27608 - DNA, 608 bp, Zea mays
  Clone ID: MRT4577_125194C.1
aaaaaataaacccgccctcccccctgccttgccttcgtcgtcacatgcgcacaagaaagaacccgcgccgcccctgaccctggcccctcctctcctccagcgcgcagccaagacgtcgccgcgcccgcttccatgaccctcgtccccacctcgcgatgagcgacattgcgccgtggtggcgcctgccttttcgttcttgaccgcccgtcgagctgctacgagaaagggagggaggccgggcgatggccgccgcgaggaggctctcggagctgctgcaggagcagcaggagccgttcctcgtcgaggccgccagggcgaggcggccccgacgcgtccgtggcgcgagcggggcggcggcggaggaagcgggaggaggaggtgggctgggctgctgccccaccgcggcgtgccggcggctgctcaggctctgcagccacgggttcaagaagaggagcgccggcgccctcaggtcggcgctgaccaaggtgctgtgcagcagggccatgcgccgggtgctgcgctgggacggcctcggcggaggctgcccttcgggcgccggcgcatgcggcgccggcggggtccgcccgctggcgccgctccctgggggg

SEQ ID NO: 27609 - DNA, 334 bp, Zea mays
  Clone ID: MRT4577_125195C.1
caaacaatcctcaaacgccttcgcctgcgcctccctagggttttgctctcgggtggtgcggatccagttcgggggatcctccatggcgtcgcgtacgacgttgaagtcgaagcccaagggcttgggcgggaagaaggccaccgtcgactacaaggacgccaccttggttgcgaccacggtgcggtttatgaaggtgtggaccacgttgacgatgaattaggcaattgtggtggcgcactacggctttatccccctcgttatcgttatcgttttgaacttctaaccaaattcccggcgtgttccaactacttttttccggtggttcggaactttt

SEQ ID NO: 27610 - DNA, 340 bp, Zea mays
  unsure (1)..(340): unsure at all n locations
  Clone ID: MRT4577_125196C.1
gggggcngnggntngggggaaaaaaatnntttggaaaanncaaacatcaaacttattcatgatttgtcataattctggggagtacccacacacaacacaaccggtccatttttaaaccaacactgtcccctctttttacccgaacagcagattctttgacaacctccattttgggagggggcaccaaacgacccaggcccattggcagtttaaacgacccatgacttacttaccaccacggggaccgggcccaagggggggggggctctccttttggatgttgaagtctgctagggggcggccatcctccaactttttgccggcgaagatcaaacccttt

SEQ ID NO: 27611 - DNA, 2206 bp, Zea mays
  Clone ID: MRT4577_125197C.1
atttggcgctgataagactcgagtggaggcggcaagcgaggccaccagtgttcaaaaactgtgaaaattcccacctctccctccctctctcgcgcgtccgcgcccgcgcccgcggcctcgttcaatccgccagcgctacccgcctacccccccggtggtagcgggctctacggcagcgctcctctccagttcccctgcgctccgcgtcttcatctgtggccgccgacgctccgtcggtgtctcgtcggacggagcgagcggagctagggtttcgccgcttcatgctcaggatcggcgagatctagggtctcgatttcagggtgattgtactggatagctgctgctgatattgcaagacaatgaaagctcatcagcagcaaggtaatgcatctggcacaggagcaaagaccaaatctggttgtgataaggtacaaagcctgaaagctggtgcacatatcaacaaatcatcaggcaatgtggctgcaaagcgcagaaaagtctctccttttgaatcacataccaaaagcaagatagcatcaaagactgacagtcttatggaagcaccagcaagtgatgctaagttgtctgctcggccacctaatcactctggaaagatcaaacttcaacttttcccattatatgaaaccattcaagagattatgcagcaagaaaaacacaatccttaccttgaattgactttggctcctcgaaagaagatgtcctcaattttacagcatctgaatacaaaatggggcagttctcagtgtgcaaaaggcgagctcatgctcttccctaatgatactagactggacactataggtggcagtgcaaaatggactcttaaggattcttgcacagctgctgatgtgcatgttgcagttggctacccttcaacatttcgtttaaggtatggttggtttggacctgatttgaaccaacaaagtagtgaaccatccttggcatcagcgtactctgcagacaagattattggcagcaggcctcctgatcttgttttcaatgaacaaaaacatatggctggttcagatgaatttgcaaatcattttgtgacaccctccattgtggatgaaataaatacatcacaaatggcggagaatccaagcaaggtggcacaactttcatggcttgactccatatctaatattagttttggagcactgttatctgaagctgcgccttctcaagacaccaaacaaccgccttcacaaaatagcatttgtctccagcagatccctcccacatgtgattcatttgatgctgctattgcttcgctgattgcccgtcagcaaccaagtaaccaaccaaaagtgttaaatccatccctttgggaagccgaagaaacttgccatgcatttcccttccagaatcaaactccacatgcatcaagttcagttcctggcaacagctttgctgctatgacctcatcagtcttgtgcgccattccagaaactggcacagatgatcagcaatgtgctacggatggtaggaaagaggaactaaacagtcaaacatcagtagagggcgatggtattaatgcaaagccagagatttcaatgcaggagtcagctggtgacccagagcgtgaagcatcttgccccagactcttgggtggaaccgacagtataggactaagctctttgctcactgacagcctggatgcgttccagaaattctctgttttctgaagctcagaaatccataaagaacgacgggcttatacaatatgaactaagcggaggtatatattaaccaggtttctgtttcgtgaacagaactaattgttttgggcttcctaagttatttctgtagataaaactccccatatctgtattgtgaagttttttattatctctagtttactactccatctgttcttttttatttatcgcggtttagtttaaaaatgtactagctgacgacaaatattcgagaacggaggtagtactagaaagaaatatgtattctgaagttgaaatttctttcgctttatcttaaggtagcaagtgcctagcctatagggaggctctgccaactgggctgtcacccagttatatttgtcattgcatcttgctgttaattgaacatttgttctttggaacattgatcggctgtggtattatagtgcaataacaagcggtaatctggccgttttgctgtaaaaaaaaaaaaaaaaaaggcccctagggcc

SEQ ID NO: 27612 - DNA, 485 bp, Zea mays
  unsure (1)..(485): unsure at all n locations
  Clone ID: MRT4577_125198C.1
ggatctcgagggccgctgttttttcctgtttttggtggggatagggggaagagtggttattgctttaggggcctttcccaaaagcgttatacccgtgacgcagacattacaaggataggaggtacgagaatgcaaaagcaattacataaacgtacctttattttaaagttagataaagntgaatatgtacggggggggggatcctaggagtgcagagtaatattattacataccaagggggacaaaaacttctgccgataaggttttacataaaaggtataatggaggattctttgctaccggacttgattccttgggctcatgctttggtaccaccttagaacagaaggaacaaaaggttgagggtggcttggctaaaaacaagggagaataaaaacctgagtatggaattactcaagaagggttaccggagtaaagaaaagaatgtgaaggggaaggcgggtatgaaggggagaagggaaggg

SEQ ID NO: 27613 - DNA, 236 bp, Zea mays
  Clone ID: MRT4577_125199C.1
cacgcgacgaacttggtatctttcagcgattttttatatctcccatatgtttgggggggtttttgaggtcacgggcggcttgaatgccaagtattacaattttcaaatgatttgttaggtaacattttttttttcctgttttacttcattccattggatttagactactaataatggagcattctgtacattcatgttaaaattcaaagttttgttatttgattttgtcatatcct

SEQ ID NO: 27614 - DNA, 173 bp, Zea mays
  Clone ID: MRT4577_12519C.1
gtcgcctccataagggggttttcccgttatgtaaccccgttcagcgtttacatgagggaaagcactaaaaacttgggtgatttaaacaaaaaaacccctccacaacgctgcatttcaacaaaacggggaaaggttttccctagccggtcccttactctaacggaatgggcgtg

SEQ ID NO: 27615 - DNA, 273 bp, Zea mays
  Clone ID: MRT4577_1251C.1
cgcacagctgctctaaaccctaggagcgtgcttgaacagtggcggatatgttatagcgagggaccctttcgccgtatcgaaggtctttgtatatcattactaccaaacgttcgataccaaccgtgctgggcttgatgggctgtaccatcagactctcatgctcacctttgagggtcagaatttccatggcccgtactacattgacggaacgcttggatctttccattaccaggcctgtgagcatcatatctttaactgttgactgccatccat

SEQ ID NO: 27616 - DNA, 138 bp, Zea mays
  Clone ID: MRT4577_125200C.1
accgtcttgaataaccgggccgacccacgcgttcgaaggagcttacgctcatgcagaccctcggtttggtcttccacataggcttctaatccttgggactgtacgagaagcactaggggtacaatgaccctgtgcacg

SEQ ID NO: 27617 - DNA, 377 bp, Zea mays
  Clone ID: MRT4577_125201C.1
gtcacatgtattttgtacgtagtagttgttgttagcagggaagggagtagcttattttgcatagcggggatttggcaaatactatggcggagtgacggcgtggctgtgaatgcgatcgtggttgttgcttgcagatggctggctgctggctctccaaggggcgtgttgtggatgacggcagtgaattgaaaacgtagagcctctttgctaagactttagacttccacgggctttgacttcactactagtagcagaagcagatgaagctttttaaatttgaattttgttaaaataatttgaatttttgccaaaatagttcgaattgtcataaaaacatgaaaagtctaaaaatagagagaaaactacagttatactct

SEQ ID NO: 27618 - DNA, 225 bp, Zea mays
  unsure (1)..(225): unsure at all n locations
  Clone ID: MRT4577_125202C.1
cgggcgaaacaaaacaaaaagggggggcgaggaaacccggatttgattttcctcgccgaaacaccgcggcagggggggggaggaacaaaggagcaggaccngcatcaacaccaagcccgacgggacacagcgggaccngagcggcgacatgaccagccgcggaaagaagaaaggggcctaccccaaggggaaaaaggccacgaacggggagaagacctacgaaca

SEQ ID NO: 27619 - DNA, 216 bp, Zea mays
  Clone ID: MRT4577_125203C.1
gtgctcaacatattgtttttgtcattttttttcaaagtttgttttattaaaaagcgtttacagttggtgattaactttgctacattccaaatagcgtgtagcatgcctagcaagccaaacatattaccttacagcaagcatcccattgccgtttcacacatctttgctgccttcgatacataaacagcacaaatggttttcttgcagggattatag

SEQ ID NO: 27620 - DNA, 279 bp, Zea mays
  Clone ID: MRT4577_125204C.1
ggggcaccccgtccgtcactgtagtagaggaagagcaggatgctgccgtcgaaggtgttcacccttgaggaggtggacaagcacaacaccaacgatgatctgatggctcgtcatcgccggcaaagtgtacaatgtgaccacgcttctgcaggaccaccctggaggcgtatatgttctgctgtcttccaatgccaatgatgctaccgatgatttcgaataacaggcgcacagcaccaccgtccgtccagtgatggacgagcacctcggcagtgagataga

SEQ ID NO: 27621 - DNA, 384 bp, Zea mays
  Clone ID: MRT4577_125205C.1
tcgggggaccacttgccactaccccttcgcgctacctttcgcatcgcatccttgtcgactaaaggagtggtgcgttcaagctttagagaagctttcctaaatttaaatcctctctatggaagaatgagccgacggatcttgagatcgacgaaatcactaaaccacgcggaggaggagggcgattatatatatggacataaattgggtctccttgctgcgtaaatgcttcaagagagtatgcctacactctccatgtcactgaaaagagtgacatatatagctttggtgtggtgatccttgagctcgttaccggaaagaagccgctggcagcagagattggcgagatggacctggtggcgtgggtgactgccaaagttgagcagt

SEQ ID NO: 27622 - DNA, 330 bp, Zea mays
  Clone ID: MRT4577_125206C.1
cccacgcgtccggagagagagagtgagagagtgagagaggcctcaccgcttcgacgtggattctgtagacgagctgcaggcgtcggcgctcgcggcatgacgcgcggtacgccatggcgaggtgggcgacggcgagcgcgagcgacatgaggaacatggcctcgacggcgacgagctggccgttgccccgccacacgggcgcggcgccgaagacggcgacggccttggcgaggacgtagcagacggaggcggcgctgcaggcgacggcgacccacctgtaggcggcgccgtcgacttcggccggggcgtacgcgcagaggatgatgaggg

SEQ ID NO: 27623 - DNA, 1521 bp, Zea mays
  Clone ID: MRT4577_125207C.1
cggacgcgtgggtgccagtgccaccatctcgccgtcggcgtcggctcgtcgcctgagagccgaggccacgcaggcacccgggccgggggatgtcggcgccggcggcacaggccgtggtggcgctggctctcgcggccatcctctcgaccccggcgccccaggcggacaccttctccaacgtcccgcccacgctctccgggggcgacgggaagcaagagcggatcaagcaccccaggtcggccaaggcgttgcagtgcacgaccaagtgcgtcggcacctgcatccgcggcggcggcggcgcgcccggcgaggggcccctcaacgtcaggacacccctgcagctgaatctcggatagcagttaatttaacgatcctgcaggggacaggaagaggcagcgcaacagcccactaaatgtaacgacgtagcagatgctggtgctgctcgtgggtcaccaaagatgggcaggacggaccctgagacgggccagaggaacaacatgcccaagcccaaagttgttggagcaactgccatggctgcggtgcaggctagatatgggatccggttcttctgccaggcctccagaagcagaacttcagaggcgacaagggtaataaggtacagtaaaccagtcagtaacatataggatccagagacatttgctagcaacaaaatccgagaaaagctgttaagagtgatgcgtagtggtcttgataaccgttaatgcgatgaacgtcaggaccatgatgaacagatacaatgcataaatagcaccatgatgaacttaagtttttatctgggagtaggagttatgtacagtttttcttttaatgaaactcgacaagatgtcgagacggacgaaccgattaaggaattccaaagatatgcatctgacttccaatgacacgggtcaatccagtgactgctatctcaaatcttgatactcccatggtcgctggatataaacttacttttccagacatgatggtaactcgagagacagctcttacactgttgagcggtctatcagggctttggacttcatcacttctgttggcagttaggctgtcattcaggttgtctaggcagggaagcatctgaatctcggatagcagttaatttaacgatcccgcatctggcaggaagaggtagcgaaaccgagaatcaaatggaacgacgccgaaagtacgggtgcccaggagactttgccgccgttgagacacgcagtgatcgacaaacgtagcttgctgctggggtaggaaatgcgagatccagatagggaagctgttgtcgtcgacaaagccacgggcaaagcagtgcagtatcttaggggccagaagcttccctttccgactcactcctaccgatgctctaatgaaatcacgctgtgcgtcttgaagttcttccctcacgttgttagccgtgtaaatcttcaccccgggagaagaatacattccacagctgagagcaaacgtcagaagtggctcaggtgccgcaatgcagaactttttctgctcctccga

SEQ ID NO: 27624 - DNA, 548 bp, Zea mays
  Clone ID: MRT4577_125208C.1
agctgccatatgaaaaagacgccgcggccgagcacgagccacgggcagctgagaacagaacgcagcatggcggcgaagcatctccgaggctcctcctcgcatgatctcgcggaggctagagtcatcgaagaagagcccgatccatgaagcaaagcctaggccgagcagcgagcacacggataagcgcaggcgaagcccgggccacagggagaaggcgaggtccagcacagacaggagagagagatcgaggagaagcgtcgactgcttcgacagcatcctcgaacccgagcagccggaaaggccaaggaaaagcttcgacaggatcggagagaagattagagcaatgggtttgtgcaatgtcgactgcttcaaagagcctcctgatagcactgagctttccagaggtagttgagtggaaaaggaattctggttgctgtcagagtcagtatttttcttttcccttgctgctttagatacaaagaaaactacagctgtgtgatggcaatgttaatcataagatgttcacgaacagagcaaagagaaatata

SEQ ID NO: 27625 - DNA, 311 bp, Zea mays
  Clone ID: MRT4577_125209C.1
ctctagtcgtcgccagtcagtgacgttttcattctgcagcacctaccatccaccaccgagctagcagctgactgctcgcctcccccacctaggctaggactaggagccaccaaactctgccccgtcatgccgggcctcgccggcaacgacaactcgcccccggcggcggcgccggacccgcgccgtctgtggtcgccggtgcgccgccgcgcgccgtcgtgcccgatgccctacggctacacgcgcggcaagccgggcgagcttacgatcgccaccgactactcgctggacaagcgagatctggggccctt

SEQ ID NO: 27626 - DNA, 978 bp, Zea mays
  Clone ID: MRT4577_12520C.1
atggctgcgccggcgacgccgaggcagtcgctgatcctcccacgtgcctcctcgcactcgcactcccaacccagcgccggcgggctcacctcttaccgcgtcaccgcctcccaccgccggcgcggcgatttcgttttcgtcgtcaaccccttgggcgccaatggccgcacgggaaagcagtggaagcagttgctgccgcttctccgcacccgcctcgctgaccagtgcaacatttgcgagtgcatcacttcgggcccatcccatgccatagatgtcacaagggaggctataaaggatggggttgatgccgtgatagctgttggaggtgatggtacacttcatgaggtggtcaatggtttcttttgggaaggaagtccactcattccacttggaactggctcagattttgctcggacatttggctggacaaatgatccccatgacgcgattgatcgaattgtgagaggagtaaaatcaaaactagacgtaggcgtgatggagggtccaaacagagaaccacacttctttgttaatgttgctgatatccatttgagtgctaaggcaggttattttgcttctatgtataagagttttggtaacttatgctatgtatttggagctttaagagccttttggggacataataatcaagatatgagaataaaggtaaatgggggagaatggagaactgttcataacgtcacagccctgtgcatagggaatgccaaatacttcggtggtggtatgaagataactccaacagctgatccgtttagtggcaaccttgaggttgttattcttcaagatttcaaatggtacgactttattctgaagctacacaggctctatggaggtacacatctatcagtgaatggtgtttcgtcaatgaggttgagaaaaaccctgaacccctactccacctatacaaagcgacacctagcccatgtgagaacgaccacgatggggcccgggccttag

SEQ ID NO: 27627 - DNA, 2072 bp, Zea mays
  Clone ID: MRT4577_125210C.1
ccggccgggaggctgcctccgctaccgctactctgctggcgtgctgcacctgcaccaccccaaaatcagcggtggggccgagagcgaccgccttccctctttatcctccccgtgtcccgccgtggtgttcactgagttctcgagcccggccgggctcgcagccgtccgcgacttcgtcgaaatcggcgcggtgcgacgagagcgaccgccctttccctcttccctcccgtcgtcttcactccgacgcctcccctgccgccaccgctattgcctattgggagggcggtccctgtcgcgcgcgacgccgaggcttcgtgacggggacacgctgctaatttgtagcgcaccacacgccggctcggcctcggttgcgcctcgcctcgcctcgccaggggattactggtgggcagcgctcgtgcttgttgtgcagccggtgtgcgtctgctcgcggcctgcggcgatggggcaggacctcgtcgagatccacccgcgcgagctccagttcacatttgaggtgaagaaacaaagttcatgtgttgtctgcctaaccaacaagtccaacgaatatgttgcttttaaggttaaaacgacatcccctaaaagatactgtgttcgaccaaataccggggttatccttccgaggaaaacatgtgaattcacagttaccatgcaagcgctccggactgctccaccagacatgcaattaaaggacaagtttttagtacagaccacagttgttccttatggcacatctgatgaagaactcgttcctgccgttttctccaaagaaactggcagatacatcgaggaaagcaaattgagagttgttcttgttagttcataccaatccctcgaagagcaacccactaatggaattcatgacactgagccagctgttgaagttcctttactgaaagagatgccaaatttagggagcgaagtaccagatgttgcaaaagaaattcctgcccctctggtacaaggtccagcaattgtgaccggaataccttcacctgtcaaagaggttccaggcctgagagaaattcctgtgccactgaacgaagcaccaactttattggcagaatttccttcccctcaaaaagatccctctgctattacagttgaacatgcctctaatgttacaattgagcatgcccctgctatttccattgaatccccacctttgaaacaaagtgttccagtttttaaggaatctcctctgaaacaaagcgttgcagtttttaaggaatctcctcctttgaaacaaagcatttcagtttttaaggaatctcctccactggaggaaactactcctaaagaagctgttatgctaagtgaccgagggcttttcaatgtgcagaatcatcaattatcccatgtaacagaagatgttcagaatatgaaatcaaagctcaacaatcttgaatcaaaattggaagaggctgaaaagatgataataaggctaagagaagagagcagaaataccacccaggagcgggatgagctacagcaagaaatggtattcctaagaaagaagggaaccgcaaggagtcaaatgggtttccccctgctctttgtggtgtacgtggcgcttcttggtacctgtatcggttacctgctccgcatatgagttccaaacttcaaaaaagttcagcagatgggatatgcttcgtatgtgggcaagacaattgaacggcagttgcactccaaaatgttgaggggtgaatttattagcattattagttcggaacttcatatggttttgcacataacagcagtgccaaactaccatctgcctgtatgtatagaacagttactttttttcgcgttttatagaacccacccaaaagatgtctgctgcctcgtagactaacctgggattcttcttccatctacctaagatttttttttacactttactggattcgcttgccctgaatcggtattggtcttttgtgtaactatttttacacctggtttcgttccagtctaatatcctggcctataaaggcacaaaacagtgtaccaaaaatccaagaaagtcaggaattcatggttgcgtagttcgtgtc

SEQ ID NO: 27628 - DNA, 1081 bp, Zea mays
  Clone ID: MRT4577_125211C.1
ggtcgcctccggccgggccgggagccagccgtcccaccacttcgtcaaaatcggcgcggtgcgacgagagcgaccgccttccgccctttccttcttccctcccgtcgtcttcactccgacgcctcccctgccgctaccgctattgcctattgggagggcggtccctgtcgcgcgcgacgccgaggcttcgtgacggggacacgctgctaatttgtagcgcaccacacgccggctcggcctcggttgcgcctcgcctcgcatcgcatcgcctcgccacgccacgccaggggattactggcgggcagcgctcgtgcttgttgtgcagccggtgcgtctgctcgtggcctgcggcgatggggcaggacctcgtcgagatccacccgcgcgagctccagttcacatttgaggtgaagaaacaaagttcatgtgttgtctgcctaaccaacaagtccaacgaatatgttgcttttaaggttaaaacgacatcccctaaaagatactgtgttcgaccaaataccggggttatccttccgaggaaaacatgtgaattcacagttaccatgcaagcgctccggactgctccaccagacatgcaattaaaggacaagtttttagtacagaccacagttgttccttatggcacatctgatgaagaactcgttcctgccgttttctccaaagaaactggcagatacatcgaggaaagcaaattgagagttgttcttgttagttcataccaatccctcgaagagcaacccactaatggaattcatgacactgagccagctgttgaagttcctttactgaaagagatgccaaatttagggagcgaagtaccagatgttgcaaaagaaattcctgcccctctggtacaaggtccagcaattgtgaccggaataccttcacctgtcaaagaggttccaggcctgagagaaattcctgtgccactggacgaagcaccaactttattggcagaatttccttcccctcaaaaagatccctctgctattacagttgaacatgcctctaaatgttacattgagcatgcccctgctatttccattgaatccccacctttgaa

SEQ ID NO: 27629 - DNA, 987 bp, Zea mays
  Clone ID: MRT4577_125212C.1
gccggccggatcgattacgcgctacgagcacagctagctagctacgacgtcgatccagaactgcacgccagtctagctagtgggccaggcttcgtcctcgaccagaaaattaaaccgggcgggtgctgctagctggtccgatccgttggagagagacgatggcggagcccagacgcacgcggccgtcgacgttccggtgcgccgcggcgacggtgctggcgctgctggtggtcgtcttcgtcatcgtcctcctgtggctcttcctccacccgtccaagctctacttctccgtcgaccacgccggcacgacgggcttcaacttcacggccgccggcgggctcgcgggcgcgttcgacctcaccctgcgcgcctccaacccgaacgagcgcgcgagcgtgtcgtaccgctgggtcgacgtcggggtctggtacaacggaacgtacctcgcgggcgcccacgcgccgggcttcttccagcggcccggggacgagacccggctggacgtggtcgcgcgggcggcgccggacgcctgggtgctgccgcggggcgtggaggagggcatgaagaaggagcgcacggccggcaagctggcggtggacgtgcacgtcgtcgccaaggtgcggttccgctacggcgtggtgcggacgcgcaagtacaccgttcgcgccagctgccccgcggtccccgccgagtttgtgccgccgacctcgttcgaccgggtgaactgccacgtgcacatatgagttttacgaaaccctgcgtgagatggtccaaaggaataagctctgggtggaatgattggttggttggttttatcgaagccttcctttcgtgctatcttggtttgcctgttgtctgcaagcctaattaaattcttcgcttaaatactctattggtttattttatgccaactgattttcatggattggcgatgtaattatttgtaagaaaatttaattttaacccacggacggaggttgccttgac

SEQ ID NO: 27630 - DNA, 344 bp, Zea mays
  Clone ID: MRT4577_125213C.1
cggatcgaagcttcagtaggagagaccgaggctaccattggtgggacaaattccggtcgtacaggaccgatacaagaagcgaggagttctattccctgccattcaatctgaataagttcttcccatcggtctgagcttttgctgtggttaatacctatcactataacggattggaacaatatcacgatacctccaacatgcctaagtactatcactatgactcgatctgaatatgtgagtattgaaaacaagtcgacctatgtgtcgttggctcgttggagagttgtaaaagaacttgtatttgagtattgcgaagttcgctgattaacccgtttatcagcggt

SEQ ID NO: 27631 - DNA, 240 bp, Zea mays
  Clone ID: MRT4577_125214C.1
aaatactgatctcactgatccagtatggctatagcatttgctgtcacaccaagggtatggggggcccacctggtgactctctgtctatcactcctatgcgctgtcgtcggcccggacgtcgtgcaaaactgttgctgccagccaaacgtatgctgcagcaaggttggctactgcggtacgaccgacgagtactgcggcgacagatgccaatagggcccgtgccgctcggtctgtggcggc

SEQ ID NO: 27632 - DNA, 308 bp, Zea mays
  Clone ID: MRT4577_125215C.1
ccttgttagttttgatggccatcggttttattgagcccagggccgccaggaataatattggttcgcgaagcggagagcgttatgagctgcagattccgcaccttgtgcacccacttcaggaacacgctgaggctattcaggatgcacaccccctttgcctacagggcttgctccacgggcagctcgctggggatattggtactgcaggaactccttgcaaatggcggactacgctggcccgtacacctttgggtccagattgatcttgatggggaactcgcccagcatctggatgcacaacggattga

SEQ ID NO: 27633 - DNA, 1484 bp, Zea mays
  Clone ID: MRT4577_125216C.1
tgggtacctcgaggccggccggtctctgcagatctgtgcgtgttcttctcaatccattccagagtccacgctgcagaagccaagggggatggaggtcacaatagcggagaagaagccccgggccgccggcgacggcggcggcctggttgagaggctccccgaggcgctcctggtggaggtgctggcccgtgtcgacgtcgacggcgcctgctccgccgctgcgtcctgccgctcgctctacgctgccgccaacgccgttctccccgccctcacctccatcgacctctccgcctttgccccgtcgaacgccatcctcagcaggattctcgcggggaatggcgcggtccgcagcctcaccgtcaactgcagcctcctcgacgactccgccgcctccgtcatcgccaggggtagcctgcgcgacctctcgctgctcaaatgctccttctcgatgagcttctttgtggctcttggtggggcatgccacgatttaagatcgttgaagctggagatggcggtttgtccatacactctatatccttgcctagcacctgtctacgtgggatgtgttcacttggagactctttgggtgaagttccctctgctagatccactcaccacttttcgcagttacaaggctggatcacctctcattcctagtaaacaccaggacctgttgctacaacctgtatctcattctagggcaaagacggtcttcctgaaaaccacatctctgaacaaacacatcactgacaacttggaatcactctctttagttcttgacatggtaacggatgaactcgttatgttgatcaccagtaatgtccataagttgtctgagctatgcctggaagatgaacctgatacccaaccaaatttgcctgaagatttgaccaatgtggggcttcaagcacttggcttgtgccacaacttgaaacatttgtctctgacacgacgttcctatgacttcagacgggtaaacgactttgggatactgatgcttgctgacggatgcaagcaactgagaaccattagacttggtgggttttctaaagtaagtgatgcagggtatgcagcccttctccactctggaaaggacctgaagaagtttgaggtcagcaatggctggtgcttgtcagacttggcatgcctagatcttgataaggcagctccaaatattacagaagtgaggttgcttaactgtgctctcctaaccagtgatacagccatatctctagcaccctgcactaacttaaaggttcttgatctttcgggttgcaagagcattgcagactctggcttggtttccatctcacagcttcccaacctaactctactggaccttgctggagctgacattactgatgtgggtttatcggcactcggtaatggggaggtgcttgatatcttctttgtgcttgagaggttgcagaaggatcagcagtattggaatagcttcactggtgtgcggggctggcaccatcaac

SEQ ID NO: 27634 - DNA, 418 bp, Zea mays
  Clone ID: MRT4577_125217C.1
ttttcttcttggtttttgtttgttttatggccttttttttcgaaccccaacttaccaagttttttgtttatccaaccggacccttataaaaaaattccaatcaagcttgggacgatggaacttcgtagttgggttggattgcaaaacttcatagttgaattgaattggatggaaccccttatgaactagaagctgggggcttatttgggttttcaacaaatcctaggatttggactggcatccaacaaatggctgggaattcataagccttgactgccttctttttcttattcttcccctggggggctgtcttaggttcagcttcttaatttttctttttcttccccttaggggctgtcttagggtcagcttcctccgaaatttcacgggccttctttttcttcttcttgggagtctg

SEQ ID NO: 27635 - DNA, 635 bp, Zea mays
  Clone ID: MRT4577_125218C.1
cgggaagtacgcaagcaagcaagcagaggagagggaccgggaccgggagtgagaggaagtcgagctcttttcttcgtcgacgctggtttttggcccctgactgctggtcgagatgtcgaagatggcggacgagaaggtgatttcggcgccggcgaccggcggaggagaggacgggctgatcgcaggggacctgtcagccacggaggcgcgtgtccgtccgttggagacgctgctgcgcgccgcgcctctggggctctgcgtcgccgccatggccgtcatgctccgcgacacgcagaccaacgagtacggcaccgtctcctactccgacctcggcggattcaagtacctggtttatgccaacgggctgtgcgcggcctactccctggtctccgcgttctacactgccgtgccgcggccggcgaccctgtcccgctcctggatcgtcttcctcctagatcaggtgttcacgtacctgatcctggcggccggcgcggcgtcggcagagctactctacctggcgtacaacggcgacaaggaggtgacgtggagcgaggcgtgcggcgtgttcggcggcttctgcaggcaggcccggacgtcggtggtcatcaccttccgctccgacttctgctacatcc

SEQ ID NO: 27636 - DNA, 292 bp, Zea mays
  Clone ID: MRT4577_125219C.1
ttcaaacatgggctccaaccacatgctcctcgtcatccaggcctacaatactctgctctaccactctccctacccacccagcttcatgctcacccatctcaccttctcctactccttcttcctcttccacaagtccaccaactccctgctcgtctcatcctacccccaactcaggttgccgctcttctggaggatcacctcctacggctgcgtcgccttcttctacgacatcgacatgctcaaaggctcatgcagcaaatctctttctccgttccctcaaagcttcttctac

SEQ ID NO: 27637 - DNA, 819 bp, Zea mays
  unsure (1)..(819): unsure at all n locations
  Clone ID: MRT4577_12521C.1
accacccacccttttcaaatttttttagagcattttcaattggtatcttattgtgttcaaaagggggagaaagcagtatttcaaaatggtatatcaaaaccctcttgaacactaagaggaagatctcatttagggggagttttgtttcagtcaaaggaaaagcatttgaaacagggggagaaaatttcaaaatcttgaaaatgttttgcaaatcctattcatttacctttgactatttgcaaaagaactttaaaaaggatttacaaaaagaaatttgcaaaaacaaaatgagttgacatgccatagcgtgtgactcattattaacaataaaagaagtttcctcttaaaaaaaaaaaaaaaaaaaaaaaaaaaaaaaaaaattaaaaanaaaactttttttattnnnacttnaaaaaattatatttggggggggggggtgtaccaccncaaaccaaaaaatattgcctcatgccattggtcgcccccagttggtttatttgaggcaaaccctgctaaactatgggtgcaaattaaccaaagttgctgtcctattttataccgagagtgcaatccccctaattgataatcccgttgagcacaaacgtactaaacacataaacattctgcctcattttcttagggatcaccaacaaaagggggatatccagattgcgtacattaacactaaagatcaattagccgatatctttaccaagcctcttgtttaacaaacttttaccaaacttacgcttgagctcaatattcttctttctaggaatttcttttgctaattcgcgcacatttctcataagtgtacat

SEQ ID NO: 27638 - DNA, 264 bp, Zea mays
  Clone ID: MRT4577_125220C.1
gttctagatcgcgagcggccgcactagttttttttaattaaacgggtactacatactcggaagcctcaccaaggatagctgggggaggaatcaggttgagactagacatttattgcacaaatgctccaccatgcatgtatggaaggtttaagcatgaaccatggcaagctatacagcagtatgatgggacgttgaaacccatacgcaaaagcgtctggaaccagactacggttagaagtttatgctgtgatgctactggatcca

SEQ ID NO: 27639 - DNA, 464 bp, Zea mays
  Clone ID: MRT4577_125221C.1
atcgaatcgtgtcgttcgtggctgtcatactcgagctgcttgcactcaccacacttcgctgcacacacaatgcacaaagggagtccatcactaacaacaccgatatgttggcaagctgtatcaaggacgtaccgatgaacaagaacaagctgcagctccaggagctcgcgcgcttcggcggatatgaccacaaccaaacggccaatagctcttatggggatcgagaagcttgtgaacgccaagacacagattggtgcttgcacgatgtactatctaactattgaaacgaaggatggcgtaggcaagaagctttatgaaactaacgtctgggaaaagccatgagagaactttaagcaacttcaggaatttaagcctgttgacaaaggtgctagcgcctaaggatctgtcgtctccctgcgcaatttgctgtctgaagcgcaaaactaaattacaaaataaggagc

SEQ ID NO: 27640 - DNA, 371 bp, Zea mays
  Clone ID: MRT4577_125222C.1
aataaattatttttgttttttttttttttttttttttttttttttttttttggggcctacaaaacaacaaattggatgcaaaaatccttctgccccaaaggacgcaacagaaacaaaacctgggtccttaaaccggggggggggtcacaaaccaaatgacgcagtccatctacccagtaatgccaaaaatcctaatttctaaccaatgcgtcttacattaccacaaacagctgatgacacatatacaggccgcaaaaaaaaatactagaaattctcagccatgttgggcacaaaggtcaaaaactactacctacaaacattatataccaacaggcccccaattttgttaacaactcaaaactggctctccc

SEQ ID NO: 27641 - DNA, 845 bp, Zea mays
  Clone ID: MRT4577_125223C.1
ccaggtactcttcagatccgcttcatttctttgtagcggcaagtgaaaatggtcgatacagacccatacgcaagcctccttttcatttaccccattctactactatatatatatctaaagtcgatacaagatacggtcatgctagagcattgtatttaattcacaaaaaaaaattaaaagaaatacggaatagtgagcaaggtaaattaaaagactcgacgagcttgcaccagcaaaaaaaaggaaatcaaggtttacttactcctcttatccccctgtgattacgtctaaaacatctccatcagatgtgccgactctgctcaagctcatccaccttcagtaccaggattggccattttttccccccatttaacttccctgtagtgacatctccagctcctcacatgttaacactttcatttcacaggaagtaaaaggaactgtccagcaaaaatattacattattccacccagccatacggatgggcgagtctcgaggaagcatgaaacaatctccatacccttcaaggctccaaaatagctccataacaactgcctgttaacttaataataccacaaggctcaggtgtgtccccacaattatactgtaccgtaatccagcctctcccacttgaaggattttccagaattgatccgcagcaaagctcgcatgaatacacagacgcatacgcagactgctgctatagcaagcattgaatgaatataaggccgagcaagcagtccccttgaccgcataggctgccttaacacaccagcccacgcgtccgcggacgcgtgggcggacgcgtgggtggacgcgtgggtcggcccgggagtccttgacc

SEQ ID NO: 27642 - DNA, 377 bp, Zea mays
  unsure (1)..(377): unsure at all n locations
  Clone ID: MRT4577_125224C.1
caaccagcccacccgccggttggtcacgctcctccccgatccccaattccctatctcggggcggcgccatgtcaggccggtgcgcggccgtcataggtctgctcgtgctcctcatcctctgggcctcatgcgcgcgcctcccacgccgcagcagcaccacccggggagctgctctgcctcgccggggagcgccgaccactgcggcgttcgcgctgggaagcttctggcggtcgaaagcggccttctggtgcctncactgcgtgatccgcacctacgtcgactacgctagcggctccaagtccaaccccgagtaccgtatcctctccgaccacgcctagtgcgttaaggtcgagcatgatccccggttgattcactac

SEQ ID NO: 27643 - DNA, 367 bp, Zea mays
  Clone ID: MRT4577_125225C.1
ccggccgggatcaatcagtgatactccctattcaaacacatctcattcttgataccctctacctctctaccccagataatccccactagcttcattcacaatgtcggcccgcctccacaagggactgtcaagcgtcctcgccaaatccccttccgacactgtcattctttcgtctgttcgcactcccatctgccgctcttataagggccaattgaaggatgcttaccctgaggaactcctcgccagtgttctcaaggctacgctgaaagctcaccccgaggcacccgtcgatgatgtcgctgtcggcgttgtcctttcggaactcggcggctctaaagcagcgcgcatggctcttaaccatgtcggt

SEQ ID NO: 27644 - DNA, 625 bp, Zea mays
  Clone ID: MRT4577_125226C.1
aatatatggaacacacgttttattcagggttttactaaaggaggactaacaagcccccccaccagggccaaaattttaacattggtttatgatactacaatataaaacgggaccatgattggaaaaggaaggcccaccccacagttccttgtataaagctacatatatatgcgggtataactttgaccgggtataaccccttaatcccccatgctttgatgcatgcttgcggatataaattagggggggggatacatcatagaaccacatatttgcagttgatgggattacggcccctgaaagctggagggcacatgcttgccgaactcgttaacaaccaccgaaatggcaacgggaaccacaaggttgaccctgacccccttggccttgatgggggggcaaaggcaaaccgcggggtcaaggtcgcccaccccgaaaagcagcggccaaaaggggtcgttggccttggccccaataacggggtgcacaaggccgttgagcgcgtccacccacgcaagcagtttgagcgtgttcacggggcacttacccgtcggggtgaacggcaacggaaattagggcgggggagggcacggggtgaacaacaacaacggggggggaggcgggg

SEQ ID NO: 27645 - DNA, 271 bp, Zea mays
  unsure (1)..(271): unsure at all n locations
  Clone ID: MRT4577_125227C.1
gccggccgggtcgggaangcgtccaattcatccaccttgtccctcccggagaaccagaaggccacccaccttccaaggcaggggccatggacgaccccgtcgagcgcttgaaggacgggttccacaggttcaagaccgaggcattcaccgtccgcaacatcgccgccatggtcccagcctacgacaagaccaagtacaccggcatcgggtccgccatcgagtacgccgtgtgcgcgctcaaggtggaggcgctcgtgagaatgggccatac

SEQ ID NO: 27646 - DNA, 636 bp, Zea mays
  Clone ID: MRT4577_125228C.1
gaatcaaaaaaaaaagggaatcagataaccagttccacttccacagatgaatatggatatgctggaaaccaccagattcctccacatctaccaatcatatagctctacaaattctacataaataaaagatgcctcacaaaagtagaggaccttgcaaacactagatcttcctttcctccttccaaggggcaagggctctgcatcatagcttagcttcagtttcatttggccgccatgtcgtcttctgcaccaacagcaagccttctttctcctggaagtaagacatgcggacctcccagtggagagatttcagaatgttctccacctcacttgttgtttcaatgttgtctctgacaattagccggccttgtggcctcaacacccggtccacctccacgataacaggtaatagctcgcacctcttcttaaccttggagaacagatggttggcgtgcacaagatcataagttctcggataggtgctaaacgactcacaccagtcatggtacagtccaaacagcccgcgctcatatataattggaagcgtgtcaggtgaatcaattggaaccacattcatgacccacaccttgagatcgcgcaaagctgctgcgaaccctgcatatacggctttcatat

SEQ ID NO: 27647 - DNA, 820 bp, Zea mays
  Clone ID: MRT4577_125229C.1
ttcggccgggagccaatgggcttcagctagcgctgggccgtgcaaaccctaaccgcccaccgcgccatggatcgggcgggcatagagttcgtggccagcggcggagcgctcgcatcccagatggattctttgtaaccgaacaagtcaggatgaatacggcgggcatcggagaaagggcatggaccccaccgtcgagcgcttgaagagcgggttccagaagttcaagaccgaggtctatgacaagaagccggagctgttcgagcctctcaagtccggccagagccccaggtacatggtgttcgcctgctccgactcccgcgtgtgcccgtcggtgacactgggcctgcagcccggcgaggcattcaccgtccgcaacatcgcctccatggtcccaccctacgacaagatcaagtacgccggcaccgggtccgccatcgagtacgccgtgtgcgcgctcaaggtgcaggtcatcgtggtcatcggccacagctgccgcggtggcatcagggcgctcctctccctcaaggacggcgcgcccgacaacttccacttcgtggaggactgggtcaggatcggcagccctgccaagaacaaggtgaagaaagagcacgcatcggtgccgttcgatgaccagtgctccatcctggagaaggaggccgtgaacgtgtcgctccagaacctcaagagctaccccttcgtcaaggaagggctggccggcgggacgctcaagctggttggcgcccactacgacttcgtcaaagggcagttcgtcacatgggagcctccccaggacgccatcgagcgcttgacgagcgggttc

SEQ ID NO: 27648 - DNA, 1158 bp, Zea mays
  Clone ID: MRT4577_12522C.1
gccggccgggccgggattcactcccacccctatcttttttcagccgccaccagcaggcagcagcttctccctcgcgcgtgtcttcttcccttggagctgagctccttttcccatggcgcctccacactcccagccgccctcctctgcccagcagccgagcgcccagctcctcccctcggcagccacggcgtcctccccttcctcccgccctctgctgtccacggcgagctgcagcagggagccgagctccaagctcccacggcgctcgagctccactcctccctgttcgtcttcaacccaagtcggcgccctctcgctggttgtcctctccgtcgcgcccctgctggccgtgcccctcacgctggcacacaggcgcccaggcaagcttccccatggcgctcgactccctgttccatggtgccctgtggtcgcccccttcttccccttgtggctgcgctcctctgctccctccatggcgccccctgctccttcctcgacgcgctgtaggtgctcgacaaatgcgcagctccatttctcccatggccgtggcctgcttttcccggcgccctgcgcagcatctccctcccccaagtccctgcgcgcgcacagcagcggatccccggcgccctcccctgctcctctcttccccacaaaacagcagcagctcgccccaccttccctcgctgcgcagcccctcggcgaaacgccgctgttcctgcagccccgacaccttccctggcttcctcactgctagcgctgcgcgcgtgccacgtgttcggcgatctgtccaagtggggtgttgagcagtgagcagcaagccgtcaacgcccgccgtgtgctcgctgttttgcgcagcccatccgcgacgccgtcgaaaaaccgtgctagccgtcaatcgccattcgtcgcgcacgcgcgttcaatacaagaccggtcgggtgaaccacgtgcttgcataactcaaatccgatcccgctcaggttgattgatttatagtttaccatacgtatgatttggttgatgtcatgcagtgcacgtatatgtatggatatgtgtaaaatgttttggttatacgcattagtaggttcgcatttgcggttggagaacaagaagttgtttgctgtgtgcgatttgtagtttgtctaaatagttttggtc

SEQ ID NO: 27649 - DNA, 386 bp, Zea mays
  Clone ID: MRT4577_125230C.1
gaagacgttacttgcctcgaatagatggatctaattctttcaagtttatagcatcagtcgtggctcttattccagcgctgcatccactcgtaacactaatattaatttctataccgatatacactctgcatgtacctcctatgtttattgtaaactttacaaacttcatcatctaaaatcacaacctatactccatggtgcttcatcatctgaaatccttccaacatcatgctccaaatacaattatagctacaattgccgaaaaccctaactcgattaaccttaataacattacccttacccataattgacaaccactgtgatgctcagatttcatttagcagaatactgctcccttttatttataattctgctccattcttcac

SEQ ID NO: 27650 - DNA, 403 bp, Zea mays
  unsure (1)..(403): unsure at all n locations
  Clone ID: MRT4577_125231C.1
taaatganacatgagcnnaagcccactttgncattatatttgtaggtgtanacntncacatntttncntacaacacttnccnaggattagcagggatacnnnctcgttacactgattatccanangcttataccacatgaaatacagtctcctctataggctcattcatctcacttcacggccgtccttgtaatgatcttcatgatttgagaagccttcgcatcaaaacgagaagtgctctcaatttcctactcttcaactaacctagaatgactgccatggatgccccccaccttaccacacattccaagaaccttcctatgtaaaagttaaataagaaaggaaggattcgaaccccctacaactggtttcaagccaatttcatncccattatgtctttctc

SEQ ID NO: 27651 - DNA, 560 bp, Zea mays
  Clone ID: MRT4577_125232C.1
gcgtccgcccacgcgtccgtgtccctcccggagaaccagaaggctacccaccctccaaggcaggggaggggccatggacgaccccgtcgagcgcttgaaggacgggttccacaagttcaagaccgaggtctatgacaagaagccggagctgttcgagcctctcaaggccggccaggcccccaaggaggccgttaacctgtccctggagaacctcaagacctaccccttcgtcaaggatgggctggccaacgggacgctcaagctggtcggcggccactacaacttcgtgtcaggggagttcctcacatgggacaataagcagccatcatgaatctatatatatacactaatgcatcatgtacgttttcagcatgcagctacatacatatatataccggatcacccaatgcaatgtgtgaatgtgtaataagcaataccatatattctaccgcttttattttctaacgccgagcattattcatgcactgtgtattttatgatggccgccctgtgtgttcgtcaaaagacatctgctatatataatcatctttggcgagatt

SEQ ID NO: 27652 - DNA, 582 bp, Zea mays
  Clone ID: MRT4577_125233C.1
gccggccgggttccggaagcggcactcgcacgatcaatgtacacattgcccgtccgcgccaccacatccagcatcgtcgccagcctcgcacctgacaccttccacttcgtcgaggactgggttaagatcggcttcattgccaagatgaaggtaaagaaagagcacgcctcggtgccgttcgatgaccagtgctccattctcgagaaggaggccgtgaacgtgtccctggagaacctcaagacctaccccttcgtcaaggaagggcttgcaaatgggaccctcaagctgatcggcggccactacgactttgtctcaggagagttcctcacatggaaaaagtgaaaaactagggctaaggcaattctaccggcccgccgactcctgcattatcataaatatatatactatactatactatactactacgtacctaccgatatgcacccgagcaatgtgaatgcgtcgagtactatctgttttctgcatctacatatatatatatataccggatcaatcgcccaatgtgaatgtaataagcaatatcattttctaccgtaaaaaaaaaaaaaaaaaaggccccta

SEQ ID NO: 27653 - DNA, 1269 bp, Zea mays
  Clone ID: MRT4577_125234C.1
gtgctccttctcaactcgtgcttcccaagctgcttcgccggaagcaatgcgagggccctgccccggtggaggcgtctcggcgtcttttgccccgagcttcaacggctcccgcgccatgatctggccggcaacagtaaattgcacgagacggatccgcatttcattcatccaaacagccaaaacggggccgttccgcgcaggcgacagggctacgggaggaatttgctatgctagccaggcggttgaattgctgcccactttgtaccctgaaatcgtggtccgagacgcacggctcgaggactgctgggaagtggctgacactcactgcagctcgttctttcctggttacaagttcccgttggaccttgttctccggattgatcgttacattgctctcctctctggattttcagttccacccgggtgcatgaggacttgccttgtggccgtcaattctaattctgtaaatagtagtttcaacatcgagtgtggagatgctacagatgccaactttgagaaatacaatctcagtagaggctccgtagctggcattcttacacttgatacagtggcagactatcttccgagaaggggacccctgaagcagagaaggacaggtattgcgtatatagcaaacgtcgcggtgcggaaggaggagcgacggaaagggatcgcgaagatgttggtccaagaagcagaggctcgggcaaggagctggggatgccggtcgatggcactgcactgcgacgtaaacaacgtggccgcgctacgcctgtacagaaaccaaggcttcaagtgcatacgagtgccggaaggagctaaatggcccgaacccaagatagctaaaggagcggagtacaacttcatgatgaagctagtgcccaaggcttgagtcttgaaccttataagatctgactagggaaaaaaagggaaaggtttggccgtgtaggttctgcacggatgcacgatttgctctccattcatgtgtacagcatttggtgtatagtggaggctactttgtaaatggtatatataacagctacgtgttggtccatagtgagtgactgagggtgtcggtgtttaaaccatccccagtccttgtgttgttgtgtttatgttcttcagattctacaaggttccagccagccagaaggctgctggggcgaactgccagttctaaattgtcttttttttttgctggagatacagaccggctgtcatatacggctggtttgataataaaagaattaaagggatatatgagggagg

SEQ ID NO: 27654 - DNA, 399 bp, Zea mays
  Clone ID: MRT4577_125235C.1
ctcatctcgacagcaacctagccgacaagatgagagccaaatggaggaagaagcgcgttcgccgcctcaagcgcaagagaagaaagacgagggctcgctccaaataaactactcgcccctcaatctcagctgccaccccaattctgaacgataacgatcaatgaacgaaacgttgtctacgcactacctttccgcccactcgcaattgctggccgccgcttttcgctacttcggttcaccgggctacgtcattcggcagacacgcgacactgcgagcttgtaagctaccaccatggaaggtcacgcttgtgccggattgaggatcatcaaggctgctggtcaactacacgttgaggtgctcgagagtttacttgactcagatggtcactctaacaccgg

SEQ ID NO: 27655 - DNA, 807 bp, Zea mays
  Clone ID: MRT4577_125236C.1
ccggccgggatagcgttactcgacgatcaatgtacacattgcccgtccgccccaccacatccagcatcgtcgccagcctcgccacccccgcgccgtcctcctcctccggctccggccgccccaggctcatccggaacgcccccgtcttcgccgcccccgccaccgtcgtgggcatggaccccaccgtcgagcgcttgaagagcgggttccagaagttcaagaccgaggtctatgacaagaagccggagctgttcgagcctctcaagtccggccagagccccaggtacatggtgttcgcctgctccgactcccgcgtgtgcccgtcggtgacactgggcctgcagcccggcgaggcattcaccgtccgcaacatcgcctccatggtcccaccctacgacaagatcaagtacgccggcaccgggtccgccatcgagtacgccgtgtgcgcgctcaaggtgcaggtcatcgtggtcatcggccacagctgctgcggtggcatcagggcgctcctctccctcaaggacggcgcgcccgacaacttccacttcgtggaggactgggtcaggatcggcagccctgccaagaacaaggtgaagaaagagcacgcgtcggtgccgttcgatgaccagtgctccatcctggagaaggagggcgtgaacgtgtcgctccagaacctcaagagctaccccttcgtcaatgaagggctggccggcgggacgctcaagctggttggcgcccactacgacttcgtcaaagggcagttcgtcacatggggagcctcccccaggacgccatcgaggcgcttga

SEQ ID NO: 27656 - DNA, 1195 bp, Zea mays
  Clone ID: MRT4577_125237C.1
cattgggtacctcgaggccggccggggatgccttcctcgtgagtgaagcgagtggcacgctggcggatgaggcgtcgggtggtccgtatctatcggcccagccgaggcgcgcgacggcgtcgccgctctcgcatacgggctgtaacggtcttgcttgttggcacgcgtgcgtccttgtgtataagttggcagaacagagcacaaacgcgcgcgcttgtagaatgcccgcctttcccgtccgtgcctccgcttcgtccagcgtcgtcggtagcctcaccggtacccgccgccccaggctcatcaagaacaccaccgtcatcttcgccaccgccccctccaccctcgtggccatgggcgacgccgtggagcacctcaagagcgggttccagaagttcaagaccgaggtgtatgacaagaagccggagctgttcgagcctctcaaggccggtcaggcccccaagtacatggtgttcgcctgctccgactcccgcgtgtgcccgtcggtgaccctgggcctgcagcccggcgaggccttcaccgtgcgcaacatcgccgccatggtcccggcctacgacaagaccaagtacaccggcatcgggtccgccatcgagtacgccgtgtgcgccctcaaggtggaggtcctcgtggtcatcggccacagctgctgcggtggcatccgggcgctgctctccctccaggacggtgcacccgacaacttccacttcgtcgagaactgggtcaagatcggcttccctgccaaggtcaaggtgaagaaagagcacgcctccgtgcccttcgatgaccagtgctccatcctggagaaggaggccgtgaacgtgtccctggagaacctcaagacctaccccttcgtccaggaagggctggccaaggggaccctcaagctggtcggcgcccactacgacttcgtgtccgggaagttcctcgtatgggaaacttagccacccgccgctcagctagcgcgcgccttcgtcacaactcctatatcttcataaatatatatatccacgtactacctatatatacctaccgatatgtgaatgcgaggagtactattacctgcatgttttcagcagtatgcagctacgtacatatatatgtaccggatcgcctaacgacgtgaatgtaataagcaataacattttctaccgcttttttttaaaaaaaaaaaaaataa

SEQ ID NO: 27657 - DNA, 522 bp, Zea mays
  Clone ID: MRT4577_125238C.1
cccacgcgtccgcccacgcgtccgaaaaaaaaaaaaaaaaaaaaaaaaaaaaaaaaaaaaaaaaaaaaaaaaaaaaaaaaaaaaaaaaaaaaaaaaaaaaaaaaaaaaaaaaaaaaaaaaaaaaaaaaaaaaaaaaaaaaggggggggccgtttaaaaaaaatcaaattttactaacccgtgtttgcaatttaataattttttttaagggcaactaaatttaatttctttggccgggttttaaaaacgtaaaaattggaaaaaccttggttttaccaaattaaatcgctttgaaaaaaatcccctttttcaaagttgggaaaaaaaaaaaaaggcccctaccaatcccctttccaaaaatttggcaaacttaaatggcaaatggaaccccccttttaccggccatttaagcgggggggggggggggtttaccccaaatgttaacctttaattttgcaagggcctataggcccgttcttttgttttttttcctttcttttttcgcaactttcccgggttttcc

SEQ ID NO: 27658 - DNA, 1046 bp, Zea mays
  Clone ID: MRT4577_125239C.1
cattgggtacctcgaggccggccgggatccatccatccatagatccctcacctcactcactcgtgaagaaccagagaacccacccaccctccttcatctcctacatccacatctatccaagaaggtccgttctctcctccccgctcccctcagcaataatctccgcacggcaacctcgctcctccgttttggttttcctctgtgtgccatgggcgacgccgtggagcacctcaagagcgggttccagaagttcaagaccgaggtgtatgacaagaagccggagctgttcgagcctctcaaggccggtcaggcccccaagtacatggtgttcgcctgctccgactcccgcgtgtgcccgtcggtgaccctgggcctgcagcccggcgaggccttcaccgtgcgcaacatcgccgccatggtcccggcctacgacaagaccaagtacaccggcatcgggtccgccatcgagtacgccgtgtgcgccctcaaggtggaggtcctcgtggtcatcggccacagctgctgcggtggcatccgggcgctgctctccctccaggacggtgcacccgacaacttccacttcgtcgagaactgggtcaagatcggcttccctgccaaggtcaaggtgaagaaagagcacgcctccgtgcccttcgatgaccagtgctccatcctggagaaggaggccgtgaacgtgtccctggagaacctcaagacctaccccttcgtccaggaagggctggccaaggggaccctcaagctggtcggcgccactacgacttcgtggtcgggaacttcctcgtatgggaaacttagccacaccccgcgctcagcgcgcgggttcgtcgtaacacttctatttcttataatattatatccactacctatatatacctaccgtatgtgaatgccaagaatactattacttgcatgttttcaacagaatgccgctcgtacataataatgtaccggatcgcctacgacgtgaattgtataagcattatattttctaccgcttttttttaaaaaaaagaaaaaaaaaaaaa

SEQ ID NO: 27659 - DNA, 1601 bp, Zea mays
  Clone ID: MRT4577_12523C.1
ccggccgggaatagaacacagtaggacgcgcattcccgggctggctcggcttctccatccagagtggatcgggataataagcggcaggacaccgtcatggctgcgccggcgacgccgaggccgtcgctgatcctcccacgtgcctcctcgcactcgcactcccaacccagcgccggcgggctcacctcttaccgcgtcaccgcctcccaccgccggcgcggcgatttcgttttcgtcgtcaaccccttgggcgccaatggccgcacgggaaagcagtggaagcagttgctgccgcttctccgcacccgcctcgctgaccagtgcaacatttgcgagtgcatcacttcgggcccatcccatgccatagatgtcacaagggaggctataaaggatggggttgatgccgtgatagctgttggaggtgatggtacacttcatgaggtggtcaatggtttcttttgggaaggaagtccagtgtgtgctctggatcgagggcctgatcattcgacggcgctgggtctcattccacttggaactggctcagattttgctcggacatttggctggacaaatgatccccatgacgcgattgatcgaattgtgagaggagtaaaatcaaaactagacgtaggcgtgatggagggtccaaacagagaaccacacttctttgttaatgttgctgatatccatttgagtgctaaggcaggttattttgcttctatgtataagagttttggtaacttatgctatgtatttggagctttaagagccttttggggacataataatcaagatatgagaataaaggtaaatgggggagaatggagaactgttcataacgtcacagccctgtgcatagggaatgccaaatacttcggtggtggtatgaagataactccaacagctgatccgtttagtggcaaccttgaggttgttattcttcaagatttcaaatggtacgactttattctgaagctacacaggctctatggaggtacacatctatcagtgaatggtgtttcgtcaatgagggtccaatcaattgaagtagcagaggtggcggctagcggtggcgtctttgtgcaatctgacggagagcatttcggctttctgccgaccaagttttcagtccttccccgtgcagttgatttcttctgctagatcagcaagtgggctgcattcatcccctgcgcatgagacaagttctgccgtgctgtagcactccgccatgtaactataatttagccctgtcatatcgaatgtttgaacctccattccgggtattaaatgtagtcgaattataaaactaatttctcagccgaagattaaaagacgagacaaatctagtccagttggttgggtcaaaaaagaaaaaaaaaaaaaaaaaagcggcctgaaaactccagcacgggtatacaatggaatatgtactcctataaggtttaagtgttactggcaaaatatccctattgtgccagaaagacatattataatgatgtatcttatcgatgaataatccctaatggattccaatctttgatgagcttttgttaccccatcatagatattgcaatggatgaacgtccggagtgatatgtccc

SEQ ID NO: 27660 - DNA, 384 bp, Zea mays
  Clone ID: MRT4577_125240C.1
ctcgatagtttacatggcttgccaccctcctactccgccgtcgccgccgccgccgggtatggggggagtgcaattccaccggggcataacgaactaatccatcctcaaggagctgaaggacctgcagaaagacccccccacatcatgcaccgcagcccctgctggtgaggacatgtttcattggcaagcaacaattatgggaccacctgacagtccctatcctgccggcggttacgtagtgaaattaaggtcccgggagactaccccttcaaacctccaaaggtttctttcaagacaaagggcttccatcctaatatcaacagatatggaaatatatgccttgacattctcaaagagcaatggagccctgctctaacaatttct

SEQ ID NO: 27661 - DNA, 964 bp, Zea mays
  Clone ID: MRT4577_125241C.1
gtccttctctccaccttgtccctcccggagaaccagaaggctacccaccctccaaggcaggggaggggccatggacgaccccgtcgagcgcttgaaggacgggttccacaagttcaagaccgaggtctatgacaagaagccggagctgttcgagcctctcaaggccggccaggcccccaagtacatggtgttcgcctgctccgactcccgtgtgtgcccgtcggtgaccctgggcctgcagcccggcgaggccttcaccgtccgcaacatcgccgccatggtcccagcctacgacaagaccaagtacaccggcatcggctccgccatcgagtacgccgtgtgcgcgctcaaggtggaggtcctcgtggtcattggccacagctgctgcggtggcatcagggcgctcctctccctccaggacggcgcacctgacaccttccacttcgttgagaactgggttaagatcggcttccctgccaagattaaggtgaagaaagaccacgcatcggtgccgttcgatgaccagtgctctattctagagaaggaggccgttaacctgtccctggagaacctcaagacctaccccttcgtcaaggatgggctggccaacgggacgctcaagctggtcggcggccactacaacttcgtgtcaggggagttcctcacatgggacaataagcagccatcgtgaatctatatatatacactacatgatgcatgttcgtattcagcatgcagctacatacatatatatataccggatcacccaatgcaatgtgtgaatgtgtattgtgtaataagcaataccatatattctaccattctaccgctttttattttcttacgccgagcattcatgtactgtgtattttatgatgaccgccctgtgctagtcaaaagacatctgctatatataatcatctttggctagaaaaaaaaaaaaaaaaaaaaaactgcccaactg

SEQ ID NO: 27662 - DNA, 618 bp, Zea mays
  Clone ID: MRT4577_125242C.1
aaacagtggcagcaatagtatgtttgatgtcttatggtgcttgacctatatggagcggcttatatcaaaaccattgttgatgattgacgacagcgtcatatatcaccatttctagctgaatacatgttatcagaaactgttgcagtatgtgaagacgcatgttttcaactatacaggatacaacaagtggtttggatgcacatattagctgtatcacgcttgctactgcaataaccatgattagtagtactaaagctacctttaactgatgttgttgctgaaaagatatggttacaattgctacatgagccaaggatagcagatgttgttggctactttgatgatgaaagacgctttccatattagctagttgtagcctataagctctgacagttatttgttcaaaggctattgatataacctggtgggaggaactgtagaataatggaactattaccttgagaccattgtggaataatgaacgtattggttattctcgacaacaagcgataacacgcttggagggattatatgttgttagccattgctgctatgttgatactaaagcgctgctgttggtgtgactctgaacgctcaaaaattataggagattcttac

SEQ ID NO: 27663 - DNA, 1300 bp, Zea mays
  Clone ID: MRT4577_125243C.1
gacatgccaaggctcaagtgtgtcaaccttgcacgtacatgtacgtcgccggttccgttccgtccaccgggcagcacaataggcttcagctagcgctgggccgtgcaaaccctaaccgcccaccgcgccatggatcggcatagagagttcgtggccagcggcggagcgctcgtaaacgggacggcgggcagctgaggagtcaaacgagagagagatcgagagagaaagggagggcatccacacccgccggcggcgataagaggggaggagagagaggccagagaagaggaggaggagaagaagaagaagatgagcagctgcctctgccttccgaaaaaaaaggaggggccagcgaaggagaagccgcccacagatacccccacctcgtcactccttcagaaccagaagccctcccaacctccacctcctccctccaaggcttcctccaagagcatggaccccaccgtcgagcgcttgaagagcgggttccagaagttcaagaccgaggtctatgacaagaagccggagctgttcgagcctctcaagtccggccagagccccaggtacatggtgttcgcctgctccgactcccgcgtgtgcccgtcggtgacaccgggcctgcagcccggcgaggcattcaccgtccgcaacatcgcctccatggtcccaccctacgacaagatcaagtacgccggcaccgggtccgccatcgagtacgctgtgtgcgcgctcaaggtgcaggtcatcgtggtcattggccatagctgctgcggtggcatcagggcgctcctctccctccaggatggcgcacctgacaccttccacttcgtcgaggactgggttaagatcggcttcattgccaagatgaaggtaaagaaagagcacgcctcggtgccgttcgatgaccagtgctccattctcgagaaggaggccgtgaacgtgtccctggagaacctcaagacctaccccttcgtcaaggaagggcttgcaaatgggaccctcaagctgatcggaggccactacgactttgtctcaggagagttcctcacatggaaaaagtgaaaaactagggctacggcaattctaccggcccgccgactcctgcatcatcataaatatatatactatactatactactacgtacctaccgatatgcacccgagcaatgtgaatgcgtcgagtactatctgttttctgcatctacatatatataccggatcaatcgcccaatgtgaatgtaataagcaatatcattttctaccacttttcattcctaaaaaaaaaaaaaaaaaagcggcc

SEQ ID NO: 27664 - DNA, 1623 bp, Zea mays
  Clone ID: MRT4577_125244C.1
aatctctacatgcaagctggcagtgagtatgtcagacagatttctaagattctgaagagccaggttacgatgttgacatccacatcatctacatctttgccggaagaaatgttcacatgcactctagaactgcaaagttcttgcaaaggtcataagagagattcaatttctccacaatatttgaagccagggactggtgaatctcaactctttcactgaaggagtttgtatttggacaaatttgaaaagcagcaggatgaaatcatcaggtggtggcctctatatcttgatgatcaagattgtgtcggaaaagttcagcttggtatgaatttatccatgtcttccaataactatgggtccgaaaagatgctgcaaggtggccctgcagtggataccatcatatatgacatggttctggaagcggcaatgagggctcaaaatttcaacagcaaaatgcttcatatcaatggtccatggatttggctgttggacgagttttctgattactatggaatatctgatgcatatagaaaattgaggtacttgtcttacatcatgaacgtggcaataccaaccaaggattgtttggaacttatatatgaacttatcgttccagtcacaaaagcacgagaagatagaactttaacaagacaagagcgaagtattttgatagactgtgaagatcggattaagagtctccgtgcagctctgtttgaaaattacaaatcactggatgaatattctccaactggcttgtcagatttatttggccccataacagattctgctgcaccagctttggcacctgctgttcagatattcagtgtactgcatgacattctctccaaagaagcacaagacatacttaggaactatttgcagattgctgctgcgaaaaggtgcaggaggcatatgatcgagacagatgaattcttatcaagcaataacgacagtcttcttacggaccctatgactatatctgctgcatatcttaaaatgaagacattgtgcattaacatgagtcgtgaaattcaagctgacattaagattcacaaccagaatatacttccaagttccatagatctgccaaacatagcagcatccctatatagtaccgaactctgcaagcggctgaaaggttttctttcttcaagtcccccatcaagaccagtacaacatgttgctgaactgataaccgcaacttctgagtttgagagagatcttgaatcttggcaagtgagacctgttcatggcggcgtaatttcgagacagctctttcatgactacatcatggtgtggattgaagacactcgattgcagttacttgataattgcaaagctgagaagatatcatgccctgccgtgtcaacagtctcgccatttgttgagcaaatgtatgagcaaataaaagagagcataaatgagtatggagtggttatcaatagatggcctcaatatctgatgagtttagagagtgctgttgctgatgttgagagagaaattatgaaggcactggagaagcaatacatggatattctaatgcccctaagagatggcataccagaaaaaattgagaagcaggtccagagattaacaagaagacaatctatagctccctatgtt

SEQ ID NO: 27665 - DNA, 349 bp, Zea mays
  Clone ID: MRT4577_125245C.1
gattcttcatctcctgtattccttccccacccgtctccttttcccttttggaatttttttcctttctttctttttcttttactcaaagcactcattttttattatcaatttaaatcagaaaagaaaatcttgtgttgggttaaaaaaaaaaaaaaaaaaaaaaaaaaaaaaaaaaaaaaaaaaaaaaaaaaaaaaaaacggggtaattaattcaaataacgtttcctgcccgggatttaatttttgcccatatccgattttaattctataccttttccttatattggccctagctttcccttgggctatatttttctcatctcatatttccactcaaaatgctttcccc

SEQ ID NO: 27666 - DNA, 374 bp, Zea mays
  Clone ID: MRT4577_125246C.1
cgacaatcgacaacccttttctcgcccaacctccgttctccacgagaaaaccaatatttcagaaaaatggcgaaggaacgttccggtctcgttgtcggcttgaataagggtcacaaaaccacccctatcgagaccaaggctcgcatcagccgcaccaagggccgtctctcccgccgcaccgcctttgtccgcgacatcgtcaaggaggtcgctggtctcgccccctatgagcgccgtgttgtcgaattgttgaggaactcccaggacaagcgtgcccgcaagctcgcgaagaagaggctcggtacaattggccgcgccaaggccaaggtcgacgagatgcagaaggtcatcgccgaagccagacgggctggtca

SEQ ID NO: 27667 - DNA, 480 bp, Zea mays
  Clone ID: MRT4577_125247C.1
aaaaaaagaatcttcttatttaactttgatcttgtatcaacaaattttatattccaacaggagttgtatgaaacaatacattggcacactctatgtatatatcaagagatacagagagagagcattctgctctcaaatgaattttttgtcttcctggttccaggggctaacacctatgcagaggaagctaaagggggcgattctcatgatctccaggggctttggattccctcattcgtaatgggcagcaagcaaggaagaataaccagcagggattctctgttttatcataggacgaccacgttcatgaatttcctcttggcgaatgcaagccaccatttatttggtgtcccgttggctctatatgctacactcagtaacctcccacttgtctcctctcgaacctgcttaagatagttcctgaaaagctctgcttcgtcctgggactgcggaagcgaaaagagacctgggaaaggaaag

SEQ ID NO: 27668 - DNA, 275 bp, Zea mays
  Clone ID: MRT4577_125248C.1
agcccatcggttcgttggaaaagatcgcaaggaccaagcacgggcaccccggcggcacgggaccagcagggacgtgcacaacacacggggcagtaccagcgaggccgcagggtgttggctgtgcaactccagccgggggggacagacgtaaatcgctagcactgaccacaagcgcaccccggaggaccactaccctagggctccgatcacgatcaacaccctgcgatggcacgtgcagcgccggacggcgccaccttgagcgaaagctgcggggc

SEQ ID NO: 27669 - DNA, 252 bp, Zea mays
  Clone ID: MRT4577_125249C.1
agaaggaaattttcctcccccggttaaagggtaaaccccccccccaaaaaaaacggggaactggaaaaccttcaaaagaatatggggggaaaacagtctttaaaatctattcttgcccaaaaaacggggtttcgaaacaaattttttgcccttttccgacctttaaaccatggggggggggggtgggtacccccccaaaatctcccaaaattttttactttttttaggcttttccaaacccgaaaaattttt

SEQ ID NO: 27670 - DNA, 273 bp, Zea mays
  unsure (1)..(273): unsure at all n locations
  Clone ID: MRT4577_12524C.1
ccggacccggaagcccggggcgacccacgcgnccgaaagaaaccaccgagccccttacaaagaaaaanagacaagcagaaccggggggggaaagaaagagacagcgaggcacccagaagaccgaagacgcggcaggcaaaaagcccaacgaccaacgcgcagccagcaacgggaacggcacacaaaacacccanccaacggagccaaacaaagaagaccggcaagagagcagaaaccgagcacagaaagcgagacaccacaagcgaggagaca

SEQ ID NO: 27671 - DNA, 736 bp, Zea mays
  unsure (1)..(736): unsure at all n locations
  Clone ID: MRT4577_125250C.1
gcttcccctttcctcatctccaccccatccctcgccccccgcctcgcgcagcggctagggttcctcccgccacgccgccggccagcagcagcagcagatgccgcccgccgccatggcgccgccgcaggccccctccgcaggggatccgctctacgacgagctctggcacgcctgcgccggcccgctcgtcaccgtcccgcgcgtcggggacctcgtcttctacttcccgcaggggcacatcgagcaggtggaggcctccatgaaccaggtcgccggcaaccagatgcgcctctacgatctgccctccaagctgctctgccgggtcatcaacgtcgagctcaaggcggaggcggacaccgacgaggtctacgcgcaggtcatgctcatgccggagccggagcaaaatgagatggcggtggacaagtcgacctctacgacgggcgccacgcctccgaggccggcggtacggtccttctgcaagaccctgacggcatccgacaccagcacgcatggcggtttctccgtgctgcgccgccacgctgacgagtgcctccctcccctggacatgacccagtcgcctccaacacaagagcttgtggcaaaggatctgcatggcatggactggcgcttccgccacatcttccgcgggcaacctaggaggcatctccttcagagcggntggagtgtgtttgtcagttccaaaaggcttgtaactggggatgccttcattttcctc

SEQ ID NO: 27672 - DNA, 313 bp, Zea mays
  unsure (1)..(313): unsure at all n locations
  Clone ID: MRT4577_125251C.1
ggctgacagagtcatcctatcatcatgtcatctccactggccccgagccccgatgcggctctaccggtcgtcgtgtcgtccctgcggcggctcggcggnacanncgacgaggccgnctnctgtacagccacatttattctacagccacattatgagaatatgtagatatatgttggatgcggaggtccaaaaaccgcagctttcagagttgccaataacaaatgggttcagaatgaacgaggaaactacatggctgtgcataaaaacattccacaagccaagaattgccgtgaggcgagtggccctagcccag

SEQ ID NO: 27673 - DNA, 1848 bp, Zea mays
  Clone ID: MRT4577_125252C.1
atgagacttcgattgtggaggtggacgttgcttcctcagccaatggtgaggtgaagatgtcactgaaatgcagcgtgggttcttcaaatttcagcattagtatggaggaggtttttaaaatggtggaggaaaagtgccttcactcatacaagatgctaccttcagatctttctattggcaagctgctgagtgaggtatgccaatctgttgtgcagttgggcactatgcattctgaggttaatagggacagtggcagcttgcataatgaagtagttgctccatttgtgaagccaatctcttgtgaggctgctgtgggcataagtgatgatgtggctggtgggtcatcagtgcttgaatcctcagaaccttgtttgcagaattcgcttgttgcttggtatcctgagttggctcattgtaagcaaaagacaacccatgataccactgatatatccaaaggggaagagcgggtaagaatacctttagtaaatgaatttggcagcgagtaatgtcctccatccttttattacgtgccaagaaatcttgtcttccaaaatgcttatgttaacatctcgattgctcgaattggtgatgaagattgttgtgctgattgttctggcaactgtttgtcatccttagttccatgtggctgtgcaagagtgacggggggcgaattcccctatacaccagagggcctgcttaagacagaattccttgatgaatgcacctcagttaatcatttcccacaagagcatcataggttctactgtacagtttgccctcttgaaagatctaagaataaagcctcacctggtccgtgtaaaggccatcttatgagaaaattcattaaagaatgctggagtaaatgtggatgtggcatgcagtgtggaaatcgtgtgattcagcgtggtataacatgcaaattgcaggtgttctttacacgcgagggcaaaggctggggagtacgcacagtagaggatctcccaaaaggttcctttgtctgtgaatatgttggagaggtactaacaagttctgaattgcacgaaagagcaattgaaaatgcaagaaatggtaaacataagcatcaagtactcctggatgctggttggggttcaggtgtattgagggatgaagatgcccttagccttgatggttcattttatgggaacgttgggcgatttatcaaccacagatgctatgatgcgaatttagttcagatccctgttgaagttgagacgcctgatcatcattattaccatctggcatttttcacgaacaagaaagtagaggcatttgaagagctaacatgggattatggcattggttttgatgatacggaagggcccagtaaaccattcagatgcatgtgtggaagtagatattgccgcgatccgaataatctgaggaggatggctagagcagctgcaaagcggaagtaggcggggaagctgaacttggttggagattagcacatcaacttttgctgtggtatttggttccgtatttgatgtgcagcagcatcacatcagttagtacttagtattagtgtagatagatggagatgagggcggatgttttggacccttgcccgtggctgagcaacacgattgcgaccttaacctacggcatattggcatgtaaattagcctgggattgagtaggcgtagaaagaacgcgtaatagtacttagttatgtcatgtcatcttggtagagggcaagttaaattacatgccatgtcgttgcatcatctatgccatgctgggttggatgcttgtgctgaatgatttgttgaagcgactagcctaggcacttgtttttggcggtatcttctaaaaaaatttcttccctat

SEQ ID NO: 27674 - DNA, 610 bp, Zea mays
  unsure (1)..(610): unsure at all n locations
  Clone ID: MRT4577_125253C.1
anaaaggtaaacataagcatcaagtactcctggatgctggttggggttcaggtgtattgagggatgaagatgcccttagccttgatggttcattttatgggaacgttgggcgatttatcaaccacagatgctatgatgcgaatttagttcagatccctgttgaagttgagacgcctgatcatcattattaccatctggcatttttcacgaacaagaaagtagaggcatttgaagagctaacatgggattatggcattggttttgatgatacggaagggcccagtaaaccattcagatgcatgtgtggaagtagatattgccgcgatccgaataatctgagtatgttgccattttcaatgcataaaagtatgaaacggggaatcatgtatgtatgattgtgttttggcagggaggatggctagagcagctgcaaagcggaagtaggcggggaagctgaacttggttggagattagcacatcaacttttgctgtggtatttggttccgtatttgatgtgcagcagcatcacatcagttagtacttagtattagtgtagatagaatggagatgagggcggatgttttggacccttgcccgtggctgagcaaca

SEQ ID NO: 27675 - DNA, 675 bp, Zea mays
  Clone ID: MRT4577_125254C.1
tttcgaccccatccacttctcacctcaatctcgcgagaagcgaagccggaggaggagggtgcgaggagatcgcgagcagccggagccggagccggagccggaggcctagtagatgaagacgttcgatccgtggccggtcttcttccgccgggagtggaagcgcaattggcccttcctcacggggttcgccatcaccggcttcatcatcactaagatgacggccaacttcaccgaggaggacctcaagaactccaagttcgtccaggagcacaagaagcgctgaccaaccaggtgaaccccccgatcaagtccgcttctagatctcggccgccctggttgacgcttgtgtgcgatgcccctgcgctaggggatgggcgcaatgtttcggcgatctgttccggtgatgggtgtcagtgtcactggcgctagtgttgccacgcggttcattttttccctttagactacccttagctagcctgtatcgatcatagttcataataccttccgttgatgccattgctgttagaatttgccgattggagtagcacggatgtttcagatagatttccatcatcgagatttttgcaattttggcactctaattgggcttcagactattggcatcgcgaagacgacaattgctttgctggcattataatcacacgccctttgaac

SEQ ID NO: 27676 - DNA, 387 bp, Zea mays
  unsure (1)..(387): unsure at all n locations
  Clone ID: MRT4577_125255C.1
ctaaccgacgggnggacagnaagcctcctcgttaagatggaatccagccagngccagggccagtctccagtctccacccaccgttccctcccctcccctcccctcctntcccctcccctgtcgagtccggttgtccccacgacccccacgccacgcgcttttttccgntnctngnnaaggnaaaaggggggggggggggggangcgcccgncagtttggnggggggctagggatccatggacaagtatgagttgtttaaggacattggttttggtaatttaggggtggtgtggtttatgtggaataaggacattaaggagtttgtngttatgaagtatatanagaggggggttaagattgatgagaatgtggtgagggagattataa

SEQ ID NO: 27677 - DNA, 495 bp, Zea mays
  Clone ID: MRT4577_125256C.1
cctcgaggccggccgggccgggccagccaggtgcaacccctcggtccgcaatccgcttcctccgcctccgcagcacccaaacctcaaacctcgccatccccacgcgcactgctgcgcccccgcacgcgcgcctccgctgccacctttcccgctccagtgattccactccaccctcaccccccaccacccccgaccccgaccccgaccccgaccctgaccctgaatccgaatccgaatccgaagataccctacgcttcgccttcgcgtgtggtggcgcgggcgccggtggtcgcgtttactccgccatcgcgctcgccgacgagcttcacgcctcgctgccgtcctctcgttccctcattatcggcgcgcccgccccgtccttagagtcctcagctgccgccgcggcctcgtacccgttcgaccccgtcccactgcactgccctccgcgcgggatcctcgccgcggggctgcaactccgccgattccgccccgaac

SEQ ID NO: 27678 - DNA, 345 bp, Zea mays
  Clone ID: MRT4577_125257C.1
gaaagcccaaataaaaactgttggtttataaaaaaaaccccggggaggaaaataaggggcgacatcgcgggtgtgtttggtacctgggggggccggcctaaagtttccctccccccctatgccaaactggaaaaaattgaaggggggcttctttgtttggtaaaagttttagacccctgtacttcagggctgtttccccaatttttttattgggccccccgtgccgggcagtaaattaattttggtgggccaggtttttctttccggcccttttggggtttttttttccccccacccgtggagaggggtcgggggggggggacaccttttccttggaaggggggg

SEQ ID NO: 27679 - DNA, 364 bp, Zea mays
  Clone ID: MRT4577_125258C.1
gagctcactattcgtgttggccgcccttttttttttttttttgggctgggttcgaagatacctggagggagtaccgtccccagttcaaaccttaccaccgtactctagaaccctatggacggaggtccgcggtgaacgagggcgtcccatggatcgtggaccttcctttgagggtgtggcgggaaacaccgctgccgagagtattatccctccggccctctagtgcaggtccacgtgtacgctatccggctgggcacactgtgctgagcatcccgaccacactagctgaccaaaaccggcagcgcctgaacgggtgagacgggaacgtgaacttaaccgggcatttatactctttcaccaccgt

SEQ ID NO: 27680 - DNA, 270 bp, Zea mays
  unsure (1)..(270): unsure at all n locations
  Clone ID: MRT4577_125259C.1
cccacgcgtncgaccacgcgtacgaccacgcgtccgcccacgcgtactgccacgcgtacgtgatgcacgacttcctgatatatcatggtatatgacaatgctgtctccgcgcttggaaaatatgccagtttcatccggatggtatagacgcacctcaggctgttccagactggcttagctgcttgcctataatagaccacacggttgaagctaatgtagtacatgcacagcttggctccatggtgcagaggtcggatgctgaaattcttg

SEQ ID NO: 27681 - DNA, 732 bp, Zea mays
  Clone ID: MRT4577_12525C.1
attgggtacctcgaggccggccgggaggacaattcccggaggtctgccccgcgaccgcgagtccctcccttcctgcctccccccgcggaatcgtgagggttcccaaatcgccggagttgatcctgccgtgcgggcgcgcggtggttagggctagtctgtctccggaaatggacgcccccgattccggcggtggcggctcggcggatgccggcgagcctatctgggactggggcaatctcctcgacttcgtcgtccaggatgacgactccctcatcctcccctgggatgacgccgccggcatagcagcatccgaccccaccgaggccgccacggcactgctccccgcctcgcccccgcttccgcagtcggtggaggaggagccggagccggagccggaaccggggccagtgcttccgccgccccctcttcgggttcaggggatcgggcgccgcgtcaggaagcgggacccgcggctggtgtgcccgaactatctcgcggggatagtcccatgcgcgtgccccgaggtggacgagatggtcgccgctgccgaggtggaggacgtggcgacggagttccttgctggcgcgcggaagaagactaagactgctggtcgccgtggcaaaccggaagctgcaggtactgccggaggaactgtccgcgcggcggtggcggagatgaactgccaagtgcctgcctgtgaggcggacctacgggagcttgaaagggtaccat

SEQ ID NO: 27682 - DNA, 507 bp, Zea mays
  Clone ID: MRT4577_125260C.1
gggggggggggggacccaaccaaaataccgtgttacttaaaacgcgtgccacgataatattgtgcaccaacaaaaggggctaacgcgggtacaccgcgaccaccaccataaatcgagcgagcgactgggccagccagccactgcagcggaggggggggggtgacacaaaccgcttagtccacctcctcgatcgtggggccaggggcaccggttccagccgggagcgtgctcgtgcatgccgccgggagcctcccatgtggggacccgcgccctggtacatcttggggatgatggggttgcaaaggctctccagctccttcatgttgtgatcgaactcgtgccccttggcgagctgggtggggtgcagccagctgatggccgcgtcgatggggtgctccatctttttcttgtggtggggaggcagcttggacgcgatcttctcgtcctttatcgtgttgcgcatgttgtaggcgtagttctccagggagtgcttgggatccacctttt

SEQ ID NO: 27683 - DNA, 248 bp, Zea mays
  Clone ID: MRT4577_125261C.1
acaagcccaaattgcgttcaggcaaatggacaggagatttatatgttgataccggattaaaccggtaaaaggccttgttgacaaatgacaagtgattctaagcctgtcttgattcaaaagaggccgaaacctatctggataactccttaagagccttgatgcaggagacaactatggggtctatcaacttgcgttgtatactggtcttcagcccttatctggggggggtgagggagttggcctgatgg

SEQ ID NO: 27684 - DNA, 252 bp, Zea mays
  unsure (1)..(252): unsure at all n locations
  Clone ID: MRT4577_125262C.1
gggaaccggtnggtagtggctttcgaacctttttctgtgccgagagtgctttcaatattgtgggggggggggagcgcgtgggttcgnttgngcgggcgtggttgacgggaccgtggagtgccgggccttgggtgagttttacccgttggtgtacgggttgctgaaagtatggatcggaggtctggttttacctgagctggtaatgctagtgttaagattgatggtgttgagcgctatacttgatatggggtt

SEQ ID NO: 27685 - DNA, 402 bp, Zea mays
  Clone ID: MRT4577_125263C.1
gcacgggttccacgtcgcgtgcgtcgacacctggctgcgctccaactcctcctgcccgtcctgccgccgccccatcgtcctggacgacccggcgccgccgaagcggtgcctcaagtgcgaggccgtcgtcctggaggccgtcctcgcatcctcctcctcctcgtccgccgccggcggaggccgcggcggtgggggattcttgccgtagcatcagcagtagttggccggttgtttgtctgtgtctgacgggcggggccaggccaggcaggtcctgggtagttgagctgctcccatcagcccgtgaggccatgacccacatgtcattagcgcagcgagtagaagaagatctctctttttgaaaggtagtgaaaacgaagaataaaactagaaagaaactagaaa

SEQ ID NO: 27686 - DNA, 524 bp, Zea mays
  Clone ID: MRT4577_125264C.1
gccagcgtcaaccagaacgcgctgcagatcacccccgacacaggcaacaacgccaatagcttcctcgtcgaccaggcaggccgcgcattctacgccacgccgttcacgctctgggccgccaacgcgtccagctccaactccagcgccgccggcggccggcgcgtcgcgtccttctccacggtgttcaaggccaacctctaccgccagaacacgaccgtcaagggcgaggggctggcgttcgtcgtcgcgtcgggcaacggtggcccgccccccggcagctaccgcgggtacctcggcctgaccaacgcgtccaccgacggcctcgccgccaacgggttcgtggccgtggagctggacacggtgaagcagccctacgaccccgacgacaaccacgtcgggctcgacctcaacggcgtccgctccgtctccgccgtcccgctcgcgccctacggcatccagctcgcccccaacgacactagcagctcgggcgaccagatggtctgggtcgactacaacggcaccgc

SEQ ID NO: 27687 - DNA, 278 bp, Zea mays
  Clone ID: MRT4577_125265C.1
cccacgcgtccgcaaagttatttcataaatttgctcgaatcatctttgattctgggcctggtagattcaacgcatacgcttgtaccaaatctgggcagtctgataagagccttaatcaatcatgcctgctattttctatggaagcagctatgacacatatgccccttcaactctatctacaactgcttcgtcagcaaagacaatcgatgacatgatcacgctctgtaaactaggataaacactttctgaaatacctacagaagtatacaatcagatct

SEQ ID NO: 27688 - DNA, 359 bp, Zea mays
  Clone ID: MRT4577_125266C.1
tttccattcatggattgggatctcaagatgtcggtctcctaggacctccgcgacttcccccgcgacagcgtcgggcattgccgccgcagctgccgcgccttccctcgcgacggcgccgagccgagcggagtgctccgtcgacctcaagctcggcaggacgacaccaccacgaaggagccggtggctgcaaccgcagcgccgtccgccagcccgatgggtcggcgtcgggcattgccgccgcagctgccgagccttcccccgcgacggtgctgagccgggcggagtgctccgtcgacctcaagctcggcgggctaggtatgtttgctctcaggtacccgagaatcagaggctccttgtat

SEQ ID NO: 27689 - DNA, 157 bp, Zea mays
  Clone ID: MRT4577_125267C.1
tccgagcatcactaccacttctcgtgccagttcaccactgacttgatcgtcagtgaaccatgccgacttcttaggtcacggaaacaaggacaccgtcggccagtacgagtgacacatggcgttcacaatgctggttctgtaccgcgttgtctcacgc

SEQ ID NO: 27690 - DNA, 331 bp, Zea mays
  Clone ID: MRT4577_125268C.1
aattcggcacgaggcacctgcctccccctcttgtttacccgaggtggcagcgaggcgcctcgctttcctctttcccccccttcgccccgctgcccccaaccaattttcccgatccggcaccgcgcaatgccgctgcagctgatgccgccgcactactatcccgtcctgctgccgctactggttcttgcggctgtggcgggcgtctccgcgggtggtggcggcgacggatatgtagtggagcggacgaacatcgtgcggggggacgccgacgcgaagccgtagggggacccgacgcacgcgcactggtactaggcggaggtgctggcggtcg

SEQ ID NO: 27691 - DNA, 259 bp, Zea mays
  Clone ID: MRT4577_125269C.1
cagagctatgacgtcatgcagcgcgtacgcaggctcggaattcggctcgaggaaaaattcttcccggcattttttgcaagagcaaatgcggccagggctaggggggactgtaacccagggcgaggacctggacccacccggactaccggaaatgcatcgccgatgttgagtggaacaacagcttggaccagatctaggcatgcctggcctccatcggagtgtggaaaaaggcgactaacacccacttcattgatctcga

SEQ ID NO: 27692 - DNA, 425 bp, Zea mays
  Clone ID: MRT4577_12526C.1
gggaccgggggatttagtgcatgttgcccatacaaattcattgaacgacttttgggtgacaaaaaacaaaaacgggttgttagaaaaaaaaaacccccgctatatgaccgattttcttccctcatatgtaataaagaagttaaaagaccatggtacaccccttgccagaaacctaacatttagagcatgcaatgctggccccttttttatccccactaaaacccaaagtttggggggttttgcaacccaaaaccttgccggccaccatggagggtctttcatcccaagattttttaaatggcgggcattattttttgcaacaccaattttttcattttttgatttactggctggccctcaaagggaaatggtgtcatggggaaaaattaccgaagtgtgttgccccctatttgcaaaagggggta

SEQ ID NO: 27693 - DNA, 238 bp, Zea mays
  unsure (1)..(238): unsure at all n locations
  Clone ID: MRT4577_125270C.1
cggggccagtgccatcccattcccatccgagtctgcagcgctcgacgacggggagaatatcgtggcgtgggcggcgccatgaagtacatcatggaagatatgcccgagagggcgggcggcgccggcgcatggtccatggcggtgccggtggcgctcgtcgtcgtcgtgctctgcgccttctccttctacctgggcggcttctacagcncggnacggaggggtgggggctgcatccatc

SEQ ID NO: 27694 - DNA, 204 bp, Zea mays
  Clone ID: MRT4577_125271C.1
ctcattcgtccgtttggtaacaccaaccgggggggccttttttagaagggttacggtgaaaagctcgccgcttccgacctcagaaactacaagagcgaatccttgctaacgagctatcagcaggcacaggatgtgtacgaccagctcctaatgaaaagagacaggcctcctttgatcaccgaggtcggaacatatcaagggctg

SEQ ID NO: 27695 - DNA, 322 bp, Zea mays
  Clone ID: MRT4577_125272C.1
cccacgcgtccggcgtttcgagacaggggggtccctaagccgacgagtgagtgtgctgggtgccctagcccagatgggtcgagcgcgtgggcgagcgcgaaggggggagaggcgaggtggccggagccgagcgtgaggcaagcaacgcggaccgtgagcacggtgcggagtcggacagcgaggaggagaggaggcgccgcaaggcaaagaccttcggcaagtcgcgtgcgccggagcgcagcagcttcaagggagctgccgccttcaagaagccaaagttcaggtgaatgctgccttcggcaattcgctcgtgccaaagtgc

SEQ ID NO: 27696 - DNA, 680 bp, Zea mays
  Clone ID: MRT4577_125273C.1
cctcgaggccggccgggatgcgtctactggggtatctcaacgtcgccatcctccgtctggtgccgatgtctttcctgcacccttcgcccgggaataacgttcgccaggtgacaggctgaacacgataaccacccaaatgagcttcataacatccgtggtactgtccaacttcgctcgaacatctctgatggaataccactccctctcatttgctaatctgtcacaatgtaagagagacatatgttgcacaaggaactacatgacctcaattctttctgagaccataaatgtctgttaacgtcgacatcaatgaaacagtgatgcaaactccgatctgagataatgctcctgctcagaaactactacttaacttcgttattgatttcatgatgctgggtggttcacctgctgtttcaaagactgctgctgctcccatcgagcgtgagaagctgcttattcataaccaagatgatatgattaaatctggtaggttatcagaaccgtacaaggttattgttgactgcttcaaacgtccattaaagatgaaggtttctcttccttgtggagggccaacactgctaatgatattcgttacttccctactcacgctttgaactttgcatttaaggactacttcaagaggttgatcaacttcacgaaagatagctatgaatattgga

SEQ ID NO: 27697 - DNA, 569 bp, Zea mays
  Clone ID: MRT4577_125274C.1
caccaccagctgacggcggggcaaacgattgggaagggtcgtcgcccgcggggagcagcgaggcggcggccacggtggccacgtcggcggcggtgctgatggacccgtacccgacgccgatcggcgccttcgccgcaggcacccagttcttccctcataaccctagaacctagcttaagttagctagctttgctgcttccattattcgtatcggtgctagtagcttaattcctttgatggttccatttacttcttccaacaaattaaagatgatgatgaacatgagctaagtagtcatcgtcatcgtcgcaatcaaattcgagacaagaagagaagagattttaattgttactgcatactactactacaacgtgcattcgagccgttgatcgatgaacactagtgcatgatcagcaatgtgtggatcatatataatgttattagctagtagagctagtgtactgttacttgttgagcaatcttgttttgggtttcattaataatttggctaccttaatgcaatgcaaagataagaattttcaaaaaaaaaaaaaaaaaaaaacccggga

SEQ ID NO: 27698 - DNA, 372 bp, Zea mays
  Clone ID: MRT4577_125275C.1
cggacgcgtggggtaaagatcatcttgcaataaaaaaaaaaaaaaaaaaaaaaggaaaaaggaaaaaaaaaaaaaaaaaaaaataaaaaaaaaaaaaaaaaaataaaaaaaaaaaaaaaaaaaacaaaaaataaaataaaagaaaacaagaaaaaaaacttatgaaggaacgaaataaaaataatagcaactataacttcacattgccgactatttcaaaccagaaaattttagccggaaacaggttaccacctgagtattagaaccctcctcgaaaagcctacaaacgcaatgccttgtaccaacagctgaagaaaaaacggatttcggacacccaattatatatacccgattcttttagaagcatacccc

SEQ ID NO: 27699 - DNA, 519 bp, Zea mays
  Clone ID: MRT4577_125276C.1
gttaaggggttttttttttttatgatatattatagtttttgttgtgtttcaggaactaaaagttatatttagtaaaaaatgcaacaagagggaaaaaagtggggacacaaacccatttaaaaagaaacctgcaggggaaaggaggcttttaaaccacaccaaaaaaaacccccccatggtaaccaatttaaacaaacccttagactttgggaacaacacctttcccaccaaaggggggattcttgcacatgccaaacggattgcccaatccccacccaaggccttggaaaaatttggggaaaaagggggtgaaaaagccccaaagccccataaatttggtttaaaaacagcacacctaaaataggtggggggtggccaaccagctgggggggctaataaagggggccacaaattttttttatgaatttgccgaaagattggaggagaacttggtaaccttgaggggggtccccaagttaaagggaaaaatttcgagcgggtttttaggggccaactttt

SEQ ID NO: 27700 - DNA, 450 bp, Zea mays
  Clone ID: MRT4577_125277C.1
cccacgcgtccgcccacgcgtccggcaacacatgcggttcaccgaccagactgacgcgcgtctgcgccgcacactcatgcgcaccggagatggtcaggtgggcaggagggcggagactatcgttctccctgtggaactcctgcggtagttcaagcccgcagagtttggcgacaccgaggagtaccaccaatgtgcagttcctgtagatcaagctcctggaggccggacttattctgcacctgtctctgcccctggaccgtcttcactggggcgagctccggtttcgcgaggtcatgcgcgcaactaagatccgagccttcgacaccagctagaactccgacgtcatgcgcgccttaaggatcgccgtgcacgctctgtcttggcgatctggcaccaccgttggccctgtaaaaacgtgccactgggccgacaggtaccctgtcaacgggg

SEQ ID NO: 27701 - DNA, 345 bp, Zea mays
  Clone ID: MRT4577_125278C.1
cctggcgggatcccggcccgagaattccggggtgagaccacacccgtctgcttgcacacgaagcatgctgcatgccagggaggcattccttactacgcacctaagagcctgaccaaccatcaacacctgcaccctcgatgtgcacagaccgggaaccaacgctatctgcattatcaatatgactatggttgggatctctagcattgtatctgtactcttcacagtagggctgacagacgctggaacctgatttcgctgctgtcacgcttagtggtggggtgcacataagagtttatgactagctccaacaaaaacctgtaaaggggtatagtacctctaattaga

SEQ ID NO: 27702 - DNA, 602 bp, Zea mays
  Clone ID: MRT4577_125279C.1
ttatcttaccgagatcatcctcttgcccaccatcctaccagcgctgctcgtgctctcgacccacgccaaaactcccaacgcgatgctaacagagctgaaccgatggctccggtgcggggtgcgcctcctcgcctccggcttcgagtcgccccatccatcttctcgtgcatttgatgccaccgcccggaagacaatgcgagtacatgggcatgatgagccatactacatccatgccaatgacatgaataagttgcacatcatgatccatcacgacttgaaggggacactctccgtgctgctatcggttgacaccctcgttggagttcctgtgaatgcagtcatattccagcagaacaacactggctctgagtgaaatgatgcctatccctgccagcgtatggacacttattttgagcaacattttgttgaagtgacaacatcgtactacatcctatcatgcgtgctcactgatactgcattttcttaccataatctgtaacctcctctcctgcggtgtgatgtaggacacgcgtcttatgtgaatgatgatggtggcttgaactttccaggctgaggagattgacgaacactcatggctgata

SEQ ID NO: 27703 - DNA, 306 bp, Zea mays
  Clone ID: MRT4577_12527C.1
cggctcgaggctcgaggtgcgggaccctgctgcctcaagaaggtgctgttcctgcgcctcggcatctccggcgtcgcggccatgaagatccgccgctccgagtgaggcggggccctggtcgcgccgcgcaggtccgggtcgctgtcggcgcgcctcagcgcgcgctgtccggtggcctggcgccggcgccgcggcggtgtgaggagaaggtggaggtcaactccgccatattccccaagggcccgccggtgccgctcccggttcagaagatggccaggcacatcgacaccaccgaggtgagctgag

SEQ ID NO: 27704 - DNA, 438 bp, Zea mays
  unsure (1)..(438): unsure at all n locations
  Clone ID: MRT4577_125280C.1
acccaancccccccccacgagcccacaggccacacgaagcccgagcgcaacggggggggagcgggccggcgagaaaccgacacagagggaggcggccacagaggcggccggcaagaagcagagcgccacgaagccccagaccgcgacacagccagagagagcagaggcccagcagccgaacgccaaccgagaccagngcgcacaccagcggggggggggcaacaagagccgcgccagccgagaacgaccccaccagggaagagagagcccgagcgccacgcccacgacaagcgccaggacacagcacgccaaggagcggaaaccaccacaagcagaagaaccgccaagggcaggagacccaaggcaagggcggcgcccccaaaggccccagcccagacacccgcaggcacgcccgaaacgggacccagcccgagcccc

SEQ ID NO: 27705 - DNA, 456 bp, Zea mays
  unsure (1)..(456): unsure at all n locations
  Clone ID: MRT4577_125281C.1
ccaaagagagacgnataagggggacggagacatggccacttccacctcgacgctcacaacgcaccactcccgcttccactctaccaccccttcctcgccctacatggcggcgcagccccgacggagaagggcacggagagcggtaccctcgcagccgggccaaagacctcgaccagaacacgatggaggacatttcggtgggggccgccagcagcgccgcgcggaagaggcgtacctgtgttctacgagacccaaatcgagaatggcgccaagagggacaaaacacggcccgagatacccctgcagcgcgactgacgcgcagggacgcaggcctctgcagaggaaagggcattgtaaccgcagcactcggggcaggcgcgacagaaaaaccggacagagccaacagcgagggcaacgcccccctgacatggcacacaggcaaaggcaccggaagcc

SEQ ID NO: 27706 - DNA, 447 bp, Zea mays
  Clone ID: MRT4577_125282C.1
gactgggataataatgatatttataacagaaacaggatcatgcgaaaaacaacaactacaacaacaacatgcgatagactacgagatgcatggacatatatataatactacatcatatatatcaacgtacgtacgtatactaacacattggataaattatttagactccagatcgatcgatcgatgggcgctagatagccagaagcactggaagccctaggggacgcgcttgacgtaatacttgacgaggatgctgaggttgatgggcacgttgaggctgatgcccatgactgttgtcctgaggacagtgcacaagcacaccgccaggctacaggaacgccagcccctggatcaatgtgcaacacggtgtcctgtgctgagtccccagtgtctagatgatcatgcctctcagcaagttgtcgcacacgcccagcttcagcgcgtgca

SEQ ID NO: 27707 - DNA, 339 bp, Zea mays
  Clone ID: MRT4577_125283C.1
ggaaaaactcaaacgggggcccaaatgcttttagtaattttggtgcccgtggccaaccttggggttcaaccctgcccttagggaaaacagccgaacccgacggggtgggcagttcacccccccccttaacactggttagctcacctccccgccaaacaggacagcacagtccttttttaagtttacccaacccgggttattttccttttaattccccccaaattacagtttaaaagcctcccccaattccaaacaagggcaaataaaagataagggtgggcctcaacataaaaactttctatttcccccccggccctttttggtttggggttcaggaaa

SEQ ID NO: 27708 - DNA, 214 bp, Zea mays
  Clone ID: MRT4577_125284C.1
tcgccacgcgtgcgcttcaaatttggcattcttgcctgttgttcattattgcccggacaggggaaacaaatatgaagcctgagctgatactcttcgggactctggctgttgtcgccctcctctccgctctctgggaagggttgtggtactgggcccggtgcaacaactgagggggttgcgaccataaaaacactgcgcagtgccaccgcactga

SEQ ID NO: 27709 - DNA, 396 bp, Zea mays
  Clone ID: MRT4577_125285C.1
ggcaccacgagccccgcacctcacacagatttagcctacctctcccaccgcgggtacattcctcacccggcccggtcggctgcataaacttttaaaaaaatgaaggcaaatatgggcacaaaagctcgtccactatctgttgacgcagacaaaggagagattggcgaaatagatacaagggctccttttgaatctgttaaagctgcagtgagtttatttggtgaagtcaaggtttcatctgacatatcagctgcaagaaagcctaaggttcctcaagcagagagggttttagccaaggagacagagctgcacttagcccagaaagagttgaataaatacaaggaacagctgaataatgctgagacaacgaaagtgcaggctctctctgagctagag

SEQ ID NO: 27710 - DNA, 242 bp, Zea mays
  Clone ID: MRT4577_125286C.1
ctccaccaccacaactactgtagtcattcccaccgccactcaccccgccgcgattgcagcccccaccttaatcgcgtcctcccctttaatgtcgttcgttgtaacaacagacgccgtaatgatagtgatatcggttgcaccaacaattgcattcacccttataacctctgccttaggtttaaacattactgctgtaaccggcctagtatcgagcaaagagaccttaactgggggtggccacg

SEQ ID NO: 27711 - DNA, 896 bp, Zea mays
  Clone ID: MRT4577_125287C.1
ctaggggcgggagagagatgcgaaaaacttttttgcatcccctcaccaccaccgccccctccccttcgccccgacgaacacggcaccacgagccccgcacctcacacagatttagcctacctctcccaccgcggctacattcctcaccccaccctgtcggtatacgcgctccggtcgtccccatcaccccccctggcctctgcgtgttgatttcttcgtttgtgcttggctgcataaacttttaaaaaaatgaaggcaaatatgggcacaaaagctcgtccactatctgttgacgcagacaaaggagagattggcgaaatagatacaagggctccttttgaatctgttaaagctgcagtgagtttatttggtgaagtcaaggtttcatctgacatatcagctgcaagaaagcctaaggttcctcaagcagagagggttttagccaaggagacagagctgcacttagcccagaaagagttgaataaatacaaggaacagctgaataatgctgagacaacgaaagtgcaggctctctctgagctagagaaagctaaaaaaactgtcgaggagctaacaaccaagctggatgtggttaacaagtccaaacagttggccattcaggcaacagaggatgcaaagactcgaaccaagcagcttgaaggtggcagcacaaatgaatgtctaggaacagatggtcctctgaggcaggaactcgaaagtgcaagggagcagcatgctatcgctttggcagaacttgatgcagcaaaacaggagcttagaaagctcaagaaggattttgaaacatctttggatatgaggttgtgtgctgcccagcaggaagacgaatcactccatacaactgaaagccaccaaaggaaaagctaacccaacttttt

SEQ ID NO: 27712 - DNA, 541 bp, Zea mays
  Clone ID: MRT4577_125288C.1
ggctgttgggggtttttttttttttttttttttttttttttttttttttttttttttttttttttttttttttttttttttaaacgcggggaaaacacccatgcattaaattccccacttaagacccaaaaacaaatttcttcaatttctcagggggggaagaagggggcgaattaaaacgttacaaaatatacacctcaggggcaaaggggggcccccacaaacaaacgtgaagggtgacattttcatttcccccaaaaaactggttacaaagggaagggggggaggaaaaaaacaaccatcttcagggggtccccttgggttaacttttaagggggcttaaaattggacaaaccgggggggcccctttttggagagggggggggagccacattcacggggcggggggacatttccgggcttcaggggggccccaaccccccaatccccccaaagggaacaaacaggcgccggggggggcggatccaagggcgagggctttagggttttccccgggcggggagttcaaaaaagggggggg

SEQ ID NO: 27713 - DNA, 287 bp, Zea mays
  Clone ID: MRT4577_125289C.1
tgggtacctcgaggccggccgggaaaccactacgcagcagtgcgcccagcctatctaccccccacccctcagattgttcccatggccgccgccattcgcggaagccctacccgcgccgccgcgccgacccagccgcgcgcggtgctgcgggtggcgtcgtccgccgcgccagcctcctcctcctccgcccgcccgcacaggggcgtcttggcagaggacacaatgcatgcgaccaagattaatgactcggacaacgcctccccagatgccgctttggaaatgggaaa

SEQ ID NO: 27714 - DNA, 291 bp, Zea mays
  Clone ID: MRT4577_12528C.1
cgactccactcagcctcaggatggggaatagccaagaatggcagcctcagcgcagaggcaaggtcagaaagagacggcgcttcagagtttcctttccagacacccctccccgcactgtgaagttcccctgaccgccctcctggttcacaaagagcattaagaaagctgcggtggtctgagcaacatagcccagagggctgagcctcctggcctgcctgcccgcccaccctgggagtcccagtggtgaggctcagagaacttctaaggggaaagaacagctggagtttctgt

SEQ ID NO: 27715 - DNA, 326 bp, Zea mays
  Clone ID: MRT4577_125290C.1
ttgctacgcgtgcgaacgaggtcgtaagcggcggtgaccctacctacgcggcgctcctgacctctggcttcgccatcctgcccgacggcccatcaggcaggaggaacatgcaaggccatggcggtggcggcgaacgctcaggcggggcgctcctgacggaggagaaccagatcttggctgactccgtccccaccgccaagctttcgctgggggcgggggcgaccgggaacagactgatcgccctgaccgtggagcgcatcaaggcagcggactacggcgagagcgttacccactagagctagcttagtcgaatcacacactcttca

SEQ ID NO: 27716 - DNA, 387 bp, Zea mays
  Clone ID: MRT4577_125291C.1
acgttctgaccgttttcacccctacctaagtgactttctttacaatagacctcatataggacgggtggtgccaagtgtcattgcagcactttcacaaagttaatccattaattgttgtcagcttttgactctactcctttgagatacagtacggaagtgccctaccaagttgatactgcattttcaatgtgctgatctaggtggctacattgctagaagttctgccaaatcgcttgacaactgatgtgttggaacaacttcgtctaaataaacaagcattggttgagctgggatcaccaacatgtgacctcaagcagatgcttatctatctcctagatgatcctcatgaaatcagacgaatatgcataatggggagaaattgcacac

SEQ ID NO: 27717 - DNA, 734 bp, Zea mays
  Clone ID: MRT4577_125292C.1
taggggccttttttttttttttttttaactaaaaacacttcccattcacaacctgacatcatgtaatctacagtgtacatcaatatgctttttataggatgtcccccaagagactacatcaatgtaacaaagaggaaaaggagtcgcaattcaagacaccggttagcagggactaacgatcccaacctgatggtcgttttctctccctgggccgatcccgtgaacttttgggatttgggttcccattttcattgttatttccagcagcagggcgggatgcagggacggagggggcagcctgtgctggccaggatgcagttacgaaagtgggggcaggctgtgcaggccgtgtgtctcctccaatggtgcccccagacacaaagccacgtagtgctggtcttaccaaggaaggtgcactgctgcttggcgtgtttgaagatccagacacaaagctgctcttaaattgttgcatcacccctgtcttcaacgaatttatagcagcagatcttggagcaggcacctgtgaaccagattcggcattgtaacctatgccgaggccaaaatcaactccacgcacaccacgaccgcgcccagcaccaccaccgacgccaccttttcctttgccacctttcttcaaacctttcctggagtcccgttttgctctgaatcttacatccttcatagccagatccatgagttcattgggtacatcctggccagcagcaatcaaactt

SEQ ID NO: 27718 - DNA, 414 bp, Zea mays
  Clone ID: MRT4577_125293C.1
gacacaaacaattggttttttgggctaaaaaactttggaaaaataacaacttaaacaaacccttctgttccccggattgtttttgctcccattttttttaactagcacgggctgtttgttctgccccccccccaaaaaaaaatgggggtgaaattgtttaccccataaaccaatcagagctggtgaaaaacatgacccatggtttcgggaggcttggagggggcccccaacgggaccgcccggggcttggggaccccccccctctcggtcatgttaatctcaagggcatcgatcctgtcccaggggaacccctggattaacgggggaaacccaaggccgggggtcccaaaaaggagcgtttcccggggggacctgggccgtcccttcccgaacgggaagtttagccggcccttg

SEQ ID NO: 27719 - DNA, 1521 bp, Zea mays
  Clone ID: MRT4577_125294C.1
gctccttgttgcccatggcagtactcctatactagccgacgactatcgacagggccatatagatctgctcaatccagtacagtgatcatatgaacaagaaacaaccacgtcatccatgaatgcattatattgcatcgcattgttagctcaaaacatagatgcatgcatgtaatcgatctgtcgatccatgcatcgatcgagatgtatatatatcctggttctagatcccatagagatcatagaactagagccagctccttgttgcccatggccatgacgagagcactggccatggtggccatgttggccactgctgccttgttcttcatgtccgctcgcgcacagcagtgcggtatgcaggccggcggcgcgctctgccccgactgcctctgctgcagccagtggggctattgcggctccactcccgactactgtaccggcggctgccagagccagtgcatcggcagcggctgcggcggcggcggcggtggtacccctgctactcccccgagcggcccggtgtctgaaatcatctccgagtccctgttcaacgagatgctgctgcaccgcaacgacgtggcgtgcccggccaccggcttctacacctacgacgcgttcatcgcggccgcgaacgcgttcccgggcttcggcaccacgggcggcgccgacacgcagaagcgcgagctggcggcgttcctggcgcagacgtcgcacgagaccacgggcgggtgggacacggcgcccgacgggccctacacctgggcctactgcttcaaggaggaggtcggcggcgtgtgggggccggactactgccagcccagcccccagtggccgtgcgccgacggccagaagtactacggccgcgggcccatccagctatcctggaactacaactacgggcccgccggggaggccatcggccaggaccttctgggcaacccaggtctggttgccgccgactccactgtctccttcgagacggcgctctggtactggatgacgccgcagccgcccaagccgtcctgccacgacgtcatcacgggccagtgggcgccctcgcccgacgacgtggccgcagggaggctgccggggtatggcgtcctcaccaacatcatcaacggcggcctcgagtgcggccacggcgccgacgctcgtgttgccagccggatcggcttctacaaacgctactgcgacatgtttggtctcagctacggcgacaacttggactgctacgaccagagccccttcggaaacacaatcttaagcaccaccaataataccacctcatatcacgttgacgcctaataagtaacaagagctacctgttactacaactgcaagacacagacatcgtgtagtgcacatgtgcgtcaaatctctaaactttgtacacccagaataaaactctgtaatctgaaactttgcacacccagaataaaagttttcgatttcaaactctaaaaaaaaaaaaaaaaaaaaaaaaaaaaaaaaaaaaaaaatccgacgggagggcgccggtac

SEQ ID NO: 27720 - DNA, 268 bp, Zea mays
  Clone ID: MRT4577_125295C.1
cgttcgaggaagcactgttgtagatgacagagctttttgtttcacagctgcggggattctgctgaacatcttttagaaaattatttcataatttattctggctttgcccccttgctccttggtttattccctcatgttttactcaaaataaacatggccatgaactcaaaaaaaaaaaaaaagggcggccgccgattattggcctcttcgccccgggatttatttcgggacgggtacttgaagggttacaggtttcccctaaggtggg

SEQ ID NO: 27721 - DNA, 736 bp, Zea mays
  unsure (1)..(736): unsure at all n locations
  Clone ID: MRT4577_125296C.1
cattgggtacctcgaggccggccggggcccactatggcggcaacgggtctgctcctccccagcctcgccggcgcccacggacacgccgcgccgcgcccacaggttgctgcagccgcatctccagctccagggcggctcccttgcctcttcggtccctccggcctccgccggcgtcggtggctcgcgcgctccggcgtggaagatacaaaggagggggaggccaatacggacgacgagatcacagagaagtacgggatccaatgccgcctctggaaggtggtcagatcctaggaggaacaggcaggcgaggggaaaaatgctggtacggagctccgcaaggaactcctggccaagcacggagctgcgtatctggccacctccatctctctctccatcgcactccttcactctggtgctaccatcctccgcaagacgaccggagtacgaccgtgccacggacctgcgtcgatcaaggtacgccatctggcacgtaaaaaccgagggcaacgtggggcatcttccacagtgtgctgaggcggggatcaaggcgctcctctccctcaaggacggcgcgcccgatgactgttcacttccgtgggaggactgangtgaaggtgccgacagccctgaccaggaacaaggtgaagaaagagcacgcgtcggtgccgttcgatgaccagtgctccatcctggaaaaggaggccgtgaacgtgtcgctccagaacctcaagagcta

SEQ ID NO: 27722 - DNA, 401 bp, Zea mays
  Clone ID: MRT4577_125297C.1
gcgaagtagaccaccaagcacaagctgcatatccggccggaatatgtggactatcggcagggtctctacaccgaatgtggccgttctcctgctgctccttatcgtcgatccccacgaagccgtgccttattccaaagcgctcatttgctggtaccggatcgcgggctcaaatggtgtcatcatgtcctaccacaactgcgcgcacgtgtgctgtgcatgaagtctacggtacgagcagctgctacggcatcatgctccatgcacgtgcatcacggattgctagctagctatcagctattccgcactttaattccattaatacggatcgacgtctccgtcggtcactacatatgtgctactatacgtgtacactacatgcagtatatgtccacatgtactcg

SEQ ID NO: 27723 - DNA, 580 bp, Zea mays
  Clone ID: MRT4577_125298C.1
ggccctctagtagcatgcatcgaccggcacgccagggtgatggtatgtccgcataatacgaccttctaataccactcaactatatggctgaaacccacatactgacatggcaggcgctgcatctcctgctggattatggctggaaccatgtatggccaccgctctgtgaatgtcttgtggctaaccacagtactaaacacagtgacaacgttgttgctgcaacaccagtcaggttcgagccaggttcaaacgtgattggagaaagggcattaccataagggctgcctctgatgacttaagcattggtgacacttttccagataggagctactgctgtagaaacgatagctgcacacataggcatctcgcagctggccctggcgatgacataggagctggtgacgatttttcctgaccctagctgctagtgcagaagctgtagcggcacctgctgctcggatgaccctcatagtgcagatgtgtgctcaagctctctctcctgttatatggtatctgctgtggtgcacatggtcttatgaccctggagatgttgttgatgggccttcacatggatgctgtc

SEQ ID NO: 27724 - DNA, 452 bp, Zea mays
  Clone ID: MRT4577_125299C.1
cactttgatggtctcttgctttttgtaggccgaaacctcagagtgaaactgagacatgatgcgctaagttagttaccgtggtatgcatgctcttgatgaccacttcggcaggaacaccctttgatgctactccagcaagaccctgcatatgtacgactgctacagtgccctttcagatggttatattatacaggaaatccgatggtatgtcatcacaaaacgacacgatgatttaccaattggtttttctctagaccaagacttgtccgaagcgctgcgctcgtgagttgccttgttgctctgctgagaccaatctcaaggagatcaaggtcattatcattctcactctcatccgcaggagcatgtgtcgaaagagctgatcccgcacgctgatgtacaccatcagacataccagggcatcttgatgctacagccggacagacagaatcgtg

SEQ ID NO: 27725 - DNA, 229 bp, Zea mays
  unsure (1)..(229): unsure at all n locations
  Clone ID: MRT4577_12529C.1
ttttcttttttatttttttttttctccaaacagccttttggccctatatattattcccttctccattgtcaatgcgttcatatcaggtacattggctcacactggccacccatggtcgatgggntgacactgccgttactcatctgccgctaaacgagtgaactagctgtagccctataggtagctagtcagcggctccattacattattactacagaacatagtttcc

SEQ ID NO: 27726 - DNA, 251 bp, Zea mays
  unsure (1)..(251): unsure at all n locations
  Clone ID: MRT4577_1252C.1
ggccccgtccgccgtggaggcccccgccgcgcccgcccccggcactagccccgcccgccatggaagcccccgccgnacacaaacgaggcaaggacacagggccgagcagaagggggacanggggnacccgacgggaacatctttggggggggggagcangggaagaacggccgctggaagtagggggaagcattccatcgaaaaaatcatgaagaagggggcaaggattagtggttccaaactagcaactg

SEQ ID NO: 27727 - DNA, 494 bp, Zea mays
  Clone ID: MRT4577_125300C.1
tgcaaggctcagggagatccgaagctatttggatcttgtaattgaagggaagctcccactgaatcatgagattttgtatcatttgcaggttagtccctctcttgcaatttgtcaggtgttactctcgtggaatgaactatgcagtaaaagctgaaatataccagctttgttagtttgcagtagtattgcaattggaatttgaattttgaacacataaggtgatgaaaggatgtttcaacatattttggtttatcatttctttattttatgtttttgtacattgctcccttcaaaacagttatttttccgcacatagctatgttttaagttcttccattatgtgcagcattgatttttaattctgccatcaagttgtgcttcaaagggactgtagattatattagagatatgcatagtctagagatatgtgtgtattttacttgcgcttcaagtttgtatcctgctatatatacgaaagtcgcccctcccttaat

SEQ ID NO: 27728 - DNA, 208 bp, Zea mays
  Clone ID: MRT4577_125301C.1
cccacacgtccatccacacgtgcgtccactctttcgcaagaagacacactccatgggctggtcctctttccccccactcttagagcacaatacccagcaattctaccagcaagaatcctcaaaactgctcaaccagatccaaattctgcaaaacactaacatgcactttgtttttgactctatttgaaacttgttactcaaatagctc

SEQ ID NO: 27729 - DNA, 379 bp, Zea mays
  Clone ID: MRT4577_125302C.1
gaaaaggggcaggaagaaatcaagcctaacacgatccatcgcctagccgaagcacaggggaggccagcaacaccagggggatgaagctggacatatcctgactcgagaccaacttcgccaacctgacagaatactactgcgacgacacgtacttctccgcccaggcctccgacgtgccgtccatggtgctacccatctgcgactacttcaacggattacaaacggacaccaaggatatggagaagaataagaagggtacgaccacacttgccttcatattcaacaagggcatcatcgtcaccagtgattccaaagccaccatggacggatatatatcctcacaaaccgtgaagaaaattattgaaataaatccttacat

SEQ ID NO: 27730 - DNA, 460 bp, Zea mays
  Clone ID: MRT4577_125303C.1
ggcgggcaaataaaattgtttttcaatccaatctaactacaaaccattttttccatttctatatctaaacaccttttcagtttttccaaggaggaaaacaaagggtctaaaaaatgccgaaagggggttcgttcattgctgaacctgagagtgtctgactgttctcgcccatggacattgtcaaatttttcgcaaaaagtatttctccgaaaactgagctattttgcgtcgttcattgataaagcgtgtggcagttggtccacggaaatcttcaacaacccggtttcacaaactttatacctgggtgggcctaactgaaacttgccccggaaggacaacccgtcattgggttgggttctgaaccaccaccagtagcgggtgttgtgcaaaacagcctgactcttcagtagtcctcactccaacatgccactgatccgagactagacccttgaaatcgggt

SEQ ID NO: 27731 - DNA, 262 bp, Zea mays
  unsure (1)..(262): unsure at all n locations
  Clone ID: MRT4577_125304C.1
tgcgccgctcgagccngcccgttcagacatgcgcatccactctcctacagtcgccatcgatccgcacaaacgccgccgcncaaagatacgccgccgacccgagcgaccgagtgagagagagatgaataccgccgagcgaagtgatggagagagaggatcgggagttcaccgatgattgccgctgtgcccgatctaccctgcgctgttggccgactctatctgttgaatgcccgctggggttcaccggcgtcctgtgtggttt

SEQ ID NO: 27732 - DNA, 736 bp, Zea mays
  unsure (1)..(736): unsure at all n locations
  Clone ID: MRT4577_125305C.1
aggccggccgggccgggcctttcagtttcatcttcttccttcatggatcaaggcgctggcggctttccatgatcggcttgtgccatttcaagtgcccccgctggccagtggatccaggcaggcgactccgctacggaggtaagccgggcagccatgcgcggcatcagggagagcctcagaacggtgcagggcagcctgctgcgcctggaggcagtcgtgctcctgagcgcgctcatcctcgccgccctggtgctctacggctccgccaaccgccgcagcagcgacaagctgctccgcggcgccatgtggatggcctactccatgtcctacgtggtggtctcctacgccgtggggatcatccaggacgggcccttccgcggcgagacgttcgtgctctgggcggccgcgctgctgctcatccaggcgagcgcgtactcggcgcccgtgcacagccgccgcgacgtggaccagcgcaagaagctgctgctgcagcacgtcctccagacgggcctcgtgctctggctcatcgtcaacgccaccggccacaacgccagctaccgcgccgccatctgggcgttctgggcgctcaacgtgctcaagacggctgccaagatagccgagatgatcgaggtcagccgccccgacctgtctgtcagggttgtcgccgagtacatggccgagtacatggctgangctgacgncgtccagcagcagcctgcagctgaccccgccacca

SEQ ID NO: 27733 - DNA, 449 bp, Zea mays
  Clone ID: MRT4577_125306C.1
ctgataatggggctaactctaaggctgcaggtatacttattatggagaaatatccaaaggtttattggaccccttgtgttgcacattgtttggatcttactccttcctttctttcttatttgttgccgtttagttcaaaaatgaacaagcaggcgacaaatatttgagaacggaggtagtatgttacaagacattgcagacataaggtattttaaaagacgtgttaaccaagccaagcaagtgacagacttcttttaggcatgggaggcttctcaatgcaatgagggaaaagacgggaggaagagatctactgaggctgacagtaacaagatttgccactttatttctgactttgcagagtttgtacaagcataaggatgctttatgtcaactcttattgtgtgaggattggaccagatccaaactggtagccacagatgcagggaaga

SEQ ID NO: 27734 - DNA, 276 bp, Zea mays
  Clone ID: MRT4577_125307C.1
tcgctgtcttcatgcacgatgacatcgcgcataacccgggcaaatccgaggcctggtgtcaacataaatcatccccagggtggcgacgtccatgccggggggccaaaggattacactgggcgagaaggcaacgtcgacaatttcttcgctgatccgtctggcaacaaaactgctctccagggtgggagcggcaaggtttgtggcaatgggccccatgaccataatattgttttctacagtgaccatggggttctggcgtcttggaatgctacgtat

SEQ ID NO: 27735 - DNA, 347 bp, Zea mays
  Clone ID: MRT4577_125308C.1
gttgcactacatgcttcttctagcattctttgttgctcatgcacgcacaacaggtgggctgacctaagaggacagcaatgctaggaacatgactatgaccaagaccaggtcattgggcgacatacttgtcagccagattgacgacgggccatgctatatagattacggtcttaatgagtacgtgtgcataaagactaataagtgctataagatctacatgctcttcgttgcgagtagtcaacgatcatgatgaatccattatacttcggagacataattatactgccgagacagactgttagagatgacgctagttagatgctggttcactaaaatattatgtaaca

SEQ ID NO: 27736 - DNA, 460 bp, Zea mays
  Clone ID: MRT4577_125309C.1
gcaccgcaagattcagaggaggacaaggcagagctcacggggctgcggaagccatggccaccaccgaggagaaggctctccttgtactcactaggcaaggaggggcgaaggcgccgcaggaagggaacgccgccaccgccatgcccgccgccacttgtaatctccgcgatgctctagctagctacagtacataacaatgcaatgagcgagcgaccggcaattcaaactccaatgccgtatgtaatcggtaagtaaagtacctgatcattaagtagctgactactacgagaactggcccccggccgggcagtatagcgtggcccgtgtctgcagctgcctgagaagctcaaactggtccccgtcgccattaagaatgcatgatacgcatgctgtcgtgtccgctatccttctgtacgcccggggaaaagaacgaaccagaggatctgcaaacttgcttctg

SEQ ID NO: 27737 - DNA, 939 bp, Zea mays
  Clone ID: MRT4577_12530C.1
attcggcacgaggtggtaggtagtcatgggtatgaggttcttgattttttgtcaggttcacgataactctggttttggcacaccgatctagcttgagattaaaggttctgaaccctgcaacctttgcaccgcaactctgattatccatcgtgtcactaatctggttggcctcgtcaagacgactaatccctatttgcaaagtgaaaaacacaagcaagaaatcaaaatgcatgactgttcgatgatagattgatctaaaataaaaactcaaatcctaacatgagcggtggctattgaatattaagtctgagggtcgtcacttcccttagatgtgtcccctaacaagctataagacgatacacggcccaacggacaaaagacaatgacgcaacatcctaataaattttggacgctgacttgtttcgattattcccattgacttaggtggacctcaaaccaaaaacattaattagctgatggatttatcttcgaaaactttgttctagcatctgttgtactataggttggtcgtaaagaccgatgtagacttgaacttgaggttgactaggcctccagttggtcttccccacctccatacatttttttcaagtataacagagataacatcattaggtagcaatctattattaaaactatgaaaatgatcgattaggaatgagttcacctctaaatttaattgttgcattggagctcggatcattgcttaatggttggtcgatcagcgggtgcatccgaaggattgatatcctcatcagatagatattcttttgcttggtaattgcagtatgcttcaagcagttgctttgcaagaggggtctatgggtgttgggatattctgatcactaggggagtcaaattacattaccctttgatcaagcaattctgaacagcaacacatttagcagatttattacaagt

SEQ ID NO: 27738 - DNA, 3981 bp, Zea mays
  Clone ID: MRT4577_125310C.1
cattgggacctcgaggcgcacttcgcagcgcattcaccaccagcttcactcccaactaccgctgatctcactcacgctcaccccagccggccagccccgtccccatccggctagaggttcacatcacctgcgtgacgataaacatcctcttccaaatcgtagtctagcccgtgcccaaaaccctagcgaccgccggagagctcgtccgaatcgaggccaccgaggggaaattagatcgcggcggacgatggagagccctgcgaaagaggaggccgggggagagctggcaatggagatcgagtcgtcggtcacggcggaggactggcgccgcgcgctttctcgcgtcgtgccgtccgtcgtcgtcctccgcaccactgcgccgcgcgcctttgacaccgaggtcgcgggcgccagctacgccacgggtttcgtcgttgacaagtcccgcggcataatcctcactaaccgccatgtcgtcaagccaggacctgtggtcgcggaggccatgttcgtgaacagggaagagatccctgtgtacccactgtacagagatcctgtacatgattttggtttttttcgctatgatccaggtgccattaagtttcttaagtatgatgagattccgctggcacctgaagcagcatcagtcgggctagaaatccgggttgtcggaaatgacagcggggaaaaggtttcaattttggcaggaacacttgctcgacttgatagagaagcaccatactacaagaaggatggatataatgatttcaatacgttctatatgcaggctgcatctggtactaaaggtggctcaagtggttctcctgttgttgattgtcaaggaagggctgttgccctgaatgctggaagcaaatcttccagtgcctctgccttcttccttccattagaacgtgttgtcagagcattggatttgatacgtgacagttgggatgcatttggtaccaagacagaatctgtttatattccacgtggtacacttcaggcaacctttcaacacaaaggatttgaagaaactcgacgtcttggcctccggaatgaaacggagcagatggtgcgtgtagtttctccagaaggcgagactggaatgctggttgtcgattcagtggtacctgaaggccctgcacataaacatttagaacctggtgatgttctagtacgcatcaatgaggaggttgtaactcagtttcttagattggagactttacttgatgatagtgttggcaaggaaattgatttgcagatagagaggggtggagttcctttaactgtaaacctgcaggttgaggatttgcactctataactccaaatcattttttggaagttagtggtgctgtcatccatccactgtcatatcagcaggctagaaacttccgattcaaatgtggtctcgtatatgttgctgaagcagggtacatgctctctcgggcatctgttccacgccatgccattattaaaaagcttgcaggagaggatattgcacatttagatgaccttattgcagttctttcaaaattgtctaggggaacacgagtgcctctagaatatgtcaaatacactgaccgtcacaggaacaaatctgtactggtgacaatagatcaacatgaatggtatgcgtcacctcagttatatactcgaaatgatgcaactggcttgtggactggaaaaccagctataccaccagaatctccgtttttagctctagctcatcatgctagtcatgtggacacaaactcaaacgctgtttcatctttatccgaatctagtcctatggatctcaagtgccagtatgattctgagaacctggcagacggatgcatcaaaatgcaaactgatgatgagattgttgtggatggatctcattctaacgaagattctgttattgagaaaaaaaggcgacgtgtggtcgaggagatagctgccgacggaactttaccatcttatggagatctagaggatgtaaaaggtggttctttgaggcatccttctaatgcagatggatctgaacttgctcgaacaatatcaagcaatgcatcattggcagaacaagtaattgaaccagcccttgtgatgtttgaggtgcatgtgccgcccgtttgcatgcttgatggagttcactctcaacatttttttggaacaggggttataatatatcattctgaacacctgggtctggttgcagttgataggaatacagtggctgtatctatctctgatataatgctttcttttgctgcatatcccattgaaatacctggggaggttgttttcctccatcctgttcacaactttgtcctggtcgcttatgatccttctgcactaggagctggagcatctgttgtccgggctgctaagcttctatcagaacctgctttgcgacgaggagattctgtctatctagttgggcttagtcgaagcttacaagcaacatcaaggaaatcaatcataactaatccttgcacagctgtcaatattgggtcagctgattgtccacgataccgtgccataaatatggaggtcattgagctcgatactgattttggtagcacattttcgggcatattaactgatgagcaaggaagagttcaagcattatgggctagcttttctacccagctgaaatatggttgcagcagctcagaggaccatcagtttgttagaggcataccaatatatgcaataagccaagtacttgagaagattatcactggaactgaaggaccttttcggcttatcaacggaataaagagggcaatgccatttgtcagacttttggaggtggaactttatccaactttgctatccaaggcaagaagttacggattgagtgataactgggtgcaggcccttgcgaagaaggatcctgtgcgtagacaagtcctacgggtgaaaggttgtttggctggatcgaaagcagaaaatcttctggagcagggagatatgattcttgctatcaacaaggagccaattacatgcttccttgacattgagaagacttgccaagagttggaccaatccattgggtcagatggagtgcttaacatgacaatattccgtcagggaaaagaaattgaccttgttgtcggaactgatgtaagagatggcaatggtacaacccgtatggttaattggtgtggttgcattatccaggatcctcactcagcagtgcgtgcacttggctttttgccagaagaaggtcatggtgtttatgttgctagatggtgtcatggaagtccggtacatagatatggcctctatgctctccagtggatcatcgaaattaatgggcaaccaacaactgatctggaaacttttataaaggtggtgaagggtctcgaagatggtgaatttgttagggtgaggacggtccatttaaatggaaagcctcgggtacttactctgaaacaggaccttcactactggccgacctgggagctcagctttgaaccagaaactgctacatggcggaggaaaataataaaagcattgcaatcagccagggcgtgatattttcatgttttgctgcgaccttttcatgctttcagaggagcatagaggtatggaagttagaggttcgtgcctttgtttggtaagctaaatcgtgcattatatatgcaggattaagcaaccctgcactttgtagggttagttgtgtgcattagcataggggtgcttgaaagatatataaaaggtacattaaaggtatatggattcattgtctgtggtctctggacaatttgaccacaggatttgccatttgtatatcgtctattcctatattttggtagaaaaagaaataaaccgttagcctttctagcggccatttcactactctgcattaagaatgtgtgttagctatcaagttaacagctccacagatttagcccgtttttcattaaagcgtcactgctatcaccttgactgcgtagttactggaatgcctaccgacagttttttttttc

SEQ ID NO: 27739 - DNA, 299 bp, Zea mays
  unsure (1)..(299): unsure at all n locations
  Clone ID: MRT4577_125311C.1
anggtattaaataacttttnnccattccaattgccaaaccacagggccggatgcacaggggggcgaccaagccctacgggggcacagggagccggtcgcgacgaattctctctgtaggcggcaagaacgggggctggcgccagctcggggatgagcctcagggggaaggagaccgaccaagcagagaagcccgggggccctgggccgccaaagcagacggntggatgcgaccagcgaccacaatagcaacgacctcacgggagaccgagacctgtacggtcgcggcggcgggggacgcg

SEQ ID NO: 27740 - DNA, 392 bp, Zea mays
  Clone ID: MRT4577_125312C.1
tttttttttttttttttacaatatttagatggatttttaaataattttatatttttaaaaaaaataaaaatgtgtaaaaagaatctgttaaaaaattaaattgccattctttgttaaggattaatggaatgaatgaaccaattaggaaaaattttccttgttattttgcaccaccacttttccaaaaataaaaaaggggggaaaaaaaattaaaaaccaataacgggttggattttgtttaaaaaaaaattttacaaaaaaaaaaatttgccccattggtttaaaacaaggggaggggcttttttgttcttttttaagcccaccccctattaaaggaaagaaatttttggaaatagggtggagcgaagtaacctacaaccatgggttttctt

SEQ ID NO: 27741 - DNA, 382 bp, Zea mays
  Clone ID: MRT4577_125313C.1
ggattatccagcgagggacgccggtttgatgctcgtactgctgcctggttgcccgaggcggctgtggcgggtcgaccatgtacagatcggcgtgtgtcgtgatggcgtggaacgtgttacggttctgcactgctctagcgtgggctaggttcaatcatgatcctgctcgtgctcgcgatcgtcggcgttactctactacgctgtcgtgctatgcaactacagtgctgtcctgatcaccggtggcggcaccactctggtcgcgctcgcagtgatgctctgcttgcacttcctgcttgctatgcttctatggagttattcatctgtcgcgttcactgaccctggttctgttccaccagatcggaatcttgattctgatgtggag

SEQ ID NO: 27742 - DNA, 347 bp, Zea mays
  Clone ID: MRT4577_125314C.1
gtcataaaccggaggggtttttggaggtgaaatagaacataccccgaatggtttttaaggtcgggaactggcttgggaaccctgggaaagaaaccaaacaggtgtgacggttaacaattccatttacacattcaaccaaagggtgcaacccgtgatgcaagggtcaaaatccttggggtgattctatttcctattacaagacctgggggcgaaccaaacgctttgatagttcaatttttggaggattcgcggtttctttttgcagaaggctcggccatggagggggcacgttgggctcaaagagggttaccctggggtttggatcgaactggaatatattagctggt

SEQ ID NO: 27743 - DNA, 365 bp, Zea mays
  Clone ID: MRT4577_125315C.1
tggtggtttttttttttttgttcgagactgttcactccacatttgttggttagtatttggaattgattcccactattttttttattcatgaaaaggggtggggaccctaaaaaaacatacccaaaaaattataggaagagggggggcccttacaagaaattatttcccaccctgcctaccgttggggggaaaccaaagggggcctaaccctgtgagaaccccccaaaagaaaaagaggtccccccctttaaaaataaacccaagggcccccgggacccaaaaaaagcccccttaggaaaccaggggcgttttaccaagcacggcgtggaggaaaaaaaacacgccggtatacaaaaggttagggg

SEQ ID NO: 27744 - DNA, 743 bp, Zea mays
  Clone ID: MRT4577_125316C.1
agcagtggtaacaacgcagagtacttttttttttttttttttttttttttttttacttaagttacaacctttaccattcttagtttagaacataggctagttggtaagattggaacttaggttgctaaacttccttttacggtagagatagcaacacttatacaaaaccctagtgcacatccatgtttagatatttgcatatgttttgtttaagaaatttattactagcctaatttagatcgagaaaaatagaagtcttaatttatcccgtcttgggcgtccacatttctttcacctcagtataaaaatacaatgacaagatgtaacacccttaattttggggtataaaaatttctttgctctatactccatgggcgacagagagaatgttttgtatggtccttgtcttctaagggcagtagcttagtcctggtgggagtcctacctcgccacccacgccgaccctgaagctatcacctaggaggaattcagagaaaatttccgccagtatcatgttctagagggcttgatgatagtgaagaaggaagagtttctagcactgaagcatagacccatgtccatcagtgagtatcgagacagattcctgtagttgtctcgctatgcacccgaagatgtcaacactgatgcaaagaggcagtaccgattcctgataggcttggttgatcccttgcattaccagctgatgaatcacaccccgcgtactctgcgttgttaccactgct

SEQ ID NO: 27745 - DNA, 172 bp, Zea mays
  Clone ID: MRT4577_125317C.1
taacgatgccgccagcgaggcgtggcgacacggccttagcagaggtcggcggacgaggcccaagctgcggtcgtccgggcaggttctgttataatgcatgacctaagaagtttgctatggaatacactcttattatagacacgctttcgtatgtctccatctacgctgcctt

SEQ ID NO: 27746 - DNA, 1689 bp, Zea mays
  unsure (1)..(1689): unsure at all n locations
  Clone ID: MRT4577_125318C.1
gtaccgccgngcaggagggcgtcgccccagcgtccgggtacccgagggcgggagggctccccgcacaagtcacaacagaacaacctacccccacaagcagaaggatccgggcggccaccgagagtcactggaagtctggaagaagctcgtccggcgccccgcgacgagacgacggcctcctcctccgctccgctgaagaacgacctccccgctgacagcgttggcgggccttgtagcgaggagggggtgcggaggcgcggcgactgttcgcgggatgagcttcggcggcagcagctccctcgcatcaggtgcgaagaggccgttcgagtacgggagaacgcatgtggtgaggcccaagggcacgcacaaggccaccattgtctggctccatggacttggggacaatggagccagctggtctcaactactggaaactcttccccttcctaatataaaatggatatgccccactgcaccttcaagacccgtgtcagtgtttggcgggttcccctccacagcatggtttgatgttgctgatctttctgaggatgctcctgatgacattgagggaatcgatgcctcagcagcacatgttgcgaatttgttgtcaactgaacctgctgacatcaaacttggtgttggcggctttagtatgggtgctgctactgctctgtactctgcaacttgctttgcccatggaaaatatgggaatggcaaaccattccctgtgaacctaagtcttgccgttggtcttagtggctggcttccatgtgccaggaccttgaagaacagaattgaagcctcaccagagtgtgcacaaaaggcttcatcaatacctcttttgctctgtcatggaaaagctgatgatgtagttgcctacaagcacggggagagatctgctggtgccttgaaggcaaatggcttttccaatgtgctcttcaaggcatacaataggttttatatctcacctatccaactacgcttcacttgagttgcaaattttctatatttcttttctcatgatgattgctctcctacttgaagtcttgggcactacactgttccagaggagatggatgaagtttgcaaatggatcacagcaacgcgggggcttggcactaagtcatcttgattggaatttgatgcgagaaagactcgcagggacggtgtccaaataataccggtatcttttccaggaggtatatggtttaatagcaaatttgggcttgggtatacggccatgttctagcttttcttaacgcagacgtgtctttttaatgatgtatgcttataatatctatattttggtctacgtcgatttggttgtggcacggataatgtttgtttcaaatattctgctctgcgaattggaattgcgatgttttgctttanaaaaaaaaaaaaaaaaaaaaaaaaaaaaaaaaaaaaaaaaaaaaaaaaaaaaaaaaaaaaaaaaaaaaaccccnaaaaaaaaaccaaaaaaaaaaaaagggcccttgggccggaacccccttaggggcaaattttgaaaatatccttcacattggggcccgttcgggctggcttttaaagggcccatttggccttatagggagccgtttaacaataaatgggccgttttttaacaccgttgtaattggaaaaaccttgcggtaacccactttattccctttgaaaaaaatccccttt

SEQ ID NO: 27747 - DNA, 768 bp, Zea mays
  unsure (1)..(768): unsure at all n locations
  Clone ID: MRT4577_125319C.1
gctgaggcgcctcagcacttccacggtccgcgctccccacgaccacgcgccccacccgactcgccaacagccgcccggagaagaagaagaagaagaccacacatcctctgtttctcggacgacctccacggccagcacgtcgatccgtcctccctccgcagatattaggcaataacaccagccggccttcttcccggctacgttaacagattgtagagaagccaaattcaggctcactcatgggctcctcaactgagaacagaagcagaatgggtagcataaagcctatggggattcagctcatcgagtgtgtccgtggcggccctctctccttcagatcatcgcaggctcttgtgttggtgctcaccttcctgtcatatgccagttaccatgccactaggaaaaccacaagcattgtcaagagtgttcttgatcccaagacaacaaacctaggcttgttgcactggcccagccatatgtatcttcaagagctgaaaggcgcggcgaacaacacggctctcgagagtggctgggctccgttcaacggcgaggatggcacccagctgctcggcgagatcgatcttgcattcccttggggtgtatgcaattggcatgttctttgctggncatctgggtgacccggtggatctcaggatcctcctgaccatcggaatggtcggnaaccgggctggtcaccgnncgctttcggagncggctactgggctcacatcacagcttctactacctttctggggcgtcagatgatcg

SEQ ID NO: 27748 - DNA, 384 bp, Zea mays
  Clone ID: MRT4577_12531C.1
gtaattcccggggcgcgagctcttagacggcgggcgcgccctttttttttggggcaaaccgggcaagcctggatggggtgggggcataacatggacacggaagcagacacggtggacaaccaagtgcgcgacgacttacagacgttcagcgctagagcaagcgagctcgccagcacatggcatagaaagaatagagaaccgtgggacataaacacatgggcattattaggccagatatactggaacaaaacatgagctgctgatcaaatgcatgaacacgttggcctacgaaacgatggtctaatgccgaaggtcggcacgggcctagactcggacagagcaacgacattccgtgcggacgggagaccttagcccagctgcacc

SEQ ID NO: 27749 - DNA, 1547 bp, Zea mays
  Clone ID: MRT4577_125320C.1
attcaaaaaaaaaaaaaaaaaaacaccaacctccctagtcccccctacctctcctcactcaactggccgaccgcttttccgaacccgtgccgcccgccagtaactgttccatctttggcgcgcgcgcgtgcctggccgcctgccaccgccaccacccaacaccaccacacgcgcagctcatgtggcgtggcgcagtcgcgcagaggtcgaccgctctgcagtgcaaagaggtggaggtggcgcatgcctatgccttactgagctgcggcctgcggtctcctgcagattcccccgcgcccaccgcgccatgcgaccctcaccccaccacccaaaaaggcgcacccctttcccgcggcccaaatccccacttttccccgatccccaagcacccgtcgccgctccctcgcacgcacgcgcgcgccgcgtcgcctttatctgcccccccgctgcccggaactcggacgctgagccgtcgttgtcgctgggattgcagcagcgttggcgggccttgtggcgaggaggaggaggagaaggagggggcgtggaggcgcggcgattgttcgcgggatgagctacggcggcagcagctccctcgcgcccggtgccaagaggccgttcgagtacgggagaacgcatgtggtgaggcccaagggcacgcacaaggccaccattgtctggctccacggacttggggacaatggaaccagctggtctcaactgctggaaacgcttccccttcctaatataaaatggatatgcccaactgcaccttcaagacctgtgtcattgtttggcgggttcccctgcacagcatggtttgatgttgctgacctttctgaggatgctcccgatgacactgaggggatggatgcctcagcagcacatgttgcaaatttgttgtcaactgaacccgctgacatcaagcttggtgttggtggctttagtatgggtgctgctactgctctgtactctgcaacttgctttgctcatggaaaatatgggaacggcaatccataccctgtgaacctaagtcttgccgttggtcttagtggctggcttccatgtgccaggaccttgaagaacagaattgaagcctcaccagaggctgcacaaagggcttcaacaatacctcttttgctctgtcatggaaaagctgatgatgtagttctctacaagcacgggcagagatctactgatgccttgaaggcaaatggcttttccaatgtgctcttcaagtcgtacaatagtcttggtcactacactgttccagaggagatggatgaagtttgcaaatggctcacagcaaatttggggctcggcacttcgtcatcttgatcgcgagagaaagactcgcggtgtcggtgtcttctccagggtagtaaatgggctaatagcaaatttgggcttgggtatacggccatgttctagcttttcttcacgcagacgtgtctgcgagtgctgtacgcttataatttctatattctggtctacgtcgatttggttgacacggataatgtttgtttcaaatattctgttttccggtttgg

SEQ ID NO: 27750 - DNA, 2230 bp, Zea mays
  unsure (1)..(2230): unsure at all n locations
  Clone ID: MRT4577_125321C.1
acgacctcgcctgtcgcctcgccccggcgccccgcgacaacgagacctcctcctccgctcagccgcagaagccacctcgccgccggcaggttcaccaacaccaacctccctagtcccccctacctctcctcactcaactggccgaccgcttttccgaacccgtgccgcccgccagtaactgttccatctttggcgcgcgcgcgtgcctggccgcctgccaccgccaccacccaacaccaccacacgcgcagctcatgtggcgtggcgcagtcgcgcagaggtcgagcgctctgcagtgcagagaggtggaggtggcgcatgccttcctgtgccgcggcctgcggtctcctgcagattcccccgcgcccaccgcgccatgcgaccctcaccccaccacccaaaaaggcgcacccctttcccgccgcccaaatccccacttttccccgatccccaagcacccgccgccgctccgtcgcacgcacgcgcgcgccgcgtcgcctttatctgctccccccgctgcccggaactcggacgctgagccgtcgttgtcgctgggattgcagctcgaggccggccagcagaaggatccgggcggccaccgagagtcactggaagtctggaagaagctcgtccggcgccccgcgacgagacgacggcctcctcctccgctccgctgagacctccccgctgacagcggagcgctccgcagaggcgcagagagaggtggcgtctgccttgctgcgctgcgggtctgcggtctcctgcagattcccgcacccacaaggccagaggcgacccaccagcgccacccaaaaaaggcgcacccctttccgccgcccaaatctccctttaccccgatccccaagccccgccgctgctccctcgtacgcacgtacgcaccgcgtcgccctttatctgctcccgagggccgctggtcggctgctgaatcgtcgccgttgttgctgggactgcagcgttggcgggccttgtagcgaggagggggtgcggaggcgccgcgactgttcgcgggatgagcttcggcggcagcagctccctcgcatcaggtgcgaagaggccgttcgagtacgggagaacgcatgtggtgaggcccaagggcacgcacaaggccaccattgtctggctccatggacttggggacaatggagccagctggtctcaactactggaaactcttccccttcctaatataaaatggatatgccccactgcaccttcaagacccgtgtcagtgtttggcggggttccccttcacagcatgggttgatgttgctgatctttctgaggatgctcctgatgacattgagggaatcgatgcctcagcagcacatgttgcgaatttgttgtcaactgaacctgctgacatcaaacttggtgttggcggctttagtatgggtgctgctactgctctgtactctgcaacttgctttgcccatggaaaatatgggaatggcaaaccattccctgtgaacctaagtcttgccgttggtcttagtggctggcttccatgtgccaggaccttgaagaacagaattgaagcctcaccagagtgttcacaaaaggcttcatcaatacctcttttgctctgtcatggaaaagctgatgatgtggttgcctacaagcacggggnagagatctactgatgccttgaaggcaaatggcttttccaatgtgctcttcaagtcatacaatagtcttggtcactacactgttccagaggagatggatgaagtttgcaaatggatcacagcaaatttggggcttggcactaagtcatcttgattggaatttgatgcgagaaagactcgcagggacggtgtccaaataataccggtatcttttccaggaggtatatggtttaatagcaaatttgggcttgggtatacggccatgttctagcttttcttaacgcagacgtgtctgcgaatgatgtatgcttataatatctatattttggtctacgtcgatttggttgtggcacggataatgtttgtttcaaatattctgctctgcgaattggaattgtgatgttttgctttaaaaaaaaaaaaaaaaaaaaaaaaataagttcgcgaatacggccatgttctagcttttcttcacgaagacggtgtctgcgagtgctgtacgcttataatttctatattctggtctacgtcgatttggttgacacggataatgtttgtttcaaatattctccgttccggtttgg

SEQ ID NO: 27751 - DNA, 241 bp, Zea mays
  Clone ID: MRT4577_125322C.1
gtctaactcgacctagatgaactacggttaggacctcacgaaaacgcccgacatggaacgacacgcgaacgccggcatctcaaggtcataacaaccaggcggtgtgacttaacacgcgcatcatatagtcgcacacggatattgtctgtgtgtagatcatctgaaattgtggcgacgcactgcccaagatcaaagagcagagtcttaatcacaaaatacaacttcatgcgcaacctgaact

SEQ ID NO: 27752 - DNA, 360 bp, Zea mays
  Clone ID: MRT4577_125323C.1
aattttgggtattacttttattatttatattttttcatgggggtatttttaatggtttttggggattgtcccaaaaaaggtgaaaaaaaaatgggcccaccacaccgcccaaaccccagtctaccccttccagggcaaaagaaaaacaaaaagaaaaaacaaaaaagaaaaccaaaaaagaagaaaaaggaaaagggcaagggagatacacagggggaaaagccccaaaaaaacaaaaaacgaaaaaatcacccaagaagaacaggcccgcaaaccaaaagggggtccagggccccgggcacaaaatcaacaaagggggtggaacggcagggctaaatagggggcgggaaaagcaaaaga

SEQ ID NO: 27753 - DNA, 469 bp, Zea mays
  Clone ID: MRT4577_125325C.1
aaccctctagagtaaatcgtacgatcacgcacatcaaatacaaccgcgagggagatttgctcttttccgtgtccaaggatcatgtcgtcaatgcctggttctcgcacaatggagagcgtctcggcacatacgagggacacattggtgctgtctggaccgtcgatgtcaactccacgacgacgctcttggtctctggttctgccgacaacactgccaagctctgggatgtttcgaacggaaagtgcttaaagtcatgggagttcaacactgccgtcagacgtgtgcagttctcagaggacgacaagatgatccttctcgtcactgagccccgtatgggtttcctcgccaccctccagatcttcaacgtcgagaacggcgccacggagaccgtctcctcggagcccttgaccgtcattcatcccgaacgtcccaagatcatcgtcgctgcatggggagctctcatcaaata

SEQ ID NO: 27754 - DNA, 260 bp, Zea mays
  Clone ID: MRT4577_125326C.1
cttcacaccaccggcagccgagaaccatggcagcggctacggcgcacctcctagccttcctatcggttctcacgacgatggctgccctctcttcggtggctgccggtggtcgcatgacggaccagctcgacatactctgggcccaacacagcttctaaacggaagcaacggcggcgacgaccagaccatcgggctgtcgctggaccgcgtcatggggtcgggtttccggtccaagacctcctatctgtttgccaggatcg

SEQ ID NO: 27755 - DNA, 227 bp, Zea mays
  unsure (1)..(227): unsure at all n locations
  Clone ID: MRT4577_125328C.1
ttnnnnnnnaattttatgttttgccagcggctaatttgcgggcaggaggggcaaaaaaacgagacaagtctgatacaaacactttatccaacggggagaggtaacaagcaaaaaaaactatggaacaagaggccgaaaagaaagtttgtaaaggccccttaacacattctaaaacactcttcaaaagtctatgaaaaaacggtggggggggcccatccaactgaaag

SEQ ID NO: 27756 - DNA, 489 bp, Zea mays
  Clone ID: MRT4577_125329C.1
aaaaaaaaaaaaaaaaaaaaaaaaaaaaaaaaaaaaaaaaaaaaaaaaaaaaaaaaaaaaaaaaaaaaagaaaacaaaaaataaaaaaaaaagggggtccgttcttggggaaccaaacttccttccccctggcctggggcctacctaacgtttttttctggggccccccttttacaacccattgcccggggcttccaacgcattacccctttgaaaaccctggggtaacccctcctagttccgctgggggcgctcttcccttcggcggcggggcctatatgcattagggcccgccccctgccccttttcattaatggcgcccgctttgttgggtacggtcaacccccccgttacggttgtttacgccctggggggcggttgttttgctccatgccctcccttcctttccacgcgcccctgctcccccctctttgctctttttccccgcctttctccgcgagtcccaaggagtgcccctccctacctgga

SEQ ID NO: 27757 - DNA, 309 bp, Zea mays
  Clone ID: MRT4577_12532C.1
cccacgcgtccgccctaaactcccctcctttctccttacaataccgcgaggcgaaagctgagctcgcgtagcctctttcccacaccttcgcctgtgcctatactcctgcacaaataaccccttcgagtgcggttgctgctgcttcatctgcggtatttcttccacacactgactcggtatccattctacggacagaccgaccaatcgacccatccgtccaccgagagccatgaggcacaagcagatccacagcaagcagaacactagcagccaccggcgacgatcgcactcctttcatcatcagccttc

SEQ ID NO: 27758 - DNA, 116 bp, Zea mays
  Clone ID: MRT4577_125330C.1
gcatccaaggtaaaaaaattgaatcaggatacatccccgtccatacttgtgcagagcagaagaactacatttatacaccggagcgttctaccgcgtggagtgaaatgaatcaagaa

SEQ ID NO: 27759 - DNA, 357 bp, Zea mays
  Clone ID: MRT4577_125331C.1
tcgtaaaagaacaaaagtggatgtgcaacatctaacaaatgaaggaaccatacgaggggatccaagaacagtctgagatgttgccataaatatgttggtcgctcatatgacaacagactcatatctggcctttctttaagtgcatctgctctgagtgctgctgcacaatctggagaaaaagtgagaatgaccattgtaggccttggagctggaagattaccaatgtttcttcgaggatgactgcctattgtagatatagaggtggatgagttggaccccttggtcgatgagctagcagataaatattgttgcttttcaatggatgaactaatgaaggtacattggagagatggaatc

SEQ ID NO: 27760 - DNA, 280 bp, Zea mays
  Clone ID: MRT4577_125332C.1
ggctgtctggtgtatagtactgtgttactcagcatccctggcctctgcccactagacatcagaagcactcccccagttgtgacaaccaaaaatatctccagaccttggcaaatgttatctgtgggggtgaattgccctcaattgagaaccactggtctagctagacctgcactgtccagtacagtagccactagatacatgtggctaaacttagatttaagtgacttacgattcaaagctcagtttctcagtcacattagtcattccagtgttcagacag

SEQ ID NO: 27761 - DNA, 436 bp, Zea mays
  Clone ID: MRT4577_125333C.1
ggccggccggggcttatgagtgtgcgagcgaaggcgaccctacctccgtcgctcgttccacgacggctcccggccggagccgtcatggcgaaatactaacaggagccgggcaaccctaccaagtcagctaaggacatgggcagggatctgagggtacacttgaagaacacaagggagacagtcttggcgcttagaaagaggtctttgaccaaggctaagcgataccttgaggaagccatagctgacaagcaggcaataacgcttgcggagatactgcggcaggtcatggcatgactgctaacggtactggtctgcacactaatggacaaggacgatgtgcggagaaaacaacacgcacccatactcacacccataggagactgctgcaagtaacacgagatgatacaggtttatgatgtggacaggactcaatatg

SEQ ID NO: 27762 - DNA, 1307 bp, Zea mays
  Clone ID: MRT4577_125334C.1
atcccctttctccctccccgggaatcccccttaggtgacattttaaaaaatctcttgtagatgatcttattgaagtagctctagtactaagcctaattcacaataaggctcaaaaggcgcattaaaattttccagatcggcaccacacatacctgctcaatctacggatcggaagtccgtcactaaaatacctaaaagatgtatctcagcagtagttgacgtgagcattatttcaattatctcaaacctgtgcgtctgcccctttccagctttcctctcaaacggagagatgtactcggatcagatctccaccgggcgcaagcgctccatccatgaccgccttgacggcgacctccctgccggcacgggcgccggcggccgtgtccgtcacacggtgtccaagaggcaacgacagatagatgaaaaatggaagcatgatctgtatcgggaagatgatgaaccagcttcaaaatcaacagatccgaaggatttgcgattgaagcttcagaggcgaagttttcaacaagattttaccagcacaagaagttctggtgtgcgtgatctacgtgagaagctatctggtataatgaacccacagccatcaaatgctgacccaccaaagccaaagccaaagccagtatcggaggttgttaacatctcaaggcgtcaaattgctgatgaaatgcatgcacgccaaaataagaaaccaccaaagcagacttcatcgaagaagacatctcagccaaaggctgaaagtccactcgacagtttcctgagttcccttgggcttgagaagtactcaattaccttccaggcagaagaggttgacatggcagccctaaggcatatgacggacagtgatctaaaagctttgggcattccaatgggtcctcggaagaagattatccttgccttggaatcgagagcataagggaatgacaagggagtacagtgtaggaaggtgggggatatgctaggcatgctcgtgtgcaagttcgacaaaaactttgtatccacatatcttggaaagggtacaacaacaatgattttatgggtctcttgtaacgcataccctgtcctgttgagcatgttcagcgaagtttaggattgctagaaggcaggccacggcgtctattgctgtaacttgtttccgtgttaattaagtggtgcggtatacatgttgaggcagttgggttcgtcttggaatgctatatcctataactacttgggtgtttggttcgaagaatgagatattacatcatcttctcacttttcagaaaaaaaaaaaaaaaaaaaaaaaataaaag

SEQ ID NO: 27763 - DNA, 389 bp, Zea mays
  unsure (1)..(389): unsure at all n locations
  Clone ID: MRT4577_125335C.1
attggtgctcctttcactttgaccactaatacgtcatattaattgtacaacgtacagcatgatgtgatatgacagaatgcatgtttgttgtcagaagtggattttccactagcagtctagctcttcagctataaatctatgaacaagctatttaccacacagatgtttgttcatcattggaatcatcctctttctgaatgattccaacaatccagtttgttgcatgaagtggaaggtttcgaaaccaatagtacgaagaagaagaaaaaacctagggtgagcattgccaagtagggtctccctctnttccatatagactntgcagtcggcatgactgctccttcattagcttatatgtggagggacgatcccgtgccaccatggagaag

SEQ ID NO: 27764 - DNA, 1219 bp, Zea mays
  Clone ID: MRT4577_125336C.1
cattgggtacctcgaggccggccgggagcggaacgttggctcgtgtatttttgcaaatatctcctatcccttttctccctcccgcgatctcctccgctcgacgcctgtaccccgccgtcccgcgtccccggtccagctcgaaaccctagacctgtgcggctgtccctattctccccaacggaaagatgtactcggaccagatctccaccgggcgcaagcgctccatccacgaccgccttgacggcgacctccccgccggcacgggcgccggcggccgtgttcgtcacacggtgtccaagaggcaacggcagatagatgaaaaatggaagcatgatctgtatcgggaagacgatgaaccagcttcaaaatcaatagatccaaaggatttgcgattgaagcttcagaggcgaagttctcaacaaagctttaccagcacaaggagatctggtgtgcgtgatttacgtgagaagctatctggtataatgcacccacagccatcaaatgctgatccaaagcccaagccaaagccagtatcagaggttgttaacatctcaaggcgtcaaactgctgatgaaatgcctgcacgtcaaagcaagagagcaccaaaacagacttcattgaagaagacttcacagccaaaggctgaaagtccactcggcagtttcctgagttcccttgggcttgagaagtattcgattaccttccaggcagaggaggttgacatggcagccctaaggcatatgacggagagtgatctgaaagctttgggcattccaatgggtcctcggaagaagattatccttgccttggagccaagagcataagggaatggcaagtgtaggaaggtgggagggatttgctaggcatgctcatgtgcaagttcgataaaactctgtaaccacatcttggaaagggacaaagggtaacaacgacaatggtttgtgggcttcttgtaacacatatcctgccctgttgagcatgttcaacgaagtttaggatgttagaaggcaggccacggcgtgtattgatgcaacttctatttctgtgttgattaaatggtgcggtatacatgttggggctcctaagttgttcttagaatgctatatcctataactatatttttcttatccacagggtatgctatatttgaagctaggtggtttgggtcaaaaaaaaaaaaaaaaaaaaaaaaaaagtactctgcgttgttaccactgct

SEQ ID NO: 27765 - DNA, 291 bp, Zea mays
  Clone ID: MRT4577_125337C.1
caatttatgtatgaacatcacagactcctgatttttcggaaacgcggaattggaattccgcgtgcaattcctatctcatgtgcttgggctcgaggatcggcctactcagaaaacaatttattacaattcatatatgatcattagtgagtccttatttattgaaaatgtagagtatggtattccacaggaacaccaatccattttacttggacttgtggattggccggatgggaagacatatgattctaattcacacatgctcataccagccttcttagctgtggaaaatgt

SEQ ID NO: 27766 - DNA, 1701 bp, Zea mays
  Clone ID: MRT4577_125338C.1
atgattgatgatcttgataaaaaggcggagtttacttgcttatcgcctaacgagttggagtctaaatcttttgccaatgataggcttgccaatattttgagagaggaagaagttcgtatcttccagagggccaaggtcaatcatcttcttgaaggggatgataatacaaaatatttccatttagtggccaacggcaagcatcgaagacagcggatctattctttggaggatgtgaatggcggctgtattactgacgaggaagaacttaaaaaccatataacaagtttaaattttggagtaattactctaattccaaagaaggacaacgtaaataaaatccaggattttagacctatttgcttgcttaatgtttcgttcaaaatcataactaaagttctcacaaatagaataggtctagtggcagacaaaatagtcagcccctctcagacagcctttatgcccggtcgaaatattcttgaaggggttattattctccacgaatcaattcatgaattacagaggaaaaaattagatggagttattcttaaattagactttgagaaggcatatgataaagtcaaatgggagtttctccagcaagcgttgcgtatgaagggtttctccccttcctggtgtgcttggatccattcaatagtctcaggaggtcatgttagagttaaagtgaacgatggacgaggtccattttttagtactttcaagggccttcgtcaaggggaccctttatcgccaatattattcaatattgttgtagatatgttagcaattctatttgcaagagcgaaagaggtgaatctgttcaaaggaattgtcccgcatttgattccggagggattgtctatacttcagtatgctgatgatacggtggttttcttagaccataatctgggacatgctcggaacgtcaaacttcttttgacactgtttgagcaaatgtcaggactaaaaataaattttcataaaagtgagttattctgctatgggttggcgaaggaatatgaagtgcaatactctcacttattcgggtgtggaattggggcaatgcctttcaaatatctcgggattcctatgactcatagaagattgagaaatagtgactggcaaggtgtgattgatcggtttgaaaggagacttagtacttggaaggccaaatttctatcttcaggtggtcgactggtcctactcaattctgtgttgagtagtcttcctatatttatgttgtctttcttcgagattccggcaggcatcttgaagaaattggatgcgatccgttccagattcttctggcagggaggtgtcagtaaaagaaagtataggcttgctaaatggaatgttgtttgtcaacccaaagcgataggtggtttaggagtctctaatctggctgttaaaaacatcagcttactcagcaaatggctcttcaaattattcaatgaggatgggatgtggcaacaattacttaaaaataaacacctaagagttaaatcccttactcaaatatctaaaagaccgggtgattcccatttctggtcaggtcattttcagaggtacttactggttcagattctggagacttctacagaaggaggaatcacatcaacaaatcctcgatgtctgtcaagcgttggaagtggtggcgatgaaagtctttgcaaatcatggatggcgctcaaatgcaagaattga

SEQ ID NO: 27767 - DNA, 827 bp, Zea mays
  unsure (1)..(827): unsure at all n locations
  Clone ID: MRT4577_125339C.1
cattgggtacctcgaggccggccgggattccgtttccccagactctcttactttcggtccatggcctcagtagcttcagaaatggctcaatctacctccaccacacaagggtctacccgacagctgaccacaacgagcggcgacttctgcacatccaacacacccgatgtccgcaagcaccttggaacatacggcctgcaccctcctgctgtcgagagcttcgacacgcaggcgcagcgatgcctgaggcttcttgccatgaagagcaccccaattgagaagttccagtacctcactcacctcaaggccacaaacgtgcacctgttctacaggctgctgtcgcaaaatatcaaggaactcacacccctcatctacactcccaccgtcggcgaggcctgtgtaagatggcacgagatctacacacagcctgagggcatgtacctgtccttcagcgaccgtggcaaccttcgccaaatcctcgataactggcctcacgaggttgagatcaccgtcctgaccgatggctcccgtatcctcggacttggagatctcggtgtcaatggcatgggtattcccgtcggcaaactatctctgtacactgcctgcgctggtattcgtcctgaggctacccttcccctcaccatcgacctgngcacaaacaacaaggctctccgtgaggatcctctgtacatgggctcgagggtgcccaaggtcactgccgagnaaggagaggagttcctcgacgagctcatggctgctctgacagacagtggcccagcattgttattcagttcgaggacttcaagacccccttcccgccctgagcg

SEQ ID NO: 27768 - DNA, 182 bp, Zea mays
  Clone ID: MRT4577_12533C.1
aggaacccacaaccggggcgccccattttactaagaccttaacgtgaaacggaacttaaacgattgacggggacagggggggaacaaacccattggtctagagagaaacctggccacaaattagtatgacccaagcgtaaacttttaccggggcacaaaggccctcattcccctttttaatc

SEQ ID NO: 27769 - DNA, 462 bp, Zea mays
  Clone ID: MRT4577_125340C.1
gggatgcttccactattctggaagcttgcaagaacatgacttagaaactgttgttgctgaagtacaatgcactcatccggaagtcctgaaagtgcagaaaaatatggggtacaagcaatcttaaaattatgtccgaaatttactacaaggcgcaagggagtagacggatttttatacagaatatagtgtaaaagaaagcgttcaagtttggaaatttcagttcgcaaacaggagcttcggattcggatagatcacacagatttttccccaggaaggtgcgagggagaactggaaggatggcttttcttcttatggaacatgctggcgatgtttggcagcatgaagctcctcttcagcagcgctttactgctcctctgatgcccctcgttcttctcggaagcttttccggcagaagtctgacgtacagggggcgacgcagcacttcccagttcttctgccccc

SEQ ID NO: 27770 - DNA, 372 bp, Zea mays
  unsure (1)..(372): unsure at all n locations
  Clone ID: MRT4577_125342C.1
caaagcggcagtgcgatnagaggatcgtcgaacnnnannncatgaagatggtcatgggggtcgtcgtgtgcctggctctgtcagctgccagcgcctctgcaatgcagatgccctgcccctgcgcggggctgcagggcttgtacggcgctggcgcctgcctgacgacgatgatgggcgcctgcgggctgtacccctacccggagtacctgaggcagtcgcagtgcacaccgctggcggcggcgccctactaccccgtgtgtgggcagacgagcgccatgtaccaagccgcttccgggaacaagtgctgccagcagcagatgagggatttggacgtgcaatctcgtcttgcaacagcttgcagatgatgaatgc

SEQ ID NO: 27771 - DNA, 655 bp, Zea mays
  Clone ID: MRT4577_125343C.1
aaaaaaaaaacaaaaaaaaaaaaaaaaaaaaaaaaaataaaaaaaaaaaaaaaaaaaaggggaaagggaaggggaaaaaaaaaaaaaaaaaaaaaaaaaaaaaaaggctcgtttcgggacttttttttcctttcgaccgatggcttcctccaccgggggggggaaaagccccccccaaaccgccgaaggcaagcggggaccactccacttttgaccaggagtgggggaagggaggctcggaaagccagaagtcgattttggcaggggcagcacagccccccatggaagggctgacctggaaaacggggggtggttaataagggctgggccccgggctgttttggcccccggccgggggcattccttttggaaccgataaaaaaaagggcttttcgcaaaacggggagtatgagggggatcctgcccatgtttccttcggggccataaaggctgacccccgggggctttacaggaaaaaaggcgtggattttggggtaaaggaccctaagggcgctaaagcccgggattttcgaaaaaaaactagggaaaagttggagttcatagtccaaaagagaggggtccatggtttttgtttaacaaaaaaacccccgacccacgaaactatagacttgcgccggccatgtgggccattttt

SEQ ID NO: 27772 - DNA, 376 bp, Zea mays
  Clone ID: MRT4577_125344C.1
aaaccgaaccagaataccggtttacttaaaacgggggccacgataatattggtcaccaacaaagagggtttaacgggggtaccccgggacgacgacgataaatcgggcagggacggggccagccagccactggagcagacacacgagacctgacacaaaccggttagtccacctcctcgatcttggggccagggccaccgtttccagccggggggtccttgtccatgccggcgggagcctcccatggggggacccgcgccctggtacattttggcaaagatggggttgcaaaggctctccagctccttaattttggaatcgaactcgtccaacagccgatttttggtgggaaatttaattttcacggacccgtggg

SEQ ID NO: 27773 - DNA, 304 bp, Zea mays
  Clone ID: MRT4577_125345C.1
gcgtcttaacaataatgactgtgaaggaggagattttattttaaaccacaaatatttaaaaaccacaggcggtggactataatcatgatgcacctatcagacatcactgccataactaactacagcaagaaatatgcacccgcctctgacctatcgctttgttttcggcatagaaagaaacacacgccttgtttctttttcattagttgctctatgataacataaaccgtctgctttcatatgaagttactgtgaatagtgcagagatatcacatggacctatataagattcaatgaatattct

SEQ ID NO: 27774 - DNA, 251 bp, Zea mays
  Clone ID: MRT4577_125346C.1
gaccccacgggcccgaagttttttgggagagggcgaggggggggggggggggcacgcggcgtcgcaataggattcttgcggagaagttttgccgcggtatatgcgaatgggaaccgatgtctgccatcaaagtgatttctagcaacaggactgtgacaactggaaaacatcggaggcattttgtgcagaggaggatatacactcctgcagccgggagtggggggggccaaacgctttttttttttttttgg

SEQ ID NO: 27775 - DNA, 404 bp, Zea mays
  unsure (1)..(404): unsure at all n locations
  Clone ID: MRT4577_125347C.1
gttggtgaggggaggaagggnaagattatagaagagattngnaagagtttgaagatgaagaatgaggttgagngtgaggaggaagaggagatnngnagggagaannagtgggatttngagtaaggaggtgntggatgtattgatgngtaagtttggtggtgtgtattagtatgtntatttttttttnggctaannggtggaagnattnngggagtcactttgcttgcgaatgtntcgcgtaagacttatgtggtcaatgggcggttattaacttattaccatgaaagcactgcgtgtgctgccctaagaggtttagtcccatttggattataaacaaagaaaaaaaaaaaaaagcgggaggtagagctgcaggttagggtgccttgagtgagggttaattgcgc

SEQ ID NO: 27776 - DNA, 212 bp, Zea mays
  Clone ID: MRT4577_125348C.1
gtgagcgtgtcaacactgatgaaggcgattatgatttgtgagcttgccccatgtgatgggactgttgcctacaatcgtagtgtaatgtgctggtattctcgaatgccatatcccatagtctgccatggcttggaataacatagtgtctgactgatatgtcacgaggcactttatgtagtacttacagaactactacaatgttgtactataca

SEQ ID NO: 27777 - DNA, 551 bp, Zea mays
  unsure (1)..(551): unsure at all n locations
  Clone ID: MRT4577_125349C.1
cttcttttgcccccgggggggggggtggggtgcaactgcggatcaagctgcggctgcggctcatgctgcangtgcggcgngaggtaccctggcctgggggagacgagcaccgccgcgcaggccaccggcgtgcctctgctgtgtccccggngnaaaaangccncgctctgtgggggggggggcgcttttttattccngcaaggccgcccacggctgcggctgcggtggcaactgcgagtgcgacccctgcaactgctgatcacctcggtcggcggccatgggtntgattattatctatctagcttgtggtggtgggtgagctattttgagcgaggccgagctggctgccctacataggtcttgtgtggtgtgtgtgagagagagagaaacctagttcttcacgttgctgtctctctctgggtggttggggtgagtctttgggctcgtgtgcgtgccgtgtggctacctgcgtgttgggttggtccgcttgcgtctgctgggcccctatcttattgggggcccgggggctggtttgctgctctctctatact

SEQ ID NO: 27778 - DNA, 713 bp, Zea mays
  Clone ID: MRT4577_12534C.1
ggccgcttttttttttttttttttagaaaaagcttaactgaggaatccacagagcattcaactattgtaaggagaagcgatacaactttcacccaattcctatacccagaatttgctgtttaatgttaatatatcataaaaaacaagcgaaactagtctgatagtgtacaatttttccctcgattttttcctcccgtgaaaaaaacagtttatagctgtttcacatagcccttcagcgtcttgcggaaggtaccatccaggcatccagcccttttagagaagtatataaaaaaatgtagattgttcactaaatacagaagattgacactaacagtacctcattcatgggtctacggatgggggacacagacactcgacaggacacataaatcttgactatttcttttgttgttcttgttcatcatgcttgtgccatggattgagggcttctctcatagcttgggcctctggactgctttcccaagctcgtttttctgactccaagacagttaccttctcatagaagcccgtgtggatcatgaagagctccatggcggcgccaatggaggcccctaccgccgcgatcttcaggtaccaacccgcgaatctcataagtccctccccaagcaaatcctcagaggcagggaggcagaggcggccggagcgagctgaggcgccggcggcggcggcggcggctttgatgagcttgtcgt

SEQ ID NO: 27779 - DNA, 296 bp, Zea mays
  Clone ID: MRT4577_125350C.1
gacgcttgggcagacgccgggggccacccgcgaagaaccgacggggaccagcagggggagcacccggggccaaaaggggggggaccacaggaagccggaaacagggccaaaaaaggcgccagcgggaaaaaagaagacgcggacaaaaacacagaacaaaccaggcccaaagcataaagcggaaaaccggcgggggctaacgagggagcaaaccaacaataaaaacgggggggccaaagggggacaaccaggggggaaaaaaggggagccagccgcaggaaaaaagggggccacaa

SEQ ID NO: 27780 - DNA, 481 bp, Zea mays
  Clone ID: MRT4577_125351C.1
gcagcggctacatcgagcgcgccgagctggccgacgcgctcgccgacgaggccggccacaccgacgaggccgcgctcgacaacgtcatgcaagaagtcgacaccaacaaggatgggcggatcagcttcgaggagttcgtggccatgatgaaggccggcacggactggaggaaggcgtcccggcagtactcgagggagcgcttcaagacactgagcaacagcctcatcaaggacgggtcgctccggatggcgcgatgaccacagcaagacgatgcatatgtgcttcagacttcagagaggcgatcgatgcgatgagatgcttggtttttgatgcatactacatcacttcatcaatggatggatggatggatagatttattttcttcagctttttttttgtatatattcgttctagaaagtctctgaactttatttagaaatatttattatcaattaacaaaatctgctgagggctttggatc

SEQ ID NO: 27781 - DNA, 352 bp, Zea mays
  Clone ID: MRT4577_125352C.1
aaaaactggagcaggggtccccctttgtcctgtttacaaaaaaaatttttagatggggccatgtccaatgagtatagtccatctaaactgctgagctgaaaaaaagggaaaaagaaaaacttacaggcttttatgaagggcactcgaccatcatttggtctgaaatgggctggtgttcaacaccaaataatagatggggaataaacaaagcgactcaagacgaattcttcaaaacaagggtttatttttattggcgacgatgttgttgttttttcccaaacccaaaagggaaaatatttacaggagtcagctcattatgcgctctttttcctttttttcggacgcgggggtt

SEQ ID NO: 27782 - DNA, 410 bp, Zea mays
  Clone ID: MRT4577_125353C.1
ccctctccctcccccttatattttttttttaggagcaacacccactctcgcaacagataaatctttttacactaataaacccctccctttacattacattcaataaaacaatgttcaactccaaaaaaaaaaattacgagttcaaaaaaaaaatacaacaacagttaacccgggggaaaaggctccttaaagttacaaatactctcataaacaaaaaaaattatccctaaatatatttttttgttataaaaacgattaaccatctattaaaaagacccttatattcccaaaacctcttactaccaaagacccaccaccatcctttcaaatacccatcaacttggaccataaacaacacccattagacattccttccatcgaatctcccaaacaagagtaaaaattccatc

SEQ ID NO: 27783 - DNA, 3642 bp, Zea mays
  Clone ID: MRT4577_125354C.1
atgggcatggctttctccaaccaaattgttgagcagatacgaaattgttgggtacaaattgctgagccggggatgcgatcgtacccgacgtggatggggcacgcggacgagattgtttcggccgggcacgcgggatgtcgtctgcaatttcgcatgcgagcccgcgccgatgggaatagggtaaagaagatttgccaatccgcgcgagaaggtgcttatccttaccagagagaaggtcgtcgccggcgtgtggagagggtcgcgccgtcgcgtgctgaaggtcgcgctgtcgcacgcgggagaggaacgtgcgggtcgcgctgtcgcccgcgggagaagaacgtgcggcctcgtgcgtgggtatcgtttcagaggcagctggttgggcctcaggtggttgggccacaatcttgtttggacgcgggaagaggcacgtatttgcgccaaaatcagttttctgcgcggggagagctggattcaatgtttaacgaccacagagcaagcgtgtatggtggtgcgtacctgatgactgacaatgtacgagggaacttctatcggcagatggctcgtattagatgcattgcacgtaagtcagtgatcccctttttgccttctcgcctggcgaagcgtccactgcaccgcacggtgccaggtcagtctagtcacctggagagactgcatcgtcacctgcacgaggagcaggagcgccgacgccaggagcaggatcagcaggactcttcccccttgcctcatcaggaggtggagtctgggaggcagccttggcatgcatctcagccagagatgcctcctacaccaccacagggcatccccgctgctggaggagaccctgacaaagacggaaacgacgacgccagtggcagttcgaaccacaacgcggagctctcggaggacggggtagctgatggccttgacctgaagtactaccctcatcgttccaccggcaatgttggaggtgtgattgtctcgcctattggtgaaggcaatcccaggctgaacaacatggtcaacctggtcgtcgtgctcaacagcgagctggaccacgcccttgacaagttgtgcaagatgtctgagaataggcacagaggtgcaaggcatgctcagccggaacagcaggcaccccaggaggaggcagctcaggaggagcagttgccaccaccacccctgatgacagttcagcagatgttcatgatgcaaactcaggcagtccaagcaattggtcagaccctagcagtagcgcagcagtgcaacgattgcaagaaggttctgtatggtccccatctgctaaggggagcagcacagtcctggtgggagtcttaccttgccacccatgccgaccctgaagccatcatctgggaggagttcagggacaacttccatcgttaccatgtgcctgaaggacagatgatatacagggacaagtttctgcagctgtcacgctacgccctagaagatgtcaacacggatgctaagaggcagtaccgttttctaagaggtttggttgatccccttcactaccagctgatgaaccacactttccccaccttccagcacttgatcgacagagcaatcatgacagaaaggaagtgtcgggaaatggaggacaggaaacgcaagattggtggatcccaggtcaggagtagcagccgtccccgctactcaggcaacccaccccagcacttcaagcaagggaggaaatcaataccagcgtcggaacaaccaggcagctcgccttcctgccctagcaaccaaacagctccagcgcaaggaggaggtcatgcatgtttccattgtagggaacaaggccactgggcgaatcattgcccaaagaaagcagctcagcagccatctcccaatgcccctaccaggcagaatgcagcgcaacaaggaggcaacaaccatggtcaggcttacaaccatggaaaggtgaaccacctggaggtcgaagcaatccaggatgctcaggacgtggcagtagctctagtgctatttgtggagaagaaggatggtacgaagaggatgtgcattgattacaaatctttgaatgaattcactgtcaagaataagtaccccctgccccgaattgaagacctgtttgatcagctgagaggagccaatatatcgaagacaacattcatcaccaagtatggactatacgagttcatggttatgtcgttcggtttgacgaatgcaccagcttacttcatgtacttgatgaacaatgtgttcatggactacctcgaccagtttgtagtggtgttcattgatgatatccttgtatattaccagaatgagcaagagcatgaggagcatttcaagaaagtactccagaggctacgagattgtcagttgtacaccaagcttagcaagtgcgagttctggatcagcgaagttctgttcttaggtcatattatcaaccgagatggactagctgtggatccaaagaaggtagtagcaattttggactggaaagcaccaaaagatgtgcgaggaatcaagagttttatcggaatggccggttactatcggtgtgtcatcgagggtttctccaagattgccagaccaatggtagacttgctggcaaagaaggttgagttcaagtggacccccgcgtgccaagaatcatttgagaagttgaagcagaagttgacaacagcaccgatattggttctgccagatgttcacaagtcgttctcagtatattgtgatgcttcgtacaccagattgggatgtgtgttaatgcaggaagggaaagtagtggcatactcgtcccgccagctgaaggttcatgagaagaattatcccactcatgatttggagttagcagcagtggttcatgcactgaagacctggagacattatttgtatggacagaagtgtgatatctacacggaccacaagagcctcaaatacatattcactccgttagagctaaacatgagaaagagtcaagttaatatgttggtcgctcacccgatgccgttcgagctagcaaaggaattcaacatgctaagtctcgggtttctgaacaacactcaaggagtgacagtcgagttggaacccactctggaacaagacattaggaaaggtcaaaaagacaatgagaagatcaatgagatccggcagctgatcattgatgggaaaggtcaagatttccgtgaagatacagaaggagtggtatggttcaaggataggttgtacgttcccgacatcaaatcgatccaggaactgattctcaaggaaggtcatgagatagcatattctatacaccctggtagcgagaaaatgtaccaagacctgaagaagagattctggtggtacggtatgaaaagggagatagcagagtatgttgccagatgcgacagttgtcagaggatcaaggcagaacatcagaggcccgcagtgtcgcccatcagaggaaccaaaaggttcggagtcagaggcaagctagcacctcgatatatcggaccataccagattcaagcaagacgcagagaagtggcacatcaactcagcttaccagaaaatctatccgccgtgcacgatgtgtttcacgtgtctcagttgaagaaatgcttgcgagtcccagaagagcagttgccaacggaggaccttgaactttaa

SEQ ID NO: 27784 - DNA, 358 bp, Zea mays
  Clone ID: MRT4577_125355C.1
gcactgcatatggcttcatacctatagtagtagttgaatctttgttgggtggggcccaccgtccagcagacatgtaactttctcttttcttgcgctataaaagagattagagtaatgtagaaataaatcagacccaggcgaacacactcacctgggctggtacaggtctagtcaatccagaatctgtttaattccacaagttaggtcgaaccaagggttcaagtgaaccagaggtcagttagtctataacactcactagaaccaaaaggaacgagagagctatttggtcatctgtgtctcgagcaatatctgagtgtgtaatcttcttcgcctctgtttcaatcaatccatttatcac

SEQ ID NO: 27785 - DNA, 245 bp, Zea mays
  Clone ID: MRT4577_125356C.1
ctctccgccacggggggccaggggagcacaaaagaaacccgtccgagggctcccggctaagaagctccgcgccgctgcccatgcgccggaatgccacctgcgacgacttcatggccgccgactccttcaggacccacgcccacagcacaagcggcaccacacggcgggcgcggggggaggcaaagctgattttttcatcaacaagatcggccgcaacgggcgcaactaactgaaaagataaaacg

SEQ ID NO: 27786 - DNA, 355 bp, Zea mays
  Clone ID: MRT4577_125357C.1
ctaggtctagatcgcgagcggccggccttttttattattcaagggggagctctaaaacctcacaattaccctaggaagataacacgcccaccaacaccctgttgaaggccacccaataaacaccacagaccaattcaccccaccgatctagaaaaccagtacacataagcttgatccctcgtccaagtaccaaacacaaaccgtaaaatttcaattaatctttccatcctatttctaccgtatttgaatggatgtatattaaataaaatttggtaactttacttaaaatacaaattttttattcataagttccatttatcataaaataataaaaaataacagatactatattaat

SEQ ID NO: 27787 - DNA, 621 bp, Zea mays
  Clone ID: MRT4577_125358C.1
gacatggaagggatcaatgttttgaagggtttgccacagaactccattttcatgagcatcctcggtggcaccatcattttccagttcatcctggtccagttcctaggagattttgccaacaccacgcctctcacccatctccaatggctcgtcagcattctctttggcctcctcgggatgcccattgctgctgccatcaaactcattcctgtggaacctcgcgaagatgatggccggataccataatcatgtacattaagagcaatagatcagcttcaccagctgctaactactgtaaccttacctaatccacaagaataggagcagagcaccaatttgtgaagaaacggtttgtttgactgcgacattaatatacccgtattactaaactgtatattgagtcgtccatttatttttatttttgtttccttacaaatagtgccttgtggcttgtatacaccagcgtccatttgctattatgaaatggcatgtggtggattacaataacgtgggattgttacatagtttgtacctgtgtcagttgtaagtagactgcaaatttgaatgcaacagcagttataactctagcttgattgatgattcaaacagttcaatttctgg

SEQ ID NO: 27788 - DNA, 254 bp, Zea mays
  Clone ID: MRT4577_125359C.1
ggcaaggaagaacccggacgggcgcccccaagacccaagccaagccggaggcaaaaaccggcacagcggacccaccccgcgcagccccggcggccacccccagccacccagacagccaggggcggcaaggaccgcgggaacagcggcgaggaccaacagaggcgggcgagccggcgccagccaacagcccggcaagccccgggccagaccgagggagagacaggaccgaccacaaaccggaaggcccgccccac

SEQ ID NO: 27789 - DNA, 584 bp, Zea mays
  Clone ID: MRT4577_12535C.1
ggatttgcttggggagagacttattatgagattcgcgggttgggtacctgaagatcgcggcggtaggggcctccattggcgccgccatggagctcttcatgatccacacgggcttctacgagaaggtaactgtcttggagtcagaaaaacgagcttgggaaagcagtccagaggcccaagcaatgagagaagctctcaatccatggcgcaagcatgatgaacaagaccaacagaagtagtcaagatttatgtgtcttgtcgagtgtctgtgccccccatccgtagacccatgaatgaggtactattagtgtcaatcttctgcatttggtgaacaatctacatttttttatgtacttccctaaaagtgctggatgcctagacggtaccctccagaaggcgctgaagggctatgtgaaacggttacaggctgtgttttttttcgcttgagcaaaaataataatctaaggggaaaatttgtaaaataagactggtttcacttgtttgtatgatatattaacattaaaacagcaaattatgggtaaaggaaaaaaaaaaaaaaaaaaaaaaaagggggcggccgctct

SEQ ID NO: 27790 - DNA, 778 bp, Zea mays
  unsure (1)..(778): unsure at all n locations
  Clone ID: MRT4577_125360C.1
gggtacctncgagccggccggggaaatccattttccgatagcatccgacctctcaggtctcgctacccagtagtgcctcataaatactatactcaatggtcagcatgaccatgatcacgcatcctccacgaaccttctccggaaagancgggagactggcggccacgtcgccttcagagaggacatggcgacgatcgtcacgacaacgaccactgcatcaccacggactacgtgagctacatggtcgaacacgaccgaccgcacgctgaatgtgagcacagtgactgacatcaggatctaaagacttctatccccgaagacaccactgtcattggcgtagtgacctgagaaaatcacacgtcgcgaagatgcggcagatgaaggcgagcaactcacggtgggctatgctgagaaggatcaggtggctgttcatctcaatgctcgcgccaaaaagggtgatatctctgcaccaagcagagatgcacgcatgtttcgcagatgtttcaatgaggagaagtacactacctctgtaaacatagtttcatccgctagctgagcaaccttgtgatttggtcctgttgctaagggcatttgtgaacacttcgaggattgttgaggctccgaatgaaacttgttatgagatcactggccacaaaaaaactgttgaaggaccctcacccaaggactgcagaggtggcagggctgccagcttttaacatcattccaagcaagaaccggtgctgccaacgctgttaggaaaagttcttcctgacctgaa

SEQ ID NO: 27791 - DNA, 123 bp, Zea mays
  Clone ID: MRT4577_125361C.1
gacatgaacgacgttatgccacatgcctaccaagagctagtcgacaactgcaggatactggcgagccactctaaagaaatgcatgacatccaatctacagatcacgagagcaggttgcggatg

SEQ ID NO: 27792 - DNA, 1257 bp, Zea mays
  unsure (1)..(1257): unsure at all n locations
  Clone ID: MRT4577_125362C.1
cggngnccgccggtcgcacctgcggcccacacaggtcggttttcttcgacttgccgacctcgccaggccacgggtggcttcgccgagcgcaatctcgtcggtcgcggcgggttcggggccgtgtaccgcggcgtgctcgcggacgggtccgtggtcgccgtcaagaagatgctggacccggacatggagggcggggacgaggagtttgccaatgaggtggagatcatcagccatctcaggcaccggaatttggtgccgctccgtggctgctgcatcaccgacgaagacgtcgaggaagggaagcagaggttcctcgtctacgacttcatgcccaacggtgcgctcgaggacttcatcttccgggacagggaagctgctacgaagctgcccccattggcttgggcccagcggcggagcatcatcatggacgtcgcgaggggtctcgagtacctgcattacggcgtaaaaccggcgatttaccacagacatcaagtcggactaacatcctgctcgacagcgagatgcgcgctcgcgtggcggacttcggcctcgcccggaggagccgtgaggggcagtcgcacctcacgacgcgcgtcgccgggacgcacggctacctggcgccggagtacgcgctgtatgggcagctgacggagaagagcgacgtgtacagcttcggcgtgctactgctcgagatcatgagcgggcggcgagtcctggacatgacggcgccagcgggtcccgtgctgatcactgactgggcgtggactctcgtcaaggccgggcaggcgagggaggtgctcgacgaggcgctgtccaccgccgagagcccgcggagcggggtcatggaaaggttcgtactggttggaatcctgtgcgcgcacgtgatggtggcgctccggccgaccatcggcgacgcagtgaggatgctggagggagacatggacgtgccggagctgccggaccggccgctgccgtacgggcacaacgccatgttcagcgaagctggtagtaccttcagcatctcaccggcgttcagtggtccgttggccccgttcatagacaatggggacatgctgaggtgattgatgaagcaggccgagttcgttcgattgcagaaactagataagaatcacaggtgttgtagatagctgttaagggttgctgtttgttgattgattgaaattcatcttttgtagtatacgttgaattggcaaatgaacgacattcacatcaaaaaaaaaaaaaaaaaagcggccc

SEQ ID NO: 27793 - DNA, 382 bp, Zea mays
  Clone ID: MRT4577_125363C.1
aaggaccgtccaagcgacccagcatggtggacgtagcctacacgctgtccaaggcggacgagcacttcgccgactactccggtgagagcgtgtcggttgacggcagcggcgagatcgctgctcggtgaaccaccatccttcgtttcgtcgtgtactcggtcctactcagtagtaatatggtttttagtaatagggaggatttgggaaggggaacggttggatagcctcatagactggcgcgtgacttgacacggcctgcctgtgacggcgggcgtacgtcgtcctggtatctgttcctaggtcagccccagcacggacggtcacgcacaaaatccatcggatgtaatctgaccccaaacgctcctgatctttcttgctcccc

SEQ ID NO: 27794 - DNA, 110 bp, Zea mays
  Clone ID: MRT4577_125364C.1
tgttgattaggcaatcgacatatgcaagttgcagactgagtatgcaagattctgtacaatcagattatttgcatactcagtctgcaacttgcatatgttgattgcccaat

SEQ ID NO: 27795 - DNA, 706 bp, Zea mays
  Clone ID: MRT4577_125365C.1
gagggccggccggggccggggatcttacaagtactataactagattttcaccataaggtctcttgttcagtctaatttatatgtcctcactctgatgtttggatgctcgttgttataagtgtgtcctcactctcggtttgtcccgggtggctttgtcgcactgctgtcccccacatatcgtcgaccggccttctctaccctcgacatcctatactctcgatcttattgtcagccaggtctgacagaagcaggtctacctgttgggggccttcggcttccgaaggtcctcaaaaacatgatttaacagtgtttctagagtgtaatgtgtgaacaggtaccttcggacttatatcaaagagggagaacctcaaaagatacgaaggttggcagtgccgaagctgtgaagcaggaaagcttcggcatgttcgcagaaaagggaaccgacttaaagatgaaaaggccatttagacctcgatagattgctatggaattatcaccaaatgtaaagggcatgtatgtaattttgtatgggttgtatcccgtgcctataaataggtgaacagtacccccgtactgttcacgctgacttggcattcgctttttgcgtcacacttgtactttcatctccttccaagccgaaggtacacttataatacaatattgtttctatttctctatgccaaaaaaaaaaaaggcccctagggcc

SEQ ID NO: 27796 - DNA, 155 bp, Zea mays
  Clone ID: MRT4577_125366C.1
agagcggccgcccgtacaggtacagactgttgcaactattgttgttgcatgtgtgtaggagctgtggcaccagcttgcgttctttcttaaagctgctggtggtgccgacgctaggcggcagcgtatcccatggcctggcgactgacccctggcag

SEQ ID NO: 27797 - DNA, 1234 bp, Zea mays
  Clone ID: MRT4577_125367C.1
tccggcctgtcttcctcgccggctgatttttgccctcgcgcgatccaatcctctcagccgccgctcaacttcgagaataaaaatcctcgcgcgcgcccaggatcttcttcctccctgcttccagcgccgaggctccctcccccagctctctcacggtcgcccctgctcctccggtcctccctcggattcctgctctcatggacccctatggcgccctgcttgctccctgtgccgcagtccctcctctctcctccctccatttctccttcacgcgcccaggctcgccgtggagtttttcgcgcgcagctccctcagctccgtactcagcgctcgtttctgctcggattcctgctctcatggacgcgtccagcggtgctcctctgatgcgcgcgctccagtcgtctccccgagctcggctctgccgctcctatggtgtccggccagctctcctgctcttctcggttgcctgcgtgcctagtgtcgcacgcatgctcccaggtccgcagcaccagctgcctgttctgcttgctcgtgtctgcgcgccgctgttgcccagctcggatccccctcgctgcgcgctgagctcttcgttgttgtccgtgcgcgcgccgctcgtcgacctctctgcgcacgtatagctcgctcttttcttatttgcggcgcgcacgaattttatctgctcgccgcagcgtgtcgagttcctgcaccatcatcgcttctgtcgcaagctcgttggccacagttatcttgatcgcgtcagcacgcgactgtggttgttggggaccttcggcttccgaaggtcctcaaaaacatgatttaacaatgtttctggagtataaatgtctgaacaggtatcttcggactcgtatcagaaagggagaagctcaaaagatacgaaggttgacacagcgccgaagctgtgaagcagtaaagcttcggcatgttcgcagaagagggaaccgacttaaagatgaaaaggccatttagacctcgatagattgctatggaattatcaccaaatgtaaagggcatgtatgtaattttgtatgggatgtaccccgtgcctataaataggtgaacagtactcccgtactgttcacgttgacttggcatttgcttttgcgtcacacttgtattttcatctccttccaagccgaaggtacatttataattcgatattgtttctatttctctatgatgatataaaaaagttaaatgaataatgttatatgat

SEQ ID NO: 27798 - DNA, 2353 bp, Zea mays
  Clone ID: MRT4577_125368C.1
atagcaatcggataacattattcatttaactttattaactcatcataaaggaatagaaacaatattgaattataaatgtaccttcggcttggaaggaaatgaaaatacaagtgtgacgcaaaagcaaatgccaagtccgcgtgaacagtacgggggtactgttcacctatttataggcacggggtacaacccatacaaaattacatacatgccctttacatttggtgataattctatagcattctatcgaggtctaaatggccttttcatctttaagtcggttcccctttctgcgaacatgccgaagctttcctgcttcacagcttcggcactgtgtcaaccttcgtatcttttgagcttctccctttctgattcaagtccgaaggtacctaatcactcattatacctcagaaacgttcttaaatcatgtttctgaggaccttcggaagccgaaggcccccaacacaatatatcatatttagacaacaaggcattttaataatacttgatatgcaaccacaggtaaaagcgagcacaaaagcatagataagctactactaaaccataacaagcatcatgatcgttggactacctattgcttgaactaaattatttacacccacaaaagtgtttcccccttcttaattcattcaagtctaaagcaagtgttaagaaagaaaatgaacaaccatatgcaactacaagacttcaccaatcaataaccaagaactaattaatcctatctagccaagcaagaatgattccaagcaatcaatttaacatgtgcagattttttttttgacagcagcacagtagtcaattgttttattcataacttacacaatattcgtccaaaaatagtaaactaaaactttttgaaaagcttataaagtcctctacaattttggtattatcatcacagtgagattcgacatatagaaatgtcaaacaatgctaaacgtaaattctgtccagatttggacagaattcgactacttacttcaaaaattcataactggagtttcaaacatccaatacatgtgatcctagactttttagaaagctaataaaattgtctacaactcatttataatcatctccagttaattcaatgcgtagaaaggtcagttaacacaagcagtctcttctgtccagatttggacagattcagacttcatatttcaaatagccataacttgacttctagaccaccaaaaagggtgctccaaaatttgttggaaagcttaagaaaagtactacaattctcctataattactaagagctgattctcaatttaacttagccaaacaatccaatttccggaacctgtacagaatttagacagattctaaaactggacctggaaaaatcataactctcaaactactagacctatgaccatgatatttttataccagtaagacgaagaagttatctacatcttttatatataacacattcacagaaaacttggtttactttactaaactaacttcttacgtaaaactggtcatgcagcattaaacagcaagcatcacacatgttcttaaaacttagaattctctagtactttattacaaattaaagctaagatcacctacttaattacactatacatatacatattcacccaagtatattccacataatatatcatcacaaaaaaactcgtctgaatcatatactacacatatacctaaagaatttactctcctttgacatgttcattcaccaactatcgcacatgtggacaacaatgaatctgaaagtcgacacaccatatacttgcgctacaaacaagaaaatcatcgaccacaactctaatcaatacaacgatcaaattaactaaatagagtagcgaataggctcaccaattcacaaaccgacccgaagatccgcgagaaaggcgaggttcccggttcggaccttccatcgaacacttggcaaacgtcgcacggacctcgcttctttaccggttaactccctcatcaacacacacaatagtaattgacgtcgagcgctaaaacgacagggcgagaacaaaacctcaccgggggtcgacggtgtcgcaggtggggctgcacacaacacaaaactcctcatggtcatttcgtcgagcaccagggagatgacgcaaacaccagtagaaaggggctggacgagcaccgtgtgccataggagaggctgagtgcttgcagcagcagggccgaaggggaagctgtggctggggcaggggcgaggtcggccaccagggatatggccgacgagcacaggcaagcacagtagggcgagctcgacctgggtagaggaaaaacgtatggggaggaagtgacgtaaggagatgcacactac

SEQ ID NO: 27799 - DNA, 424 bp, Zea mays
  Clone ID: MRT4577_125369C.1
gcttgctctggggggaaggagagagagagagcgagagagagagagagatctagtagagaggctagtaggtggtcctcgaacgaagatgttgtcggtgttcaacggccatatggtggaggtgccggcggagctggtggcggccggcatcctgacgccgtcgctcaatacgaaggcgtcgcagatcgtggggcgcttcctggccgcgtccgagccggtcgtgtacgagcagctaggagacacacggtcacctcgactactcccacaccaaccaggcgcttctacttcccaggtccgtcgcggacaaagacgaagtgttctgtctgttcgaaggggtgctggacaacctgggtcggttgagccagcagcacgggctgtcaagcaagggcgccaacgaggtgctgctcgtaatcgatggctacaagac

SEQ ID NO: 27800 - DNA, 441 bp, Zea mays
  Clone ID: MRT4577_12536C.1
caggccgtctctagagcagcgcggctcttagcgaccaccacattagctataaaccactcaagccagatgcgctgttgactatggacaacccttaggtacttcaacataggaaccgccatttttaccagtagactacatctacatgaacacgcatcaactttattgttgactgatgtttaaaatgaaacacagcattttatgaaatatacacgcataggcagattgaatttacataactcataagaagtgatttaaattttcagcttaaaaaataaaagacttcattgttgaaaaacaaggtacaactttagcataacattcattaatacaatccggtcgatatcacgtgttttatgcattatgagttcattggaggctttagactttgaaagggttaaaaacagcgggcttacctatggggggacctatttaaacatgggg

SEQ ID NO: 27801 - DNA, 281 bp, Zea mays
  Clone ID: MRT4577_125370C.1
gattggtacctcgagccggcggggagtctcacaaggcacaatactgctaccagaccggcggctcgtcctcgcgacggcaagctagtcctgacgccataatctggaagtgacgccaccgccgatcgaccgggcggcgacccatgctccgctcggggctcttccgctcagcccccgggctcctccggagtccggcgacgggccacttatccaccggcggcggcggcgccagatcgaggttccaggatgggcatggctccgccccaccgaggtggcgactcctg

SEQ ID NO: 27802 - DNA, 479 bp, Zea mays
  unsure (1)..(479): unsure at all n locations
  Clone ID: MRT4577_125371C.1
ctgcatctcgtcttctgacctttcgtgtggtggtgtgcccaacaaaaacagatcatgtacacgagccttgctccgcacggtcccctgaagctgtaccacttcatcatcatggtggccgtggtgctggcctttctctcccagctaccgtctttccactcgctgcggcacatcaacttcgtctcgctgctcctgagcctgggctacaccgtcctcgtggcagccgcctgcgttcgtgcaggtttgtccaaaaatagtcctgcgaaggactactcgctaagctcgtccaagtccgagcagtccttcgacgctttcctgtccatttccatccttgcctccgtcttcggcaacggcatactgcctgaaatccaggcgacgttggcgccaccggcagcggggaagatgatgaaggcgctggtgctgtgctactccgtcatcgtcttcaccttcttcctctcgtcgntcacgggctactgggcctt

SEQ ID NO: 27803 - DNA, 375 bp, Zea mays
  Clone ID: MRT4577_125372C.1
agtcagcacgaaccaagagagctgctccagttgctactaagctgccttgagctgacaaagcagctctagttccttcactgctaccttcagttgataaagctactccagtgtctcaaaaatctactatgggaaacaaagcgactgacgcccagcccaaatgtccagcagttgacaaagcaactgcacatgattccaaatctccagcagacgacaatgcaactcctgctcgttataaatctccagcagttgacaaagccactcttgttagcactcaatctacaccagctgacagagcaacttcagatagtgctcaatccgcagcagttgacacagcaccttcagctcggccaaatctccagccattgataaagcaac

SEQ ID NO: 27804 - DNA, 433 bp, Zea mays
  Clone ID: MRT4577_125373C.1
cactgtttagtgtggccgacgtctcccgtgcggaacgccaagcccccctctggcgaaatggaccacaagcgaggtggcagggcgccagtgccggccaagaagaagacggataaagtgacgaaccctctgtttgagaagaggcccaagcaatttggtatcggcggcgcgttgccggccaagaaggacctgcaccggttcggcaagtggcccaaggttgtgcgtattcagcgccagcgccgaattcttaagcagcgccataaggtaccaccggggcttaaccagttaacccgcaccctcgacaagaaccttgatacgaaccctttttaagatgctgctgaagtacccgactgaaaacaaggctgtcaagaaagagaggcttccgaagagggcccaagctgtaaatgaaggaaaaacggttgagttgaagaaacca

SEQ ID NO: 27805 - DNA, 373 bp, Zea mays
  Clone ID: MRT4577_125374C.1
aacaaaactaacctgggtttatgaataggcttacagtgttgcatgctgattcacacaactctcacatctagatcggtcagacacatgcctatccatgaaaattggcctccaagacgcctgccttgggcatcccaatttatttggatttggcaaagccaaactacttaaaggcgcgcacccgctctatctatccatggtgcacaacagcgatggctacctacccaatacgtaacgatcagaacagaggcacatgatatacagcgatccttggccttacaagacgataacaggaacatggagatatgcccggcttcaccggtatggaaggactttattgtctacacctacgcagtcttgcgggtggatgacgact

SEQ ID NO: 27806 - DNA, 283 bp, Zea mays
  Clone ID: MRT4577_125375C.1
gagaacacagaggtaccggacgggcccctagaggttgaagactgattggcaaaggttggtgtttatctagggcatgtacaagtacctgtttccgttcgaggctcatccgttcctacagcttgctttcctcctgcttgcggttccctaactgcgaggtgactatcaaagcgcctgattatttagtgctaaactatccaacaggggtggtcacgtacggtgtacactatatcaccatggctattaccattatcatcgacggtagtacaaaaatcgcctaccgtat

SEQ ID NO: 27807 - DNA, 464 bp, Zea mays
  Clone ID: MRT4577_125376C.1
aactgccgcacttgctggatgtggcagacaagggatacgtcgcatgacttgatatgaagaacgccaatgttacggctagagcgcgcttacgccaggagaacggacccaagactgcttcgagcagaccagatcatccgcatcgctgaccgcagcatgatcagcacacacaccgaacaccctgcaggcacccacaatgtcgggagccattccttggcccattctgcattggcgccgctccatccaaattctgcatggctaagcactgaagacacccgctaaaaacggtcatatatactaactgcaccaatgcgtgaaagggtaacaggtcacatgtcataccatcacatgaactagtttgtgcaacatggattgccctgtgagcccattacgatacattaacctccgggccatctctgcactctgcgcagagaatacacactgccgcctaccagattagtcacagc

SEQ ID NO: 27808 - DNA, 1325 bp, Zea mays
  Clone ID: MRT4577_125377C.1
ataagacacatcccacgcgtccggatacatctccccttctcacccaaccctccaagcaacattgaccgcaaagggccatccgctgcggtcagtgtaggtttctgaatcatagcttggcgatgcctgaggctagacaaatactgagctagccttcagaaaaaaaaagaaaagaaagagattgagaagcagggagaaaaaatggcactggcccattgaggaagcttgagaaccagttaacaagaattgccaacatattcttggacaatcttgttaacagagttttaaggtttcccagcagacatttttcgagtccaggaagagcgcgtgcaaccaccacattcatataattaataagcaaggtttagagaagaggcaacatgggcacaaagatgaagaaggggatcctgaagccgttccgctatatctcaaccatcatggatggtaaggaggctgaaatgcaaattgggttcccgacggatgtaaaacacgtggcacacatcggttgggatggtcctggctccaccaacaacaataacaacaacagcaacaacaatagtggcggagcacctagctggatgaaggattaccactcggcaccgcttgactcgtcctcttttaggagtgagagtgggggcacggctgctgcaaatccctgggcttctcaagagatagtcatggatggagcaagcgtcggagaaacctccttcagggacacgaaaagcgaggcaggcgtcgacgtcggcgggggcgactccccaccgtcccccgccacccgccggtcgagacggcaccgctctcggggctccggcaactcatccatggacgccaccggcggcgagggcgaggagaagactaaggagaagagcaagaagggcacccgaaagaaccgcaagaagcaggacaagtcggccggcgacgacgcctcgggcacatgccaggacctccccgccgttcccaagaagtccaaccgccggaaaaacaagggaagctccgaggggagcggtagcgccgcggccaaggacaccaccgcggccgcgccgaccgcacccgccgtggacgacgactagggatatataatccaagctgctgcggcctcgtataagaacttgtgccgaggggctgcgcccgccgatacctactttcgcagatcgtactcacatgcccacgtgcagtcggggctccatgcgcgcgtgctctagcggccgccggtccgggtgtgcgcgcacgaacgccgtttgggcccctccgtgccttgctctaatattgatccgcttttttgtgaaaaaaaaaaaaaaaaaaaaaaaaaaaaaaaaaaaaaaaaaaaa

SEQ ID NO: 27809 - DNA, 147 bp, Zea mays
  Clone ID: MRT4577_125378C.1
caaagattataagccctaatacggatgatgccaaatatgttataaatgtaaaacaaatcgcaaaggttgaggtcggatcgggagataatgactctccaactgatatacccgaagggttgaggttcgggtatggcatcctatgtttca

SEQ ID NO: 27810 - DNA, 362 bp, Zea mays
  Clone ID: MRT4577_125379C.1
cccacgcgtccgagcgaacgaaaagtatactaatcaaagttaccttcctgctggtggccattcttctattgtgcagaatcttacacgacacttccaccatgccaagcacgttgaacaacgacacgactatccccaacaagccaaacagaaagaacaaggcactgtaccaccccctgcccaaagtcaataaatacaccagcacctgccaacccatacaacactgcaggtgcccccgccgatcaccaaccatatacatatagcacatcacattcttattattgcatgcacgtttatataaaacatcaatgcctcgctgttgtaagtgccaacacaagcatatataaccgctttatatatactac

SEQ ID NO: 27811 - DNA, 304 bp, Zea mays
  Clone ID: MRT4577_12537C.1
gtctaaggtattctgtgtgtccaaaacatgactcccctagatagtagttctatttcaaaaattatttggtttacaaagtacaccatgaagaacattatatcatcaaagcatcacttcagctttgtgtgttgaagagatttctgtgtccttagtgttcttaatgtactttcacaattcctagtcgatacgttggctgaaacatctgccaagattctttagctggttcatgaggatgaggtcctttaggtcctacgtcctagctacctgcaatttttaagagcatgtggtatacatacttttgttt

SEQ ID NO: 27812 - DNA, 1651 bp, Zea mays
  Clone ID: MRT4577_125380C.1
ggaacaaataagcttatatacaaaggctagatgaagggggaaaacagtacaaaggctgcttggcagtgtgcgcatgtctagcagttgcaaggtgcataggaaaacccagggtctttatagccattacactgtatattatttcatccaggatccagctacaaggaactaacgcggaactcttgcactcaaccatctgaaatgtctacaatttcacctctaattggtgaatccgttggagaagacatatgttcatgaccagcttgatttccagcaactccgttgctactcacaggatgacttgagcaggatctttcttcaggttgagaagatggcacaatttcacctttgttattgtccttgggagccagtgagcaagaaccaaccgtatgagaagttgagctgccaaactcaacatcattggattccctggctagatacatttcatgtaatctttgtcggcgccttctttctgttcgcttattgatcaacggcacctcatcttcatcggactcactaagacaatagtaattcaaccattcaattattaccgaataggaaccacaccgattgctttgtttccttttcttccgtctgctgcactcttggttatctagtacagctgttcttctgcgttttggtgcttcctgaacagtttctgtccttccaaggtcagagttaacatcctttgaaattttgattttcttattggacctgtcttttgaagaggaatccagtcctgaacagacaactgcattatctgcaacatgaaggaactccacagaggcatcttcccgctcgttttattgcttcttctgctcttatttgatgtatgtgtggtgtgccaacttgtacaggcaggttcttcaaccttgccctcattgtatgcttctacagcttccaaacattttagttctggacctcctggtgatgattcttgaactctacaataattacccgaacactgctgcttgtgtctatgccagtgacagttagaattatgacatgggtcatctacaccttttctctcaatgcagtcatcaccagaaggtcctctcatattggttgacttgataaaatctgcacagctttgacatttgtagtgataatatttcttatggatctcatggagcagagttatgctgtagccatcaactggtcgatggggatcagctacagaactcaaattgattgtattcatcagtttctgaaattttgcaccatgatcactatggttactgttattgtctttgatgcaaatataggcatgaatcatctcatgaagcaaagcattcttcagatcagatccattatgagacccgcataatgatttggaaagcagtattatacagccaccacctcccggataatagtcacatgtgcttacatcacaatcaggtagtgggtcctcggtccatgagacagcgcacgaaccgagggaatcgcggaagtagagggagttgtagtggcagaaaagctcggagacgtccggcgcgcctccgttcccgtccggatccgagctcaccatggccgggttagggcgaggttaaggggccagcaacgagggtttaggcaaagcctccaccctccgacgtcacggggttagtcaggtacacaggtaaagttttcccgggcggactcgagggtcccaatg

SEQ ID NO: 27813 - DNA, 300 bp, Zea mays
  Clone ID: MRT4577_125381C.1
acccacgcgagtggccacgcggccggcggaggagagacagggggggcacagacaggcgaccgcccagaaacaacccccaaaggcaagaaaaggggccaaaggaccgagaaaaacccgaccccaaggaccccaagcaacaaaggacggaacaaggcgccgcaggcaccagagccagcaaacaccagcggggaaagcaaaaccacagaacagagggacaggaacgacgacggcgcacaggagacggaaccggggacgaaagggaggaacaacggaagaagacggaggaagacgaaagaaacg

SEQ ID NO: 27814 - DNA, 212 bp, Zea mays
  Clone ID: MRT4577_125382C.1
ggcagaagcttcaacagtcaactttcaactttggtttctggtacatctgaatgcccaaatctgccgcgaagatgctatttcttacctaatccctctccataccaagtgtggggtatgtcatttgctttaaacaccggggacaactttgtggctgttgggccctccatggggtggatctgttacagctggagcacttgctaacttcttaaaaa

SEQ ID NO: 27815 - DNA, 366 bp, Zea mays
  Clone ID: MRT4577_125383C.1
gacctgctgagcagacttcactccaagaggagggcgctcccgtgcttgtgcggctactgcatgcccttctaggaccacccgtgggtgaaggacggtccctccacatgcatcccgttcctcaagcacagctacttgcactccgcgctgggacttcatgacccgatgcaattgctccttgctctaacctcactcggcgataaaaacctctgaggaatcccaaactgaggcagattgatggagcaattgcgtaccagcaccggttatccagccctacagcatatggcagccttctctaagcacgcatcagacaactagaccaattttacttgtggagctacgcctgccaaaacagcttaagatactgag

SEQ ID NO: 27816 - DNA, 434 bp, Zea mays
  Clone ID: MRT4577_125384C.1
gggggcaaacaaagggccccccatttcccaaccccgaaaccatggggggggggggaaaaacaaataaacatggggggcccggcccccaaacagggggggggcccccggggggggcccaaaaaaaaaaactcaccgggggaccccccccctccccaccaaaaaaggacaatacccccccggccggaataatcccccccgcccggggggttgggtgggggaaaaatacccggggggttttttggaaactggtttccatggcccttggcccgcccaaggggaaagagcccagggggttccggaaccccactgggtaaaacaggtggggcctgggcccccctacgggtggccccaggaacccccccccccccccctggggaaaaaaaatgcgggccccccccccggggacctctaaaaaccggggggagggggggggg

SEQ ID NO: 27817 - DNA, 391 bp, Zea mays
  Clone ID: MRT4577_125385C.1
tgttatttttttttttgttttttttttttttattctgtttttttttttttttttttttttttatttttttttttccagagaacacacccattctttgctttaaaaatgaaaagtcgcccctaaaaaaacatttggaaaggggccgtttttacaaaaaagacttaccacatgggccgggggggcaatagcaacaagacccccaaaaattaactccacggcatgcacacagtttaccatttatgtttaacagagggtcttattcggaacgggcattttgggccaaaaaaagaagccctataacgttatgtgggaaggttttctgggtctggactatgctgaaccaaaagatcgcacgtttgatgcaattcaccgttcgagggttgggaaaaca

SEQ ID NO: 27818 - DNA, 445 bp, Zea mays
  Clone ID: MRT4577_125386C.1
agctcgaattcggctcgagacactacctgcaccccgcgctgactacattctcagcctagacccgtctcgcccgctgggtaacaaacaccgcatctgaaacgacctcctcccttacggaaacagcgtccataagtgagacatcaacctctacaacccctacaccaatgaccgcaatgagaacctccgaagcatggacacctatgtgtaccacacacaccagccgcttgaacatgacgcaactatacagccagataacccggaccaatctatcgttccacgaaataagaaaaattaagtttctcaaacaaacaccacctattgtatgctgtgactaaactaacctaaccaggctctttaaggacgacatgtcttccactatatgagccaaaaatatgccatgagaaagagtctgcgaaccgtcctattactaatcttatgggaggtg

SEQ ID NO: 27819 - DNA, 362 bp, Zea mays
  Clone ID: MRT4577_125387C.1
gacacaaatattcttttcatgggtgaattttatggttattacatcggaagagccacatttattacaagtcctgatatactcaaagtgcggggctgacaacaatagcatgaccgtaggaaccgtcgaaaccttaaacacaagcctgggtaaaaaaaatgtggacccgaaagcttcctccggcttattttcacagggcccaaaaaaaaatcggtaaagggccttggggggggtgtaaattctttttttaaaccccaaaaaaaaaggggccaaaagtgggggggcaggaactgtgggagacttcttttgagcaaccagtttttgaatggggggacccccggggggtaattttaaaccccggaggg

SEQ ID NO: 27820 - DNA, 2241 bp, Zea mays
  Clone ID: MRT4577_125388C.1
cggccgcgtgggcggacgcgtgggcgcacatgtgggcttcctcactgttcggtcctcccgcccctcccacggcctcacctctcctcgccgacggaatcgaaagcaggggcttctgattggtcgtactcatggcaatgttggtgcctgatcttagtttctcggcatcgatctctagtgtgaagctcccaaggtacggggcatcaaagagtgagacattctttgttaagaagcccccaacattccgtgcagaagctaggccagcggaatctggcaaatatggtactaataatggccgggcaacaaagatggtaccaacaactgagttcaggaggaccagtggtggtcttgtaagatcagggacagttaatggttctccaaatagcgctgtcaatggctcgaccaaggtgttgattaatggttctgcaaatgccattgacaatagctcaaccaaagcagtcattaacggtacgccgaaggtggctgtaaatggtactagtctggtgaaaagcagcaagacttctcttgttaagacgcagaagcaagtgagacccaaagatgacccctttcaagaggaattgaaggttttgccttctgatgagggattcagctgggcaaaagataattacaattctgtgcagaggagcatagatatatgggcttttgtgctttctcttcgagtccgcgtgctatttgacaatgcaaaatgggcatatcctggtggattctcggaagaaaagcagaaagttcgaaggcggaaaactgcttcatggctaagagagcaagtattacagcttggcccaacgtttattaagctcgggcagttatcctccactagatctgatttatttcccagagaatttgtggacgagcttgcgaaactgcaggacagagtacctgctttttctcctgagaaggcaaaagctttcatagagaaagaaatgggttgttccattgatgttgtgtacaaagaatttgaggaacgcccaatagctgctgccagtcttggtcagtttatgaaattcagtgcctttgacgatatctatgtgcatttttatgaattctacttccatgtaattgtgtttatttttcaggtacaccgtgcaatgctccacaatggagaaagagttgcagttaaagttcagcgacctgggctcaaaaaactttttgatattgacctaaggaacttaaagctagtagctgagtattttcaaagaagtgaaacatttggaggcccttcaagggactggattggtatttatgaggaatgttccaaaattttatatgaagaaattgattacatcaatgaaggaaagaatgcggacaagtttcggcgggatttcagaaatataaagtgggttcgcgtgccacttatcatgtgggactacacaactgaaaaggtgctaaccctggagtatgcccctggtattaaaataaacaatttggatgtggagcaccttcgaattggctacaaacttgtggcgaaaagggagttgaatgatccagagaatgcacttatcggtgcttttgctggcgccatcactggagctataacaactccccttgatgtcatgaagacaagattgatggttcagggacaagggaaccaatacactggaattgtaagctgtgctcagacaatcctcagagaggaaggccctaaggcattcttgaagggcattgagccgcgagtgctgtggattggcatcggtgggtccatcttctttggcatgctggagaaaaccaagtcgatgctagccgagaggaggaaccgcgagcttcgggccgtcaaggacgaatgagtggagatcagctcttttttggcgttgagtccttaccctgaaacaaaatacacaattttacttgccggggacaacctcgccggcccgtacttgtactccacggcgttcacgttatcacgtacgtagaaattatgagcatgactgacggtttctacagattgaaaaccaaaacttattacatgcgctggaaacctgccactcactgtttacgttgggagtttttacaagtatctcagttcataacactatgcaacatttggttgggggacaggtagtacagtgacgtcctctcttatctctccaattttgtcccctctcatctctccaattttgagggacaactagggataacactggaatagtgatatcctaactcttgacgttgaattaaacaattatttgagggaaaaaaaaaaaaaagataaaaaaaaaattcataatt

SEQ ID NO: 27821 - DNA, 517 bp, Zea mays
  Clone ID: MRT4577_125389C.1
gtgagcagcatctcattgtacagagcgatggtccaatgttggctcctgtttgtgggcgccatctgagcatcctacgctctgctctggaggagtaggaacgacctcatcatacgaaagctggcagggtgctctagcgtatatatgcatgataactaaactaggatcgcgaggctatgaatatgaaggacaaatttgaccggggctgctagatccttgcttggagcaccggagggtagattagcaaggaccaaggaaataccctttgatcagtaagatgtaggttgcataagtatgattcgggtaaccgcatgggcatctaggatggacaaactactaaccgtgctatacaatcaggatgtaccaatggagatagatattaatggctcgtatgctgaataggttcatgagacaaaaggatatgttgatgatagatatatatatgtcatggtcactgatcagaagcaaaatattttgggtgagccgagctactcttaaagtgctaatactatgtccgtac

SEQ ID NO: 27822 - DNA, 590 bp, Zea mays
  Clone ID: MRT4577_12538C.1
ctcgaggccggccgggaacttttttctctcgttctatgcctcctgcatctctagagaggcacgtaccaactccaagctacgagccatgctggatcggggtcgccaacgcaacacggacagcaccccgcgaggtaatgtccttacagggaagcccgaagcatccagtggaccacacgccagcttggctgagcgagaattatgctcacatcccataacatgcttcttccatgcgctatccacggcggctgcgctatgcttctacatcctattctctatctttgcgaaaagcttcaccatcatcttcacgatcacgacgctccctctcagctcttgacttctgactggcgaacaacgtacatctggcatgatactaccccagatgcacagcggaaatgacatcgatgatcacggaaacagagagcgaaaacttgaatgctcttgatggggagtctctctctcggatgaacaagaaggatacatggatgttctggagtactcttcacttgactgctgctgcatgaatcctacctgaaaaattcccactcatcctgcttgaagctgattaccttcatagcgctggagacagcttg

SEQ ID NO: 27823 - DNA, 1640 bp, Zea mays
  Clone ID: MRT4577_125390C.1
gaaccaacaagattgtttgcttcgtgtttagccttttcatggtttgataaattctcgggcactcgagttagacaagacattactccgtattatttagaattaggggcttctgattggtcgtactcatggcaatgttggtgcctgatcttagtttctcggcatcgatctctagtgtgaaacttccaaagtacggggcatcaaagagtgagactttctttgttaaaagcccccaacattccgtgcaaaagctaggccagcggaatctggcaaatatggtactaataatggccgggcaacaaagatggtaccaacaactgagttcaggaggaccagtggtggtcttgtaagatcagggacagttaatggttctccaaatagcgctgtcaatggctcgaccaaggtgttgattaatggttctgcaaatgccattgacaatagctcatccaaagcagtcattaacggtacgccgaaggtggctgtaaatggtactagtctggtgaaaagcagcaagacttctcttgttaagacgcagaagcaagtgagacccaaagatgacccctttcaagaggaattgaaggttttgccttctgatgagggattcagctgggcaaaagataattacaactctgtgcagaggagcatagatatatggtcttttgtgctttctcttcgagtccgcgtgctatttgacaatgcaaaatgggcatatcctggtggattctcggaagaaaagcagaaagttcgaaggcggaaaactgcttcatggctaagagagcaagtattacagcttggcccaacgtttattaagctcgggcagttatcctccactagatctgatttatttcccagagaatttgtggacgagcttgcgaaactgcaggacagagtacctgcattttctcctgagaaggcaaaagctttcatagagaaagaaatgggttgttccattgatgttgtgtacaaagaatttgaggaacgcccaatagctgctgccagtcttggtcaggtacaccgtgcaatgctccacaatggagaaagagttgcagttaaagttcagcgacctgggctcaaaaaactttttgatattgacctaaggaacttaaagctagtagctgagtattttcaaagaagtgaaacatttggaggcccttcaagggactggattggtatttatgaggaatgttccaaaattttatatgaagaaattgattacatcaatgaaggaaagaatgcggacaagtttcggcgggatttcagaaatataaagtgggttcgcgtgccagtatgtttcttggacatcacaatgcaattttttgggggtgtttgattcaattcccttccactatcttaatcaaacaaactgagattgcatgactagaagaacagaacataaccaccatatacagcatcctggttgaatttttcttgatggaggcaatgtatgattgtagttaagcctgctcaacaatgagtatcacaaaatgttgtattaatgctgaagctgatatggcaagctacctgttgatttatgttgattagtggttggcacatgctgtaaggtctatctatatacttggaacattccatgaagcactatctatgtacttataaactattgtaaattataatccactttagtc

SEQ ID NO: 27824 - DNA, 305 bp, Zea mays
  Clone ID: MRT4577_125391C.1
tctaactattatctctcactgcgatgatctgatcacaccaacaagtagagcatctatcaagtaggcctactgctgtatgtacaatgctgaactcatccaaaatggtgactacattcgcaccctcggcaagggtatcctcgctgcttgagcatacactggcactattcaagcgctgctttccagaggcaactcttggcacgtctaagggaaccgcagtggccactatcagctccgatattgccaccctggtgagcgtgcggatgcttgcgggggccaaggccaacatgaaccccaccggccaagcg

SEQ ID NO: 27825 - DNA, 165 bp, Zea mays
  Clone ID: MRT4577_125392C.1
tctttctctccgtgcgtgccctggatgccttgatcgcccgcaccgttcaactcatcccgtctgattcgtgtgcgtgccagtcctccagcgttcgtgaaacacaaccgtctgtgggctggttgctagatcgctgatcctcgcggacgcttacggtcatggctcctc

SEQ ID NO: 27826 - DNA, 265 bp, Zea mays
  unsure (1)..(265): unsure at all n locations
  Clone ID: MRT4577_125393C.1
aaagattgtaattaataaatacaagaaaagaatggggtttatgatgctacttggaaaataggcaaggaattttttttttttttatngaacgaaaaattgggtggagggggttttttttggtggggacccggcgnttacgttgaaggggggggaggtggcccccattgggggttgtccttgagcatgtgcacggggatggtgttcgggcggaagttgtccatgaaccaggtggggttgtacattctgggctgggggttgtaggggt

SEQ ID NO: 27827 - DNA, 513 bp, Zea mays
  Clone ID: MRT4577_125394C.1
atgaccaggaccgatgacctcaacgtagagagcttcgtcaggacaattcctatgatgatgacgagtgaccacgaagaatacctccaggcgtatgtccgaaggttcttgcgtcttagagcacaagcgcccacagtgcccaatgaaatggtcattgaggccatgatcaagggtcttcggccaggacctacggctcaatacttcgccaggaaaccccctcagactctggagaagctgcttcagaaaatggatgagtacatccgggccgataatgattttcgccaaagaagggaggaagcttataggttttttgaaatgactaggggcttcggaggacgaatccaccctaggcatgtcagatcaatccacaactccagtcagaatgatgacagaggaagccagtttcagaggcaacagcaaagctcacagtcttcaggacagcagcagagctctttcaggccaccagctccaaggggaagaggtggcaggggcttcggaggaagatatgaggattag

SEQ ID NO: 27828 - DNA, 488 bp, Zea mays
  Clone ID: MRT4577_125395C.1
cccacgcatgcgaggcgcgtgggcaaacccatgagcacgcgggctctcatactcacgcttcagaggacatgaccaaggaaggggacgcttgctgcatatgtacattctggtgctcttgggaccctagtgtgcatgagagaagtaagaacttgtctttgtgcatcaccaccatattgaatgatgctcggggctatcttaatggaatctgggtctggtaagatggtggctttggctataatcgcctatgagaaaaccccattgtgcatagatagctctgattattcacagtgaactaaaaaaggagcataactcgtgaggacaattggattttgatctcatttgagaagctgactagatgatgaaaagctataaaaaattgatgaacagcgtattgggagacatagcacagatgattctcaccacacattctacttgagaaaaccatgaacctaaaactactacctgcatgtatcatgtggataaagcca

SEQ ID NO: 27829 - DNA, 264 bp, Zea mays
  Clone ID: MRT4577_125396C.1
ggaggccatgaccatctcagctcccaggcctcatcggtgagcctggtgtctataaaaataccgggatggacgggctcccgtacacatggttcgcgtgaacaaaaacgcgcccaaaaacctgctggacatacgtcttatggtgctcgacagtgatacccatgggggggaagaaaaggactctgctttgccgggagaagggaacagaggcgcatggacccaaaaagtgcccttcagagcttcagacacaacttgtttttgaacaga

SEQ ID NO: 27830 - DNA, 293 bp, Zea mays
  Clone ID: MRT4577_125397C.1
caacttccttcgacagacccatcggcctcctaccaacaacacatcattggtgaggcagggttttaaatagcttattactcacaatccattaataaagaattctgtatgacatacgtggcctaccaaaaatataatttttcaattccagatttttatattattttttcctccaaaagttatccgatattacttctcctaatatttggactgtaacaatcattaattcataataaaacattcaatcattatttacttattatttaatataattattcattaataaattctataat

SEQ ID NO: 27831 - DNA, 599 bp, Zea mays
  unsure (1)..(599): unsure at all n locations
  Clone ID: MRT4577_125398C.1
tcttgcgtttccgccgccacgctaaaccctaaatcgccgccgcagccgccatgtcgccgccgacgcagccgcagctgaaggacaaggcggcgcacgaggtgccgcgcgcgacggcggccagcgccgtggcgtccctcaccaagtggatgcgcgagcgcgccgcggaggcgccgccgaacttgctcgccgacgagcgcgacgacctcgtcgtgctccagctctcgctccgccgcgtcccgcccaagcccaccaccaagccgcacctcctcccgctcccgcaccccgtcgtcgcccactcggccgcctccgtctgcgtcatctccgacgaccgcgccggttcttgctcccccgccgccgccgccatcctcgacgccgccaggtccctcaagctgcccgtctcggaggtcgtccccttctccgccctgcgcaccgactaccgcccctacgagtcgcgccgccgcttcgccgcctcctacgacctcttcctcgccgaccgcgccctgctccccatgctgccccgcctcctcggcaaatccttctactccaccaagaaggcccccatcgccgtcgacttcacccgggctggctggnccggagca

SEQ ID NO: 27832 - DNA, 251 bp, Zea mays
  unsure (1)..(251): unsure at all n locations
  Clone ID: MRT4577_125399C.1
ccccatccgacctttccattccctgctcctccgctcttttgaccgccaagccaggatcgcctgtggactcggaggagcccacttgaacgaaggccgacgccggagcgtcaagacctacccgacagctggcccgccgaggacggttctcgctcaagaccgccctgcgggtgggggttctcctcngactggtggctgggctgccgtgccctttggtgcctgttgtgcgcggggcggcggggatgttgggcttc

SEQ ID NO: 27833 - DNA, 462 bp, Zea mays
  Clone ID: MRT4577_12539C.1
acacgtacctccacttgttttctctaccccggccgccggggggggggggttatctccacacccaacaaacggcggggggcaatcctattatggtttgacatggactcctccttattataaacaaggtcccctatggccacggatctccccacatgaactggcacaacatcataaatggcagccacacaggggggggggggctgcattaatacaacgaactacgcgccgatatgcggagctgtgatccacaacacaccactaacggacatagctttacttctcaaactgaaagccctaatccttgtacaggtcacgtctcttgacaatgtggatgacgcacatagacttttgctgtgagacacatgtatccacatacccttcctcctactatccgagctcaaagaatgacccatccaacctgtcaaccctaccaaactagcttactcccattcatggggagca

SEQ ID NO: 27834 - DNA, 204 bp, Zea mays
  Clone ID: MRT4577_1253C.1
tatatctgcacgtatattcacctgtgtacggcgaatacgaccaaaaattctcacgtaatttgagaacctatggatgaaccctacctttaggcataccaaccctcaattcaaccatatattttgtctagtatggcaccctgtggaaggttcttagctttgactggaccaacacgcaacttaatcttttgcattttatgttaaaaa

SEQ ID NO: 27835 - DNA, 425 bp, Zea mays
  Clone ID: MRT4577_125400C.1
ctctagacttctaggtccgcctctgtgtgtgtggcgggcgtggtgtgtgcgtgttgggggcgggggtgtggaaggagtatagtgcgcacatgatcacgatgttacagttgtactcctaaagagagggtaagaaataaggtccagaaaatttttcaatgaccttaccagtcatgacatattctggtactgaatatccataggcatccaaaactcaagtcgagacatgagtattatcacctacagttgcctcattggcaagcccaaaattggtgagtcttgcattatacttctctacaagccatataacataacatgcagcagtatgtaaataatgagacacacactgcataattctattcattaacttaccgcatacagccatacattagattccagaaaatcactgacaaatgagaggccttttt

SEQ ID NO: 27836 - DNA, 1059 bp, Zea mays
  Clone ID: MRT4577_125401C.1
gggttgtgcctgagatgactagtagcagcagtatgcccaatttagctattgcaaaagatggaaacaccaacgttttgcctttcgaatttcgagctcttgaagtgtgccttgagtcagcctgcagatctttggaagatgaaacttctactctggagcaagaggcatatccagcattagatgagctgacatcaaagatcagcacattaaaccttgaacgagttaggcaaatcaagagtcgtctggttgcgatatctggtcgagtacagaaggtgagggatgagctagagcatttactggatgatgaaatggatatggctgaaatgtacttgacagagaagcttactcaacaagaaattagtgaggcttcatctagagctgaggttgatgatccatctcaaacagaagaggatagcttagggagtacgttgatgacacagaagattatatcaatataatgttggacgacaagcagaatcagctgttgcagatgggagttatgctctcaactgctactgttgtcatcactgctggagtggctgtagttggcctttttggtatgaatattggcatatcactttacgcagacccaacaactgaggaggaaactcgagcagcaaacagaaaattttgggaaactacttttgggaccgttgctggctgcgtgattttgtacatcatagccatgggttggggaaagagaagtggattactgcaatgaggtggaaactcatgcaatgaggtggaaacatgagtgttctgcacccaatgaaaactggtttgacaaaaatctccaagatgagatgttgcattggcatgccgctcaaatacagtacgtcctattccactatgccgggaaagaaacatcttgtgtacgctagtagtaatgtgtgtgaaataaaactattgtacaatttgttgcccctcacctgtcatggcaactcagtaattctgtacctgtttaccacggtagctgcggtttttgctcttgcagttgtaatcatttctgtaactgttgtaactgtatccaccgaactgtaatatgtaaaggaagtatatgag

SEQ ID NO: 27837 - DNA, 567 bp, Zea mays
  Clone ID: MRT4577_125402C.1
ggccgggccgggatcatcacgatactctccctgctatcgctactattaaccgcccccacaatccttataccttgcctgccgagacgacgatgttgcccccctgctgcgtgaaggagacgatgttgacgcactactccgaccgcttgtccatgttacggatccggttccctttgattggagagaccctcaccaatgctgtgttctccttctggacggccgacgacgttgacctctctgcctacgcccgatactgaaaaaagattctgacccccgacgaagaggcactttatctcacacgtattctgcttcttcactgcctcctacaacatcgagctcgaaaacctcgcttcccgctgtcatgacagatgtgatcgcaccctcatagcatgagcctcctaccgcttcaaaatagccatcaagacctctctactcagagacgtactcactgctgctctagacttacatccacgaccacaatcatgatgaacgcctgctccgcgccagctacgcctggtcctattcccgccgcgatgttgattgatgctatgcgctcgtaccactggcatc

SEQ ID NO: 27838 - DNA, 2096 bp, Zea mays
  Clone ID: MRT4577_125403C.1
cccgttaattttattttgggggccccaaaaaaaaactttttccttccaagccccgggaagtaaactttggtcccttaaaagggccccccctttttttttttttttttttttttttttttttttttttttttttttttttttttttttttttttttttttttttttttttttttttttttttttttttttttttttttttttttttttttttttttttttttttttgcagacaagagtgcagctttctcatatacttcctttacatattacagttcggtggatacagttacaacagttacagaaatgattacaactgcaagagcaaaaaccgcagctaccgtggtaaacaggtacagaattactgagttgccatgacaggtgaggggcaacaaattgtacaatagttttatttcacacacattactactagcgtacacaagatgtttctttcccggcatagtggaataggacgtactgtatttgagcggcatgccaatgcaacatctcatcttggagatttttgtcaaaccagttttcattgggtgcagaacactcatgtttccacctcattgcatgagtttccacctcattgcagtaatccacttctctttccccaacccatggctatgatgtacaaaatcacgcagccagcaacggtcccaaaagtagtttcccaaaattttctgtttgctgctcgagtttcctcctcagttgttgggtctgcgtaaagtgatatgccaatattcataccaaaaaggccaactacagccactccagcagtgatgacaacagtagcagttgagagcataactcccatctgcaacagctgattctgcttgtcgtccaacattatattgatataatcttctgtgtcatcaacgtactccctaagatgtgatagcttgttaagtgtgccatcaatttgcacaaaataagcttctagaagcatctctagttcttcaatattaggcttataaccaataaagctatcattgcttccatctggctcacttctataatcttcatccctatcctcttctgtttgagatggatcatcaacctcagctctagatgaagcctcactaatttcttgttgagtaagcttctctgtcaagtacatttcagccatatccatttcatcatccagtaaatgctctagctcatccctcaccttctgtactcgaccagatatcgcaaccagacgactcttgatttgcctaactcgttcaaggtttaatgtgctgatctttgatgtcagctcatctaatgctggatatgcctcttgctccagagtagaagtttcatcttccaaagatctgcaggctgactcaaggcacacttcaagagctcgaaattcgaaaggcaaaacgttggtgtttccatcttttgcaatagctaaattgggcatactgctgctactagtcatctcaggcacaacagcagtagtcttcttagtcatctccatttcatgtcctttggatgcacttggtaggggaaatggtgaagcaacattagatgattcaccttccatgtcagtgaactcagctgcctggtcagacgaagatgcgaggacacgggtctggaggtcgcggacgaagcgcgcaaaggcgggatccttggtgtttggaagcagcacctctgtggctgtgatcagggctttgacgcgctccaggttgacgacgatggcgcgctcgcggcccaggatcgtggacgggtacgagagtaacgggtcgagtaccctgagatcgcgcgcgggaagccctgtacgcgccatcaccgcgtgcttcccggcttcctccacccgagccggacccgacgccggcaccaccatccactcccggcttgcggcagcagcggcggcccccgccttccgcctccccacgccaccgccgcccgtccccaccgcgtgcggcctcatcgtttaccccttggaattagggctccggtcgggatcccggcggcggtggggaatccggaacgtgcggcggtgcgctcgtgacgggttaggtgctgccggctgggaggagatgctggggtttgagtgaaaataacaaacccggaggtcttttctccccggccggcccctcgaagggtac

SEQ ID NO: 27839 - DNA, 397 bp, Zea mays
  Clone ID: MRT4577_125404C.1
agcagctggtaacttaccgacaagtcacaacatttaggggcccaaaaaaataacctttttttaaagctgaacttagttgaaacccttgaaaaagcaataccacagtttaacccgttaacccttcaagggggaaattcaaaaaaacaaatggggagcccaggacatgttatgcctggagttggcaccttaacttttaaacagcaccttttcgctgttcgtttttgccatgggcaaaagggcaccccttgccgaaaggacaaacccccttcacgaaagtttcgcatagcttcggcttggaggtggttttggcacccaaaccaccgccttggtcttcaaatggagcccccggagcaaaagaatttttctccaacatgctcttgcttatgggcccgaaaag

SEQ ID NO: 27840 - DNA, 2690 bp, Zea mays
  Clone ID: MRT4577_125405C.1
ttattagtttttgttattctttttttttttttttttttttttttttttttttttttagggtaacagtgactctaaattttattttacactataagatataattttacactataagatataaagatcggattagaaacaaatcctatttatattcattttacactaaaatttataatttatttaatactctactattttatgaaaaaacatttagatcgtcatccattaccacgccttgccctatccgcaacccttaatcctgattgaccctaggaatctgcgcgctgtctctacattgccactcagaacaggaatcgcgttacaaggtgtgtacttctcctggtcgatctattgattgagtctatgggcgtgttcggctggctacaagccgacactgttgcagctgtttggactgctgcagctgcaatccatagagagaaaaatactgtagaagccgcagccgcagccggattgcagccgcagcaagccgcagcgaacaagctgaatctctcattttggagatttttgtgaacccagtattcactgggtacagaacactcatgcagtcatgcttccgcatcattgcagtaatccacttctctttccccaacccatggctatgatgtacaaaatcacgcagccagcaacggtcccgaaagtagtttcccaaaatttcctatttgctgctcgagtttcctcctcggttgttgggtctgcgtaaagtgatatgccaatattcataccaaaaagaccaactacagccactccagcagtgatgacgacagtagcagttgacagcataactcccatctgcagcagctgattctgcttgtcgtccaacattatattgatataatcttctgtgtcatcgacgtactccctcagcttcaatcatagaggacatttaaaggatcagaaacatgcgaataagacatcttatgaatgtgaagctcagctccccacactagtgtccttgtgtcactgataggaaaggcaaccaagaactatcggtaattaggtgcagaataaagtaaaccactgacacaggattcactggcttaagttatctaattttacaagaaattgctaattctatgctgtgttaagattagtttgtttagataaatggatgccattactaaaccaaatagaaacagcctgttgtttattaaagaaatagttaaataagtagaaaacaataattaatgacagggaacgctcaatcaaaccaactagacactttgccaatatttaaaggtgcaatagtgaaacgcttacaactccttagtttgttttacttgtggaagcatctgttataccttattcgtaacagcatcatcccaacacaaatcaaatactttcatcatactttagatttgtgtttaaagtgatatctcacttcaagaaaacatttgttgttataccatatagtacctcctaaacaaaacaatattgacaaccatgtgagtaagagggcaagtgaaattacatgtgatagcttgttaagtgtgccatcaatttgcacaaagtaagcctctagaagcatctctagctcttcaatattgggcttataacctataacactaccattgcttccatctggttcacttctataatcttcatccctatcgtcttctgtaagagatgcatcatcaacctcagctctagatgaagcctcactgatttcttgttgagtaagcttctctgtcaagtacatttcagccatatccatttcatcatccagtaaatgctcaagctcatccctcaccttctgtactcgaccagatatcgcaaccagacgactcttgatttgcctaactcgttcaaggtttaatgtgctgatctttgatgtcagctcatctaatgctggatatgcctctagctccagagtagaagtctgatgttagaggtatgaattcaattgcggccagataaacaacatataaccagacaaacaattccagatgcaagcacatacttcctcttccaaagatctgcaggctgattcaaggcacacttcaagagctcgaaattcgaaaggcaaaaccttggtatttccatcttttgcaacagctaaattgggcatactgctgctgctagtcatttcaggcacaacagcagcagtcttcttagtcatctccatttcatgccctttggatgaacttggtacaggaaatggtgaagcaacaataggtgattcaccttccatgtcagtgagttcagctgcctggtcagacgaagatgcgaggacgcgggtctggaggtcgcgaacgaagcgcgcgaaggcgggatccttggtgttaggaagcagcacctccgcggctgtgatcagagctttgacgcgctccaagttgaccacgatggcgcgctcgcggcccaggatcgtggacgggtacgagagtaacgggtcgagcaccctgagatcgcgcgcgggaagccccgtacgcgccatcaccgcgtgcttccctgcttcctccacccgcgccgggcccgacgccggcaccaccaaccactcccggctagccgcggcggcggcggcccccgccttccgcctccccacgccaccgccacccatacccaccgcgtgcggcctcatcgtttaccgcttggaattagggctccggtcttgcggcggcggcgggggaatccggaaccacgaccgcaattactctttattcataattaccccg

SEQ ID NO: 27841 - DNA, 726 bp, Zea mays
  Clone ID: MRT4577_125406C.1
attgggtacctcgaggccggccgggaccagttcaccgtgttctcccttcctatttgtgtgatacgccgatacgcgtccatgtgcagcatccagatctcctcgcacgcaagcctcgtactgcctccgtataacctcgcggcggcggcggcggcggcggcgactggtgagcgctcgtgtcatcggaaccatcatcaacctcccgatcaacccgcgcgttcgccagcgctcggatcctagccgggctgacttcctcgcgcgcgcgcgcacgcgcgcacatggccgcgctgccgctgcccgtgacgcgcgccgccgccagtgaccagcagcagcagcagggtcacggcggcgcgggcgcggaggtgtggaggagggcggccaaggcgctgctgttcctggcggccgtcgcgctcccgtgcctcgtgctgtaccaccgcgccgtcgtggcgcccggggacctgttcggcgccgccgccattccgtggcggcgcgccgccgccgacctggtgagtacgtgacagcgaggacgggagtactctggagcgagtcctgacggcggcggcgatgcggcggcccagcgacacggtgatcctgacgacgctgaactcggcgtggtcggagccggggtccgtgctggacgtgttcctggagagctcccggccggcgagagcacgagggagctcctgcagcacctggtgatcgtgtcgctggacaccgcggcgcacgcgc

SEQ ID NO: 27842 - DNA, 205 bp, Zea mays
  unsure (1)..(205): unsure at all n locations
  Clone ID: MRT4577_125407C.1
ggcgagtgngatggggcggatgtgttcccatgaccgggccgtgagtcgtggtgaattcatacacgacgctcccggtgaaattggtcgtagcggtggttgtccagnccagnggcgagaggtggacatgcangtggtcacgggggcgccgccgtntaagngccgaagctggggggcttgttgacgtattccgcttgncgttcccgct

SEQ ID NO: 27843 - DNA, 375 bp, Zea mays
  Clone ID: MRT4577_125408C.1
accagccatgcacgcagcgtagctagagctgacatgcatgcatactgcaccgcagagccgccggcccggaagcgggagcgcaagaccatgtaccgcggcatccggcgccgcccctggggcaagtgggcggcggagatccgggacccggccaagggcgcgcgcgtctggctcggcaccttcgccaccgccgaggccgccgagcgagcctacgaccgagccgcgcgccgtatacacggggacaaggccaaggtcaacttccccaacgaggacccgacggccgagtacgactacgactacgacggacactcccacgcccacgcccacgccggcggggaacaggggatgctcgccatgtacaacagcggaggcagggac

SEQ ID NO: 27844 - DNA, 314 bp, Zea mays
  Clone ID: MRT4577_125409C.1
cgcctctccctcggcctctctctctcctagcttcgacgcgctttcgcctttaggcttcgaggtcgctaccgccggagcggtgctcgctcatgaaggccaatggcatccgccggctgcctccgaggaggacgccgagcccgagatgatccggtcctcacgcagggagctacaaagtgctacatacccaagaggaccctagcccttgcgatgaggaaactgcagcgctgaagactgccacaattcatcatcggtctactatctcaaaaactataggattggctggaatcctattctggaccacgaggcgcacatac

SEQ ID NO: 27845 - DNA, 295 bp, Zea mays
  Clone ID: MRT4577_12540C.1
ggggacatcgaacccatttttttatacaaaaaccccccgcaaaaagctaaatggaacacagcgtcattattatgggccggaaccattggcccatcacgcatttaaaacaacggcggttccataccataccaccatttttaaatggcccccggattcaccctttcttattttcaattcaatgcggaagggggcccaaatacaaagtcaccaccgggaaaaaagagtttgggggcgcgggaacaaaaaaaaaaaatattgggcctttggcacgggttaggcctttggggccaacaaa

SEQ ID NO: 27846 - DNA, 295 bp, Zea mays
  Clone ID: MRT4577_125410C.1
ctcgtctacaactcgagccacccccctttttttacactttctacctcctatcaccaatgggagccatgattcttgaccttcttgccctccttgccctttgaagaacaccgctaacttgacttttatttcacaaagctcacaagaataccctctctaccgcgaccgccgtaggcacccaatccccaactatgcgaatctccattgttcaagaagccatgcacgcacacataatactggcattcacattaaccctataacaaccatatgctctattgccacaagccttattagagca

SEQ ID NO: 27847 - DNA, 510 bp, Zea mays
  Clone ID: MRT4577_125411C.1
tccgggcccgatagagataggagacgataatcttcctgggcctgatgcagctcatcctgtacgccatctaccggaaaaacaagggccccgccgcgccggccggcaagggagaggccgacgccacgaccaacaaggcttatttgctgtctgggactgggaggaacatcctaaacgaggctgccttagtttgtcggtggagcagattggtgttggtttctgtgggcttttacggttgttgttactctcatctccatctctcccaggaggctaccccaagcatgtagtagcttccattctggttctgggacggtgttgcacgttacagtgctctcaagctgtctctgcaaagtgtgtgtttttttattccatttccctcctgctcttgttctctccaactgcgcttacctgcccccgatttctctaaaaaatgtattaaactatctgagaaattcatccaactgcgagtactgtgctgtgcgtgtgaaaaaaaaaaaaaaaaagcggccccta

SEQ ID NO: 27848 - DNA, 1005 bp, Zea mays
  Clone ID: MRT4577_125412C.1
atgccattcctgcctctgctgcatgcctacctgatggtcttcttcttgcctcgcctaatctctgttagatctgtctccccagggaatgtcattgcgctcttcctcttcctgtcgcctgttgtcaccttctggagggtcatcaggaagcggtcgacggaggacttctccggcgtgccctacaacatgacgctgctcaactgcctcctatcggcttggtacggcctgccgttcgtgtccccgaacaacatcctggtgtcgacgatcaacgggacggggtcggtgatcgaggccatctacgtggtgatcttcctcatcttcgcggtggaccggcgggccaggctcagcatgctgggcctcctgggcatcgtcgcctccatcttcaccaccgtggtgctcgtctcgctgctggccctccacggcaacgcccgcaaggtcttctgcggcctcgccgccaccatcttctccatctgcatgtacgcctcgccgctctccatcatgaggctggtgatcaagacgaagagcgtggagttcatgccgttcctgctctccctggccgtgttcctgtgcggcacctcctggttcatctacggcctcctcggccgcgaccccttcattattcacagtacccccgggctgggcgtcggttgccctttcgatgtcccgcccaagcccaaccaggcgcacatgcctgccgctgccgcagccgatgcacgggcatgggcgccggtagcgtctagcagcgtgggcgtggccacccacaggcagcgcacgccgatcccgaacgggtgcgggagcttcctgggcctgatgcagctcatcctgtacgccatctaccggaaaaacaagggccccgccgcgccggccggcaagggagaggccgccgccgccgccgcggaggtggaggacaccaagaaggtggccgctgccgtggagctggccgacgccacgaccaacaaggcggcggacgccgtcggcggcgacggcaaggtcgccagccaggtgtag

SEQ ID NO: 27849 - DNA, 1344 bp, Zea mays
  unsure (1)..(1344): unsure at all n locations
  Clone ID: MRT4577_125413C.1
nnnnnnnnnnnnnnnnnnnnnnnnnnnnnnnnnnnnnnnnnnnnnnnnnnnnnnnnnnnnnnnnnnnnnnnnnnnnnnnnnnnnnnnnnnnnnnnnnnnnnnnnnnnnnnnnnnnnnnnnncctcgatgccggccgggagattgggtgcctcgaggccggccgggatccatccatccatccacacacacaaacagacagacagacaagcatacaacaccgttgccatttagttgtgttcttgctaggcagttgcgcgcttacattgagccgcagctagctgtctactacggcacaactatctcctgcgcgcgtgctcgatcgatctgaaggccagacctgagcctgtccaattttgccttgttctacccaccagtagtcgagaaggttccatataagcgcaagcagacagcaaaagagctaaggagtctgagacaaggttcgaacagatggaggatgtggtgaagttcgtctttggagtttccggaaatgtcatcgctctcttcctcttcctttccccagtgcctacgttctggaggatcatcaggaggaagtcgacggaggatttctcgggggtgccgtacagcatgacactcctcaactgcctcttgtcagcttggtacgggctgccgttcgtgtccccgaacaacatgctggtgtcgacgatcaacggcgcgggcgcggcgatcgaggccgtgtacgtggtgatcttcctggcgttcgcgtccagccagcggacgcggctgcggatgctgggcctggcgtcggcggtctcggcggcgttcgccgccgtggcgctggcgtcgatgctggcgctgcacggccagggcaggaagctcatgtgcggcctcgccgccaccgtctgctccatctgcatgtacgcctcgccgctctccatcatgaggctggtggtgaagacaagagcgtggagtacatgccgttcctgctgtcgacgtgctccccgggactcgcgattctcaacgggtgcgggagctttctgggcgccgtgcagctggtcttgtacgccatctaccgcgacagcaacagcggcggcaaagcgagcggcgccggcggcaagcagcaggccgtcgacgacgtggagatggccgcctccgacgccaagagcagcaagaaggtcgccgacgacgtcggcggcaaggaggaccgtctggtctagcatggagctagccactttctctttcggtgcgcgagcgtatgtttcctccccccgtgttgtgtgtgtctgtgtgtattatacgagagtgcgtgctgtactgtactacctctgcgtgtgtgcaataatataactgggtgtttcatctcgcaaaaaaaaaaaaaaagcggcc

SEQ ID NO: 27850 - DNA, 265 bp, Zea mays
  Clone ID: MRT4577_125414C.1
atgggaagcccatctaccacaagcccaacgagtccgggagccgcctgcgcagtctgccacaactccgcggtgtcataccacatggcggacactgcagaccacagcaacccccgcaatgccacagtccacgccggaaaccggatgaagtctccccatgagcgcgagcctcgttccatggccgccgtgcctcccgcgtcgcgtaccgtactacgacctgcaagaatgcgacgacgcccatgcggcgaaccacacacaagcgcagggg

SEQ ID NO: 27851 - DNA, 589 bp, Zea mays
  unsure (1)..(589): unsure at all n locations
  Clone ID: MRT4577_125415C.1
gtccgaccttttgaattttagaacactctgcttgcacttcatatgcattagtgcatatgcactacaaatttaaaatctctctctatatatttttgaattttataaaactctgcttgtatccattttaatttgagaagattgtgcatgctaattaccatttaaaatctctctctctctctctctatatatatatggtttggatacacaaccaagctttagttcatcagatgttttagaagctgcatatgttaggtcatatcagcaaaaaaatgagtttgcatagcagttgttgcccataacttttactatgtatttagacatagtgtatatctatgtgcatagcaaaactataaggggcctagtgttggaggctctcacatgagtgagatctgtgtaagagataaactgaggcaagctttctcccgtaaatgtggagagactgcttcanacccgtgacctagtgactcagtgagacaactgtcaccactgcatcaggtctatcctttgtgcatagaagaactatatatctaaaaaagccaaaatgtcttatcatttgaaatggatggagtacgtagcaaagctaggtgag

SEQ ID NO: 27852 - DNA, 1927 bp, Zea mays
  Clone ID: MRT4577_125416C.1
ggccggccgggaaaaaaataaaaaaaaaaaaaaaaaaaaatccatccatccatccacacacacaaacagacagacagacaagcatacaacaccgttgccatttagttgtgttcttgctaggcagttgcgcgcttacattgagccgcagctagctgtctactacggcacaactatctcctgcgcgcgtgctcgatcgatctgaaggccagacctgagcctgtccaattttgccttgttctacccaccagtagtcgagaaggttccatataagcgcaagcagacagcaaaagagctaaggagtctgagacaaggttcgaacagatggaggatgtggtgaagttcgtctttggagtttccggaaatgtcatcgctctcttcctcttcctttccccagtgcctacgttctggaggatcatcaggaggaagtcgacggaggacttctccggcgtgccctacaacatgacgctgctcaactgcctcctatcggcttggtacggcctgccgttcgtgtccccgaacaacatcctggtgtcgacgatcaacgggacggggtcggtgatcgaggccatctacgtggtgatcttcctcatcttcgcggtggaccggcgggccaggctcagcatgctgggcctcctgggcatcgtcgcctccatcttcaccaccgtggtgctcgtctcgctgctggccctccacggcaacgcccgcaaggtcttctgcggcctcgccgccaccatcttctccatctgcatgtacgcctcgccgctctccatcatgaggctggtgatcaagacgaagagcgtggagttcatgccgttcctgctctccctggccgtgttcctgtgcggcacctcctggttcatctacggcctcctcggccgcgaccccttcattattgtacgcacacggttctctctctagtctagatcctgagccgcactcaccgcccggccgtacgcacgtgctatccgcgcatgttgtccgattggcactcggaaaccactgtagcagcactgtatcactagctgttgggactggacgtaactgcatctgatctggccagcacagtacccccgggctgggcgtcggttgccctttcgatgtcccgcccaagcccaaccacatgcctgccgctgccgcagccgcagccgatgcacgggcatgggcgccggtagcgtctagcagcgtgggcgtggccacccacaggcagcgcacgccggtgctagctgccgatgggccgccgtgcccatgtccatgcagctggattggacccggcacaggcagaagcaacagcgcccgcgctctttcttgtcgcaatgctagttagcaaactgcacggtgcactccacttcagtacacaccaacgcgacagactgcgatgaaatatctaaggccgagtttttttttttttgcaaatctcatcatgtcggaatgattcatgcggtccaaacttcagcacacccccactgtcgctaaacccgcgctgtctgtgcatgcgtgcagatcccgaacgggtgcgggagcttcctgggcctgatgcagctcatcctgtacgccatctaccggaaaaacaagggccccgccgcgccggccggcaagggagaggccgccgccgccgccgcggaggtggaggacaccaagaaggtggccgctgccgtggagctggccgatgccacgaccaacaaggcagcggacgccgtcggcggcgacggcaaggtcgccagccaggtgtaggcgggcaaggcttatttgctgtctgggactgggaggaacatcctaaacgaggctgccttagtttgtcggtggagcagattggtgttggtttctgtgggcttttacggttgttgttactctcatctccatctctcccaggaggctaccccaagcatgtagtagcttccattctgattctgggacggtgttgcacgtt

SEQ ID NO: 27853 - DNA, 332 bp, Zea mays
  Clone ID: MRT4577_125417C.1
ttcaataataaagttttttatctgatgtttggggcttcctagaaatgtactaccttaattccaggaagccacaaacatcacataaaaaaccgcacatttgaacaagagcagaatgctgggctagcgttcacgaccatgctaagctcaagcccccctatagaacatccgaaccacaactcactggcgtacaacttacacctatactgagaaataatatacatctatcgtataaaaaagacaaatgggtgctgtggcaataataaattcgtaaaaatttcatcacaaaataatttcctgtagatataagccaaaactccaaggtaccaaaacat

SEQ ID NO: 27854 - DNA, 680 bp, Zea mays
  Clone ID: MRT4577_125418C.1
cgtgtacgtggtgatcttcccggcgttcgcgtccagccagcggacgcggctgcggatgctgggcctggcgtcggcggtctcggcggcgttcgccgcccgtggcgctggcgtcgatgctggcgctgcacggacagggccggaagctcatgtgcggcctcgccgccaccgtctgctccatctgcatgtacgcctcgccgctctccatcatgaggctggtggtgaagaccaagagcgtggagtacatgccgttcctgctgtcgctggccgtgttcctgtgcggcacgtcctggttcgtctacggcctgctcggccgggaccccttcgtcgcgattcccaacgggtgcgggagctttctgggcgcagtgcagctggtcttgtacgccatctaccgcgacagcaacagcggcggcaagcagcaggccggcgacgacgtggagatggcctccgacgccaagagcagcaagaaggtcgccgacgacgtcggcggcaaggaggaccgcctggtctagcatggagctagccactttctctttcggtgcgcgagcgtatgtttcctccccccgtgattgtgtgtgtgtgcatgtatacgagagtgcgtgctgtactgtactacctctgcgtgtgtgcaataatgtaactgggtgtttcatctcgctaaaaaaaaaaaaaaaaaagcggcc

SEQ ID NO: 27855 - DNA, 1796 bp, Zea mays
  unsure (1)..(1796): unsure at all n locations
  Clone ID: MRT4577_125419C.1
cgcctacgccacgcgtccgacacacaaacagacagacatacaagcatacaacaccgacgccatttagttgtgttcttgctaggcagttgcgcacttacattgagccgcagctagctgtctacggcacaactatctcctgcgcgcgtgctcgatctgaagctaggccagacctgagcctgtccaattttgccttgttctacccggcccaccacaccagtagtcgagaaggttccataagcgcaagcagacagcaaaagagctaaggggtctgagacagggctctttggttctcttctcggtcctaccccttacctcccaaatcctctgctccttatatattcttgtgcactcctcgctcccgggcgcaccgggtgacacacaggcacaaagacaccgcccgtacacaggctcgttggcttggctgctgtgtgttgcgctcagccattcagacttgagagctactagctaactgctcgttgggtgtgggtgcgctcccggcctagaccgtggaggaaaggagtccagtccactcactaccccctctgctccgttcgggttccaggccagcacagccgagggttccgcacagcgataagcgcgaagcggaagagatggagcatatcgccaggttcttcttcggagtttctgggaatgtcattgcgctcttcctcttcctgtcgcctgttgtcaccttctggagggtcatcaggaagcggtcgacggaggacttctccggcgtgccctacaacatgacgctgctcaactgcctcctatcggcttggtacggcctgccgttcgtgtccccgaacaacatcctggtgtcgacgatcaacgggacggggtcggtgatcgaggccatctacgtggtgatcttcctcatcttcgcggtggaccggcgggccaggctcagcatgctgggcctcctgggcatcgtcgcctccatcttcaccaccgtggtgctcgtctcgctgctggccctccacggcaacgcccgcaaggtcttctgcggcctcgccgccaccatcttctccatctgcatgtacgcctcgccgctctccatcatgaggctggtgatcaagacgaagagcgtggagttcatgccgttcctgctctccctggccgtgttcctgtgcggcacctcctggttcatctacggcctcctcggccgcgaccccttcattattatcccgaacgggtgcgggagcttcctgggcctgatgcagctcatcctgtacgccatctaccggaaaaacaagggccccgccgcgccggccggcaagggagaggccgccgccgccgccgcggaggtggaggacaccaagaaggtggccgctgccgtggagctggccgatgccacgaccaacaaggcagcggacgccgtcggcggcgacggcaaggtcgccagccaggtgtaggcgggcaaggcttatttgctgtctgggactgggaggaacatcctaaacgaggctgccttagtttgtcggtggagcagattggtgttggtttctgtgggcttttacggttgttgttactctcatctccatctctcccaggaggctacccccaagcatgtagtagcttccattctgattctgggacggtgttgcacgttacagtgctctcaagctgtctctgcaaagtgtgtttttttattccatttccctcctgctcttgttctccaactgcgcttacctgcccccgatttctctaaaaaatgtattaaactatctgagaaattcatccaactgcgagaaaaaaaaaaaaaaaaggggccgcaaaaaaaaaaanaaaaaaaa

SEQ ID NO: 27856 - DNA, 196 bp, Zea mays
  Clone ID: MRT4577_12541C.1
gtgctccagcctcatatgtccttgcacacaatggagatgtatacgaaagtggtgggaaaaatagacccaaaaaaaaataataataatagcgggctgaaggagagaaaaatagtctcctcttaccatcaatcaatcctagatccaccggtgtaccaccacatagaaatgtgaagttgagattgaaccatcatgacta

SEQ ID NO: 27857 - DNA, 536 bp, Zea mays
  unsure (1)..(536): unsure at all n locations
  Clone ID: MRT4577_125420C.1
cccgacccagcaggatagagtgctcagaacccaacgagcagcctgagccgaaggaccccggccgggtgttccacgccgagcgcgtcgccccgagggacgccacggagtcggtaaccgagcagctggcgcacggcggtagcggcgacgacggcgtgatcgacgagacgtacgacacgaggatcaagatcgcggaggcgctggaggcgtcggccagggccatcggggacaagcacgtggagccgtccgacgccgcggcgatacgcgtcgcggaggcgagcgccgcggggcgtggggcgccggcgatcccaggcggcgtctccgagcgcgcgcaggccgcggtggctgccaacgcccgcgccgcgcgcgacgaggacaaggtcaccatggccgacgtgctgacgtgggaggcgacggtgaagctgccgacgggcaaggccgtgactggcgaggtcgctgcggccggggncgcggcagaggccgagaccgaggccgcgaatgacccccgagcgaagacgaacccccgcggggtgagcgcg

SEQ ID NO: 27858 - DNA, 565 bp, Zea mays
  unsure (1)..(565): unsure at all n locations
  Clone ID: MRT4577_125421C.1
atttcnncaccaggcgaagccgcagctgcgagggagggacncnncctgttgtcccgggttttaaacgcaacttccatcggtgcgaagctatccattcgtgtgcgtgatgggcgccagcgtgaccgtggaaaacctcaaccccaaggggttaaaatgtgagtatgcagtccgtggggagagtgggatccatgctcatcgcctgtgncaacaactacaaacacaaccaggggctcttccttttgaggagatcctctattgcgatattgggaatccccaatctcttgggcagcaacctgtgacattcttcaggggagggcttgctctttgtgagtatccgtgcctcttgggaaaagaagagaccaaatcattgtgcagtgcggaggcgatttctcgagcaaagcagattcttgcgactattgctggaaggggacaggtgcgtataggcacaggcaggggatcaaaggactgcgtgatgcaattgctgctggaatatgtgacgtgagggattccctgcgaatgcgnatgacattttcattacagacggagcaagggctggggggcacat

SEQ ID NO: 27859 - DNA, 355 bp, Zea mays
  Clone ID: MRT4577_125422C.1
attcggctcgagggcgttcctcctctctgtgttttccgtgcacccacagcctaccacccgtgagacgaccgagactcatgtcggcgcccatgcagaccgacgccggccacccggccaggcacaaggagccacagccactcccactcatcatgttgagcttatctgaattcgttgaccttgcagtgcaccctgtattcgacaagcaagggacacccttcaagcggctcattaaagaccataactacaacaacgacctcgaggagggaattaacaccatagtcctgaggtctaagctggtgccctacgaactggatgaagaatgaatgtagacagagcacactgatgttgctatatg

SEQ ID NO: 27860 - DNA, 329 bp, Zea mays
  unsure (1)..(329): unsure at all n locations
  Clone ID: MRT4577_125423C.1
ggggggggggggggggatcaaccatgacggtcgcacatgctacattatacagcaaaagaaagaacaaaatgtccaacctgtgatagagcgaggcaacagtggtatggagaggctacgcgtgcccgtgctcgacggggcggtgtggccgggcgcggggggggaagcctatgtgcttgcgtngggccacgcgaactcgttaggtgggcagagatcgtgagccgntggggcctggctgtcggggccaagtgcctgaactctggacggtggccgagcgccggtgtttacgctagaagggaaggtggaacgaggagtatgatagggaggtgggc

SEQ ID NO: 27861 - DNA, 289 bp, Zea mays
  Clone ID: MRT4577_125424C.1
cctctactacctcgccggctagcttgctctaagtttcgccgttcatcatgcaccctcgccgacgagctcgggggcccttctcgtccgtccgtaggttccatggagctcgcccaggtcggcgttcctctccctcaagctcatctccatgccgcgtcaagctcttccccacagcagctggcccgtcgtcgttcttcagctccttaccatgctcagctgttcgtcgtcgttggtggataaatagaacggttaaatatattagttgcgataatttccttgtcgtggttaggat

SEQ ID NO: 27862 - DNA, 170 bp, Zea mays
  Clone ID: MRT4577_125425C.1
cacaaacagatctccccacaatccaaccgtacggaagcatcagcttcaagatggagatcttatgtaaaaactctgagcggtacgactatcatccgcaaggggaagatcaatgacagcattgcctaggaacgaggcgaagacccatgaaaaggcggatgttccaccagaaa

SEQ ID NO: 27863 - DNA, 329 bp, Zea mays
  Clone ID: MRT4577_125426C.1
aacccagtcgctcaaaaccctagagctctcgcctgctcgcctccgccgccgtagcgagctgccgatcttcatccgtggaccgtggtgacccagatcagcaagaagaagaagttcgtcagcgacggtgttttctacgccgagctgaacgagatgctgacgcgggagctggcagaagacggcttctctggcggggatgtacgcttcacgccagttcgcacggagatcatcatacgcgccacgcgcacgcagaacgtgctcggcgtgaaaggccgtacgatcaaggagctcaccttcgtcctgcaaaagaaggttaacttccctgagaatgg

SEQ ID NO: 27864 - DNA, 347 bp, Zea mays
  unsure (1)..(347): unsure at all n locations
  Clone ID: MRT4577_125427C.1
ggccgcttttttttttttttttttgacgggagcagcgcaatcacacacatatatatattgctggggggttacaaaccatacgacaaccaaactttaattagacggcggaatgacaaaattatctgccaaaaggcccggatccaacaaggaacaagcatctgtggcgctcacagacagctagncgaggggcgcagggggcagnatgatagatgattagccggaccacccacattcgcagggcgtggaagggacaaatggccgtcgcaaacttgagcgggagaccgtgtgagtgtgggtgcgggtgggtgctgtgtttggggggggggcccttcctgccagctgggcgg

SEQ ID NO: 27865 - DNA, 341 bp, Zea mays
  Clone ID: MRT4577_125428C.1
atttcgtatggtgccagtagcgctattgtttgatttttgtggctgctcttcttgtacagtaccgagtgcgagagatgcatagtcatcgtatacataccaatacaataccgtacctataggtcttcctattcatgtggaagagtagaacttgtatccttattagctgtcagtaaaaaaaaaaaaaaaaaaaaaaaaaaaaaaaaaaaaaaaaaaaaaaaaaaaaaaaaaaaaaaaaaaaaaaaaaaaaaaaaggaaagccaaactaaaaaaggccaaaaaaacaaaaaaaaccagccacaagaacgccgcacaagcaaaaaaaaaaaagggggggggcttta

SEQ ID NO: 27866 - DNA, 338 bp, Zea mays
  Clone ID: MRT4577_125429C.1
gaattcccaagtcagacccacacatactgatcattcatacactctcctttctatcctctctatccactccctaccctcatcctcaagaaaaattttaaacataaaagcactacttcccccttttcctatctcatccaataccctcactttcacacaattctcattttctcctaccacccttaatccatttttttcccccacctattacttcctcaaactcctaacactcctctaccccatccaactttctacaacccactctcccttcttactcttttaccacatcccatttcccaatcttttcaccactccttccctcttctccacacttcaattca

SEQ ID NO: 27867 - DNA, 802 bp, Zea mays
  Clone ID: MRT4577_12542C.1
ctccctcaaggttcttagggtttcgcatccgcatcagccgccgccggaaccggggaggcggcgatacgtcgcgatgcagccaacataccagccgccaatgaacggccagcacgcgcctcagccgcaggcctctggggctccgccgcctcctctgcagcaggcccccccgccgcagcagtactaccaggcgccgccgcagtactaccagcagggacccccgccggcgatgtggggccatccgcagcagcatatgcctccgcagtacgcgcccccgccgcagcagtacgcgcctcagcctcctcagcagtacgcgccgccgccgcagcattacgcgccgccgccgccgcagtacggagcgcagatggctggcgggccgcctccgggaggcgaggatatcaggtcgctgtggatcggagatctccagtactggatggatgagacctacctctacaacgcctttgcgcctgtggggccgcagcaggtcacctcagtgaaaattatccgcaacaaacatactgggcagcccgagggttatggttttattgaatttcaatctcgagctgctgcggaatatgctcttgggacctttaatgggcagatgatgcctaatgttgaacaagttttcaagctaaactgggcttcttgtagtgctggtgacaagcggggtgatgatggttctgatcacacaatatttgttggtgatttggctgctgatgttactgacgccatgttggaagagatattcaaagccacctacccatcagttaaggctgctaatgttgttactgacagggccactggt

SEQ ID NO: 27868 - DNA, 551 bp, Zea mays
  Clone ID: MRT4577_125430C.1
gtttccacccctaaacccctcaccgctacgcacgcgacccggcgaccatgggtaagagcgggaagaagacgaaggagtcgcaccggcaaggccgcggccgccgtggctcgcagctcggcgacgacgacttgccttcgtctgcctacgacgcgccgccgcgccgccaggaggactcggacggtgacgattccgacgaagcaacagcggaaggcgaacacgacggaggcgcggaagaaggcgacctccagggccagtggcaggtcggctcgatgccttccaagttccacctgtaccagctctccgtgcagtcgccaaaaggggacatcagctacctgcagaagttctttctgatgtatgtcggcgggcgcgtccctctccacctgcaggaggatttctgtggcaccgccctcctcagtactgagtggcttcgcactgatacgagacgaacagcagtgggcttagactttgaccgtgagtcacttgagtggtgtcttgagaacaacctgagcaagattggagctgatgggtattcgagattgttgctttttaat

SEQ ID NO: 27869 - DNA, 228 bp, Zea mays
  Clone ID: MRT4577_125431C.1
gcagctcgtgtatacgtccaacggcttgatctgtgacgactatgacggcttgtgcatcaccaaggtcggcttctccgacgtcctcgtcggtcatcagctcttgttggtgctggtcctggtcatcctggcaccctgcgggccgtgctgctgctgtgctcctgcgtcagtgttttcatccccatggtgcagtacggcgtgatggcgccggtgtagcagtttgtcgtcgtc

SEQ ID NO: 27870 - DNA, 318 bp, Zea mays
  Clone ID: MRT4577_125432C.1
aaaaaaaaaataaataaaaaaaaaaaaaaaaaaaaaaaaaaaaaaaaaaaaaaaaaaggggggaaaaaaaaaaataaaggataataaataaaaaaaaaaaaacaaaaaaaaaaaataaaaaaatataaaaagacaacaaaaataaggggggggcgtttttggggttcctttttttggattctggggctcgcgagggtttttactcctttttggggcccctcctcttgatattttggggcgcttgttttaatcgttctttggggtttacccctgggggttccccatttttgggcttttgtgaaacaccctggttttccg

SEQ ID NO: 27871 - DNA, 1010 bp, Zea mays
  Clone ID: MRT4577_125433C.1
gccggccggttccgggaacccaggagctgcccttcctcgtcttcctcgctcgtcaagtcatcagcatctcagcacccaaagtcgacaaaattgaaggacacctagccggcaaaacatgagggggaaggtcgacgagtgctgggacgagtgctgctacaactggggcgagtggaaatactgcctgctgtgcctcggcatcgtggtggccatcgtcctcatcgtggtgttcgtcgccgccttcggtttcgtgcgccacatcgacgtctccgtggacgacgcttcgctgacgcggttcgagctggcgacgtcgccggtgacgtcgctgtcgtacaacctgtccgtgaccctggtgatccgcaacccgaactgggccatgagcctcaagaacaccaagccgctggaggcgcagtacaagttcgacgaccagatgttcgaccgcttccagctggccgacaagggcgacaagcaccccgccggcaagaccagagtgtaccacatcgcgcccccgggcacgacgagtagcgtcatgctcgggaacgccggcgaggccgagttccggaaggagaacgccacggggacgttccaggtggaggtggccgtcgccggggaggtgcgctacacggcgcgctacaccaagtgcaagatccaggcgtcgtgcccgctcaagctgcagctggcgccgccgggcaccgccgccgtcgtgttccaaaaggtcacgtgcaagctcgccaaggcggagaagaactgctagatctagcttgcatatatagctggtggcatggcatggcacacaagccttattgcattgcgttcgtgttgcgcggttttgtgttcgtcgatcggtggtggcgacgatttgattatgtttgttgacttttgttctgattgctgtgtgtggtgtgctccgttaatcaggatttctgctgtctgcacccgtgtgattgcaaatttgcgcggaatgtgatctgtttcagctccaaaaaaaaaaaaaagaaaaaaaaaaaaaaaaa

SEQ ID NO: 27872 - DNA, 226 bp, Zea mays
  Clone ID: MRT4577_125434C.1
gagtgtgtatgtgactaccatagctctctgttccagacagtgcgggtgactgccttaacgcatcgataaaacagtatcttgatgttgaccatcaatctaacttttctattacctgctgttgagataggccttcagcttggtgctttattctacggaaactgccttcaaaggtggatcacacataccacccatccattatagtacagccttgtaacaggcaaaggtt

SEQ ID NO: 27873 - DNA, 288 bp, Zea mays
  Clone ID: MRT4577_125435C.1
caagcatcgtcacgtctgcggcgcctcgtctgcgatcctcacctcgacagccatgggcatgatcaagatcgacgatcaactggttcgcaaggatcgacacgctcgtggccaccgtcgccctgcagacagaggatgtcgaactcgtcggcgtaaatgaacgcttcaacactacggattagatgacgtacatgttcacctacgacaccgtgcacaggcattgacaagcactgcgggatcgccctcaatgactccaagatgcttctcttctagtagaagccgttcaccgtc

SEQ ID NO: 27874 - DNA, 392 bp, Zea mays
  Clone ID: MRT4577_125436C.1
agttgtacgcacaccagttttagaagtaaccattatcggacaaggggtgttgaacacaatttttggcggttttccccctttttgaatgggaccatcaacttgcgggcccatcgaatgcaagctgctaaataacgaagcccatgagcttaatgacgatcggggtgaggattgaccaatcactacgcttgtggaggcataggcgtgcccctggcgtgcttaagatggggacggacaggcacacgacggtaatgcgcgggatcaccaaagcaacggagtgctgtcaggactggtggcgctttggcatcttctgtccagacgtccaggtgctactccatggggacccagaatgaaagacgctgattaagcgccctcgttggggccatctttgggtg

SEQ ID NO: 27875 - DNA, 297 bp, Zea mays
  Clone ID: MRT4577_125437C.1
gaggatcatcaccgtttgttacctagcaagttttaaataaaaaacaaaggagtaacggtttggggagggtaaaactgggtagacaaaatgtggccgagctagccagaccagaaggctgaccccgccgggctggggggaaggcacgctggggggcggtaacgccagcgagtccccccgcaagggggaaaacccccgccaatcccggaacaccgggaaaacccaaaaaacccggtgccttgatgggacgggcgggcctatctgactaaaagggaaaaagcaaattgagggggggggggg

SEQ ID NO: 27876 - DNA, 296 bp, Zea mays
  Clone ID: MRT4577_125438C.1
gcgcggtgctgctcgcgctcagcctgtactcgcatcgagagtctatactccgctagatgctataacggtggaaagcgcgcgccacagccgatagagactcatgatgactctctcgtcaaggcatcacctacaaagatacgcctatggtagaattcacagagtgatggctaaggttatctttcgtgataacacatatggtatactgataataaccatcgccatcacgcatgggctatggcatagtatgatcgtgaagattgaatacgagaattgcatatgatgcactatctgcattg

SEQ ID NO: 27877 - DNA, 457 bp, Zea mays
  Clone ID: MRT4577_125439C.1
gtctgcacaacccttgattacagattggatcacacagtcctggttgatttcctcacttaagattttgttagtagacagcacaaggaagtttaacctgtacagcacaaggaagcaagcagctcagcctccattttatttggagaagtcttatacttatcagaaaaagaaaagctaaaactctaccctctgcgcccaccttcaaggaaaatcgactgcatttattgttcttgggtacacaatgaaagatgggtgcagtctattatattggagttaagagagcgctaccttgcagtcacactcgatgaagtcctatagtgctagatttcaaaaatttagatggctattatcctttgcaattgatcaagaatggtgagctattctaaggaagcttctgaacaatatacctgctgtcctggagtgtcacaaatggcaaagatttgcgcttagggagggagga

SEQ ID NO: 27878 - DNA, 574 bp, Zea mays
  Clone ID: MRT4577_12543C.1
cgttgctgtcggggatttgcctagttgaacggatatcatagctctcatccatgcggccaccttcttggagcctatccaaagattttcttgagtaaggcagtgataagccagaaatggactcagatgacatattactcaagtatggtgaccttgatcgttctttggtgggcaagtgtgttgtcatcgtatccaataagcgggaacctccatttcgtgaactaggtgggatggtaggaagggatgagtccaacagtgctgagttctgcaatgacagaacgtttgatgctggtgctgcaagcggcacaggaggatcacgagatgatggaggatcaactccaaggtccaaacttgttgagcgtgcagcagagaaattttgccctgacatgctgacacctttcagcaaactttcaatggcggaaactttttctttgctggagctaagcacactctccaggctcctctcagaacttctgccaatcgtctttgactgtgataaccgaagagtgtttgatggaaaagatgaatctgaagaaatagctgcactcttgtccattgcgacaatagctgaagtgcc

SEQ ID NO: 27879 - DNA, 389 bp, Zea mays
  Clone ID: MRT4577_125440C.1
accggggcccaattgcccacccgaagccaaatttattacccaaaaaaagggttccttttaaacccccccaaaaaataaaggtttttcaaataaaaaaattttacaaaaaaaaattcccgtaaaaaaaaaaaatagttaaacctgaaagaaaaaaaaaacaaaaggttaatttccaattcaacccgggtggataccaaaataccaaccaaggaaacccccacaaaggaaaaacaacttttcaatctggggctaccccaaaaggggaaaccccccttcaaaacaaaaagaaaccccctttttttgcttgaaaaacccggaccctggaacaattaaaaaagggccccccatatttttaaatatcccggaacaatttttaaatttgcccccaa

SEQ ID NO: 27880 - DNA, 203 bp, Zea mays
  Clone ID: MRT4577_125441C.1
attaattcactaacacatctgggggggttggccataaagctccatccctgggggaggccgaagaacgtcaagaccaacaagaatagctctggggggggggggcggaaaaatccatcgggctgcatgaagaaaacgtactcccctaaataaaaaatctctccccttccttacgggtccaataaaattggcgaaccaaagaaaag

SEQ ID NO: 27881 - DNA, 331 bp, Zea mays
  Clone ID: MRT4577_125442C.1
attcggctcgagcgttgcggggctcttcttttacatacacacgctaacagaggaggctggggccgtctaggggggtagtgaactgggtgccataacaatagctctgcctacttcgtgcaggacaaattctgtatacctaaactggctaccagccacagccgaacaggagcacaatcaccagcctactgtgaacagcggcacaatgctcctcatgctaatttgatctgagaacaaggagggggcggacctcccctagtgggctctctgacccgggaatgattccaggaccgctacctggcggctaccgcagggagcctagaatacgttggct

SEQ ID NO: 27882 - DNA, 1052 bp, Zea mays
  Clone ID: MRT4577_125443C.1
ttgggtacctcgaggccggccgggccgggaagagcatgatccaagctagcagctcagctctccactccctctctgtgctgtgctgtgtagtcgttcattcatgcacttggcgttcttgcaattgcagcccccttctcctcctcatccttgtcggggcagttagctaggtgagaatagtgcagtggagctcaacaggccagcgataagcaattaatggaggtagaggcttgctacaactacggcttcctccctgcagacagaggcaggcaccaaccaccacctccaccacatgccacccttcctcacgctgcagccgattttttgtgtatttcagaggatgcaggtgagctgtgggagtacttcccttgccccttttgctacatcgaggtggaggtgcccttcatctgcaaccaccttcaggaggaacattgctttgacaccaggaatgctgtttgccccatctgcgccaacaatctagggaaagacatggctgcacatttcagactgcagcacacgcatcttctcaagaggaggaagccctacaggccaagctcatgccctgcggctgccaccagcccagcaacataccaagtgaactcttactatgaagaggcagaaccacagcagcactacagcaggccatacaaagatcctgcacctgacccactgctctcccagttcatctgcagcgtcgatgcggtccctggtgatgacaacgcccagaaagatgatcagaggctgaagttgaacaacaagggagcgacagcgagcgacgacgatgcatcatccaaactggggctggaggagaggctgcagaggatcgactttctgacggagatactcatgtccaccattctttgatgtcttgttaccgctatctagggtttcttgaggatttgtagcaatggctatcaggatgtgtctccatgtcacgtaagcgaaagcaattccctgtccacatgtacaccatagccttggctacctacatatatacaatgaagtgccatactttggccatccttgtcaaaaaaaaaaaaaaggcccctagggcc

SEQ ID NO: 27883 - DNA, 1088 bp, Zea mays
  unsure (1)..(1088): unsure at all n locations
  Clone ID: MRT4577_125444C.1
ggaagaacatgatccaagctagcagctcagctctccactccctctctgtgctgtgctgtgtagtcgttcattcatgcacttggcgttcttgcaattgcagcccccttctcctcctcatccttgtcggggcagttagctaggtgagaatagtgcagtggagctcaacaggccagcgataagcaattaatggaggtgctacatcgaggtggaggtgcgtagaggcttgctacaactacggcttcctccccgcagacagaggcaggcaccaaccaccacctccgccacatgccacccttcctcacgctgcagaggatgcaggtgagctgtgggagtacttcccttgccccttttgctacatcgaggtggaggtgcccttcatctgcaaccaccttcaggaggaacattgctttgacaccaggaatgctgtttgccccatctgcgccaacaatctagggaaagacatggctgcacattccagactgcagcacacgcatcttctcaagaggaggaagccctacaggccaagctcatgccctgcggctgccaccagcccagcaacataccaagtgaactcttactatgaggaggcagaaccacagcagcactacagcaggccatacaaagatcctgcacctgacccactgctctcccagttcatctgcagcgtcgatgcggtccctggtgatgacaacgcccagaaagatgatcaagaggtaattcagatctttttcagagcgctggatgtgccagtaacagtatcactatccagccccagctgggtttttgttttttttcnccccatcaggctgaagttgaacaagggagcgacagcgagcgacgacgatgcatcatccaaactggggctggaggagaggctgcagaggatcgactttctgacggagatactcatgtccaccattctttgatgtcttgttaccgctatctagggttttttgaggatttgtagcaatggctatcaggatgtgtctccatgtcacgtaagcgaaagcaattccctgtccacatgtacaccatagccttggctacctacatatatacaatgaagtgccatactttggccatccttg

SEQ ID NO: 27884 - DNA, 469 bp, Zea mays
  Clone ID: MRT4577_125445C.1
ggattgggtttttttttttttttttatttttttttttttttaaacccccccttataacctaagggaaaaatttttttttttttaaattccccccccccccaacaaaaaaaaaagctcagggggttacaaaaaaagagcttgtttttctattggatccagaaaccacccgggaggtacacagggggatggttcctattttttaccggggggttgtaccaaagttcgaccccattgcccgccccccaggcgcaaaagacggggtggttttattttttaccccccccaaaaaacattgtccctttggttaataccgcccctaataaatatattaaaacccggggggggggccgcggcaaaaaaaaaaaaaccggggggagggggggcctgttattatagaaacttcccacacgggaacctgaattagggtctttcccccccggggtaaggaaaaggggggggggggttttaa

SEQ ID NO: 27885 - DNA, 681 bp, Zea mays
  Clone ID: MRT4577_125446C.1
aaacaagaagattagtagtattaagtatcaataatacaaccatgttttaagattacacgagattaaacgttacaagttgtaacttacaaccaaaccatgtaaaatactttaatagctgcgggctgttacaaaatgttctcacagccacttcagctactcactttctctttctccctcatttccccctttatcactcacaattaaaacaccaaacccaaaaaaaaaacattaaaaaagtgaaaacacacacaaaagtcaaagatactttcccctgatttttctctcctttccatatataaaatttagtaaaaaaaaaggaggaggaatagcgaaattagcggagagttttcttttgtctcgaaccactttaatttctcgaatttcctccaaattttagtttctcgaaactcgccttaaaccctgaaattcttcccgacaaaggtttgaccaaactgccagttagaaggaaccatgttccaggaagtagatgttctacggtcactgcctgtgacacggaaagagagtgcttgaccaaccaaaacagcattagattgccagttttgtccccagtttctgctcaaactcatccaaccagtccgtgatcctttcacactagccctcacgatgtctcctgctccagccacgttagtgatcagaaccaagttgaagtaacggtgaccg

SEQ ID NO: 27886 - DNA, 330 bp, Zea mays
  Clone ID: MRT4577_125447C.1
gtccgtctgaccaagcgaacaagctccaagagctgtacacccctactgacaccttcttcgtgcgcgacgatgctgagaaagtcgccgaactcaaagtgcaggacccagctgccctggcgctgatcgagccatttgccgccgatcaaaacaaggctgcccaagtggatggtgatgatgaaaccccaaaggaaaaaaactggatccttttgctgatgaagatgaggaggatgaagatcatgcatccgatgccgagacagaaaccccatctgcagccgatgaacccgaatgtgctgctaactgcaattagccacagggggacctatctgccgc

SEQ ID NO: 27887 - DNA, 242 bp, Zea mays
  Clone ID: MRT4577_125448C.1
aagcaacatactaaggggaattcagaagcggcattggggcgccactggcgggcaacatatgctccatacatatgctccatgctcatgctgcatgcgttgcttacgcgaccattttacccgaacactcacaagctactataacaggcctttatacccgatacctttcatcaatgaccgctataaatggcgaaaacacaatgctaaaaccctacaggctacaacaagcagttgcaacaagcaac

SEQ ID NO: 27888 - DNA, 563 bp, Zea mays
  Clone ID: MRT4577_125449C.1
gcggggaaatggaaaggaataatatatagggaaaaaggatgtttggaaaaaaaaaaaaaaaaaaaaaaaaaaaaaaaaaaaaaaaaaaaaaaaaaaaaaattaaaaaaaaaaaaaaaaaaaaaaaaaaaaaataaaaaaaaaaaaaaaaaaaaaaaaaaaaaagtccctctcccggccggcccccccggccaggaccccggttttttccccagtcccccccctcatttccataaagggccatcaaaccccctattgggcaaccctataggttacaacaagcccttgcgggaaccgtttaacaacacccgtttccccaattacaacaacaatccttggcccatttaaccatacaaaccatcgcaccccaactagagcaccattttgtcccccctttgacccacctacccccaggaaaccccgtctcctacttgaaacaaaaactgtttgcttccaacccaaattctttggcaaacccacccctttcccagcaacacctccagttgcaacagtttttaccaccttttattcaacaacccctggggaaccctcccaaaaacctgca

SEQ ID NO: 27889 - DNA, 392 bp, Zea mays
  Clone ID: MRT4577_12544C.1
cattgggtacctcgaggccggccgggctctactgacgcttctactatctagaaacacgcacacgggccgaaactaaatttctcaagagcgcctcttcgggccaatcccggtcagggatagcctatgttccgtgctgcgggccgtactccgtaccggacgccgatgggctaccccggtccctgtaaaatccagtttatcgtggtggcccacaaaaacaccagagagctggcgtaagaatgccgcgccaccaccacgcccatgtgatgcaatgggccgaccggggccctcccacttttccaatactgtatcatccactaccgaaaaaagaagaaggaaaagcttgtgctagaccctctcctgcatcaacaacaaaataatgatcgaggcccaat

SEQ ID NO: 27890 - DNA, 604 bp, Zea mays
  Clone ID: MRT4577_125450C.1
acggcagccgaggcggcgaaggggcttgtcccggccgccactgccaccgcgctcatgggcaagtccggctccgtcctcctcctcatcatgctcttcatggctgtgacctcagccggctcggccgagctggtggccgtctcctccctttgcacctacgacatctacaggacctacatcaacccggatgccacaggcgagcagatcctgcgtgtgtccagggccaccgtcctcgtcttcggttgcctcatgggtgtcctggccgtcatcctcaatctggtgggtgtctccctcggatggctgtacctggccatgggcgtcatcattggctccgcagtcatccccatcgcgctgctgctgctgtggagaaaggccaatgccttgggcgccatcctcggcgctgtcagtggctgcgtcctcggcgtcaccgtctggctctcggtcgccaaggtgcagtacgggcgcgtggacctggacagcaccggccggaacgcgccgatgctggcaggaaacctggtgtccatcctggtgggtggggcggtgcacgcggcgtgcagcctggcgtggccgcagcactacgactgggagagcagccggcagatcacca

SEQ ID NO: 27891 - DNA, 559 bp, Zea mays
  Clone ID: MRT4577_125451C.1
ggtttttttttttttttttttttttttttttttttttttttttttttttttttttttttttttttttttttttttttttttttttttttttttttttttttttttttttttttggggccctaaaaaaaaaacccccccttttttaaaggggggggggggagggggcaagggtccaaaaaaagccctggccccccaaaaggtttggccaagggaaaaccaccccttcctgttttcaaaaaaaccccctttggggttttggaaaaaagggggttcccgaagggggcttttttttttttccccaaaaaaaaaccggggggtttttggggggaagggggaaaaggcctttttagggggggttagggcaaaaagggcgccccccccttgggttttttggggaaggggggaaaaaaattgcccgggggggggggcctttggagttggggggttgtggggaaccttttcctcccgggggggccgggaaaagtgcgggccccgtggggggtggggccccgggcctttgccttgtggaaaatgcccgggcccaaagtggagcccaagg

SEQ ID NO: 27892 - DNA, 346 bp, Zea mays
  Clone ID: MRT4577_125452C.1
gcctagcgaacttaatagcccagaaataaaatgttgcgcacgaatcaccgacgcgcggccggccacaacatatgaagcggctcatctgactagccactgatcgttacacggagaggtcgggcgatgtcaaacctatccagcaaccgacaactatttatgatcaaacgggcctcctcacacatatcagctcttcagctatcgtcactttagacaccaacatctgaacaaaccattggataagacctgtatcctgatctagatgatttaggaactatccacgtcatgatcttacgtcggaaggctcggagatcaacaagccaacgatgccggactgcaataacaaact

SEQ ID NO: 27893 - DNA, 776 bp, Zea mays
  unsure (1)..(776): unsure at all n locations
  Clone ID: MRT4577_125453C.1
cggggcaccagtcgtctagtggtagaatagtaccctaagtggtaccagaggacgacgtggatgtacatttctgtgccgctggcgctttacgtcggggaacggacgctacgggccttccgatccaaggcctacgcagtcaagattctcaaggtgtgcctcctgccggggaacgtcctgaccgttaccatgtcgaagccctacgggttccgctacaggagcgggcagtacatattcctccagtgtccaacaatctccccgttcgagcggcaccctttctccatcacctcagctcccggagacgactgcgtcagcgtccacgtccagaccaggggcgactggacacaggagctcaagcgcatcttcgtcgagaactacttcacgccgtgcgtgcccagacgggctgccttcggggacctaggcgcggtggaccacaagaccaagagcccgnccgagggttgctggtcgacggcccctacggcgcccccgcgcaggacttcaggaacctacgacgtgttgctcctcgtcggcctcgggatcggcgccacgcccttcatcagcatcctcagagacctcctcaacaacatcaagctggccgacgagctcatggacctggcaatggagaccggccgggccgaggacagcgccagcaacctgagcgcgtcgacggcgagcggcggcggcaacaagaggagggcgtaccgaacgacctgcgcccacttctactgggtcacgagggagcctggggtcgttcggggtgggtaaaggggggtgatgaa

SEQ ID NO: 27894 - DNA, 1343 bp, Zea mays
  Clone ID: MRT4577_125454C.1
cggggaacgtcctgaccgtaaccatgtcgaagccctacgggttccgctacaggagcgggcagtacattttcctccagtgcccaacaatctccccgttcgagtggtacgtacatacgcacgcatagttggcactctcatgcatgcatctcttgatacttctccgcgtcggtggcgtatgtggcaggcaccctttctccatcacctcagctcccggagacgactgcgtcagcgtccacgtccagaccaggggcgactggacacaggagctcaagcgcatcttcgtcgagaactacttcacgccgtgcgtgcccagacgggctgccttcggggacctagcaggcgcggtggaccacaagaccaagagcccgccgaggttgctggtcgacgggccctacggcgccccggcgcaggacttcaggaactacgacgtgctgctcctcgtcggcctcgggatcggcgccacgcccttcatcagcatcctcagagacctcctcaacaacatcaagctggccgacgagctcatggacctggcaatggagaccggccgggccgaggacagcgccagcaacctgagcgcgtcgacggcgagcggcggcaacaagaggagggcgtaccgaacgacctgcgcccacttctactgggtcacgagggagcctgggtcgttcgagtggttcaagggggtgatgaacgaggtcgccgagatggacaagaagggtgtcattgagctgcacaactacctgacaagcgtgtacgaggagcgagacgcgaggacgactctgctgtccatggtgcaggccctcaaccacgccaagcatggcgtcgacattgtgtcagggacaagggtcaggacacattttgcaaggcctaactggaaagaagtatttacgaggatagcgtccaagcacccaaattctacagtcggggtattttactgtgggagacctacacttgccaaagaactgaagaaactgtcacttgacatgagccacagaacgggaacccgatttgatttccacaaggagtacttctgatggaaaatacaagtgcccctgatttcttttagtactagaagatacagataaaaaaattcacaaattttgcgtagaagcgaactgatcctctttcacagtatgtaaatgtacatggtataaagcagagagtagttagaaacgtttttctttctttcttaaccaaatgggagggtgaaaatatgtcctgcgctttcagacagccattggtaactgcagatataaatgtaatagatcatatcattgtatgctaagcatgcaagagacttgaggccaacaatctgaatgcatatcactcaattaactggtcgtgtt

SEQ ID NO: 27895 - DNA, 375 bp, Zea mays
  Clone ID: MRT4577_125455C.1
gacgaagagcggaagcctacttatgtagcgcatgctatgaaatcaacaaatgcaaacaggcatgttacttttaaaaaaggagcgtgatcgatcttgacgtatacatgacatgcatagcactgatgtgcattttaacattctttggatgctttaaaaaagaatccgagtatactgagtgctagatattttagatgagagtacatatgaaacacgagaagtgggtgaggaatcttctctaatatcaatatgaagaggcgtaaaatgaagattagacgatctgacctgtgagactgaaaagacctctgtcccaaaacttgaagatgaaataaaagaacgcatgcgtattctcaagtgaatgtatgctttgacgcgtct

SEQ ID NO: 27896 - DNA, 946 bp, Zea mays
  Clone ID: MRT4577_125456C.1
ggtaccactcgggcttgccgggtcttccctacacctcccataccgtctaccgcgcgcccgccgctacctgccagccgcgcacccaccgccaccccccgcgcgccctgccgccccccgcgcgccggcaagtactctgcagtccgctcccattccactctagcccagctgcgtgctgctccggcactggcaggtggataagcccagcaggcaagcacgcaggagactaggagaggaggagagctcagcactggacgcacgctcccctccccttgctggccaaatcgatcggtccccttcaggctccagactccggagcttgctttacttcaggtcgtctagctgcatgctgaagtataattccagatgtatccttgaagtgtaaacatttaaggattgtgtaattctttgggtaccaagacccatttttaaaattttaaacaatccagtttctgcttattttctgaatgacctgaaagctagcgatatgcccgtatatataactacttttgatcaacctgaacactttctcaagtcatcgcatacagagcaaaaatcttgatatttgcacccactaacaaaatttatttctgtgtctcagtcctttgcgaatatcaaatggtactttgctgcaggtccttgacagattttgtttcttttttccttatcgtgcagtgacaaaggttattttcagggggcaaagctgatggttataatttttttccatagttggcaggtgtattttcaagggatgttgcttgagcccaaatggatgacagcagaagtgtgatatgacgtgcgctcagcttcaccaacacactgattcttgaatgcattaagcatagtgcacaagcagttattcatgataagaaatcttttgctcaaatacatagaaggtgctctcaaagacattgaaggacctctcagagatattgagggaactcttatc

SEQ ID NO: 27897 - DNA, 575 bp, Zea mays
  Clone ID: MRT4577_125457C.1
ccacattctatcacgagtcaagagaatacatagtagagagaagaagatggtggctgccggcaggaacagggcggagcggtggaacctcgccggcgcgacggcgctcgtcaccggcggcagcaagggcattgggcacgcgatcgtcgaggagctcgccgggttcggcgcccgggtgcacacgtgctcgcgcaacgcggcggagctggaggagtgccggcggagatgggacgagaaggggctgcaggtgaccgtgtccgcctgcgacgtgtcggcgcgcgccgaccgcgagcgcctcgtggccaccgtgggggccaccttcggcggcaggctcgatatcctcgtgaacaacgcggggcagtccctgttcaagcggacggccgagtgcaccggcgaggactactcccggatcatggcgaccaacctggagtcgtgctttcacctcagccagttcgtgcacccgttccttcgcctcgtcagcggtagggggggcggcagcgtcgtgcacgtcttctccgacgctggctttgttgggctcccggcgttgtcgtctacttcatgtcccagggcgccctgaa

SEQ ID NO: 27898 - DNA, 857 bp, Zea mays
  Clone ID: MRT4577_125458C.1
ctgtgacctcagaaaatgacgagaatgcgggaggcttctcgacggaggtgggagacctcggcggagatctgtcaccgtcgacctgtggctgcaacatcgttcggggtccgggaaggggcacaaagcatagctagagttcgtggatctccccggagtctacacatgtggaggctgactgggtctcgtgggattgctcaccatcgaatgaaggagggtgtcgagccggcatttcagctagctgactttcatcactgcctcgatatgatcactgatgtaatacatgctcacgttcggcacccaaatgcccgtagaccgtggtcaacgtaccccatctacaccatgatcagagataacatgcaaaacaatatttctttccctttcattgagacaataagctaaacaaaattgccttcgcttcgaactaatctattttttcagatggtgacttccatgtgttcgattgtttgaggtgagggatgacgtgaagctgccaagctataagggtgaaaacatcaatgacaagatgttcgacgagaagaatcatatcttggacccataaaggatgctttaggagtacgcccaatccgctaccacgctcaacctactctgtgtcttctccactggcggctacaccgacattcagcgcgtcacgcagtggaaacttgatgtcaccgaacatagcaagcagggcgtcatgagaaataaaatcttccatgcactgagttgatttattctatatatttattgcctgaccacaacagccttaggatcttattgtctgaccacattttttcactatgaaagacgtggcgtactgtcatagtaagagttcaataaaatttcttgtttgatgagct

SEQ ID NO: 27899 - DNA, 515 bp, Zea mays
  Clone ID: MRT4577_125459C.1
ggccgcttttttttttttttttttcttttttttttttttttttttttttttttttttttttttttttttttttttttttttttttttaaaaaaggaacttttttatttttgggaagccacaaacatgaaataaaaaactttattactgcactaaagcttataagaaaaaaaaaagggggcccccccaaggaggggttgttggaagaacactgttgggtttgtaaaaaaagggtggcagaatgggaccaattgtggcggttgaaagagggcgcccggggttgggccaacagggtggtagaacggaaaccactggggtgggtgaaagaaggtagcaggggttacaccaaataaccgggtgaagggaaagaggttatgtggttgaaaaaaagaaagagaggtcaatgcgcctaagggggttaagggaaaaaaatgtgggggggtggcaaaaagtaagcggatgaaaggaacttgatgttgttgcaaagaagaagctgaggttaatgaacctaggtggt

SEQ ID NO: 27900 - DNA, 457 bp, Zea mays
  Clone ID: MRT4577_12545C.1
tggacggttttgaagccccaggagccgcacgcgtccggcggacagcctgaggggggcggcgccccctgtgcgaggtcgtcaagtcgcgcccctgccaggacgctcacatcctgtggcacatcctcgtctactcgtaccactcgcggccgctcttcgggcgggtattccatgatgactggctggggctgccgcccccgcccccgccgttgcgcctgccatggggtggtgcgcgtcccaccgccccgggggaactggggttgctggctgcgtaccgcggaggcctgccggcgccggcgggcgcgctcggtcaccctctttcgccgcgatccgcgcggtccttattgggtcctggggcccggcgggcgtcaagcgcgatgtgctcctccgttcgtcctgcgctgccgcgtttgccgccctccccaaggatcggcgcgccgcgcgcgcccctgcccctggc

SEQ ID NO: 27901 - DNA, 281 bp, Zea mays
  unsure (1)..(281): unsure at all n locations
  Clone ID: MRT4577_125460C.1
gggaagcatcaccgcgagacgcgagtcgtcctcctcgctgtcttcgctcgncganagagaaggagannnnggactcagnnctgggagggagggganccttataaaacgtgtctgagcccagngaggagaggccatgaaggttctaggagtgaagggattaggatcgggaactgctgctgcctcaggcgcancaaggcaatgaggaggatgtggtggagaacaattttttttttatgagcacngagataagnggcgccctcacngaaggcgggcggacctgc

SEQ ID NO: 27902 - DNA, 462 bp, Zea mays
  Clone ID: MRT4577_125461C.1
gggacatgatcagcgccgacgcgataaagcaggagctgttgaagaccgctggctatggcggaggctgcatgtagagggcatggcgcggctgtagcctggaggaaggagaagaagaggaggagcaggaggaggaggaggcggcggcaataaattcagctctattagacgacagcgctagtagcaaggagcagcagcagtatcggttcaggtccagtagctgaaaaggcaggcagggcatgaggccagtgaagatatggcatgggggaactttttgcaatccaatctccccatcagaacccacttcgagttagcagtgtgtgtccgcgcctgaatctttctcctatatactgctgtatttaattagcaagagcaaagctctcactgcctttctaatgattgatcagaagtgcctttggcgaccccttgtctttctggacatctatatataatgttcttcattca

SEQ ID NO: 27903 - DNA, 360 bp, Zea mays
  Clone ID: MRT4577_125462C.1
ggggcccccaaaaaaaaactttgccccccttttttaaatataaaaaagtttttttttggccccggatttataaaccccgccaccatttttaatcctgaaacttaaaaggaaggggggggggtttttccataaaaccctggaaaacttgggggggggtttttggtttttaaaaaaaacctttattttcttgaaaacctttgtaaccccggggaactcctgaaaacccaaaaaacccgggaaaattcctgggtattttggcacaaaaacctttttttctttttggggaaaaaaattggggaaagccgttttcccatccataaacggggttaaaacccccttaataaacattgggggggggaa

SEQ ID NO: 27904 - DNA, 284 bp, Zea mays
  Clone ID: MRT4577_125463C.1
ggagctggcgttgatggtcatcgaggccatgaggctggggcccataaccatatatgcgctgaataagctagcatgggtctgatgaggtatcaacacttccactatctattgagaagaaaatctagagatactaaatagggataagcagatgcacaagcgaataataagtcagccgtcataagctgctgggcgctaaaaactcagcttcatagactgggataatctgcacagcagcatccaatatcaaatacaaataagaggccctcgcaagcatagaggatcca

SEQ ID NO: 27905 - DNA, 207 bp, Zea mays
  Clone ID: MRT4577_125464C.1
aatcttacaaaccaccaatagtacaaattaaagaaactagcgagatgaaagattggcttatgtgattcaatttatgcgcctgccgctgttgatactgcatcactagtcttgagtcatttgtgggtacaaaactacaaatccttgtaagaggtcacatccagtgatccatcattttcttagctgcagtgaaacgtggtgcttttctct

SEQ ID NO: 27906 - DNA, 490 bp, Zea mays
  Clone ID: MRT4577_125465C.1
ttatttttagatcgcaagcaggcgtggtttttttccccgttcccttcctgcccttttctttagtcctcagatccgccgattcccggtccttgcgcttacgtataatgatctttgcgcctctggggtggcggctgccggcaccaaaggctgccgccggggggtcgttcctgctcggcgcgtcctccgtgaagtccaatcctaatccaaagcccaagccaagcaggatccgttgtgccgccgccacgctgaacgaggtcctgggcctgcgcgccggcgcaacgggccgggagatcaaggccgcgtaccggcgcctggtgcgggagcggtacccggacgtggcgcccgcgcccggggccgccgccagatttcgcccgcctgcacaacgcctacgcaacgctgtccgacccggacagccgggcgcgctactacggcggcggccccgcccccgcggcgacggtggcaaggcgcccctgaagcggcgccgtctacg

SEQ ID NO: 27907 - DNA, 221 bp, Zea mays
  Clone ID: MRT4577_125466C.1
cgcctgccttccgatctcttccactgcacctccgagagatctccgtagcctccgtctcgtcgagcattgatcatgtgggcctactgcgagaagcacaaggaacagctcatgaacaaagctgcctccattggtacccctgggcaggggattctccctgctgatgagtccactgcaccattggcagtcgcctttccaggatcaatgcccagaacggtggggag

SEQ ID NO: 27908 - DNA, 732 bp, Zea mays
  Clone ID: MRT4577_125467C.1
ccatccatttggaagcgcattttccccagttctgtcgatttgcccccctttatttttggattggttcctctcagtctttccaagatcagcgaagagagccccgcgtgttgatgaaatatttggatctcgttactattcgcgtcggccatggctacagtttggagcggctgcagcacgagctgcggctccttcggccaagaactgcccccgcgcggcaaacggggcggtggtgagggcacaagattcctttcgcgaagcagaggccggatcagaggtgacgcccgccagacacaagctctaagcgccgccatggttacggtcggagcttgcgtttgtagagcggctccatgcttgcttgattcggtggtcgacgggacggaggacgtcagcgttgggtttgggggcatcgacggtgaaccgctcgccgatgggtatgatggtggcaagaggcgcggtccgcgtcggcgtccgacgaggccgaccgtttttcagaaggaggtgggcgcaagaactgctccaccggcgatggcgtcggagccggacagcacatctgagcatgtggtgtcgaggctgcacttcctggaggagagggacgaggagacgctgtcaagaaggttgataaagctcagccaaaacaacaaggtcagtagtgccactgagctgtttgaatcaatgcgcgcatctgggctgcaaccgagcgcacatgcctgcaactccctggtggcttgctat

SEQ ID NO: 27909 - DNA, 1281 bp, Zea mays
  Clone ID: MRT4577_125468C.1
ctacgaccagatcaaagtcctgaggatttgcaacgttggaagccggctcccggacgcgcaactgcgcggacttttcctgcaagcttcttctgcaaccgaagcaactcttcaatccagaagtggctgctccagggcggcatggcgccaaaagtctccagcccgttcctcctccgcctaccctgggtcgtcgcgcacgttggatccatcaaatcttccaatgcacgctgcgccggcccgggtcgtcacgcaagagagctcccttcttgctagcgagtagcgactagcgagaggtcgccggcgcggcaaaaatccgaaaggcgagccgagatggcggggtcgcagtcgcaggcgatgctggagaagatggagctgcggcagagctaccgcaacgtctggcacaccgacctcaccaacgccgtcgccgcggacctcccgtggtgctgcctgtctctgtggtgcggcccgtgcgtgtcctacatgctgcgcagacgcgcgctctacaatgacatgtcaaggtacgtgtgctgcgccgggtacatgccgtgcagcggcaagtgcggcgagagccagtgcccggaagtatgccttgcaaccgaggtgttctgctgcttcggcaactcggtagcttcaacccggttcctgctgcaggacgagttcaacatccagacaacgcagtgcgacaactgcatcatcgccttcatgttcttcctgcagcagctggcctgcatctgctccctggtcgcctgcatcgtcggcaacagcgagctctcggaggccgcgcacgtcatctcctgcatgtcgaatctggtctactggacggtttgctcgtgcatgcagacgcagcacaaggtggagatggacaagagggacggcacgttgaacaccatgtctgcgcctccgatgcagcagatgtcgcgttggtaggtgcgagtgagattatgtgccggcctcgatacggaggagggtagctgctggagctggaggctatcagcaatctcctactctggttaggacggtccatttttcagatttgggtgagataccatggctagtgtgtaaaccatgtcccgtttgtttgggcaaattttcgtgtttaatgagttgtgcatttttcacaacttctgttatacctcttacggctagatgccgaaattagatatcctaataatttattttaattgactacaaaagtatgtgcaaaaaaattttatttagaaatgagacgagagcaacgagtgtagaggctcaacttatcctccgggtgctttgtgcctattgagt

SEQ ID NO: 27910 - DNA, 612 bp, Zea mays
  Clone ID: MRT4577_125469C.1
ggccgcttttttttttttttttttactttaattgttcaatcaggtttttgtttacactgacacagccagataaatctcaatcaatatatatgattatttctaggaaacacattgtcggactgagggcaccattgacgcgtacattttatttgtaatctaaaagatggcacctccaacacatgggttgctgcaaggcagggttcatcaaagagaactgtgtgtatggcacaaattgttgatgctgttgcatgaaggtaccgaccaatgggttagccactgccaatggattaagtaactgttgccgctgttgtgggtacccaacccagtttgtcacatgccacctggtttaatggaagcacctgttgtaagtaggcacaacagtttgccacagctagctgagtcagagctggtacaatttgttgcaccaactgttgttgctggtacctaagggcattgcccaactggagcgggctagatgaactgacttctacgtagacggcagtgttcaccatggctagttgactgagcatctggataaactgttgcagctgttggtgttgctggcatgcacctacgttcgccagatcaagtgtgttgtatgcaagcagctgc

SEQ ID NO: 27911 - DNA, 2043 bp, Zea mays
  Clone ID: MRT4577_12546C.1
gtgaatacaacgacaataacatgtattcggccacaacttattgggagaaattcgttgatcaagagaccaagaaagtggtgaacgaggtgaaactgacagccttgttgtcatcgtctcagcacagacagtcaatagtagctcccgacaaggtctcatgggtggagaaaccctggattcgtctgctctccgtggacgcacaccccaccgaaccatggatcataactggtcacgaatgtggacaccttgccattaggaaccatgacacacagatgctactgtgttcgtttaaagtttcacgtggcggagtcttttgtgttaaatttatagcgcagaagcaatggttcatttgcagctcaggagaaggtttcatacatgtgttcagttatgaaacccaagaaatacaaaatgtgaacaatttcagagcttatgacgacaatagtcgctggctccccatatcactggccgttcatccatcccggccctatgtgttgtcgtggtgtcgctacgatagtgagataataatgaagctttgggactgggacaaaggatgggagtgcgcacgcacattccgaagtggaggcattaatgtagatcatatcgctttcgatccaaaggagaccaaccgctttgttgctaccgattgcttggatggcaaagtgatgatttggagcctcgactctcccgaacctgaatatcatctgcctaagacggattttaagggtatcatgttcctggaattcttcacacgttatggtcggcagtgtttgattattgctcatgaagatcataaagcacacgtatgggactttcggttgcgcaaatttgtttctgagaagcgaaaattattatctcgtgaagcttctgtcttcttacgtcctaatgtatcgttactacttacaccttcatctaaaggcacttgccgtttctgggacgctaagaaattcagtttttatggagtcattgacaattctgctggaggagatgtgctgggtatcgcttgtttgatggggtctaaaacaaggtttgtgattggacaatattatgcattaacaatattgcatcttgataatgcattatatcaaaaggacccaaggcaatctattgagccacaattatgtgctcatacaaggcaaggagacacaagttctgaggagaaatatggggaggagatggtttggcatcatggcccaaacttcgattggcagcatgaaccatttgatgccgcaatcatgcgagctagtggtggcgagaacgcacatgaacagtacacgcttttcgacataatgattgactcaacagaggtgagagctcaaaggatgagttcttcattctgtagcatgagcctttcatctcatcagcccaaggagcaggagttggaggtggctaggctgcgcgaggagctgagacagcgtgacgagcatcataaagtgcaacaagactacatgttctctttcatacagcagcaacacgcgattattcaagaattatcccagcaacatggcttggatgtagtcctcccagagtttcgaccgccactgccaccgatgctgccacaattgagtccttttctatctacaatatctcaagctacgactgatgcaagtgggacggaacctactggaatggcttttgtggagtccttcgcctaccctcctcctgcaacagatagcaaccacaactctaataatccatgtagcgattttggtgcctgagtaacattgcatgtttctttgcatttaaacttgtgctttttccaattatgtatgatggtcaatatgaattgaattgaatctctatagtttgttgaacgaaagacttgaatatgtgagatgtgattctggctttgaaaggatatgtgagctatgacgagcattgatgaatttaaagtattatgtatatgatgtttgtgaattgtgatttataatggttgcgaattgtggttttaaaaaaaaaaaaaaaaaaaaaaaaaaaaaaaaaaaaaaaaaaataaaaaaaaaaaaaaaaaaaaaaaaaaaaaaagtactctgcgttgttaccactgct

SEQ ID NO: 27912 - DNA, 316 bp, Zea mays
  Clone ID: MRT4577_125470C.1
atccaaggtatggtttatctgtggccgaatttcactcatcgcaggtccaagtcagcgttgcgcctgaggctgccaaatggctgaaggctgcctccgagtagacctctgcagaagaatatactactgatagagactcatgggtggctttgcatgctgtaccatactaggtctatagaagcccaaaaatctaggcacagactgtggacagtcaaaagtgctaatacaatttagtctcatgttagctgtacacgacatcatgagctatcaactagatagacaagggtgcatctaacacttgctcttggttgctaatcat

SEQ ID NO: 27913 - DNA, 177 bp, Zea mays
  Clone ID: MRT4577_125471C.1
atacaccattggagactgggccgatttcatattgacagcccctgtattaaatgcatatctaatttgtttaagacattccaaacgtcgctgtcaactttgctctaaaggtagtggattcaggtgcttcgtgtcagcataaggtctggtatcttagtatacctcttaaatgtattcttc

SEQ ID NO: 27914 - DNA, 226 bp, Zea mays
  unsure (1)..(226): unsure at all n locations
  Clone ID: MRT4577_125472C.1
gccggttctacacactcgtcctaaantacccataccactttaatttactncatctatcaaaactcacactacttaagaancttttcaaaattctattgcccatctaaacacttacaaccatcactcaattcattaaaactctcctaatccaatactctctactatcactatcatctttaacatttttcatataacatataccttaattaacatacactcctcacaa

SEQ ID NO: 27915 - DNA, 657 bp, Zea mays
  unsure (1)..(657): unsure at all n locations
  Clone ID: MRT4577_125473C.1
ctctcgcgcagggcaccgccacgcgcgcctcatccggtaccgccatgacgagcgcctccgagctcttcatcgcgcgccgcgccgcccgtggggcccgcctctccgaccccgaccccgacccggacccgcaccccgtcgcgctccgggaccagcatggactcggcggccggcgccagcgccgcgggtgccggccgcgacgccagctcgacgccgccggggacgtgcgccagcacctgcacaccggggccccgccaccgcgtcgccgcggatcgtacaccgcactggactaccatgttgcacaaagagtgaaacgacaaacgagccttgttcattatagtagcagtgatcgagcttggcatcatgtagtcctgacggctttgtgcgattgtagctcttccgccagtgaaaatttcgtagatgacgcaggatcagatcttatcctacatagacaataacaactttggggattctgcatctcggaggaacagactcgataggctgatgttcaggacaaatgagcggcttcctggtgctgtactgcaagcacaagcacgtgtcctggagagactcagaggcatttctcttggttcatctgcctncaggccatccatctcattagatgaattttccgctaacgatgtatttagaatcatcgac

SEQ ID NO: 27916 - DNA, 312 bp, Zea mays
  Clone ID: MRT4577_125474C.1
tttttaaagatccagggttacgtcctcatgggtgcgaggttttagctcttttattggggctcctaaatggggttttctgggccgcctttttttaacttacaggactcgggaaatccttggggttacccagcttaaaaccccttgcggtacatcccttttttgcctggtggagaattactgtttaggcccgtgccgattgccttttcaaaaatttgcgcatacctgtttggcgaatgggacccccctttttggggcattttaaccccccttgtggggggggtttcacccaggttgactggtttttttgccacc

SEQ ID NO: 27917 - DNA, 155 bp, Zea mays
  Clone ID: MRT4577_125475C.1
aaataaaaattgctgtcctttagggacaaggtgaattttaacaaacaggcatacacaccatttgaccgggcagctagaacgatacatgggaacaggcgacgggaagacacaaaaacccgatggagtcgggaggttcctggttgagctgggtacca

SEQ ID NO: 27918 - DNA, 413 bp, Zea mays
  Clone ID: MRT4577_125476C.1
gggtcgacccacgcatccgagactacgccacggcatcagacgaccagcgaagaagctgacggaggggcgactctaagcccaattgaatcatgatggcgtcgattaatcgtcacccgacatcgagcgcggtggaagatctggacatgcagcctgctctcggacagatcattaacatcaagttggtacagactggggagaaggagaagctaatggacctactccgcgaacgactcgctgactgcggctggagggatgagatgaaggcactctgcacggcatatgcatcgcacacagggataaatactgtgacagtagatgacctcattcaggtaattactccgaatggaacaccatccatgcctgagtcactgaaggcagaactcctgcaactcatcgggtccatccttatgtcg

SEQ ID NO: 27919 - DNA, 271 bp, Zea mays
  Clone ID: MRT4577_125477C.1
gagctattacttgcacgttagctttgccgagagtggttttgaccatgttcgggaacatcgcaaagatccccatgattgtggacctgaggggaagtaacaagaatagcacacctcaagggcaatgtggtgctcgtgctgaagagcgtgctctcgcttgcacgcataccagcatctgcacgtccctcctcgatggagacggcgagttattcggccggggctgcacctgtcagagttatcagctccaccggcgtcaagcgtaactgcggtaact

SEQ ID NO: 27920 - DNA, 672 bp, Zea mays
  unsure (1)..(672): unsure at all n locations
  Clone ID: MRT4577_125478C.1
cagccggccgccgccctcttcttctgcgccggccgctgctctgctctgctctgctctcctctcctcagcgacaatcagccaccgctctcctctctcctctcctcagccaggcagccagccgctgctctctggcgcccacagcagcccagccagcagccagccagcagaccatattggtgagtactgattttgtgcaaccatattgcccaacagtgaatcaatcattcaagctctatttgctcaaccaagttgatgaagctattggtgcatctgcacatctcagacccacgcgtccgcctaggagagctgctggtgggtgtgtgagaaggaatgaagaccttgaggaagaggagactaatttagcaaatgaagatgacgaggatgaggaatatattcttgatgatcttgatgtggaagatgaaattgaaggaagcaatagtggaaagatggtgatgatcaaggcgtgtggatgctcatggtcttcatattgctgagttcgatgatggttgatcatgcataaaagttgtaacctatgtggttgaacttgtgctgttgaacttgatctgtttctntttatgctatttggtttgtgaactcaacttatgtatgaacttattctatatttgaatttctatgtcaagtctgaaaagacgtttcaacattcggttaaac

SEQ ID NO: 27921 - DNA, 204 bp, Zea mays
  Clone ID: MRT4577_125479C.1
acccacgcgtacgcatggcagcactttttcattttgacaatcacatggaagctaaataggaagagggaggacattaaaggggtcattggacatgcactacaaaactgcgcaaggggaagttactggccaacaatgcacattatagatgcattgcgcacacataaagagcccaaaagcggtgaacatgctcgactaggatgctgg

SEQ ID NO: 27922 - DNA, 219 bp, Zea mays
  Clone ID: MRT4577_12547C.1
cccacgcgtccgcccacgcgtccggaagcgtgctgttttactttttttaatgtaaagtcattgactaccatgcattgtaattactttttcatgatgccttttttagactactctagtacaatcattgagctatcatgcagttttattgcttttttctggcattgacatggttaacgctatttttattaagcggcctgtctcttttctgtagagtttaga

SEQ ID NO: 27923 - DNA, 332 bp, Zea mays
  unsure (1)..(332): unsure at all n locations
  Clone ID: MRT4577_125480C.1
cgcctgggcccgtctacccaaacactggtgtgaccaccggcganccggcgcgagagcgcagggggacccagacagcaccgcgggtgctgccggctgacccagatgagggcgcggccggacaacaggcgcaagcatggccctggggggccaccgttccggcggggaggagaccaggacgaaagacgaaccgaccgcccgcctccgctcgcggggggaacaactgaaccgggacgccagccagacagagaccaaagaagaaccggcgccccgtgaggcaaagctgaaagaggagcgagaagacacgaggcctaagacgggcaccggccagcgaa

SEQ ID NO: 27924 - DNA, 418 bp, Zea mays
  Clone ID: MRT4577_125481C.1
tacttcgtgcgacggacttctcagctcactgctgcatcctctaccacgagcgccatgatgctctcaacgactcgtttcctccccaactggcccttgttcatcagaacaccgctcaagtgttatcgacgctgtcagaggccgagctggcacccgatgccaccctagggcatcggcctggtgccgacatcccggggtgatgcgcagacactccacccatagaacctacaatccatctttcacatcgacatgcgctccttctccatcttgcctcccacctatctacagtaccatttcccagaacttctcaatgatacatgagctagatgtgttcgactactcttgtgtgggacctcgagatacatcgtcgatagatgacagttatgttagcatcttgctcgtcacccatcaggtatatctg

SEQ ID NO: 27925 - DNA, 290 bp, Zea mays
  Clone ID: MRT4577_125482C.1
gttccacttggcagtgataccgatgatgaggagcttgattgagaactggtcaaaaagaaggttgtaatcagcattcttttcagttgattcacgatagtgacctctgatgcagcaccttacacattacagcctacgtaggacatgccagtccaacgtaagctggaatgggtaaggggcagcgtcggaggtcacattcgggatacaactgaaccgatgcatgccacaaccatcctttcagcacctgttcgcaatcgcgctccggatcatcgccatcactgccacgtgcgaac

SEQ ID NO: 27926 - DNA, 820 bp, Zea mays
  Clone ID: MRT4577_125483C.1
cattgggtacctcgaggccggccggggtccctccctcgtcacatctgccgtccgtcaccatggggtgttcgtgtcctccgctcgccgacgccgcgtgcctggccctgcttcttctggccttgtcgttggcgtgtcgccaccaccacgggtgcgcggcggccacgctgtcgacggcgtcgcggtgggtggtggacgagagcgggagccgggtgaagctggcgtgcgtgaactggccgtcgcacctggagccggtgctggcggaggggctgggcaagcggcccgtcggcgccatcgccgcggacgtggccgccatggggttcaactgcgtcaggttcacgtggcccacgttcctggtcaccgacgcctcctactccgacctcaccgtcgcgcagtccttccagcggctcaacctcaccgagtcgctcgccggcatcagggtcaacaaccccggggtcgtcgacctcaagctcatcgacgccttcaaggccgtggtgagcagcctgggcgagcacaacctgatggtcatcctggacaaccacctgagcaagcccgggtggtgctgcagcaacaccgacggcagcggcttcttcggcgacacctacttcgacccggacgtctgggtcgacggcctcaccaagatggccaccatgttcgccggcgtccccaatgtcgtcggcatgagccttcggaacgagctcaggggccccaggcagaacgtgaacgactggtacaagtacatgcagcgcggcgcggaggcggtgcacgcggcgaacccgcgcgtgctggtcatcctctcgggcctcagcttcgacaacgacct

SEQ ID NO: 27927 - DNA, 466 bp, Zea mays
  Clone ID: MRT4577_125484C.1
ctatatttcatgaattttattttcatatttctattagagtacatgttccttgtatcataccatcatgttgcatgagaaatcttaagatttttcagatccacttttatctcagatttctggtgactgcattctttgattgcaaaaaaatatctacagttttggttcaagaagaacaaaacaaagtaccaaatctgcatgctccaagagtgttagatagcagcaaagtctctaacaaaaatgaacagcggacaatgatccgactgatggctcaacgggacgcgacgaaaaaggctgcacgcaccgtgccagggatggagattgtcacgctgttcgtaccgtcgcacagtgttttcgcccatagacaacctacgcccaagcgttcgagacttcggggtggatcccgagcttccgcttgctacggagcagagagccacgacaggggtggatcccgagcttccgcttgctg

SEQ ID NO: 27928 - DNA, 178 bp, Zea mays
  Clone ID: MRT4577_125485C.1
gtaaatttaaatgcttcatttttaatttggatgtttctgctagatacctgtgatttggtaattagttattttgcatgtttgtcaactgtatatgtatgataatagataaaaaacatgctttttgtaaaaacccctaagatttgtatatgttcatctttaggcttctgaaagggagaga

SEQ ID NO: 27929 - DNA, 627 bp, Zea mays
  unsure (1)..(627): unsure at all n locations
  Clone ID: MRT4577_125486C.1
cccacgcgtccgcccacgcgtccgcccacgcgtccggaaagagtggtacttcttctaccagaaggaccgcaagtacccgacggggctgagggcgaaccgggccaccgaggccggttactggaaggcgacgggcaaggacaaggaggtctacaacgccgcggaaggagtggcggtactggtcggcatgaagaagacgctcgtcttctacaggggcagggctcccaggggtgacaagacaaactgggtcatgcacgagtacaggctcgaagggcagcggcaggctccccgccggcctcgcgtccgcaaccggctcaaccgccgccaacgccgcggcggccttgaaagcttctgcttataaggatgagtgggtggtatngtcgtgtgttccacaagaccactgggatcaagaagaccaccactgctgcaccggcgtaccaggtggccatggccggcgctgagatggatcagaatcagaacaacatccccttccccatgccgatgcaattttccatgctgcccgacttctccttggacccggtgcccccctactacccgtaccccagcccatgagcttctaccaccagatgggcacggggactgcttgcgctggcgngcttcgatgtttct

SEQ ID NO: 27930 - DNA, 108 bp, Zea mays
  Clone ID: MRT4577_125487C.1
aacgatctgcatccccttgtagactccagcacggccctgaactcgttcggcgttaggtgcttcgtcttgtacctgtgcgtgttggtggcggcccgcatcatcagcgtc

SEQ ID NO: 27931 - DNA, 1784 bp, Zea mays
  Clone ID: MRT4577_125488C.1
gggccgacgcacgcgtccacacaacacgctagctctgcatcatccgttctggtgagcgagcgagcgagagacctagctaactgactgactactgtaataccagagatcgaacaacttggtcctgcagctcaagaagagagttttgtgcatttgggggccgggggcaagagagagagagagagccatggcggcggaccagcagccgcagctgcaggaggagatgaacgacgctgccggcggcggcctcaggctgcctccagggttccgcttccacccgagcgacttcgagattgtcagcttctacctcaccaacaaggtgctcaacacgcgcttcacctgcaccgccatcacggaggccgacctaaacaagattgagccatgggacctcccgagcaaggcgaagatgggcgagaaagagtggtacttcttctaccagaaggaccgcaagtacccgacggggctgagggcgaaccgggccaccgaggccggttactggaaggcgacgggcaaggacaaggaggtctacaacgccgcggaaggggtggcggtactggtcggcatgaagaagacgctcgtcttctacaggggcagggctcccaggggtgacaagacaaactgggtcatgcacgagtacaggctcgaaggcagcggcaggctccccgccggcctcgcgtccgcaaccggctcagccgccgccaacgccgcggcggccttgaaagcttctgcttataaggatgagtgggtggtatgtcgtgtgttccacaagaccactgggatcaagaagaccaccactgctgcaccggcgtaccaggtggccatggccggcgctgagatggatcagaatcagaacaacatccccttccccatgccgatgcaattttccatgctgcccgacttctccttggacccggtgcccccctactacccgtaccccaacgctggcgcggggatgccgatgcttcctatggcagcaggtataggtggtggcgccggtgggctccacctcaacggcgccgccctgttcggcaatccgatggccgcgccccagcccatgagcttctaccaccagatgggcacggggactgcttgcgctggcggcttcgatgtttctgcgccggagagtaggccgtcctcgatggtgtcgcagaaggacgaccaggctaatggcgctgagatctcgtcgatgatgtccgtggccggcccagggcctgcgaccaccaccaccatagagatggatggcgtgtggaagtactgaaaacgtggagggtggagggcaaagacatgaattcgcataaattaaatatgcatgtaatatctatatctgcattgcattttgtgaaatatgatgcatgcatggtttgtatattccgtaataaccagtagttggtaagctatgtgtgtgtatggatgtactagctagtacatgcaccgtatcattgcatgtgtggtatatgtctcgtttggtgttagtaatctgcttggttgtgctgatgactgatggttgtaagaagcagattcgagtttggtacaatattatcgtgaacctatatattatatatatgttaattatagtatgttgtttaattatatgaacttgattgccacctggatttacatctgcttggtcgtgctgatgttgtgttgtaatttgtaaaaagcagattgaagttcggtacagaaaaaaaaaaaaaaaaaaaaaaaaaaaaaaaaatgggaataaataatataaaagaacccaagtttacttccccgtgcttgcgaacgaaatagtttttttttagggc

SEQ ID NO: 27932 - DNA, 479 bp, Zea mays
  Clone ID: MRT4577_125489C.1
gctcagcatgtaatacaactgaaggaaggacgatgtgagactcgtatgacatgcttatatttctggattaaatctatcatattataggcttatgacatgcttaagtttctggagatggcgagcgggagcggcaaggcaaaagcatagtcagtagggcggcggcgatgggcgggcggctctagagggtcctacggaccaagccggcctgtgccactggaactacgtgttatggcaggcggtacatcaactcgcctggacgccagttgaaagcgcgagcagttgaaaaaccctggggagcccgcactcaccggctgcttatgctatctccgtctgcgccgctggggctatgaggagagacgacccaaccgaggaggatgagctccggacggtcatgtacattggcaactgggaccccccctgctagctacgatctatagcaggcggaagcgaggtgtccgggcaacaatatgagatgcatg

SEQ ID NO: 27933 - DNA, 430 bp, Zea mays
  Clone ID: MRT4577_12548C.1
agaaaagttacccagcctgagaaatggaaaggacagatagagaaggttgttttctgcaacagttcgaatttagaggaagcatgccatggttgacaacctctagtgtttctatacacttgatttctgtttccattacaggatttgccacgaacatttccaggacaccctgcattagatgaggatgggaggaatgctttgaggcggttgttaaccgcatatgcaaggcataatccatcagttgggtactgccaggtaaattgatgccaattgaaggaattttgttttttttatctagcctcttgttggcttaattgtattgaatgagatagattgtaatcctaattggtgcatgcaaactatgaaaggtcatgtctctgatgttcagttgagcatttgagcaaaattgtaatgtatgaccttaaattttgag

SEQ ID NO: 27934 - DNA, 278 bp, Zea mays
  Clone ID: MRT4577_125490C.1
cagtggagagagcgagctgagtggttgtgtggtcgcgtctcggataccggtagcgcttgcagcatggctgaccaactgactgaagagcagattgcagaattcaaagatgctttttcactatttgacaaagatggtgatggaactataacaacaaaggaattgggaactgtaatgagatctcttgggcagaatcccacagaagccgcgttacaggacatgattaatgaagtagatgctgatggtaatggcacaattgacttccctgaatttctgacaat

SEQ ID NO: 27935 - DNA, 351 bp, Zea mays
  Clone ID: MRT4577_125491C.1
gggggggcaaaccgatacaaaaaaacggggcgggacaatggcccgacccccatacaaattaggggggggcggggccggtgctttcatcccgggggagtaaggcccaccctctgggactgggactttgttccaccgccgtttattctgggcctgggggaaagaatgtaacccttaaaactggaactggatttccttcgggtacccaagggcgcccaggggcccggccctgggttttttcatgggggggggcccacattgaaatacctgaatttcggggggaggccctgggcaatgagtttggataattttctttgacacgaacccgaccccaccggtccaaacttaaggggg

SEQ ID NO: 27936 - DNA, 463 bp, Zea mays
  Clone ID: MRT4577_125492C.1
cacctccatgtcccctacgcacctcgagctcccgatcatggtttgcttaccctttccctgttgcgctcttgctcgactcttgctcttacctgtctcctcgagtcctccgctattccttcttcataatccaccttttatcatgcgcaagtctactccttcctgctcgccgccgctactgagctaggctgactctatcacttatgatgccgctcatctgcccgattctccagtcggacacacctgcccacgcctgctgcagtcacatcgaaatcgtgcatcgacgcttggagaggcaactagaaaatcgtcttttctgccactttctcattcactgattacctgaactcactgattctgttgggttcagtcatatcggctcactcataggccttctgacgattatccacatcaatcatcttcatcaccacttaccgaacttgtgagctgaatgatcagataactg

SEQ ID NO: 27937 - DNA, 134 bp, Zea mays
  Clone ID: MRT4577_125493C.1
cagtaatcacaccgaagtctgattgaatttctatcgagcgcggttatcatggggtattcttaaccagctacgctgctaagcccactacgtccctatgggagtgtcaattcacactaatgaatactgcttcacaa

SEQ ID NO: 27938 - DNA, 534 bp, Zea mays
  Clone ID: MRT4577_125494C.1
agatattaacttcccgatacgagatctttaccttgagtaagacacacctcggagtggcagatgaaacactgcaaagataccactcagttttacaatacaagtacacgggcaacttgcctctgaaccaccaaatggagtaaaacaggtattgcctggggcgatcatcgagccaagaaaaatactaatctaaaaacagatggagcagaacgggaacaggggaccctgattattggaaacaaatggcttcgatgacaccctccttgtaattaaaggaataggccatggcggagacgacagtcctcacttggcactggcgagctgggtgcggatgagcttggcagcagagaccatgttggttagggcgggcttgacctccgcgtacttacgggtcttgagaccacagtcagggttcacccagaggatgttggtgtcaagcaccgcaagcatcttgttgacgcggtcggcaatctcctcggtggacgggatcctgggggagtggatgtcgtagacaccaggccaatgccagcaccgtac

SEQ ID NO: 27939 - DNA, 188 bp, Zea mays
  Clone ID: MRT4577_125495C.1
gctggctccaactcaactatttgaattttggccgactccaactcagcatatagaattgcttttgccgatccatagccaaaattacggcttagttgatagaacaaaaaaagggagctgctccattctccatcgggaggaccaacttacccgaaatttaacagtaaagaaactaattaacatacccggga

SEQ ID NO: 27940 - DNA, 317 bp, Zea mays
  Clone ID: MRT4577_125496C.1
agttcaaatcttagtggccttgtatgctttacatttgttgtgccataaaaaaaactagatttattggtggcaccgcggaaaccaaaggcgttattcgggaccaccagtcaaacaccgccattatagaaatcaagagacggcacctctgacggtgggctgccacgccaacaagggttgggttatcacgaggtaaccgacaagcgggcacatttcctgacagatagggaaggtattctcccaaggagtcttccccacctgggctccagttggctgctgcttctgtagactgttgatgactccgtctgccaccgtctgtt

SEQ ID NO: 27941 - DNA, 415 bp, Zea mays
  Clone ID: MRT4577_125497C.1
gctatctaatgctactaatctacacaccctgaacacgtgtgggcggaggctggggcatgtatcaactcgcgtcgcagcggcgaactcttgaagacatagagaactacgcataagccatggcgtccggccgcccggcgaatgcgagaggcccagcgagagctaagcgacagtgcctacgacgcgccggacatgctattaatgcggagcgccggaataggacacctgagccccggcttacgagtaatcgccggcttatggagccggggcatagacgtctccgtcgggaccgtgctgtccaccgtgtctgccggcgagactgactacttgaacggactcttcgcggactaccccgccgtacgacgcgtggacatgcacctatagccgctggacgcctgcgagatcaccaaagaggacc

SEQ ID NO: 27942 - DNA, 1716 bp, Zea mays
  Clone ID: MRT4577_125498C.1
aatgtctggaaaggctgggaagaccactaaatttgtctcattgttggaggaaatggtgtccgaaggatgtgttcttaatctgattgcttataatactccacgcgtccctcttggtttgaacaagatggttgacaaggcgatttttatgctttctaaaatgattgagagtgactgtcggcccaatcaattcacatatagcattatgctggatgttttatcaacagggggacaactccacaggttgaatgagattctagatatttgtagtggatgtctgaataggccagtttattcttatttgatcaaggcactctgcaaatctggtcatgcaagtgaggctcatagtgtattctgccgtatgtggaattcccatgaaaaaggagaccggtatgcttttgtatcaatgcttgaggcactatgcaatgcagaaaagacaacagaggctattgatctactgcatatgatgcctgaaaaggggattactacagatgttggaatgtataatatgatattttctgctcttgggaagctgaagcaggtgtctttcatgagcagcctctatgatacgatgagagccaatggtgttgttcctgatgttttcacgtacaatattatgatttcaagttttggtagggttggcttagttgataaggcatctgaactttttgaggaaatggaggatggcagttgcaagcctgatgtcgtcacctataattctatgataaattgtcttgggaaaaatggagatctcgatgaagcccacatgcttttcaaagatatgcaagagaaaggatatgatcctgatgtcttcacttacagcatattgattgagtgctttgggaaatccaataaggttgatatggcatgcagcttgtttgatgagatgattgcacaggggtgcattcctaatattgtaacctataacattttactagactgtttagagagacgagggaagacaacagaagctcataaattttatgaaactctgaagcaacagggattgactccagactcgataacttactcaatacttgagagattgggaagtagatctcaacgaacagtaagaatacgtaaaccaagccggaatacaggctgggttataagtccagtgtgataacctaccctggatctttcagttgcatacctccggtgtagtggggctgaggacaaatagtctgtatgcacaacttgcaattgtattgctggtcaataatgtcaacaagtgactactcaattaccatgaaaacaatatagtagtcctgactcatcagaattatatgtatataatagtattgcatggctgctgatatctgatatcttggttctgaacaattcgtggaagatggacatcttgagaacaggtctgtaccccttcagtctactctaaaatctgacgtggtgtcgacctagatagtccactacggcaagagttggtcatgttaggttggaatatgcatataactcatgttgagtttgcactgcaatgggcaaaacaaggaattacccccacagtgaaacaagaccacacttaggggtggtaatgaatcaccattcaaattgaatgtttcttcacaattcatttgataccttaattagttttagttagaaaataaataaaaatagagcatgattaaaatatgatcccatcccttaaattttatagtgtaaaacttatagccattactaaaactgtctcttcaggataatcag

SEQ ID NO: 27943 - DNA, 423 bp, Zea mays
  unsure (1)..(423): unsure at all n locations
  Clone ID: MRT4577_125499C.1
ccggatcccttaatggtgtaccttgccttggcgagacctaaaacagttggaatgcttacgttattgattctatttcgatatccttaatgcattatatgcatatgaactcgcatatttgatattgtattttgaatgactatttgtgctacatttgaaggacatctttaggaccacagtgacggttcaaatacccatagattcagatgaaacaggacatctttacgactgcagtgacgcttcagatatccaaagattcagataaaacaggcgaggttatacggtttctttattactttatttttaaaaaaagaatgtcacctacatcagcttggttagtattccctcaaattgttgttgatccaatttatgaccattannnaaacacacgagcatagtcattacaagattttcactcttcaaagc

SEQ ID NO: 27944 - DNA, 385 bp, Zea mays
  Clone ID: MRT4577_12549C.1
ccacgcgtccgcaacacacccacacacacagagagagagagaaagacatgggagaaaaacagagtggcacagctcagcatcgcctccggaagaccggagcggagtcccattcccatcccatggcgagttcccggaggagctccgggctctcctccggtgccgcagcgctgggcattgcgctgctggtcctggccgccagcgcgggcaacgccggcgcgtcgtactacggggagatgaggcggcagttcctggcgcagcagaacgcggcgcgcgcgtcgctgggcctggcgccgctggcgtgggacgagcgcgtggcggcgtacgcgcgggcgtacgcggagtcgcggcgcggggactgcgcgctggcgcactcggcggggcccta

SEQ ID NO: 27945 - DNA, 418 bp, Zea mays
  Clone ID: MRT4577_1254C.1
ggctaccgtcctcgccggaggacctgccaccttcccctgggtctccggcagcggcggcgacctcccctgggcggagccgttcaacgcgctgtccggccagctcgcggcgctcggcgccggcgaggtgcgcgccgtcgacgaggccgtccggaggctcgcgtcggcgctggactccgggaccgacaacgagggggccgtgcgcgccgcggcgcaggaggttgggaggcgcaccgaggagctcgcgccgcggctggaccgcctgtctgacgccgtcggcggcgtgttccgcgccgcgctgggcctccgcaacgccgagcttggatgcttaatggtgggacccgcggggaagcccgtgtaggaatagtacttcgtactagctggtatactgggatactgcgtgaagttgatttgggatcat

SEQ ID NO: 27946 - DNA, 181 bp, Zea mays
  Clone ID: MRT4577_125500C.1
gaaactagggttttgctcttggaatctctctccccgctgccgccgtcgacggacagtgcaccgacgattcgacctactgcttacttcaatctggccttaataaaacgaggatcccgtacaagatgctgaccctctggctgctaaagaccgaccaggggcacccaatgctcgtggtgctgat

SEQ ID NO: 27947 - DNA, 538 bp, Zea mays
  Clone ID: MRT4577_125501C.1
caggatgcaggggctagactcgtatcggtgagcatgaggggagaggggggcggtggccatgatggacgatgaagagaggttgacccatgccgagatcccgaccaggttccatacagagcctgcgcgcctgactgcgatgccgtctagttaagacctaccaccagctcagggagaacggctgcgaaaactgtctgtctttagagatggacagagagcacgacaacgtccttaactgcaccaccctaaactaaactgtaattatctttctgatagaccccattagtagctgtgcagcccatgcacgtgagaataggcagcaatattcctgttggctatacacttgctgtctctgaacgaacttgcacaagagtatcaaggtatttgtgaagacaacacaccgcatattgtgccgtccaatacagtctaacaataaagacggagccattgaagctgtattgatcctgaagcattatatataattatgtacaacaatcagggcttgtcaaggcaactgctccacatatgctctgtatccgag

SEQ ID NO: 27948 - DNA, 316 bp, Zea mays
  Clone ID: MRT4577_125502C.1
ccacgcgtccgttaaacacaccaagcgactctttttaaccattttctaacaacaattcataccaggagattagtgcccctttcacatcttgcccttttaattattctcctcacatacaccacaatattccacactggtgactttctcctaatgccattattccacaagtgctcccaccacacactcaaatgggctttgaacacctaactatgcaagccatcatgcaacaactagcgctcgaggacagcatcttacaaaacccaattgtccaactgcaacacaacttcttgacccatataacaatacacgccatcac

SEQ ID NO: 27949 - DNA, 410 bp, Zea mays
  Clone ID: MRT4577_125503C.1
gttgacgttgttctcctgaataagcctgagaaattttgaagttggtgatcttgatgctcttgcaatgtctcaaaaatgtgttgaccctgtttgtctcgtctccttccgggattatataatctagcttatggattatataagcacttattaacctgcttatggattattacaatctaggtacctagattacacaatccactttgtgatttatgttgtttgtttacttctcaacttatttaagctagatcctataaatctatagggtaaacaaacagacctgcttgagatgtactgggacttgtccatacccattagcttgtttgaggcttattgagcagaaacaacccgttgtaaaaggccattaaaatcggaaaaaaataccatattttggctctgtggcattgaagtgg

SEQ ID NO: 27950 - DNA, 753 bp, Zea mays
  Clone ID: MRT4577_125504C.1
tatgctaagaagtttttgggtacctgggtcttgcaaaaaaaaaaaaaaaaaaactcctcagccgtcttcgcatcgcctcgcgcccgcaccccaggaaggtaagctcaagaggctgtcctgagaagctcaaatggctcccaaagttgctgttgccaagaagggcgatgccaaggcccaggctgccaaggttgccaaggctgtgaagtccgggtcaatcaagaagaccgcaaagaagatccgcacgtctgtgacatttcaccgccccaagaccctgtccaaggccagggaccccaagtaccccaggatcagcacccctggcaggaacaagttagaccagtaccagatactcaagtacccgcttaccactgagtctgcgatgaagaagattgaagacaacaacacccttgtcttcatcgtcgacctgaaggcagacaaaaaaaagatcaaggctgccgtgaaaaagatgtacgacatccaggccaagaaggttaacaccctgatcaggcctgatggcaagaagaaggcgtacgtgaagctgacaccagactatgatgctcttgacgtggccaacaagatcggcatcatataagtcagagggacggtcctgcagtaggcgcttgtgtcgtggtttcttatgttattggagttttgtagttgttacttagcaaaggggctcagtggctccattgcctaccatatcgctgcacactttcatgaatttgatgcaatcgaagtgacttgtgttgatgccgt

SEQ ID NO: 27951 - DNA, 232 bp, Zea mays
  Clone ID: MRT4577_125505C.1
ccggctcgagccacgcagtccgccgacgcgtcctcccacacgtccgggttcctccctgcgtgtatgcttgttaccgtcatgtcttttctttcactactaggctccatccaacatcgatggcttgcttctttatcagaacatgtttgaataaacgctatttggtaaaaaaaaaaaaaaaaaaatattataaaaaaaaaaatacaacaagaacaaataataaaataaaaacatt

SEQ ID NO: 27952 - DNA, 257 bp, Zea mays
  Clone ID: MRT4577_125506C.1
agcttgtggaggatagagaatctcttcagcaagtgcaggaagagaatcgatccagtgactatgaactgactgcaaaaaagaaggagcaaagtgcatttctcaagaaaatcacattgtctgagaaaagcataaccaagaaaaagcttgaactcgacaagaagcaacctgagcttcttaaattaaaagagcaaatatctcgtctcaaatcaaaaatcaaaagttgcaagaaagagattgacaaaaagaaggatgatcac

SEQ ID NO: 27953 - DNA, 503 bp, Zea mays
  unsure (1)..(503): unsure at all n locations
  Clone ID: MRT4577_125507C.1
caagaaacgaaaatgagattgttcgtttagcctatgctttttttttttttttttgcagatggcactgactatacgctacttctactgttgaccgacagatgggattaatgaagaagcatccttccataataccattcatggtatacatcacaaacgaggagaaacacatggaacggtttgctgtgcgtgcgaagtacatgacactagacccagcgaagaacaggtacatcaagtacattcgaaatattagagctatccaggaatacctatgcaaccgagctgacaagcatcttgtgccgaagatcaacaataccaatgttgaccagagtgtggctgctatacatgcaacagtcttcagctgtcttcgcaggcgagcagccggggagcaactgtattcctnatccactacagcaacagtgtttgtgttgaggtcatacagttgctccccggctgctaacaccttgggatcaactgaaacattttctatgaacccaaagaaggtg

SEQ ID NO: 27954 - DNA, 404 bp, Zea mays
  Clone ID: MRT4577_125508C.1
attcggctcgagggtctcgaacgtgagctgtcgacctaaaagaggcaacgacgatggctgctgctgttgcgatgatggtcttcggaggacggacagctctggtggaagcgggcctgctctgcgctgaggccgacatagccgctgcgcaaaatgagaaaaacgtgcagtcgacgtaccacctgtacaaccaggcccaaaacgcataagtacctggacagacaagggcgtactgctccacttatgacgccacacaagcttctgacaggtgaatgaagcacggctggacagccttgtgacggtccaacaccctgataggccaggccccctgaaacccgtgcataaaggtggacaaacctgctactgactcccacatccaaacgaggagtcgcagaccattgctaaaa

SEQ ID NO: 27955 - DNA, 230 bp, Zea mays
  Clone ID: MRT4577_125509C.1
accacccacgcgtccgcccacgagaccgacacaaccacaattggatacattcccacagactgtggaacatcaggagggttcgccgtagaatacaaggacaaaaagatcaccgaagacgaatacatcagtgcaatcaaggaaataatcagcaaggattgtcagatacaagaggaacttgacattgatgtgctatgtacatggagagccaaagagacatgacatggttgagt

SEQ ID NO: 27956 - DNA, 154 bp, Zea mays
  Clone ID: MRT4577_12550C.1
ccggtcggattccgggtcgacccagctcgggacgctggcgatcggagaccaagtccgggcttggcttgtcacttctcacggagaggcatgcggaacgcatcgaggcatgaacggaaggagctggacggccgcaacatcaccgtcaacgaggccc

SEQ ID NO: 27957 - DNA, 332 bp, Zea mays
  Clone ID: MRT4577_125510C.1
tagatcgtaatactcatccaagcccttatcacccgcccgatctgactacgacaaacagcctaataatatcaaacccaatattcaatgtagtcaccgttcgggctttgacccattataacctggtatatcagaatactttgttttgtatagcgtagtccttgctattgttgttgtcgttgtcgatgttgttgtcgtcctacgtctcgttgccgatgctgccgatgttcatatcaccgtcggtagcggctgtgtccttgtccgcaatgttagtgtcgttagctttgtctttcgcgattacgctaacaaacttggttgttgcaatagcctacgca

SEQ ID NO: 27958 - DNA, 538 bp, Zea mays
  Clone ID: MRT4577_125511C.1
ccggccgggcttcttgaccaaatgcttcactagagatcaataagcctgttagtgttatattcacctagatgttgacaattgacatcggtattttccatgcaatgtattccaaggtgagcacactcatttgtataaatgtccaaacaggccaggttcatggtgcggcttgaggcgtttcacgggtttagacttgcatgaacacaacctggcatggtggacatcgggcccatgctggcccagcttgcttgttgtgccatgcttggaccgaaggtgtggcacggtgggctggtgtaggcacggcctgtttaattttctagagaatttaatttatagttgtgaatatatatgtcaactatatcccaataaacacgtgtaaggctatggccatagcatatggccatacaaaacacagttttgccctatagaatacactattcacagagtagagttggaaatgagagatgtggatgtgtaagttgttggagatagcctaaacttggtatacttgttattatgtgctgcagaagatcttatgaga

SEQ ID NO: 27959 - DNA, 673 bp, Zea mays
  unsure (1)..(673): unsure at all n locations
  Clone ID: MRT4577_125512C.1
accgccttcgtcccacgcggtcacgaccctcacctgaccacctcnggcgctcaacaaaaaaccagctcgagagacagagagcgagaagaaagtcggaggagaccccaagtccccaaggcagtcgcaaaggaagggagggagctttgctggcccgggcatttgggagacccacccgcgcgggagtgaaagagaaagagaaagagaaagaggaagggagagaagaaaaggcggcgcctcatcacggtcgcccgcctgctcggcctcttctcccccctccccttcctgtgtctgcgtcgcgttgcggttgtgcgcacacctggtcgttctcggtttcctctcctgcggttctgccgtcctcacggcttcctttttcttccgggccactctccgccctcttccttgccgcgctctcccttcctgcgcattcctcctctgttccccccgtcggtccgttcctgagcgcagccgcttcgcgtccccttgattccacccactgcctaatatgcgtccgtcgcggcggcggcggttggtgctgtgagcgactagcggcgcgacaaggggaagggattccgtcgtgctgtgcgaaggcctcaggagccgccggcattgtgcatggagggtgaggaggacggtcccggctccgcggggcagcgcccgccctcgcagcagcagc

SEQ ID NO: 27960 - DNA, 1909 bp, Zea mays
  Clone ID: MRT4577_125513C.1
gtctaaaccctaatcaatcagtcggtcgccgccgtccgcccgtccgctcagccggccgagcgctcgagcctcctccgtcccgctcccgcccgtccgccgagcgccgacggcccgagcagccagcaccgcccagcaggcgagccgctccgcctccgcgcctctatccgccgtccgctcgtcccgaggccgcgagccgctccgcggctacgaccctccgcccgccgtctgcccgtccagcgagcgcccgacggcccgagcagcggagcaggcgagcagctccgcgcctccggccttcgcccgccgtccgctcgggctcggaccgagccgctccgcccaccgtccgccgagcgcctgacggcccgagcaggcgagcagctccgcgcctccgcccgccgtccgctcggcccgagcagctcactcgctcagccgcagagccgctgtgccttccacttccaggcggacaccaccgtgtcgcccccgcgtcctaaacctctcacctcgccggggtccggtagccgcgaacgatgttccgccgcgcgctcctctcctccgtctccccactccacggaacggtacgaatcccgagccccagctattctcctatccaagcccttctcgctcaatggagcaggtacgcctccgtggtctcatcctcggccccgccgccgccgccgccccctccatctccgcctcaaggtccatcgaggtcgagcggtggaggtcccacttcctcgtcgctgaaccctgcagaggtcgccaagttcgcctccatcgccgagacctggtgggattctagtggcccattcaaacctttgcatgtgatgaatccaacccgactgtcttttatccgctccactctctgtagacatttcaggagggatccaaattcatctaagccacttgaaggtctcaaagttattgatgttggatgtggaggtggcattctgtcagagcctcttgctcgaatgggtgctacggttactgcaattgatgctgttgacaagaatataaagattgcaagtattcatgcggcatctgatccaacaactgcttctattgagtattgttgtgcaacagctgagggactggtaaaagagaaaaggctgtttgatgctgtaatttctcttgaggtgattgagcatgtcgccaatcctttggagttctgtgaatccctctcggctttgacaattcctaatggtgccactgtgatttccacaatcaaccgatcaatgcgagcatatgccactgcaatagttgctgctgaatatatcctcagatggcttcctagaggcacacatgagtggtccaaactggttaccccggaggagcttgtcctaatgctgcaaaaggcttccgtctccgtcgaagagatggcagggttcgtttacaatccgttgagcggagaatggtccctgtcagatgatatcagtgtgaactacattgcttttggcgtcaagaagggtgaagcatcatcgacaaatggcagagatgcaagtttatcatagctgaagaaaaacacgtgaccttgaattgtcgggcatcattttcagaggaccaattcatgtcactgaaatcttactgctaaggatgcaaccaagtagcagaagagaattctcttgccctttgttagtcttggaaactggagcttgtggagtgatgcttcctggaagcgccattgagaagtcaagttgacaacaagtgactgctaacaagtagagctatctgccttttttgggtaatgtttcgggcagtttttctcaattttgtggcaatcactgatgatctaaataaaaataatactactacactgctgtacgtgaaaactgaacagatttgctgtctggaaatgtaactatttttaacagttaaggcttgttcgtttttgcgttaaaaaaaaaaaaaaaaaaaa

SEQ ID NO: 27961 - DNA, 413 bp, Zea mays
  Clone ID: MRT4577_125514C.1
tgcgttgccggaacccaacctacgcacggctgcgcaatgcatgtgtagcctgctatacagccacacggacaattggacgagctacactctgcgtaggcggagatggggtgctcgttatccaggctgaacgcactgtacgacacctgcgagggccgaggtggtgacgtcagagaataacgactaccactttcgagggctccgcaggctcagccatgccgaccctgaagacctcgtcgcatacctcgcaaaagaatgaagaccgccgcaacacctatccgagggaccgttgggtcagaccccggcgcctcatggatcgtctagaaaaaaggtatttacccatcacacatctcacctgacggaacatatgctcacaagaaaggacttgttcatactgaccatcacttagagcttgc

SEQ ID NO: 27962 - DNA, 130 bp, Zea mays
  unsure (1)..(130): unsure at all n locations
  Clone ID: MRT4577_125515C.1
tcttcnatacttccacacccactgacccacagcccaggccatcatacaacgagaaggaggggtttaccgtagctgctatcaaaacaatggagaaccctgctccgagcatcgtattgtccatcttctcacc

SEQ ID NO: 27963 - DNA, 250 bp, Zea mays
  Clone ID: MRT4577_125516C.1
tcggttgaactaaccatctcagggcgcaggggacaaaattcttgcttcaacaaggctgggcctaattttcgttccttcttgtaacaggacaatggaagtgacagcgaggcccaattgcccccttccatcttaaaattaagggccggcggtaccaatttaactttatcaatggctggggcggaaccggtagcctttgctccggcaataaaaagggggactgcaaactttaaactacactatcttttgaagc

SEQ ID NO: 27964 - DNA, 365 bp, Zea mays
  Clone ID: MRT4577_125517C.1
gtcggatagcttcagccacgacgatgacgactctaggccgagagacaaggttcagagacgggtcgcgcagaacagagaggcagctcggaagagccggctacggaagaaggcgtacatacggaacctcgagacgagccgcgtgaagctggcgcagctggagcaggagctcataatggccaggcgccagcaggtacgcacggcgcgtacggcgtgggaggaggagtcgcaccgccggcggcgcccgtggacccgcgcgtcgctgcgttcgagctggagtacgcgcactgggtggaggagcagagcaggcaggcgacggagctgcgggcggcgctgcagtcgcacgcgccggacgtccagctgcgggt

SEQ ID NO: 27965 - DNA, 1139 bp, Zea mays
  Clone ID: MRT4577_125518C.1
gagccggcgatccagaggaagaagcgctccgcgggggaccgccacacgccggacagcacgaagaaggcgtcggaccgggctgccctcgccttggcctggaacagcgcgccgtagtgcgccagcgcggcgtcgacgaggacccgcagctggacgtccggcgcgtgcgactgcagcgccgcccgcagctccgtcgcctgcctgctctgctcctccacccagtgcgcgtactccagctcgaacgcagcgacgcgcgggtccacgggcgccgccggcggtgcgactcctcctcccacgccgtacgcgccgtgctgcagccgccttgatcagcagtggcagctgcggctagcggtgctgcctggattgttccatcggcgtgtcgatcgatgccctctcccagagttattaccgtacctgctggcgcctggccattatgagctcctgctccagctgcgccagcttcacgcggctcgtctcgaggttccgtatgtacgcctggttccgtaacaagctcttccgagctacctctctgttctgcgcgagccgtctctgaaccttgtctctcggcctagcgtcgtcatcgtcgtggctgaagctatccgacgacggcggcgcttcttgcatccgcggcacgtcgtcctgctgcgcctgcaacagtcgtttgccgagcttgatctcctctgcttccgtctcgacgacgtcgagcggcgccggcgtggccacggtgaccgaggggaaacgcggccaggggcaggggcatggccacggcgtcggcgtcgagccggaacggttccccccacacgccggtgggcaccaggtggcgctgccgctcgtagatccccatggccccgacgggacccgatgtcacgtagcgggcgggcgcgccgctcgtcggcagcggctgcagacgactgagtttgtggatgttgaaatggtcttgaagatatccagggtaaagctccatctcatgcttcacctgatcaatcttcttctagggatgagcaggtaataaggccaggggcagatacaccactcaaaaggaagaatcagaagctcagggcagctaccgatatatgtatgtgtgctccggatgggagttcgtctccaaatagcacaccacttgcccgtgctctagatcgcga

SEQ ID NO: 27966 - DNA, 763 bp, Zea mays
  Clone ID: MRT4577_125519C.1
attgggtacctcggccgcgaaggccgggactcactaccttttcttcttccaagtctctgccatggagttggatgctacactcctatcgatctcccttgttctcataggcctgctactacacaccactcaagccaccacccaagaaaattgtgaaagatctggcctatgcacgtatattgtacgtgtgagccctcatctgaatatttccatggatatgagccgtatggaccttgaaagctggtatagatcattcctcccaccacgtatggacagatcacctcgatcaacatctccattcatccacacctataaagaagccattctggggtttgctgtagacctcacaaaggacgacgcggagtatgtcaagagcaaagatggggtcctcatggtgtacaaggacatccttcttccgctcttgacaacccacacgccagatttcctaagcctacgaccaaacggaggggcttggagcagcttaggcatgggcgagggaagcatcatcgggctcctagacacggggatcgactccgcacacagctctttcgacgatgagggcatgtccgcgccgccttccaggtggcgtggatcctgcaagtttgctactagtggtggtcactgcaacaagaagctcattggcgcaaggtcattcatcggtggcccaaacaatcctgagggtccactgggatgatgtcggccatggaacacacaccgccagcacagcccgccggcaggttcgtgcagggtgcaagcgtgtttggca

SEQ ID NO: 27967 - DNA, 435 bp, Zea mays
  Clone ID: MRT4577_12551C.1
cagcgtgtggccggcgcccgtacgttgaccgtgtgaagcgcccaaacctgccctagtgccttcgcaacgtttcttgcggctggcgctcggatgcgacccttgctctctaacacatggcgttcccttcgcttgatgccgataaaaccgggacgcgattttggaggaggaggcgctgcgccagctttgggcgcgaccggagccgacggggatccccatcgacaggaggcagggcccgcgacatgcacgagatactgcacgctcatctgactctgagcataccaacgcgtgaacgcctagccgaaatggaacgaaacccaagccttctccgactggtccaaactccgaaaatgggccaacgagctcaaggaggcatccagatagcccgtcggcatcgcgaccagcatgttcttccgacgggggccaacggtgcggaca

SEQ ID NO: 27968 - DNA, 359 bp, Zea mays
  Clone ID: MRT4577_125520C.1
ttgggaccctcgaggccggccgggagatgtctccgctccctccctggacgctccctctctctgccctaaaacattgcgagcgtgccgcggtcagccgctgctactgaccttagagactgacaagcagtgtgcggcggcagcagagctcgaaaccaggggcatgccgagaccaccatcggggaactatcagatctatcatggaatcgccgtgcagctcctcccacaaccactcgaccaagaacggaacgcggagcctcaatacggctaagcatgagagaagctccttaagaacgtgtcgcctcctgggtagcaagaggggctccgcatcgtgtacttcggctacaggaggggattatata

SEQ ID NO: 27969 - DNA, 2119 bp, Zea mays
  Clone ID: MRT4577_125521C.1
cctcgagccggcgggaccactctgatcgcacgcagccacgactccgcacgacacgacacgagctcagccggcggcggcagagcgggaggagggagaacgcttcggtcccggtcccccccaacccaacctcctccccttcccgacaaggcgacgcgaagcgagatgccgctgtacgactgcatgctgctgctgaagacgacggtgaccagggaggtcctagcggaactggtgacgcgggtggcgcgccgcgcatgccagcgcaacggggtcgtcaccgacgtcaagtcattcggcaaggtcagcctcgcctacggcatcaggaagctcgacggccgccacttccagggccatcttatgcaaatgaccatgatggttcccccttcgttcccgcaagaactccactatctgaacaaggaggacaggctgcttcgctggctggtcgtgaagcacagagacacggtatacgggttggagttcttgaacgcggatggcgggagggacgagctgagaagtttcagccatggtcacacgaagggcgactacgatattgaaattgactccgatgacgaagactccgacgactccgacgacgaagagtacgcaatcgaggaggaagaggaagaggaggcggcgaacgatgaggagaagaagtagaactgtttggccaggtttctgcagtctcatctgtattggcagatgcgcgttttcttagaaatcaaatgttcggatcgtcggacacaggcacgacacgagctcagccggcggcggcagagcgggaggagggagaacgcttcggtcccccccaacccaacctcctccccttcccgacaaggcgacgcgaagcgagatgccgctgtacgactgcatgctgctgctgaagacgacggtgaccagggaggtcctagcggaactggtgacgcgggtggcgcgccgcgcatgccagcgcaacggggtcgtcaccgacgtcaagtcattcggcaaggtcagcctcgcctacggcatcaggaagctcgacggccgccacttccagggccatcttatgcaaatgaccatgatggttcccccttcgttcccgcaagaactccactatctgaacaaggaggacaggctgcttcgctggctggtcgtgaagcacagagacacggtatacgggttggagttcttgaacgcggatggcgggagggacgagctgagaagtttcagccatggtcacacgaagggcgactacgatattgaaattgactccgatgacgaagactccgacgactccgacgacgaagagtacgcaatcgaggaggaagaggaagaggaggcggcgaacgatgaggagaagaagtagaactgtttggccaggtttctgcagtctcatctgtattggcagatgcgcgttttcttagaaatcaaatgttctctttgtaacatctgcgactttttataaaggctgtagggtatgggatgagagtcagaacctatcacttgtgtttctgaacttttaaaaccaggaaaacgggagctggaacttaccggttggttgtaacatggatgacatgaatttggaaaatctctccgtgacaaagcgtgctttgatactattttgataaaatctcctcatgacataatctgccatgtgtgtgcgttgatgtcttattgggcaagtctaagcaagaaagagttgcaggaccttattcaggaggggcgctaagctgttcggtttgcgcagccaatgtcaaggtggttactcaagatggaggccatgaagaaaatgatgaggaggatgagccgactcatgaagactaatgaagagttgaaaaggctttgtgggaagagaagctggatgtctgttctgtgatgccccagttctggtggtttgctagtgtctttgggattggatattgctgtcttattgttgttgatgagttggctggttattagtttcgttggttgccaggtttagaactagatcttttgcagctcttaaacttgctagggtagttagcctgctgtgcttctatctttggccgcaacacacctgaattaggtgctgtccatgtggctttttcgagtcataatgcgtctgctgcgcttgttacatggacttatcgtgtaccccgactatcga

SEQ ID NO: 27970 - DNA, 390 bp, Zea mays
  Clone ID: MRT4577_125522C.1
ggggagcccaaacctaagagttataattttattttttttttttgatttacagaggcagtacaagcaatggtaaatagcaacattaaaacgggatttttttttttaaagtaatttatttgcgtgcaggttgcttttaacggccggcgcgcggaaggttggacaaaaggagggggggcctttcgaaagccagttttttatgcaacgcgcgtgaaaaccgtggccgaaggccggttttacccccacggggtccccttttgaaaacttggggaggaaaatggcgcattccgccggggggcccgccagggttttcccggggggggattacaccaaaagggggggggggggggcttggagttccaccttaaaagagggttttttagccgggttgtc

SEQ ID NO: 27971 - DNA, 331 bp, Zea mays
  Clone ID: MRT4577_125523C.1
attcggctcgagcatggtcactacacataggttttttttttcgaccggggctctgggactataggccgttgcttgacagagagccttgttcttgttcggcatgctgggggctctacagcatacctgaggtgcaaagggcagagctctcataacacacacagccagctgttgtcaccaatcagattcatatcctggagtgccctgcttctgcaaatggcactctgatttgtgcggtcacttgtcatccatttctacgctaagaatatttgcagacatgtgccatgacgttgccatgaccatcgtaatcaaagaggatctgcttctgtttcac

SEQ ID NO: 27972 - DNA, 358 bp, Zea mays
  Clone ID: MRT4577_125524C.1
agggaaaccaagcaacaacttggcttaactttttttggtacataggccccaaattccgggtttttgaaaccggtcaccccttcattgggaaaacccgggggggttacttcaacagggggggggaccacaagaacacaacggtgggggggggtttttaacgggaaaacaaaccggccaagtgggaaaaacagatgctttatttacaccggctggggggggggataaaggttaaagggggtggccagttttgttccaaaacctaaaaaaatttggggggggacccacccttggtttcggggaacattttaactggttaaaagttaacaagaaaatttgggtttggggcacacagcggggg

SEQ ID NO: 27973 - DNA, 462 bp, Zea mays
  unsure (1)..(462): unsure at all n locations
  Clone ID: MRT4577_125525C.1
gatacaataggcaatcacagcaggcgtagtacctttatcacaccctgttactacaacaactcgaagacctattacatcagtgaccttcggggcatttgtgggagcacaacataagcgcacatcatctacaacagcttgtgctaggaaaccttgctgactactctgagcatcagaagagggtgggattcgaccaactggctgcctggaactctagctgcttatgctgcacaacgactacgatgcaagcagctagctgcatgcctaccgcncagcaagctacttccattcaaccaacaggcagcattgaactctgttgcttatcaacaacagcaacagctactaccattcatgcagctagctgatgtgagcaatgctgccttctagacacaacagcagctgttggcgttctacctactcgctgtacctaacgctggcacactcttacaactgcaacaactgctg

SEQ ID NO: 27974 - DNA, 215 bp, Zea mays
  Clone ID: MRT4577_125526C.1
cggcgtcggcggcgttgaagttgtcctcgggcttgaaggcgaggtgcatgtacatgacgccggtgctgcggagacctcggcggtggcgggcgcgtcggtggcgggctcgacgacgacccaaacgacgggttcacctctcgattatgtgtgtccttgatctaacatgtagctctcatgatatatacaaaccgtagcaatgtgcaagtattgtacta

SEQ ID NO: 27975 - DNA, 351 bp, Zea mays
  unsure (1)..(351): unsure at all n locations
  Clone ID: MRT4577_125527C.1
tttcccatctcccaaatcctattcgcgagttctccctcctgtgccggctggcgctctctgtggagaagacctcgtctggacgggagtacaaggtcaaggatctctcgcaggcggacttcggccgcctcaagattgagctggccgaggacgaaatgcccggtcttatggcgtgccgcgccgagttcanaccgtgggggggggtcgatggtttttttttctcggggtctttccacatgaccatccagaccgtcgtccttattgagaccctcaccgcgcttggggccaacgtccgttggcgctcctgcaacattttctccattcatcaccaccccttccccgccacctcgcgct

SEQ ID NO: 27976 - DNA, 216 bp, Zea mays
  Clone ID: MRT4577_125528C.1
cggagctatcgacaaaaacagagcccaggcccaccaagaggaagggctacgcgctaggacgtaacgcgtagagctgcccaattcacctccgagcacacgaagggctggaactcccccggccagcccagcatgagaaaacggtacgactagggccactgtgcaacggtaagcctgctggaacttaaggaatggagagcctaacattagatggcggac

SEQ ID NO: 27977 - DNA, 355 bp, Zea mays
  Clone ID: MRT4577_125529C.1
gggtactctttgggcagtttatggtgtcatacgtacgttggatgcttcggtaggaacttagacagactggaatgacgtcatcgcgattgtactgagaagagcttcctagcgtgcccgagctaagtgcaggcacatctgttcgtccacgcagtgatagccttgccctccaatctatatacactctatcacgtggtcaaaagagcagtgctgattcgctaaactaatctgacgactctgcccatcatgatacttgacgtgactcctaaccgtctcgagacgtacactgttgaggcgctaatcgcgagctgacaggtcgctcagagagggttgctgatcgtcaggtacgatgagcata

SEQ ID NO: 27978 - DNA, 239 bp, Zea mays
  Clone ID: MRT4577_12552C.1
gagagcagacagttgccgcccaagcgacagcctatgctgtcttggaaggagacaagctctgctccggcagcgctgcagcgccggcggcggcagggaccaacgacagcccggagtcgtacttcgccggggcgcgctcgccaccgtcgtcgccagaggacgacgaccgcgccttcttcttccccccggacgccctgctcaacaactgggcatgggtatggaacgatcggcagtattagggg

SEQ ID NO: 27979 - DNA, 244 bp, Zea mays
  Clone ID: MRT4577_125530C.1
tgcactccaaaatggtgccctcataccggcatgtattcccggggagatctcaatatattgattgagatttatctcaaaaaaaaaaaaaaaaaaaaaaaaacggcttgcacaagcttttttttttgcctttttttttttttttttttttggcccatcataaacatcaagcggccccacgcttcctacaaaccacacctcactgatgaccatgcatattttatcgggcatcccacccaagataatg

SEQ ID NO: 27980 - DNA, 357 bp, Zea mays
  Clone ID: MRT4577_125531C.1
atgaagttctactctcactcttgtgcttacgatgtcttttgtagatggctcgtattagatgcattgcacgtttcagaggccttttcagagcattattctatcactgagagggatactgccgaggcagccatgcaggatactgcacaacgtgcactttcgcagtattgctcgttgttcagcggggtagctgatggcctcgccccgaagtactacactcaccgttcgaccggcagtgctggaggtgtgattgtctcgcccgttggtgagggcaatcccaggctgaatagtattgtcaacctagtcaccatgctcaacaccgagctggaccacgcccttgacgagttgggcaagttttga

SEQ ID NO: 27981 - DNA, 186 bp, Zea mays
  Clone ID: MRT4577_125532C.1
cgtccgaaccgacaagacatcagactaccgcgtacgacgctacgattggacgtacatagctacactgtaccgcacgagccagacagaaaccgagggcgagaccagccgaccaaacgtacacagatcgagcaacgtgaccggtgtcacacctatcgggttacggacgacggactacgaaccccacgg

SEQ ID NO: 27982 - DNA, 451 bp, Zea mays
  Clone ID: MRT4577_125533C.1
aggtggagaatctataatgctgcatgtactgaagccaagtaacaagataaggacatcaacaatgctgatgacattggcatccctgtcaaagctatacttactgctgatgagtacactggcaccattggcaagcgcctatccagcacgaatggacacaaacttcatgacaaccgccgtgccctccgcgagctcctattatgctgccctgctgttctcccgcacatcagagccgtgatcctctctaacgacaccctgaaccacaaaaccaacgacggcaagaccttttgttgacgccccacaggagggaggcgccctccctgccatatatgccgacaaggcccacattgccattcctcccaccgccaacgccaccacccccccaccccctgcacccccccgctaccgcccccccccaccaacccccccaccccgcaccccccccccccccccc

SEQ ID NO: 27983 - DNA, 248 bp, Zea mays
  Clone ID: MRT4577_125534C.1
acaccaccaccttgtgcacctttcctttccatgctttccttctctcgtctggaatgtcaatatatatagtgcgggctcttctgtgctgcagtcatcgtcttcttatataatactccaactactcatgtcctcagagcctgcctattccatgatatataagcgtcgccgttccggtccactgcacggtctgcggatattgctgtcgaagcgcacagcctactcttatcaagaaggcacaaacaacttac

SEQ ID NO: 27984 - DNA, 673 bp, Zea mays
  Clone ID: MRT4577_125535C.1
attcgctagctcgcttcctaaaccctatcaaagtacgaatggcgtccgcgagctgctcgcgcgctcacttctccgcaccccaaaccccacccagacgagacacccgaaccgccggagtgcctctgtcgtatcattcccccgccgaccaccgtggcatgtcacgtgggcgcctgcgtctctactgactccccttcaccaccgccacaacccgggctggtggctgtgggagtgccgaaacactgcttccgaggtggcgactatgactacctgtactgagagctatagctggatggagtgactccaagacggcttgccgagagcagacccttctatctctacaagaagccacagatcctccgcaactgcgccgcctaacgcaatgctctccaatgactccgctccatcatcgtctatgccgtgagatccaacaacaaactcaccgtgctacccgtcctgcgagagcttgcatgtgacagcgtcctcgtcagcgacaataagctccgactcagcccgtccaggagtgatgccatcgcccggcaggagcatatttaacggaaatgagaagacactcgaagatcttatgttatgtgctgacagcgcagtatttgtgaatgtggatagcgaatattgatttgaagaatattgtgacagctgcaagagctactggaatgaa

SEQ ID NO: 27985 - DNA, 510 bp, Zea mays
  Clone ID: MRT4577_125536C.1
gccggccgggctggaccatgatgtcctgccatttagttcgtatccccgtcgcctacttcgggcgttcgcgctcagctagtcatcacattctttctcatcgtggacgcccgcgtcgaggtgagtgagatcatcacgctacaccagagattaatggccctgggagacgtgcttcagagtgtgtgcgttgtacgccgcccctgtgtgcagaaaggacaggctcctgcgtctagcagcctcttgtccaaactgctgctgccttctaagcgagtggcgtgcgcctcgctggacgatctacctgtcggatgggctgctggaccgatcggaggtgccggaatactcaccggacaagtccctggagactatggctacgacccttttgggctgggcaataagccagaggacttcgccaagtaccaggcctacgagctgatccatgccagatgggccatgctcggtggcgctggcgctgtcatcccaaaaggctgcaacaagttcggcgctaactgtggc

SEQ ID NO: 27986 - DNA, 1017 bp, Zea mays
  unsure (1)..(1017): unsure at all n locations
  Clone ID: MRT4577_125537C.1
ctcgaggcttgnccggnngaagccgcaaataataatcgccaaagcccaaaagagatagagaggagagacgcgacgcgaggggagtggagaaaagcagagcacagagagagagaagggagagggaaaagagagagagaaaaaaagatccccgtccaccgcccacccgctgcgccggcgctgcacgcacggacggacagacggacctcccccccaagcggtgccggattcagtgcggtgggccaggggctgggacggagtgggcgacagatcgagcgctggcgatgccgcacccgacggacccggaggcggggtccgagcagaaggcgccggcggtgccttatttggcggctgcggcgccggctccggtcaagaagaagcggaacctccccgggacgccagatccggacgccgaggtgatcgcgctctcgccggggacgctgctggccacgaaccgcttcgtgtgcgaggtgtgcggcaagggcttccagcgggaccagaacctgcagctgcaccgcctcggccacaacctgccctggcgcctgcggcagcgtggtccgggcgcgccgccgccgcgccgccgggtgtacgtgtgccccgagcccgcctgcgtgcaccactcccccgcgcgggcgctcggggacctcaccgggatcaagaagcacttctgccgcaagcacggggagaagcgctgggtgggcccgccatcggcaccgcgatacgcgccagcgccggagccactgcgacagcaaccgcccccgcntgcgccgcatcatgcggagccacgtaatgagcctgacacgaatgcgactgaggccgtccagttcgcgccgccgcctccgccaccgccgccgccgccgcagttacagctgccggtgctttcgcaagcttcggtgagcgctgctgccaacgttagcgccagcagcagcagcagcagcgtcgcggggacgtcgcagagcctgctcgccggtatgtctcgcgccctcgtcgatggcgtcagcgccgcagtacgcggacctc

SEQ ID NO: 27987 - DNA, 243 bp, Zea mays
  unsure (1)..(243): unsure at all n locations
  Clone ID: MRT4577_125538C.1
tgctgtaccagtgtcgagctccccacgcccaccgctactcctagcccctctcctccctnggactttcgcccagtctgccatctgctctgttctgagccgatggtacggcgaccttctccttgccttacagcagggtcagcggccccatgctcctgcaacattctcggctccgctgtcccatgctctctcacggagccactgcttctcgtgtctccgatggcgtcgacatgggggctcgcccct

SEQ ID NO: 27988 - DNA, 457 bp, Zea mays
  Clone ID: MRT4577_125539C.1
ctctctctttttttttttttttttttttttttttggttggggttttttttttttttttttctttcccccccttttaaaaaaaacccaacccggggggggtttaaaaatcccaagccgggcccttttaaagcaggggaagtccttcaggggcacattggaggctcgatcccccaccatgtctgggggatcaatacccttagagcccagggggggcccgggggtttcccgaaacaaaccacaatcttttgggtgacagggggaggcccagggggggggggttaaccaaaaaacctttccttatcggggccaaaggcgtctaagcttcggggcgcccaaagggcatgaggtgcaaacctggcttcgataacagcgggggtcggggaagggacacctttgaagggagggggggggacattgtctcaagatccgggagacaggaaaattccaaagggggggg

SEQ ID NO: 27989 - DNA, 680 bp, Zea mays
  Clone ID: MRT4577_12553C.1
aggcgctgctcgccgtggcctcgggcgccgcggagccggggcccatccggaggctggcgctcatggtggcctgcaacgtggccgcctgcgccgagggccgcaacgcgctgatggacgcgggcggcgtggcgtccgtctccggcatcctcctctcgccttctcacgacaccaccaacggcggcggtggcaccgcggacctggaggagtggtgcctgtcggcgatgtacgcgatgagccgaggcagcctccggttccgcggcctggcgctcgcgtccggcgcggaccgggcgctccggcgcgtggtggccgacgagggcggcggcgtccggcgcgagattgctcggaagaccctccgcgccatgcggagcgacctcgacgaggacggcggcgagtacaacgacctgaccggaagcagcgcggagtgcggcgacggtgaggactgcggcgggagcatcgtgtcggacgggctcatgtcgttccggcgccggcagcgcgagctcggcgtctcgtcgtgcggcaacaccgccgagttctgaacccgttctccggcgaccggtgcccgtccacgtccattgcgactgatgttttgcgcatgtataaattgcttggttttaggttcacgaggttagacatttgtgccgtgtgtgaagcagatgatgaaaaacttccatggtttttgg

SEQ ID NO: 27990 - DNA, 378 bp, Zea mays
  Clone ID: MRT4577_125540C.1
tttcatgaggactcaagaccgaccgataggaagtgccgtttgacactgtaagcaacagctgcttcctccggctgcaggtgtctatcctccgaccataacctttgtggtttggtctgggatggagcacccatctgtggttcttggattctggctgtggtgtgtgatttaaatcgggtctctgagggattagagcaactattcaatacctttcagtttgtgaactgtaatgaaatggaatttgggcctgatgccacgtctctgttaaccacggcattgaccagagatgctatgattgggccgaaacgaagttttttttaacgtttcacgtgttgataggaacctgggactgcttctctatctgtccgcacagccggttaa

SEQ ID NO: 27991 - DNA, 277 bp, Zea mays
  Clone ID: MRT4577_125541C.1
tcacgggtcaacacacgcctccaaaatattcatcacacaacaaggaacccccccttagccaaaccccaacaataagaactcccaattggaacccaagaaacattacctgggcgggctaacccaaaaaattgtgaaggcttttgcaaacaaccccaatttcggcttcaacccttccggaaacagggtgaaaaccgggttaaccttcaacaacccaaggtgcgtccctgccctgggctacgacaatggctgcacgcaccgggaaagtgtcccgggtgcc

SEQ ID NO: 27992 - DNA, 193 bp, Zea mays
  Clone ID: MRT4577_125542C.1
tgacctgacatgaaccactgacttggaaaggaataatttatagggaaaaggatgtttgtcaacatgactgtggggtctgaacatgaatggtaattgttgttgttgcataatgtgtgagatagaaccagagtaacattgtggcgctgtcatcatgtttggcatcatctttggcgccaccgtgctctgcctcctc

SEQ ID NO: 27993 - DNA, 223 bp, Zea mays
  Clone ID: MRT4577_125543C.1
aagggataaccacttgacgatcaataccttccagtcttccacaactgggttgttattgttaaatacaacaaaagaatctgggccaatgtaacccaagagaaaatagttaatcccataagagcatctatttacacggctgccctggctaggaggatgggaaaaaaaagaatgagacggcatacatcttgacctgagcctaaaaatgaatcggatcgagcgcaac

SEQ ID NO: 27994 - DNA, 361 bp, Zea mays
  Clone ID: MRT4577_125544C.1
cgacgggtacaagctatttttttttttataagaacaaacaaaaaaaaaaatttttttaaaaacacaaaaaaagaaaacacacaacaggcaaaaataaacaaaatatgcataaaaatagaaaaaaaaataaaaaaataaaattttttgccccccaccggggggtcctttgaaaggggtaattttgaaataatccgtgaccccggcgcggggggaatgcataaaaccctaggggcccccatatcactatggggggcggaataaaaaacttttgggcacgctggtgtaaaaagctagagcccgggaaaacacgggccttcccaacacttaatcatcctgaataaaaaacggtttccccctgttg

SEQ ID NO: 27995 - DNA, 1679 bp, Zea mays
  unsure (1)..(1679): unsure at all n locations
  Clone ID: MRT4577_125545C.1
ccatttcttttttttttttacatagtactcttttgtttgtcctacaaaaaaatgtatcggagcttgatgcgtgttttcagggacttattaaacatatcctccatagcaccttaagggtgtgtttggttgtgggacaaggacgggatcgtcccctgacgttctctcgtccctctaattttgagggacaggggacaaaggatagtactgtcccaacccttgacccagaaccaaacaacctaatttgagggatcgtcccgtcccatcccgtcctgtcattgcaaccaaacgcaccctaacagatgaaacacgagccagaggcaacaggcgcttcagctttctgcaactgccgagacataacagtgaatcccagagctctatggcgccgctgtcactagaatcctcgcaactcacatctacttcctgctcgagtcccaatacgccaagcctactccaggaagccagacggctgatccggtgaccccagggatcggggcaaaatagcctagagaagatcgatttgcttctgcacaatttcactaacgaatctcattttgttggccactcttcctgccagttcatccaggaaggaacaggcacgcactgaagagagtgcaatgttcttatgatgctcgcaagctcgaggactcacgagacagactctccacgggatctagttttctgcaacttcagacaaatacaacaggatcttcaactttttctcagtgccgacggttagcatagtgatcacgaaacgctccttgtggcacggggcactgacagcccaggcaactccagagtcatattccgctgacttgacaacgtgctcgatcttctccaagtagccggacggctgcactattgcaacgacgcatcgggagcaaactacctcatagaagttgcgaatggttctgcttaattttcctaacggatatcagctcggtcgccacaggcttggtccatcttatctggatcggaagcggcacgctatgaggcagcgacagtcgtacgtcgccaaatccagcagccgatgcacgcacgcggctgcctcttatgtgagggaccaacaacaacactgttctcaccactgctttgaaccaggactaatccttctggatggctaagggcatcctcttcctgagcatcttcttcagaaacaacagtcaatctatctgctgccatgctccggtgataagatgcacgtgtccgcaagtgctgtggagctctataatggacaccaagcagtaggctgtaatccattatccgctgtgttctcaaaaaatcactgtctgtttcaatctgtttaagaagagcctcacgccaggaaggttcaagataaaaggaatagttaagatccaaatccttcagagttgtgttctcgtcaatttcaattttatcagtagaacggcctaaagatgatcctttcaaatcaaacctccggtggattctcaattcagtgcaaaacatgtttcccattacaacaaaccgaaacttttgaccactagaaggtttcaccctgtggaggccaaaaaacttagttatgagggtgttctcataggtacggacatgatcataatagtttggaagcattcgtaaaagaacctgcagggcaggtaatcggagatccgctgtgttgtcacaatgtcactgtgacaggaaaaagacacttccactntttncca

SEQ ID NO: 27996 - DNA, 452 bp, Zea mays
  Clone ID: MRT4577_125546C.1
cccgggcggacggagtccttgtgcttgtggacggttcccaagtcccaacttccttccgcccatatggccactaaatctttttcatcgacatggccagccgagtgagagctttggcgcggggaggatcgcatgcagctgaaacgggagtgcgcaagtgagttagctcaagctggaggaggacaagaaccagttgtccaagggcttggacccttggagcaaccctaccgccgccaccagcaccctgcactacctgctccaggagaaggagagagcgcaggcgcaggagcagctccagatctatcaccagcaaggattcagctacctccagcaccacgggaggcagcagcagcagcagcagcagcagcagccgccgagggctgcaggagccggcgccgatggcgtcagcagcggcgagtcgacgcccgtggacgcgctggccaccgcattcgtga

SEQ ID NO: 27997 - DNA, 310 bp, Zea mays
  Clone ID: MRT4577_125547C.1
ctcataaaaatgctttttttttttttggggaaaaaaaaaagaaattttcgcaggtctgtccccattcatagggtgaacaggggaggtttcaggaacagaaaacaaatgttcggtttcagaaacaggggaaaacataaaacctttaaaagcaaggcctttcactggacaaacagggcccaaatactttaaacagttgcgtaaaaaacctttaggtactgaaccctggaaaggggttgggcgaacacaaagccaggaacgggtgcttccccccgttttaccccccaaaaaagaacccagcagcttggttcct

SEQ ID NO: 27998 - DNA, 286 bp, Zea mays
  Clone ID: MRT4577_125548C.1
ttgggttttttctcagagggtgtttgccaacaacttgctgagggactcagggccggtgctgctttccttgctcataagatcagctgccaccatgtctgtctcccacagttcgagactcaacaagggggtgagggaacagtacatgaaactgccccaaggtgggatggcccaggtcacctacgtctggatcgatggcaccggggaaggagtaaggtgcaaaaccaggactctggatcaggaaccaaaaaccatagatgaaatcccagaatggaactttgatggatcc

SEQ ID NO: 27999 - DNA, 458 bp, Zea mays
  Clone ID: MRT4577_125549C.1
ttttgagacgtacacagtgctcattccactgcttgtatggattcaataggctgaacacataggcttgccagttatatgcacatcacattgctgtgcgagtggacaggtaacgatgtgcaaattcaaaccgaagcgcacagacactggcacttcatagggatattattaaaccttgagcattgacttctacatacaccaatactaactgcatagagtatttgagcaccagaccaaataaatgcagaccttgtactaaacctccaagtgaggcagtcgatgtgttatgcaccccttatcagtggcgttgtgccattgcaacatatgaactcatgactatgatactctttcaaagattgcatggaaatgttatgatctagcatacatagtgaaggctgtcaggaggcttacggaactcttgacagccaaactttatatttatcacatttgcagtcaagtgc

SEQ ID NO: 28000 - DNA, 616 bp, Zea mays
  Clone ID: MRT4577_12554C.1
atttctacattacaattactacagacaccgtcggaccagatcgcgatcccaggaatcacgaagaggcgcgtcctcctactgtctcccgcactagccacatctctctcgccaacaaacgaaaaggagcaggatgacatgatcgatggtgtacaacacttcactaggtgacctctcatcgaacatcaatgaggcactcgctagctccagatgtgcgagatggaggacgctcgagatcgagttgctggagcaccaccttgtagagagatcacctgctgctgtctctcacttgccaaagacgctattgcttgatgttcgtaacatgtgcaagcacaataacctaccgacacgctgcagatgtatgcgacaaacacaccgtcaatctgccgtaaattgatcgctcctctacgatactgcatccaatggtgaatctaggcgcgccgcgctacttaccctgcacatacaatgcattgatagagaactcgatgccgcgtcatcaagatatctccacccagtgtcccccaggctatattcgtgactgggagctgctgtaacgatctactgcataccgaaatctgcctagccatgtgaaccagtaagctgcgcctacatctaggac

SEQ ID NO: 28001 - DNA, 321 bp, Zea mays
  Clone ID: MRT4577_125550C.1
aagcggcctggcacacgaagatccattattcttctgctacatccgacaacctctgggggagtgaactttttatatggcacttgtaatacgtcacaaactcctatcatggcgcccttcactctatatgatacacggtcttaggcgatctcttactactccttttaatccatgtgcacaatacacctgctcaccagctaatgaacatggcgtacatgcctgttctgccttgcacacgactacacaccttcatgatcttacctgcgctctgataacaggttgctcgcctaaattacgatatgctcgatgtgcctttcttcacat

SEQ ID NO: 28002 - DNA, 241 bp, Zea mays
  Clone ID: MRT4577_125551C.1
cgacccacgcggacgattaaacacacccttcgatttaaatttaattttgagacagaaaaacacaacgcgcggggggttctttcggagcggggcgcacatacaccagcttatccaaatcaataacatgggttcgaacgggaagctattagaggacccggtagataacctgaattattcctttgaggtggtcatacataatagaaccccgctaaacttcatgaccctgatactttaatcaaag

SEQ ID NO: 28003 - DNA, 500 bp, Zea mays
  Clone ID: MRT4577_125552C.1
ccggccgggaaacgtataccaattccactcatttttttaccatgaagttctctcttgccgctttagccgttgccatctcctctgctgccgccaccattacagtcattgaaccttggtcacaaactacctggactgccggttcttctggtctcgtccactggtcttaccctgaaggtgctggccaaacctgtgaaattcacttgttgactggtcaagctaccaacgctactgttgttgctaatcttactgccaatggccacaccgtcccttgtgactacaccaaggctactttcctccctcttcccagctacacccctggtcaatactttgtccgtgttgttccccttggttctgcacctgaaagctacggttactctaactacttcaattttgtcgccgctagttcctaaagtggattattacctgtcaaggaattcattaaataaagcattgtttattaccttttaatacacaaaaaaaaaaaaaaaaaacccgcggcc

SEQ ID NO: 28004 - DNA, 698 bp, Zea mays
  Clone ID: MRT4577_125553C.1
cctcgaggccggccgggaacgaatccccagaacagccctcccaccccatcgttgcaaccatggctgtcggcaagaacaagcgtctttcaaagggaaagaagggtctcaagaagaagactgataccttcgcgaagaaggactggtacaacgtcaaggctcctggcactttccaggtccgagacgtcggcaagaccctcgtcaaccgcacctctggtctcaagaacgcaaacgatgcgctgaagggccggatattcgaggtttccctcgcggacctccagaaggacgaggaccacgctttccgcaaggtcaagctccgcgtcgacgaggtccagggcaagaactgcctgaccaacttccacggcctcgacttcacctccgacaagctccgctcgctcgtccgcaagtggcaatctctcatcgaggccaacgttgtcgtcaagaccaccgatgactacctcgtccgcctgttcgccattgctttcaccaagcgacgacccaaccagatcaagaagaccacctatgcccagtcttcgcagattaggcagatccgcaagaagatgaccgagatcatgacccgtgaggccagctcgtgctcgcttgctcagctcacccagaagctcattcctgaggtcattggccgcgagattgagaaggccacccagggtatctaccctctccagaacatccacgtgcgcaag

SEQ ID NO: 28005 - DNA, 597 bp, Zea mays
  Clone ID: MRT4577_125554C.1
tttacattcagttactaaaacgatttagaccgggaagtatatgtgcatattgtatatgggttaatatatgcaatgcaccattcaaatggaaagcaaatagattttttattacgataatcattccttcttcgacgggcgtacatatacattttttttgcctactcaattctttctttttgcactctatccattttccttattattcttttgtcatttcgttgttcgaatcgttttattgaatcttggcattcactagaggaacgatatattattttcgtttcgattcgatctattcggattgttgttatattcgatcgcttttctgttgatacctttttcaatgcatagcacaaaagggagggggtaccgatctacgtgcattaaaatatggttcatgtaagagaaaattaaaataatggaaatgaagtgagaaaatagaataatattttatctcacacaagcaaacaaaacatttgaaaagaattccactagagaaaaatttaaatcacgaattattttatgttataaacattaaaagtctcactcactatctatctgaatacgatgtgaagagaaatccagtttaaaccatagtgt

SEQ ID NO: 28006 - DNA, 1286 bp, Zea mays
  Clone ID: MRT4577_125555C.1
ctcgaggccggccgggacatacaggagttaattgttgggggatgcacactagctcctcacacatggacgatgagtggaggccggtgatggcatgctcgtcttcaacctcatctctgctgtgatgacggcgctggtgaagaaggcgctccagcaagggctcaacgccctggtcctcatcactcttcgccagttggtggccactctcttcctagcaccaatagcctacttcaaagaacggaacacaaggcctaagctcacgctagagatctttgtgtaccacttcttcagtgcagcgcttggtgcttccctgtcgcagtacagcttcttctacgggctcaagttgacgactgcgacgttcgccataacatttgccaacatggctcctgtcctcaccttcctcattgccatagctctacgggtggagtcgctcaacatgaagagcaaatcagggtctgcaaagatggtggggacgctcatgtcgctcggtggagtgctgctgctgagcctctacaagggcatggccgtgacacaccacagcagcggcactcctccgccctctcaagtacaactaggcaacgacggcgacaggaaggtctggatgctggggactgtagcgttactggccaactgcctcgtcttctccctgtggttgctgctgcaaagcaggctgacgaacaagtacccggcgctctactccagcaccgccttcatgttcttcatcagcacgctgcagacaggatcgctgacggtgacggtcgagtggcaccacgcgtcggtgtggattgtcacaaagaagctggagatggtcacgatattgtattcgggaatcatggcgtctgcagcaggcttcctgataatgacctggtgcgtccacaagaggggtccagttttcactgcagccttcatccccatcgtccagatcatggtggccatcatcgatttcttcttcctccatgagcagctataccttggcagaagaaggatgcaatggcggcatgctctgcaggtacgaccaaacatgacgaagaggccagcatcaacaagtagtgaaataatcagcagtcagcatcatcgagtggtggcaaacacagacatgtactagtagtggcggcatgcaattgtttgaagaaaagaaaatctactgtggcaatacaaaaacgatcgatccagaccccttttgccatgcatgagatgtgtttccagcaacactaattaacaaaactgccgatcgatgatatcacgagtttattgttgataaccacttgtcaataaaaacttttgctttc

SEQ ID NO: 28007 - DNA, 584 bp, Zea mays
  unsure (1)..(584): unsure at all n locations
  Clone ID: MRT4577_125556C.1
gccacactagctcctcacacatggacgatgagtggaggccggtgatggccatgctcgtcttcaacctcatctctgctgtgatgacggcgctggtgaagaaggcgctccagcaagggctcaacgccctggtcctcatcactcttcgccagttggtggccactctcttcctagcaccaatagcctacttcaaagaacggaacacaaggcctaagctcacgctagagatctttgtgtaccacttcttcagtgcagcgcttggtgcttccctgtcgcagtacagcttcttctacgggctcaagttgacgactgcgacgttcgccataacatttgccaacatggctcctgtcctcaccttcctcattgccatagctctacgggtctgcaaagatggtggggacgctcatgtcgctcggtggagtgctgctgctgagcctctacaagggcatggccgtgacacaccacagcagcggcactcctncgccctttcaagtacaactaggcaacgacggcnacaggaaggtctggatgctggggactgtagcgttactggccaactgcctcgtcttcttcctgtggttgctgct

SEQ ID NO: 28008 - DNA, 1340 bp, Zea mays
  unsure (1)..(1340): unsure at all n locations
  Clone ID: MRT4577_125557C.1
acanacagtttggaaggttgggggatgccacactagctcctcacacatggacgatgagtggaggccggtgatggccatgctcgtcttcaacctcatctctgctgtgatgacggcgctggtgaagaaggcgctccagcaagggctcaacgccctggtcctcatcactcttcgccagttggtggccactctcttcctagcaccaatagcctacttcaaagaacggaacacaaggcctaagctcacgctagagatctttgtgtaccacttcttcagtgcagcgcttggtgcttccctgtcgcagtacagcttcttctacgggctcaagttgacgactgcgacgttcgccataacatttgccaacatggctcctgtcctcaccttcctcattgccatagctctacgggtggagtcgctcaacatgaagagcaaatcagggtctgcaaagatggtggggacgctcatgtcgctcggtggagtgctgctgctgagcctctacaagggcatggccgtgacacaccacagcagcggcactcctccgccctctcaagtacaactaggcaacgacggcgacaggaaggtctggatgctggggactgtagcgttactggccaactgcctcgtcttctccctgtggttgctgctgcaaagcaggctgacgaacaagtacccggcgctctactccagcaccgccttcatgttcttcatcagcacgctgcagacaggatcgctgacggtgacggtcgagtggcaccacgcgtcggtgtggattgtcacaaagaagctggagatggtcacgatattgtattcgggaatcatggcgtctgcagcaggcttcctgataatgacctggtgcgtccacaagaggggtccagttttcactgcagccttcatccccatcgtccagatcatggtggccatcatcgatttcttcttcctccatgagcagctataccttggcagtgttctgggatccgcgctgatgatatttggactttaccttctgttgtggggaaagaagaaggatgcaatggcggcatgctctgcaggtacgaccaaacatgacgaagaggccagcatcaacaagtagcttagtgaaataatcagcagtcagcatcatcgagtggtggcaaacacagacatgtactagtggcggcatctgcaattgtttgaagaaaagaaaatctacgatcgatccagaccccttttgccatgcatgcatgagatgtgtttccagcaacactaattaacagaactgccgatcgatgatatcacgagtttattgttcataaccacttgtcaataaaaacttttgcttttatatagtcaaaaaaaaaaaaaaa

SEQ ID NO: 28009 - DNA, 147 bp, Zea mays
  Clone ID: MRT4577_125558C.1
gccaagcaattttccaaaacatgctctaatttgattgtatcaaagattggtgctattgggctctccggtaccatgtttggtgcgccggtttgaagcttgggggatcctgggtcggagacgtgtcctgtgtgaagggggggtggggtg

SEQ ID NO: 28010 - DNA, 256 bp, Zea mays
  Clone ID: MRT4577_125559C.1
ggacggaaaaaagtatttttaaaactaaaccccccttcaaattcaaacccctaaaaaaacctttgggaatttgcacttttgaaaggccccttaataaaaaaggggcatccagtacaaactggcagttttttttttacaaattcttttcccgcctttgaacttagtttatttataatttccaggggaaaacttattatttttttgaactgcgaagggatactacttccagggggggaggactattttttgcttaaaa

SEQ ID NO: 28011 - DNA, 254 bp, Zea mays
  Clone ID: MRT4577_12555C.1
ccttgggggggggtggacatgaatgcgccggacctgtacacgctaggctaaggtacgggctggttttcttcaaagttttgcttaaggcaaactgcacctacacccgttcaggcagtaggaaacaccgggctttacttgtgggggccaaagctcgtggcctcctttcttgggtcttttgatcccatgggttttttagtatccataaccgttctaagggcagttttcgtggcgttccgcttaacaccaagtcgtgt

SEQ ID NO: 28012 - DNA, 836 bp, Zea mays
  unsure (1)..(836): unsure at all n locations
  Clone ID: MRT4577_125560C.1
ccgctccctccccacccgcgctcgacacgcagacgcaggcgacggtggcggcgatcaggcccggtatctcagcacggccgacagtcccaggctcgacggcggcgtcagcagctccccttcccgcttctagccagtggcctcgtgccctcgcctccggtcctctgcacaccggccggagaccctgcatttctttatacgatgagctggagatttcctctattcgggtatgttgatcttattgaaaccaatctatgctgatgtcacaatctatgttttatgagccctgacatctcatttatctgtctaattagttaggttttacatattcctaatttgctatatgcatttggtacatgtttcctttggaacctgctagttcaaatacgttgcacaatcacaacactatgatgcccagttttagttttttctccctgtataaccctgcagtccaaaagttctttagttaaccaaagagaattttacctgattgctatatgtgccatttcctgtggatgcatcttaacagttatactggatgtaggatgccatatacgaaattatgccttacaagttctgaaaattttgcttctcttggttactgttatttggtcctctgaatgcactcataacagctcccagcagcagcaatcagatccaaatttccaggacattcctacgcagtcttggtaccctacctcggttgtaggtttgtcttcatctccagccacacctacctcttctagctccagtccacatcaaagagcttctaaatatctgcagtcttcatcccgtgggcaaccatctnctgctgaggctgcagagataattgcccattt

SEQ ID NO: 28013 - DNA, 322 bp, Zea mays
  Clone ID: MRT4577_125561C.1
ggttagtaaaaatctgaaataaaacgaccacgaaggggctcctgatgccagaatgcaagccggccatactagaccagcaggaggcttggaactggcatacacatcatgcatgcgatcgaacagcgatactactgccaagggcatccattgcgtgcgcgggggccatgataaggacagaaatgagtggcgacggcccattgggcacaagagggcagcaaagggccagggggccgtttaggcagctacgggtggacagcctgcacaaactacaccaccttgcctgaggtaacgacgtcggtaccaccggggaagatcaaacacc

SEQ ID NO: 28014 - DNA, 376 bp, Zea mays
  Clone ID: MRT4577_125562C.1
ttgggcttttatcgaaagctttattattattcaaaaccttttaaggggaagttggtgggctctgttcttgccgaattttttcccctgaactgaaacggatccccccccccatggggttttgttcttaaaaaacccaatctcttagaacttccccgaactggcaattggaccaaaaaggttgcccactttttatgccttgaaaaaaggcggggccccggggggggggctaaaaccgaaaccttttttcccggaaaaaaaagcccgttacttaaaaatggccggagggcattaatagggggaccgatgaatcttttaaacccaagcccgccacaaaaagggagcttttgggctccaactttaccgggcccgaaggggg

SEQ ID NO: 28015 - DNA, 500 bp, Zea mays
  Clone ID: MRT4577_125563C.1
cccacgcgttcgcagcggatgagtgcgacggcgacgaggccggcgcgctggtcgccgccgcctgcaccggcaccggcaccgataccggctcgacccgggacgcgccggcggtgcggtccccgcgcgccgcgtgggcgctgttcgtggaggagtcgcggaggctgtgggcgatcggcgcgcccatcgccctgaacatcatctgcctctacggcaccaactccacgacgcagatcttcgcgggccacatcggcaacctggagctctcggcggtggccgttggcctctccgtcgtctccaacttctccttcggcttcctcctcgggatgggcagcgcgctggagacgctgtgcggccaggcgttcggggccggccaggtgtccatgctgggcgtctacatgcagcgctcctggatcatcctcgccgcctccgccgagctgctcacgccgctctacgtgtacgcggcgccgcttctgcggctgctggggcaggacccggccatg

SEQ ID NO: 28016 - DNA, 405 bp, Zea mays
  unsure (1)..(405): unsure at all n locations
  Clone ID: MRT4577_125564C.1
ggcggcttttttttttgttttttttattgggggcgggccataaagggggggggccaaatacncaacatggtccacaaggcaaaatacacggaggaggcggtcaaaaatacaggaaaggatacaggggaggattagggaggttggtcttctatctcctccaaggggatatattaatgggaacccacaggccccttggtaaaactaggaaggatccacaaatacaaccaaatggtggggaacataaaaaaaataggggggactagaggtacaggtggaacatataaccacatttgggttcctaagggaaaggtgcgcgcggaaagggactttggttgggctanaanggtaaggtggtggggtctctgagtggtggggtaaataatggtcaaggatgtgctcttcatc

SEQ ID NO: 28017 - DNA, 334 bp, Zea mays
  Clone ID: MRT4577_125565C.1
gagctttctcgtcggcggccgccctctttttttttgtttttttttttgttttttttttttgttttttttttgaacccccaagaattgaaacatgtcctttacaaaacaactcttagatgattcaacttctcttggttcttggagagctcttttttttccccagccaaccacataataggccttttttaaacacttaaacaaacacaaccccggacttcactgggctttccattttcaccacccaatgctgtggaatccctgatttaacaagagatattgaatcccaagccttgggaccacaccactggtcatttttacaagggaagagcttttg

SEQ ID NO: 28018 - DNA, 694 bp, Zea mays
  Clone ID: MRT4577_125566C.1
tccccaatatatcccactcttcttctcctttctggaggagctagggttccgtcctcgatgcgatccgacgagagacaccacctttccccactccgattcaagcaatggccgcacgagggcgagaagaagatggttaccctcgctagctccgatggagaggaggtcgaggagcaagaggcgcgggctatgcatgcgcacaccatccgtcacatgatcgaggatgactgcaccgacaacgcgatccctcttcctaatgcttactcctcgatcctattcgaggtaatctaggactgcattcactgcgtacatgccgacgccgccgccgccgccgtctcaaaggacgaatccgacgacgagggcgtcgcctcctataacatgaccgacgcctccggtgaggatctcggaactcggatgcggagttcgtcatggttaaccataccacactctcgacctcatcgtgtctgcccactatatgaacatgaatgctctgctcgacctgatctgtctcactgatgctgacatgatcactggcaggacaccataaagagactcgcgagatcttcttgatccagaaaggcttctgccctgaggatgaagaggagatccgcatgaagaaccaccgcgtctgcgagtaaggaactgctgcacctatcggtgcctaggaatacgcggagtctacgactatgtctacttt

SEQ ID NO: 28019 - DNA, 170 bp, Zea mays
  Clone ID: MRT4577_125567C.1
cggacgcgtgggaaaaaaaacaaatcttcagtttagaataaaagtagctataacacaagcaccagcatgaagcaaacatggaaagaaggatccagtactgcaaggttgaaaagagaaagttagatcgtaacaagaaaaaaaaagggggggccatttaaagggttccaatt

SEQ ID NO: 28020 - DNA, 380 bp, Zea mays
  Clone ID: MRT4577_125568C.1
ccgggttggaccaagccttccggagtattaggccccaattcaaatttgatccttcatttttttaattccaaaaccctggggcttggtcctgggggttctggctttaatggttttaatttcaatggttcttggtacacagaacaggcgctgcagctttggtcaacaacaagccatgagcagcaacatcatccacaacaacatcatccacaaaaacaacaacatcaaccaccaccacaacatcaccagcagcagcaacaccaacaacaacaagttcacatgcaaccacaaaaacatcagcaacaacaagaagttcatgttcaacaacaacaacaacaaccgcagcaccaacaacaacaaacacaacaacagcaccaacaaca

SEQ ID NO: 28021 - DNA, 379 bp, Zea mays
  Clone ID: MRT4577_125569C.1
ggggggcataaaccaatccgggaacccacctccggttggttggttcccccaaacaatggaccaaacatttttaaaaaaaaaaccccccccgggggtttacccccctaagctttttttttttaaccccccccctccccccaagaatttttttccggctcagattccaaactccaaaaaaaaaaggggcaaaatttcacaaaggttgcacggggcccccaaaggaacggccctgggcaaaaggagccccccccccccggccctttttattttggggccggccccttgggcccaggcaaaaaactggattagggggcccagacccaagctgatggtccccaaggggagggtttcccccggggccttggcccccccccttccc

SEQ ID NO: 28022 - DNA, 304 bp, Zea mays
  Clone ID: MRT4577_12556C.1
cggggcattaaaacaacatggtttagtctgcatctagacacacctttttttgggctatttcctagcgagaggcttcgcagaaaaaaagattgggtgttttttgggggatctgatcgttgttaaggaagattagctttcaacagagcagatcattccttttgttttgtacgccggggagggacctttgcgggcaaccggcttttttcctgtggttgggtcgctactccgccggccgctcctctcagtgcttgctggaggaatacctgtgcgcgttcagaaaaaactcgcactgtctcttgatttt

SEQ ID NO: 28023 - DNA, 887 bp, Zea mays
  unsure (1)..(887): unsure at all n locations
  Clone ID: MRT4577_125570C.1
cattgggtacctcgaggccggccgggaagcttagtcacacctcttcctccccacacttgcttcgacacaagcatggataactcaaagctcaggctgcgcgaagaccgtcagcaccagacttctgcaagcgatcaagacagagtctcgaactggctgagggatgcaagtcttcaagagcacgacgacgtgagcgagatcggcgacagcgcgcctcgagagccagccacgccgccaccgggacgctcgcttttggtacagtattgcgaggaagtatcacccaccaacaccaactttacaagtgactgggcttcggtcttcgatgaaccagatactcagtgcgacgcgtggatcgaagaccccttcggcaacgatgttccagatgccagccctacgcatgaagagctccataattcacaaaccaaggtcatgcgaagcagcgcgaggtcagacttgacagttctcaataccggtcgttcggttgccgccagctatgactcgaccgaagtcgcagagaccctgggtgaagaaggtgcaaacatcttagcggaggcagctacggcacccatcgacccgaacaaaccgcgcatcacacaaatcaattcgtgcacacaatgcacagtggctgatttgaaatgctccagaagcgtgcccagctgttcgcgctgcaaccgcaaaggtcagggcagtctgtgtctccttcagcgtgcaaggtataggggggaacttgactcagacctgccctgctcatcaacggttctactanagctgaaagatgacgacgagtcgatctggcagcagaaggtgaatttgagcaaagagcttgaagacttgtggcgtgctcaagaggatagaaaagactgggtcttggcttcgcttgatgttccgcg

SEQ ID NO: 28024 - DNA, 351 bp, Zea mays
  Clone ID: MRT4577_125571C.1
cgcgtcggccctgcctctgccacctcgaggtgatgaacttgtattccgcccccttgaacatctccaacctgtgaaatactcccggcctggattacccttgttgggttttggagaggagattttggacaatgctttgactaaggcagaaaaaaataagatcaatttacatttggtggctgcagaagaagctcttgcattgtcgatatggactatggctacagtttgtcgttctctgtctttggaaagtgtgctaggcttattcactggagttttgctggagaagcaaattgtggtaatatgcccaaatctgggtgttctgtcagcaattcttttgtctattataccgatgat

SEQ ID NO: 28025 - DNA, 261 bp, Zea mays
  Clone ID: MRT4577_125572C.1
ttttcacgtggggcctccggtcatcagcgctcgccatgttcgaccagtggtggttgctgctacatcaggagcaggggatcatgacgggaaaccgcattgtgggcgggatctgggatggatccatccagacattgtccataaaaaatggacggctcctgccatacaatatgaaccttgagagaacacagatcaaaaggtatggcggtcagtatagatccaacaaatggacagagatatctgtcatgacggatggatagcact

SEQ ID NO: 28026 - DNA, 781 bp, Zea mays
  unsure (1)..(781): unsure at all n locations
  Clone ID: MRT4577_125573C.1
cattgggtacctcgaggccggccggggctttaaccgcccccaccctccctccataaatggccactcccgctcgcgctcccaccctgccggagccggccgcgcaagagctacccgccggcgccggcgccggcgccggccagcggcagcagccccatcaccaccaccctctcctcgcggcggccactgcggcgtcgctcctcgccgtgctctacctcccccggccggtgctgctgctcgtgctctccccggcctcgctctcctccctgctcctgctcctctccctcctccacctcggctccgcgccgccgcctcccgccctcgccgcccctcctccttcctcgccgccgccgacggaggagaagaaccagcagcaacagcaggagcaggctccagaggccgcgtgcccgccgcctccccctcctccgccgccagagccagagccggagcgcggggccgtgttcccggagctcctagagttcgcgtcgtgggcggccaaagggcgcgcgctggaggtgatccacgaggagttcgaggccgagtgggggctgccggaggagatgggcctgccgtgggactcggactccgactccgaccccgacgccgactcgggcagcgacgacggctacgtccggngcggcggcgacgcggacgacggcatgatcgagatcgagctggaggaggacagcctcatcgagatcgacatctccaggtgcgccgtgagcgtggttaccgattggatggaccgcgtatcatcgcctccgngtttttttttccccccctc

SEQ ID NO: 28027 - DNA, 500 bp, Zea mays
  Clone ID: MRT4577_125574C.1
gggggtgtgtttttttttttttttttttttttgtttttttttttttttttggggggggggggggtaacacaggaggaaggggaaatttaaataaggcaaaatttacaggagagactaacaactggaattcagattcagatagcaggggggggggggggggaaacatggaatacataacaacgcaataggggggggaatcatgaaggggccttcctggaacactcgcatgaaacgacttttggacattgcccttttttggggggtttttactcctcttgggtcccccttagagaggggggggggctggccccaaggctccggttccatttcctatcaggcttcctgggacaatcttttgtgggtgccgggggcaattccccggtcttttttgccgggtggctttcgagcaatcctttggggcctgcgggtggacttgggggtctggaactcctggcgggccgtgcgctttaggggggggcgggaaaggccccccgggaggg

SEQ ID NO: 28028 - DNA, 377 bp, Zea mays
  Clone ID: MRT4577_125575C.1
ggacggggaatctgcttggtcctggtctcaacaaggcaggcaagttcccgaccctggttactcaccaggaatccctcgaatccaaggtgaacttccttgtttcccttctgaagaagaactggcagaatgtgagatgcctctacgtcaagagcaccatggggaagccatacagggtgttctaagtatgctcttttgtgaagtctgctaggttctggcaccgaggttttattgaattaaactcttgttaaggatatgtttttggacgatcctatatttcgtcctggcgctactatgtttcagaatggtggtactactataagtatcctggcgctctaagtattgcttgaaaggatcaatataaaaaaaaaaaaaaaaaa

SEQ ID NO: 28029 - DNA, 728 bp, Zea mays
  Clone ID: MRT4577_125576C.1
ctcgctccgttgctcgcctcgggtcaaaccctaagcagggagttgatttatccgctgcagccatgagtaagttgcagtctgagtctgtcaaggatgccatctcccagattgttggggatgccaaggagaagaataggaagttcactgagactgtggaacttcagattggtctgaagaattatgatccacagaaggacaagcgtttcagtggctctgttaagttgccccatatccctcgtcccaagatgaaggtgtgcatgcttggtgatgcccagcatgttgaggaggccgagaagatgggacttgactacatggatgttgaggctctcaagaaaatgaacaagaacaaggcaggcaagttcccgaccctggttactcaccaggaatccctcgagtccaaggtgaacgagactaaggcaacagtcaagttccagctcaagaaggtcctttgcatgggtgtcgccgtcggcaacttggcgatggaggagaagcagatccagcagaacatccagatgagcgtcaacttccttgtttcccttctgaagaagaactggcagaatgtgagatgcctgtacgtcaagagcaccatggggtagccatacagggtgttctaagtctgctcttttgtgaagtctgctaggttctggagccgaggttttattgaattaaactcttgttaagagtatggttttgggacgatcctataatttcgtcctggcgctactata

SEQ ID NO: 28030 - DNA, 380 bp, Zea mays
  Clone ID: MRT4577_125577C.1
aggccgagcatgttcccctatcagacagattcctggtggattctaacccagcaaccattttttggtcaataggaatcccttagcaccatgactcctagctgctattgcctgagtgcaccagcctaagtaatacatgcctgacacaacccggcgtcgaccttatttgctgtcggagcctgtctgcaagacggaccttctccgaatcgctcccagtggcccacgagccccacacatgagacgagaaggaatcccacacactatgcgctgcttctcccccgacatgactacaacctccatcttttccaaatccaaaaggtggtaacccaccgattccttgatgcagaaccggcccttgtacatttactttatcatcacgctca

SEQ ID NO: 28031 - DNA, 679 bp, Zea mays
  Clone ID: MRT4577_125578C.1
ctctcgctccgttgctcgcctgggtaaaccctaagcgggagttgatttatccgctgcagccatgagtaagttgcagtctgagtctgtcaaggatgccatctcccagattgttggggatgccaaggagaagaataggaagttcactgagactgtggaacttcagattggtctgaagaattatgatccacagaaggacaagcgtttcagtggctctgttaagttgccccatatccctcgtcccaagatgaaggtgtgcatgcttggtgatgcccagcatgttgaggaggccgagaagatgggacaaggcaggcaagttcccgaccctggttactcaccaggaatccctcgagtccaaggtgaacgagactaaggcaaccgtcaagttccagctcaagaaggtcctttgcatgggtgtcgccgtcggcaacttggcgatggaggagaagcagatccagcagaacatccagatgagcgtcaacttccttgtttcccttctgaagaagaactggcagaatgtgagatgcctgtacgtcaagagcaccatggggaagccatacagggtgttctaagtatgctcttttgtgaagtctgctaggttctggcaccgaggttttattgaattaaactcttgttaaagatatgtttttggacgatcctatatttcgtcctggcgctacta

SEQ ID NO: 28032 - DNA, 683 bp, Zea mays
  Clone ID: MRT4577_125579C.1
acttatagtagtaccaccattctgaaacatagtagcgccaggacgaaatataggatcgtccaaaaacatactcttaacaaaagtttaattcaataaaacctcggtgccagaacctagcagacttcacaaaagagcatacttagaacaccctgtatggcttccccatgctttcttggcatcagaggccatcatcaagcagattccccgtctccttggtcctggtctcaacaaggcaggcaagttcccgaccctggttactcaccaggaatccctcgagtccaaggtgaacgagactaaggcaacagtcaagttccagctcaagaaggtcctttgcatgggtgtcgccgtcggcaacttggcgatggaggagaagcagatccagcagaacatccagatgagcgtcaacttccttgtttcccttctgaagaagaactggcagaatgtgagatgcctgtacgtcaagagcaccatggggaagccatacagggtgttctaagtctgctcttttgtgaagtctgctaggttctggcaccgaggttttattgaattaaactcttgttaagagtatgtttttggacgatcctatatttcgtcctggcgctactatgtttcagaatggtggtactactataagtattgcttgaaaggatcaaaaaaaaaaaaaaaaaaaggcccctagggcc

SEQ ID NO: 28033 - DNA, 129 bp, Zea mays
  Clone ID: MRT4577_12557C.1
cgtccgacacgctgcgacaaacgacacgtatcctatacaggcgcttctcaccatttccacattaaagcttcgtatggtatgctcctgagagtgaccctgagggggagggggggccttcattttcaatga

SEQ ID NO: 28034 - DNA, 357 bp, Zea mays
  Clone ID: MRT4577_125580C.1
cctccttttttttttttttttttttttttttttgttggtttttttttttttttttttgtttttttttcccatttcccggaagggggaaaacgctggcacagaaccccaatctttaccccatgggcccggtgttaatgggccggacccccccccaataaccgggaaactgagaccaaagggggaatccaggcaaaaccctagcctcaaccccaggacctaaggtcccttcttcaaaccatgggcccaagccaaaaacttttgggggggaggatctttctttttcttttttacaaaaagaaaaaatttcccgccgggccgtttctatgatgaaaaggcgaccccaatggcccccccagg

SEQ ID NO: 28035 - DNA, 583 bp, Zea mays
  unsure (1)..(583): unsure at all n locations
  Clone ID: MRT4577_125581C.1
ggtccgnattcccgggcgcctcgggtcaaacccttaaccaggtgttgatttatccgctgcagccatgagtaagttgcagtctgagtctgtcaaggatgccatctaccagattgttggggatgccaaggtagaagaatatggaagttcactgtagactgtgtgaacttcagaattggtctgcaagaattatgtatccaccacaaggacaagcgtttcagtggctctgttaagttgccccatatccctcgcaccaagatgaaggtgtgcatgcttggtgatgcccaacatgttgtaggaggccgagaatatggacttgactacatggatgttgaggctctcaagaaaatgaacaagaacaagaagcttgttaagaggcttgccaagaagtaccatgctttcttggcatcagaggccatcatcaagcagattccccgtctgctttgtcctgggcttaacaaggcaggcaagttaccgacacctggttactcaccatgaatacctagagtccaatgtgaacgagactaaagcaaccgtcaagtttcacctcaagaaggttctttgcatgggtgttgccgttggcaac

SEQ ID NO: 28036 - DNA, 413 bp, Zea mays
  Clone ID: MRT4577_125582C.1
aaaacacaaaaaaattattataaaaacatttaaaaaataaaaaaaaaaaaaaatagcgctggggcaaaaaatgacaggggagcggacaccatcattcgccgtctacttctttttatatcgagcaatacaattaaataaccctgcctacatgatgacaatcgaaaccactagaccacacctgttgccaagcttcaattttcttaaaattagtaaatcatacccatttcaaagctttacatactaccccttgctcgtttgaaacacgggcttgcgttcttgttgcatctcatacgagatgatggtactccccacagtgtctagttattaaagatgtcgctttgccctgtccatacaaagtgaccgttactcttgaaagcgccttagcacccccacctttcccttactatcctttt

SEQ ID NO: 28037 - DNA, 674 bp, Zea mays
  Clone ID: MRT4577_125583C.1
gatttctgctccgttgatcgcctcgggtataccctaagcatggagttgatttatccgctgcagccatgagtaagttggagcctgagtctgttaaggatgccatctcccagattgttggggatgccaaggataagaataggaagttcactgagactgcggaacttcagatgtggtctgaataattatgatccacagaaggacaatcgcttctacggctctgttaagatgtcccatatccctcatcccaagatgaacgtgtgcatgcttggtgatgcccagcatgctgaggaggccgagaacatgggacttgactacatggatgctgaggctctctcgataatgagcaacaacaagaagcttgttaagaggcttgccaagaagtaccatgctttcttggcatcagaggccatcatcaagcacattccccgtctccttggtcctgttctcaacaaggcaggcaagttccctaccctggttactcaccatgaatccctcgagtccaaggtgaacgagactaatgcaacagtctagctccagctcaagaaggttctttagctgcgtgtcgccgtccgacacttggctatggaggagaagcagattcagcagaacatccagatgagcgtcaacttccttgtctctcttctgaagaagagctggcataatgtgagatgcct

SEQ ID NO: 28038 - DNA, 144 bp, Zea mays
  unsure (1)..(144): unsure at all n locations
  Clone ID: MRT4577_125584C.1
ctttcttagcaggggtaacaacgcagagtacgcgggctgtgcaatcgntccgccaagctatcaatttggctccagagcttggagcgccatgctaaccgcactttgtgaaacctgaaatacaaaaattgttcttgatgtgttttg

SEQ ID NO: 28039 - DNA, 402 bp, Zea mays
  Clone ID: MRT4577_125585C.1
gggtcaaaccctaagcagggaggtgatttatccgctgcagccatgaataagtagcagtctgcgtctgtcaaggatgccatctcccatattgtgggggatgccaaggagaacaatacgaagttcactgagactgtggaacttcagattggtctgaagaattatgatccacacaacgacaagcgtttcactggctctgttaatttgccccatatcactcgtcccaagatgaaagtgtgcatgcttggtgatgcccaacatgttgaggaggacgtgaagatgggacttgactacatggatgtttaggctcttaagaaaatgaacataaacatgatacttgctaagaagcttgtcaagaagtaccatgctttcttggcattagaagccatcattaatcagatttcc

SEQ ID NO: 28040 - DNA, 869 bp, Zea mays
  unsure (1)..(869): unsure at all n locations
  Clone ID: MRT4577_125586C.1
ctcgcctcgggccaaaccctagcaggnagttgagtgaacggttgcagccatgagtaagttgcagtccgaggttctcaaggatgccatctctcagattgttggggatgccaaggagaagaataggaagttcaccgagactgttgagcttcagattggtctgaagaattatgatccacagaaggacaagcgtttcagtggctctgttaagttgccccacatccctcgtccaaagatgaaggtgtgcatgcttggtgatgcccagcacgttgaggaggctgagaagatgggacttgactacatggatgttgagtccctcaagaaaatgaacaagaacaagaagcttgttaagaagcttgccaagaagtaccatgcgtttttggcatcagaggccatcatcaagcagattccccgtctccttggtcctggtcttaacaaggcaggcaagttccctacgcttgttactcaccaggagtccctggaatccaaggtgaatgagacgaaggctactgtcaagtttcagctgaagaaggtcctctgcatgggtgtcgccgtcggtaacttgtccatggaggagaagcagatccagcagaacatccaaatgagtgtgaacttccttgtgtccctcctgaagaagaactggcagaatgtgagatgcctttacgtcaagagcaccatggggaaaccatacagggtgttctaagcctgctcgatctttgtgaagtctgctgtttatgaattatgatgctaggattttgaaccgaggttgtcttgaactaaaactcttgttagagtatgtttggttggcaggatattggagtggtactaaagcctttgtattctctctctatatatattgcttgaggctcaat

SEQ ID NO: 28041 - DNA, 609 bp, Zea mays
  Clone ID: MRT4577_125587C.1
ccggccgtgatctcggtccgttgctcgcctcggtttaaaccctaagcatagagttgatttatccgctgcatccatgagtaagttgcagtctgattctgacaaggatgacatctcccagattgttggagatgccaaggagaagaatacgaagttcactgtagactgtggaacttcatattggtctgaataattatgatccacagaagggcaatgcgtgtcagtggcgtctgattatttgccccatatccctcgacccaagtatgaaagtgtgcatgcttgatgatgcccagcatgttagatgaggctcgagaagatggaacttgactacatggatgttgaggctctcaagaaaatgaacaagaacaacaagcttgttaagaaggttgccaaaaaacaccatggtttcttggcatcagaggacatcatcaatgagattccccgtgtccttggttctggtctcaacaagggaggcaagttccccaccctggttactcaccaggaaatcctcgaatcaaggcgaacgagactaaagcaaccgtcaagtttcagctcaagaaggttctttgcatgggtggttcccatgcccactttggcgatgtctgaaaagcc

SEQ ID NO: 28042 - DNA, 251 bp, Zea mays
  Clone ID: MRT4577_125588C.1
attaacagactttattggctaaaatttagagcgtgcacctctgaagaagggcacaaccagaggaaaaaaaggtgtgaaccctaaacagacgataaaaagacccgggccgtaggaacaccaatgggcaggacaaaatgatcagttaagtgtacgaagcacactgcataatgctcagcaggtacgatatttagctatggacagggtgaaagtagcaagcagaattgcactacaagctccaccttttgttctat

SEQ ID NO: 28043 - DNA, 403 bp, Zea mays
  Clone ID: MRT4577_125589C.1
tcgccaagctgaacaacagccagctcgcgaaaataatgaagagccgcagcatggcatcatcggccgggctcttgttgctagccctcgcgctagtgtcggacaccgccccacatgtagcggacgcaaagaagaagagagcggccgacagcgtctagacctctgaagctaatactaacaggtatactacagctcgatgtgcagctggtatatacgtcatgcgtgctaaaatgagcgttatgttattcatcttattctcaaggtggtactccacctgttacagaattagaatgattctcgcttcttgagaagtcaaagttaatataaaacataattagttacactaggtgaatattcgaatgtattttcataattaagttatttggagatataaatgttgataata

SEQ ID NO: 28044 - DNA, 176 bp, Zea mays
  Clone ID: MRT4577_12558C.1
gcaatacttggtgcagattgcgagaaatttgtaattttgccactctcagttttggcttcctgttattatgccatcatgtgtctatgactggtgggaccatatgtgtctatgactggtggacctgatggtatattggcgaaacccacaaatcataatggcaaaattaccaatgtctc

SEQ ID NO: 28045 - DNA, 606 bp, Zea mays
  Clone ID: MRT4577_125590C.1
ctcacgcgttcgctcatcttttctcgtttagaacctctaatatttaccccactcgccagtcgcagccatacctgtcgccatggacgccagcggagccaataacgaggcgaacaagggcgcggccggccgcaaggcaagcagccccaggaagaagtccgtgacgcgctccctcaaggcccggctgcagctcctcgtccgccggatcaggaactacctgaacaaggaccggttcgcccatggcgtgggcacttacctccccgtctacctggactacctcctggactaccttgtcgactaggttctggacttggcaagggacaccgcgaaagacaacatgatgacgcgcatcatgctgctccacatgctcctcgacatccacatcgacaaggagctcgggaagctgatgataggcctcaccatcgtgcacggcaacatcctctccaacatccactccatgctcctgcccaagaaggcggccaacaacgcgggcaacgcccgcaacaacgagcccaagtgcgccaagaacggcaccaagtcctccaagaaggcttactaagtagggacttcatctgcactgtgcgctggagcatgctcgtgtctagatct

SEQ ID NO: 28046 - DNA, 308 bp, Zea mays
  Clone ID: MRT4577_125591C.1
gcttcagatcagcaacctgtacctacagagaagcagagcccaaaggaccgtgctcttttgtctggtctctattatgcgaacttctgatttactgagtggtgacttcctaaccgatgcacgttgttgactgaacattccgtatatctaaagggaatgagaatacgttcacacatctgttcaagcggtgtgagctcacatgcagtgtatgtttttcccgaatgtgaatgccgtgctaactctaatctgtatcagatgactgatgctgatgctagagaccatcccatatttgcctatcctaggcggtgatg

SEQ ID NO: 28047 - DNA, 1457 bp, Zea mays
  Clone ID: MRT4577_125592C.1
gcgttcgcagtcgcccagtgtcagtcagtcagtcgtccctcctgttctgctcctgcctccgctcgtcgtccttcttaaggcgcaggccgcgactgggcgcgcacggcacggccacagctgactgactcctcctgcgttggctgataatcatggctagagctccgctgctcctcgcgctgctgtgcgcgtgcgccgccgccgccggctccgccaatgcggcggggaggaagatggtcggcgtgtacgagctcaaggcgggcgatttctccgtcggcgtcaccaactggggcgccaccatcacctccgttgtgctgccggactccaaaggggattttgctgacgtcgtgcttggctacgacaccattggaggatacgtgagtggtaaaagctacttcggagcgcttgtcggacgagtggccaacaggatcgccaacgcgcgcttcgtgctcgacggaaaggcttaccatcttttcaagaacgatggcaacaacacgcttcatggtggccatagggggttcagtcaggttgtatggacggttaaagagttcgtcggtggcggtgactcgccctacatcacgttgtactaccacagcttcgatggagaacaaggtttcccaggcgacctggacgtgtacgtgacgtaccagctggcggccccctacgtgctgcgggtgcacatgaacgcgacggccgtgaacaaggcgaccccggtgaacctggcgcagcacacgtactggaacctgggcgggcagggcagcggcgacgtcctccgcaacacggtgcagctgttcgcgtcccggtacacgcccgtgggcggcggcctcatcccgacgggcgcggtggcgcccgtggccggcacgccctacgacttcctcgcgccggccgcggtgggcctcgcgcatccgccaggtctccggcggcaaggccggcgtctacggctacgacaccaactacgccgtggacggggagcccggggcgctgcggaaggtggccgtcgtccgggacggcgcgtccggccgggcgctggagctgtgggccaaccagcctggggtgcagttctacacgggcaacttcctccaggacgtcaaggggaagggcggcaaggtgtaccagcagtacggcgcgctgtgcctcgagacgcaggggttcccggacgccgtcaaccaccccaatttcccctcccagatcgtcaggccggggcaggtgtacaagcacgacatggtgttcaagttctccttctagccgctctctgtataggcaacaacaccctggtccctggctaatcaatctactagtacctgttatgattgtcactggcaaagtggcaactgggccttattgggactggagacacacgttacatgatttcaagtcaatttgttttgcggaccgtaattaatgtttatcgcaaagattatgtattaaccaatccaatttaaccaccccccccccccccc

SEQ ID NO: 28048 - DNA, 228 bp, Zea mays
  unsure (1)..(228): unsure at all n locations
  Clone ID: MRT4577_125593C.1
ntcagtttcaaaacagcggagagacatagctccctcctcctcctcatgcatcggaggaccagagctcctctgcgactctgaatcacctgcgactccacttcacaggtgcaagaccgccctcgacgactgctacatcactactgccagcgcccgtgctgtctactcttactgagccagatcgcaccgcgggagaggtataacaaccaggagggtgagaagatcgagcga

SEQ ID NO: 28049 - DNA, 599 bp, Zea mays
  Clone ID: MRT4577_125594C.1
ttcaatacagcgaggcgaagcaaagcaaagcttcaaagcatcctcccctgcgagaagagaggaggacaatggggttcgtgctggtggtctctttgcacttcatcttcctctccatccttctcggcttcggctgcttcttcctcggcaagcacaggggccgggaggagatgcgaaccggcgtcggcgcgcaggtctacggcacgccgctgccgccgcccggcgtcgtcggagtctcatcgccgccgcctgagccgattcacgccaagaaacaagggcccgaagccgtctgattgagatccattcgtttctacctactactgcctatgttttggtgatgttggatttattctttcttctttattttcgtccagaccgtgtcgaggggtgtaagctgagagtgaatatatgtttgtgtctaaaaattgttcattgttacgacttacgaggggagggggtgatggtgtgtgtatgttgtgatatgatttgcaatcacggcaagcaaaaaccagatgtcttgtgtcactgtcctgactagctggtgattggtgatggtgtgtgtatggatatcacatattttataaagtgtttttagagattac

SEQ ID NO: 28050 - DNA, 265 bp, Zea mays
  unsure (1)..(265): unsure at all n locations
  Clone ID: MRT4577_125595C.1
aaaatnccaaaaaaaaaataaaaatccctcttaaaaattaaattctcaaactactcctaaacatggtttccccacaaccaacgaccctcaacagtcaacatacttcaaaaaaaccgtcccccccaagaaaaagtggctaacattcaaacccacgggccttccacaaaacccaaatcacccctctctattatctttgaaggccattaggccccaaaacaatgtgaaaataatccttcctcccgcaaaagccaagatccccctcttc

SEQ ID NO: 28051 - DNA, 468 bp, Zea mays
  Clone ID: MRT4577_125596C.1
ggggaaacactataggtaactcattcccactttagctcctatccactgctcgcttgtaccgtgtggagaggattgaccaagcagcatgctgatcatcctggtatggtgcctccttaagctgtagcgccatgccgctgtcccgcaactgtggtgcgcgcggccaccgctgctcaacgagaagggtctccacttagagataggccccggcgacctcagcagcgaagaacacaatgatcccgacttcctccaccttaaccctttccgccatatcccagatctcctacacctacaccaaggtctcttcgacgtacgagaaatcaatggactacctcgtcaataaagacgtagcgaaagttacggttctcttccacgcaactcgtgcagtacctaacctgcatgtgtgggtacaagcggaggcccaccacttcctacccgaatgcattgccactggagttacagctgctcctg

SEQ ID NO: 28052 - DNA, 343 bp, Zea mays
  unsure (1)..(343): unsure at all n locations
  Clone ID: MRT4577_125597C.1
caaatattgttggcacaccccagaaccnagccggaagagcccaaactaattgtgcaccccaaaananacccnnnnggacaggaaaagaaaagccacgtacagacacacacacagcacaccaggagaacacgaccgccaaaccctagaaacaaccaccacgggaagaacaaaggacaccgaacaggcaacagtggaccgacacacgaagcacagcgagcaaacaaacacagcgacagtcaactcacacgtcaacgacaaagaacaaattgacgccaacggtgccaacacgcgacccaaaacatgctggaaacccccccgcacaccagccgaaataatcaaacgg

SEQ ID NO: 28053 - DNA, 389 bp, Zea mays
  Clone ID: MRT4577_125598C.1
tccgtcttccctggggtgttccggcgggctgcaaaagaggcagggggttggcgctctcacgcgggcggactgctggggcctctgcatctgagtccgcactgattccttccgtgcggctcgttagatgtttaactggttgtagaggcggccaggcttggttgtgcaaaacttatacagtggcctgtgatgaaaagagtataatggtttcaggagccaccttaagctgtgttaaaacctcataggacacctgaagattacatgacctatctaatctaagtttacgttggggaaaccatattggatcaattcagtcttggagggtggaaactgatcaagactcatgcgtaattaaagtgcgcgtggctgattattattcagactgaatgcca

SEQ ID NO: 28054 - DNA, 306 bp, Zea mays
  Clone ID: MRT4577_125599C.1
cgacgagcggtattacgtacgagagggccgcacttctctaccaccgttaaacggtggcgacgtttgaccctctgaccgcataggctctataaccggatcagatggttactaagcttgtcattacggatgctcgccatgcgtttacgagtgaacctatgtggactgactagattagatgatcgcttagcaaatcaggttttgcatactggccgatgtgaccgtcgaatgcttttgcatactgcactgggtgcgaacttaatccgggatgagctgcgacagattgatcttcatcagctgtgtacatat

SEQ ID NO: 28055 - DNA, 190 bp, Zea mays
  Clone ID: MRT4577_12559C.1
ggcgccctcacctcccccccctcgcgggttggcacattcgccccacctccgcgcctcagatgcatccccaatccggcaaccctagcggcggcgccctcctcctcgtctccgcccgccgccgcctccattggcagaggtgatcgaggggcagacacacaccttgggtggctggattagggagagacggagg

SEQ ID NO: 28056 - DNA, 277 bp, Zea mays
  unsure (1)..(277): unsure at all n locations
  Clone ID: MRT4577_1255C.1
tcgtcttgcagcgacgtagctcgcattcgctcagtagtgtctctctagcgctctctctcgtcgtgcttcgtgtcgaggccgagcactggctctgtgagagagaacatctctcagtcagtccagagagctcgatctctctaccgatcatgtcgtgctcaatctcatctctcatcgggtcgatganagctgaaatcttcgctacgtgatcaacgagtccatcatcaacgtggctccgcgttgtgtctgttaatggtggcctcttgtagttcttgataaa

SEQ ID NO: 28057 - DNA, 412 bp, Zea mays
  unsure (1)..(412): unsure at all n locations
  Clone ID: MRT4577_125600C.1
tctcaacacagcacaggcagttctagagagagatatttagagagagagataaatatttccttcttctttcaccaccaccacatccagccttctcccccttcgtctttccccaaccaggtgttcaagatcttctgccgtgccaacgagaacttcttcctttccgtccttgactgctccgtcttgctttccccgttcatccctaatgactaccaccatctactttacatgttcatgcgctttatcacccttttcatttactaataattcatgccggcggtggggctctttaacaattccacatagtctcgtcatcatatcacttttcttttctcattctctaccctnttcaagcttctttccttattatttcctcatctaataatactcttatcttttcttatttaaattatct

SEQ ID NO: 28058 - DNA, 334 bp, Zea mays
  Clone ID: MRT4577_125601C.1
agaataaaatctctggggggggttccactaggacccaagtgccactgctaccacactcaaactcaggcgtaccacgcacgcatctctgatacgtggcaattccagcacaaacaaacacaaatgcgggacgcagctgctacaaatgaactcattcggcgcggcaattttccaccagttcctttgacttgtttatttcgcagcaagagtttgtttcagctgcttgcgcgggggctcagcttcatgcttcagcagggtggtatgcaaaaactttaaaaagcttaaaaatatgtcgttcacacaaagaacacgatacgaatctgtagtacagaaaaca

SEQ ID NO: 28059 - DNA, 289 bp, Zea mays
  Clone ID: MRT4577_125602C.1
ggcggcttgtgcagcaatggccaagatcaaggctcgagatcttcgcgggaagaagaaggaggagctgctgaaacagctggacgacctgaaggtggagctgtcccagctgcgcgtcgccaaagtgacaggcggtgcggcctccaagctctctaagatccgagtcgtccggaaatccattgcccgtgttctcacagttattaaccagactcagaaagaaaacctcaggaaattctacaagggcaagaagtacaagcccctggacctgcggcctaagaagacacgtgccatg

SEQ ID NO: 28060 - DNA, 656 bp, Zea mays
  Clone ID: MRT4577_125603C.1
atgacatcgtggtgatcctcagtggttacgatgatcggtatggtgccagcttcgggtacctggagaaggtggagggcttcaggagcatcttcacacgccgggacatcggaagccatgccgtccacttccttcagaagggcgatcttggggcgctttcgcatcagataccagccaggaaagtgcccaagggcgagggatcggccctgcctcccggggattgctgggaacttgatcctgcatcgttgcctcccgagttgctgtgcctgtgcatcgaaccaccgaaatgacctgcttatggtgtcaaaggttgttgcaggtgttttagttgttaggatcggctgtgtatatggcacataaatcgcagaggaaggctgctggtttgttctgccatgtcaaatagtatgaggatgcgtctgatttgccaactctagctgggcactgctcatgtttatgatccttcttcatgtagtttctcaggtagcatgattaaacttgtagctatttgagtgttaagtcctggtacccatggtgcatgacatgaatggttttttggtactgatggcagactaacactgctttggtatatggatgatttttatgaacttcctttatattcaaaacccaaataaataaaaaaaaaaaaaataaaataaaat

SEQ ID NO: 28061 - DNA, 367 bp, Zea mays
  Clone ID: MRT4577_125604C.1
gcccagccgagtgggaaaagaaaatgggagaaaaaaaggcggtaaagaagagggcagaggggagtccgtagcaaggagaaaaaaacggaggcccagaaagaggaggggggcccccccggacacagaacgagacgaaagaggggaaatttttgaccggaaaaacggggggaacaaggccgaaagccaccgaccccgcccgggcgaaaagagaccggctgcacgagcgcaacgagagagcccagagccacaacaatttggcgggaacaccatgtagcgcgcgccgaaagggagaggggagaaaacccgctggaaaaacacaaggagggcatacacaaaaccggctacgtggggggggggggcactttcc

SEQ ID NO: 28062 - DNA, 669 bp, Zea mays
  Clone ID: MRT4577_125605C.1
gatttcctggccgtcgtcacctctcctgcggcatcaacgaggcctaaccctacggcgggtgtgccgttccctcctggcacgacccatggcgaccgagatggcgtacgcgacgccgatgaaggcgagcgatgccgggcgtcgaaatagggatgatggcctgcgcactacagcgatccgcatcagggtctcgtccaagagggacgagaacctcaaggaagtctgcggggatctagatgatcggcgtcaagggcaacgagctcatggtgatggggcccgggtgcatgcctaccgaggtgctcctgatcgactcacgcaggacagactccctgtgaagacaggcaccaacacccgccgatccctcttgagcagtgaggcattcgcgatagggtgctactatcctcgaaagacagcaccacacggtggccaggaaagcagctcaggtcacccttgacaccaggagtacaggactcgcatgcgcactatccgacgcacgcttaatagtggaagccttatacattctcaagagggttctagcgaacacgatattctcaattcctaccgataacttgtgtaatggacgaattcgacgatttcatatcatgagttgaccgacttatcgaggctacgcgtgatgcatggatcctgtttcctatgatctcacctactgat

SEQ ID NO: 28063 - DNA, 503 bp, Zea mays
  unsure (1)..(503): unsure at all n locations
  Clone ID: MRT4577_125606C.1
tttntttttttttttttcttttttttttttttttctttttttttttttttttttttttaaaagggcaacacaggagttctctagaccaataacgaccgtcgcaggcaggagaacaattgtgccagttcccgtaacaaacaaaaaaaaacgatctggggcaaagaccaaattgtttggttacacctaattccggaaggccgaaccttattttgaaacaccgactacatcaaacaggtgcatttactcttaagcccaactgcagtttactttcttatctccgcagaggctcgggtgcctaaattgatccttccctcatgcaggaggtttagacccaatcattcctgtcttccgggcctaggcaaacatccctccggccttaattacaggggccacatcaccaattggtttaagcttgtactccctggcagagggggggcaaataaaaacagatgtactaaggtccacggcgaccacatcccatgtcttgaaattcttccaagccc

SEQ ID NO: 28064 - DNA, 359 bp, Zea mays
  Clone ID: MRT4577_125607C.1
cccacgcgtccggttctagatcgcgggctgccgccctttttttttttttttgtttttttttttttttttttttttttttttttttcttaccgttttttggtcaactatgcttgaacaggtctattgcaactagcaccccatatgcaaacctatcaaatgaaaatgtcattagtggcataactcctgatatcatggtgaagatgtggcccaaaaatatgtattgtctataaaacaatccttctcaacattttggtagtccccattggaaacattttacaggtccctggaaacttaaaagtcaattaacttttatgttggagcttttcaagaaaaccattttgctaaaatgcattatcaaa

SEQ ID NO: 28065 - DNA, 318 bp, Zea mays
  unsure (1)..(318): unsure at all n locations
  Clone ID: MRT4577_125608C.1
gaaggcntcgcctaaaattggcaacgataatcttgtgcatcaccacctgtacactgcataccctatttcctgcattaaactggaccgattcataacatatttgcaggaaccgttcccttgcggctggataccctggactattattggctacagcctttaaacctgatttaacatgtaaagaaaggttcaagctcactgagcaactaaaattttgctttgatagccctgtttttaagcaaaaacataccacactagtttgttgagataactgcccacacagttcactctaagaggctgatccccatcccgacgccggac

SEQ ID NO: 28066 - DNA, 425 bp, Zea mays
  Clone ID: MRT4577_125609C.1
aaagggaaaaaaaaataaaatgggtataaatttttttgggggacctttaaacttaaaaattttggaaaatgcaaactcgcacaaaaaatggaaaaaaaaaaaagtccctaaaaccttttgaaaatttttttttgggaaaaccaacaaattttgggggaccattttgaaaaaaaaatgaaaaccgggagggggggttaaaaaaaaaaaggggaaacccattttttaaaaaaaatttttttttttttaaacctttttttctttttttgacttttaaagagggggtggcccaccgcaaaataaaagggggggggctcccatggaaattgcccccccccctgaggggaaagaggaaaaccttttctttcagggggaaaaaatttgggaagccctttttttgaatttgggaagaaaaaattttttttttt

SEQ ID NO: 28067 - DNA, 662 bp, Zea mays
  Clone ID: MRT4577_12560C.1
gtagaattcacactagcttgattcaatgaagtaaacctctattataaatacacacacagttatgtactccaccttctaaccacataatttcaatgacacatctacaacgtaagaatgaaaaaaaagaaaatgttaacttaaaatcttaactgcgggtaattgcaacaactgcacacacacacaccttttcttccttttgttttgcctggtgctgtggtttttttgttttctgtccgagtgtttagccggtgtggagccttgcttggatttcttgcctaagctgggtggggggaagaagaagtggctctgctcttcatcttgttctgtacatatgcgtccctgacctctcacgtctcaccgtcctttgcgtatcagatcaaaaagggaaaagaaaaggaagaaaaaggtgtgtgtgtgtgtgtgtgcagttgttgcaattacccgcagttaagattataagttaacattttcttttttttcattcttacgttgtagatgtggcattgaaattatgtggttagaaggtggagtacataattgtgtgtgtacttataatagaggtttacttcattgaatcaagctagtgtgaattctacacagaggcagtacatgtaacttacgggacaattctcttggattaatgaggctgtgatcttttgtgc

SEQ ID NO: 28068 - DNA, 584 bp, Zea mays
  Clone ID: MRT4577_125610C.1
gcgcggagtactattatctatctgcaggtcgcgtcggggcttgaccggactgcgctgcacccatagctagcaacgtccagcgcagcgcagggtgggtggggatcccggcgttcgtggtactgtcacgggcgggattcgcatggatccgaggtgccagggcgggagctgctcggacggacgtcctgaacaaatggagccggatccgatccaagttgcagccgaggaccgcgtgaatcgatcggtgtcgacactggcagcccacgggtttccatttcggcatttccacgtcctgataaaatgcggtgcacctacacacggctctcctcgcacggtcgcaccgtgcgtgcataaacgcggcgctacgacagctgcgttcggttggttgcgcgtagtactagtaggtgaaaggtccctgtagactcgtagagcagaaatatagtactgtatatgatatgacacgcgtcgtgtggcgtggtgacaaccgtcggcgctgtcccgttgtgcacgccatcgttctcttctcgcatgatttgttatggtgcggcgcacgaaaaggcttggaaaacacgcctgttacgccagct

SEQ ID NO: 28069 - DNA, 362 bp, Zea mays
  unsure (1)..(362): unsure at all n locations
  Clone ID: MRT4577_125611C.1
ttttaaacccatttcctcccaatccatcccgtctccaaacccgaactccaagtcgcccggcatcgatggcgcccaaggccganaagaagcccgtggcgaaaaagccggcggaggaggagcccgctgtcgagaaagcgccggccgggaagaagcccaaggcggagaagcgtgtcccagcaggcaagtccgtcgcaagggaggcggcgagggaaagaagggccgggagaagggcaagaatagcgttgagacctacaagatctacattttgaaggtgctgaagcaggtgcacccggaccatggcatttcctttaagccatggtcataatgaactcccttattaacgacattttttaaaaagctcg

SEQ ID NO: 28070 - DNA, 342 bp, Zea mays
  unsure (1)..(342): unsure at all n locations
  Clone ID: MRT4577_125612C.1
nactgattgcactgactcactacacctcacacatgcaacgccgatgcccagagcccactggtctccgctagaagaatgtgagagagagaggagaaagggcagaagggcactggcaagcgaggcatgggatccgcttccgtacgtgcgcctccgcgacaagcatctcagtgcatcaggacctggtcgacgcggacgactgccgcggaggcccaggtgtacaccgcatacgcgcgctgctgtaacaagagacccagggagggctcacgatcttgctggccaccgtcataacggccggcccaacttacaccgagcgcgcacgcgggaagacccggaccaccatgg

SEQ ID NO: 28071 - DNA, 449 bp, Zea mays
  Clone ID: MRT4577_125613C.1
atcggttggtccgctttagttaaaatccaaaagctcttgcgaggtttccttaagctgttcctagtttggcatcaagtttgtctgtgttctctgctcctcctcccctcctgttccgtttgaaattggtcgtctcattttaccaggactcgctcttaaaagaagacttgccattatatgtcctactcagttagggaggaaaagaaggggaatgctggggccaactgccaagctagttatgcacttgtatctaatatattgatttgaatatgatgacctctgtattgtcagtttctgaatttttgcaacacaggtcatgcattttgcctgtagtcaaggatggtgaaggtccaatcatgtgcatatcattggtttcctctggttatgatgaagagatctggattcaatacttgattttttcatttgttttaaaatatttgttaatggttatg

SEQ ID NO: 28072 - DNA, 288 bp, Zea mays
  Clone ID: MRT4577_125614C.1
cgctctcggcccggcaaccaaggcctacctccatgcccgcagctgctcgcccaggcccaaagttgaaatgcccaacggacaagtcaaagatactgcagcaaaggatcatgctccaaccatccagccaccgctgccgccgcccaagaggaagcgcaagacgccttatgactccgaggacgatgtgcccgaagtgtcccgtcgcatgagggacctcagggacatcggatccaaggcggtcgtcccaatggacttggccaatgctgctgcagtctctgctcccaagtacga

SEQ ID NO: 28073 - DNA, 587 bp, Zea mays
  Clone ID: MRT4577_125615C.1
aggaattcggcaccagatagaatgtcagataattgacatcacttcattcactttgctttgatattatggcaaacatcttcatgaatatctaacattgatcctaaatacaaaggtatcttcctgtacactacctgcccttccaaattaacatctcctttatatgtagtagtatcgaaatcaatctcatatattcggttttagttctaccgagggcatgtttgtttcaacttatagattatacaatctagattataatttgttgagattataatctatatggagctgtttggataactagattatatgaatgaaggttattgattttgagatacaaagacaaaaacaacaataccctgcgtgcgtgtgatttgggaaaagaagaaaaatgtcagatttgtaatagtgggtcttttgccaaaaataatctcaaattagctactcttgaggagattatgagattatcataatctgggctttagattatatatttatataatctggacctataatctaattgtttatttacctgctagattatttatgctggattatataatctggacagattatactccgaaagaaacacg

SEQ ID NO: 28074 - DNA, 586 bp, Zea mays
  Clone ID: MRT4577_125616C.1
gtggtggtacatgtggccacgggcccttgtaggcatgcgcattttttttttttttttttttcttgaacagatgatcttttaccatacttctgaaccagttccctcatttgctctgctgggcgagcagagggtggtggtacatgtggccacgggcccttgtaggcatgcgcattttttttttttttttttttcttgaacagatgatcttttaccatacttctgaaccagttccctcatttgctctgctgggcgagcagagggtggtggtacatgtggccacgggcccttgtaggcatgcgcattttttttttttttttttttcttgaacagatgatcttttaccatacttctgaaccagttccctcatttgctctgctgggcgagcagagggtggtggtacatgtggccacgggcccttgtaggcatgcgcattttttttttttttttttttcttgaacagatgatcttttaccatacttctgaaccagttccctcatttgctctgctgggcgagcagagggtggtggtacatgtggccacgggcccttgtaggcatgcgcatttttttttttttttttttttttga

SEQ ID NO: 28075 - DNA, 764 bp, Zea mays
  Clone ID: MRT4577_125617C.1
gggcttgaacagatgatcttttaccatacttctgaaccagttccctcatttgctctgctgggcgagcggagggtggtggtacatgtagccgacccatgtaggcacgcgcagttacattagcagcatggtgtgtcgttttttttttttttttttgggcttgaacagatgatcttttaccatacttctgaaccagttccctcatttgctctgctgggcgagcggagggtggtggtacatgtagccgacccatgtaggcacgcgcagttacattagcagcatggtgtgtcgttttttttttttttttttgggcttgaacagatgatcttttaccatacttttgaaccagttccctcatttgctctgctgggcgaacggagggtggtggtacatgtagccgacccatgtaggcacgcgcagttacattagcagcatggtgtgtcgttttttttttttttttttgggcttgaacagatgatcttttaccatacttttgaaccagttccctcatttgctttgctgggcgaacggagggtggtggtacatgtaaccgacccatgtaggcacgggcagttcccttacccaccatggtgtgtcgtttttttttttttttttttgggcttgaacagatgatcttttaccatacttctgaaccagttccctcatttgctctgctgggcgagcggagggtggtggtacatgtagccgacccatgtaggcacgcgcaccccccttaccagcatggtgtgtcgtttttttttttttta

SEQ ID NO: 28076 - DNA, 1717 bp, Zea mays
  Clone ID: MRT4577_125618C.1
tcgaggggccggccgggcctcgaggcggcacgagctcgccgctcgagacgaaaggaactaaggaaggcgagggccaccatccccaaaacccgtaaaaaaacccgaattgacaaattgagtcgacggggaaggaaataaagaaggggaagagcacgcgccgccgccagcaccgcgtccgccatggccgcctcctcccgccgcgcgtctcaattgctggggtccgcggcctcccgcctcctcctcgggcggggcttcgccgcggcagccgccgcggcgccctcgccggcggtcttcgtcgacaagagcacccgtgtgatctgccagggcatcacggggaagaacggcaccttccacaccgagcaggccatcgagtacggcaccaacatggttggtggagtgactcccaagaaaggtggaactgaacatttagggctcccagtgtttaactctgtagcagaagctaaggctgaaacaaaagccaatgcatctgttatatatgttccaccaccatttgctgccgccgctataatggaggcaatggaggctgagctcgaccttgttgtctgcattacggaaggaattccccagcatgacatggtgaaagtgaaggctgcactaaatagacaatctaaaactcgattgattgggccaaattgccctggtatcattaagcctggtgagtgtaaaattggaatcatgccaggttacatccacaagcctgggcgtattgggattgtatctcgttctggtaccttgacatatgaagcggtgtttcaaacaacagctgtaggattggggcagtcaacttgtgtaggcattggtggtgacccgttcaacggcacaaattttgttgattgccttgaaaagttcgttaacgaccctcagacagaaggtattgttctcattggtgaaattggaggtacggctgaggaggatgctgcgacattcatccaggaaagcaaaacacaaaagcctgttgttgcattcattgctggacttacggcacccccgggccgtcgcatgggtcatgctggagctatcgtggcaggaggaaagggtactgcccaggacaaaatcaaggcactcagagaggcaggtgttaccgttgtcgagtcaccagcgaagattggctctaccatgtttgaaatcttcaagcagcgtggaatggtagaatagacgatggtacagtagagacattgagaaaccgcattttgatgctcatgggcaattgcgagcaattccttccatggcctcaaacaaaactaatgaggctaccttttcttacgtgccttctgtttggaagatggcctgacttcacctggatcaccttccaatgagctcatttccaataagacgtttcagagccatggacatgcttggagtcaatgtgaatgcctaatttcgaatttttattgtttacacatgtcaatctaggtttaccaatctgtttccttgtattatattgtgcggtaaattgccccacagctgaggacgattgctttgctcggtgtcatgtttgagaaaatttcttatttggccctgattgaaacttgtctatcttggcccttgtcctgaaataaaatttcttacctattcgacctcaaaaaaaaataaaaaaaaaaaactcgagactagttcctcgtgccaacctaagagcaaaaaagaagctgtggtggacacagggcgcgcgatcctacggcaatgcgaggagtcccaa

SEQ ID NO: 28077 - DNA, 2164 bp, Zea mays
  Clone ID: MRT4577_125619C.1
cgaaatggatggatgcattggtttgacttgcaagtcgatcgatcgatcgatctcataataattacattgaagattgaacgccccacggcagcagtgagagtgaggtcgtcaccagagcctcctctccccgacgagcccctgcacctcctcccagagcccgcccttgacgacggtggcgagctccagcacggcggcgctgcaggccgcgacatgccagagccccgcgcgcccctcgtcgcgcagctgcccgccctcccacccgccgttttttgcttcacaggaggagccgcacgctgggagggagccccgatcgacctgcgcgccgagctgtcgcggtgaagagcggcagggggagcaatggcgcggccacggacctgctcgtctgcttcccgtcgcgggcgcacctcgccctcatgccgcccaaggccatctgcagcccgtcgcggccgtcggcgtccgagccggtcaagcgccggcacagcaccagccggccgcccagcgggctctacaagtcggccgcgggcgcggccaggaacccgagccgccgcggcgcggacgtccccgtggacgacgagccgacgtcgcccaaggtgacgtgcgtggggcagatcaaggcccgccaggccaagcccaagggccccgggcccggcggtggcggtggcggtggcaagaagaccaagaaggccacgtggctgcaggcgctggggatcaagaaggacgccctggcgctcttggacgccctgcacggcgctttcaggttcaacgttgccggatgcttcggcagcttccccggcgccgtgggcgtggggtacacttccggggaggacgacgaagacgaggaacacgatgcgccgcgcaccgagaaggaaacagaacacggcgcggcattggcccggtggttcatggtattggaggaaggcaagaaggtgtctgccaagaagctgcagggccaaaaaccggaacagagccaccaggaggaggacagggaggaagacgcggccccgccggcgaacgcgctgatgctgatgcggtgccggtcggcaccggcgaagggattagcgaggaggctagagacagaggaggagcgcaatgatgtgaagggcgccgccaagaagactccagatcaggaagagaaggagaacgagggcctggtgctcatgacatactcgccggacttcttcaaggtgtcccttgacattgccaaggagacttggatcgtcggcggtgatgacgcggtcctgcgctgccggagctggaagagatgatcgcagtgactgttcaacaaggaatgtatgtgccttttgtttaccttttactcctccgcttgctttttttcttctttttttccgacactcttgatgattactactactcttgcataaggctcgtgtgaagggtacgatcagcacacagcagaattggtttagccaaggccactgtatgtctgtattggcctcaccctgcaaaacattcctgctctgtaaatagtgctgtaaagtcccttgttaaatgttgcccaggtatacttgatcggtgagggctgatttggtatatctcgttttttcttcctggaaaccgaattgcagacgtatgaggaagaaatctccttactattctatagatcccctcttaattcaacaacagacaaatcaaacattgcatttttcttaaagctattactatgcttctatatgaatacctaaacctatactggtttcagaatgttatatattactagttttttccatttttgttattgaaatgtaaagtgtaaagtgaaaataaaactgcaccaaccaatgtacgtggcaacacaacaagaaacaaagtaggctcaaagttgatatgctacagagaggtatgtaggtgacaacaaatgtatacacttatttcagaagtaagaaataagaaacaaaacatactatcacaatatatgacacacggcacacaattgtctttaatatgttccatctatcgagtatatgcaacaaaattatttaccttctgtaagcagcattttcatagacagcaacaacaagtatactaattgtcttatcaatgtgcacactgcacagtgatcattagacagaacaaaccatgaacaaaactaatgttaatcacaaaggaccttagttgatatgtgtcttactcttttaggtggtat

SEQ ID NO: 28078 - DNA, 314 bp, Zea mays
  Clone ID: MRT4577_12561C.1
gggaggggatcgacgtataccgtatccatgtccctcgtctcagggcaacatagccggtgagtgccctggacatcttcctgactgcaacaaacataaagcctgcctgcattccctttttgtgtgaaactaatttggaaacatgtgaccgatttaaacgcagcagccaccctgctcaagcgcatccagtaagaacgtggcccctacaatcctggagtctatgcacacgggtgagaacacggtgatgatgtcccttgtggtcaccactctgtggacgcccccctgctgggggacaatgaaactgcatctgctcctta

SEQ ID NO: 28079 - DNA, 865 bp, Zea mays
  Clone ID: MRT4577_125620C.1
tgtttcaaacaacagctgtagcttggggcagtcaacttgtgtaggcattggtggtgacccattcaatggcacaaattttgttgattgccttgaaaaatttgtcgatgaccctcagacagaaggcattgttctcatcggtgaaattggaggtacggctgaggaggatgctgcaacgttcatccaggaaagcaaaacacaaaagcctgttgttgcattcattgctggacttacggcacccccaggccgtcgcatgggtcatgctggagctatcgtggcaggaggaaagggtactgcccaggacaaaatcaaggcactcagagaggctggtgttaccgttgtcgagtcaccagcgaagattggttctaccatgtttgaaatcttcaaacagcgtggaatggtagaatagacacagtggtacagtagagagacattgagaaaccgctttttgatgcttgcgggcaatcgcgagcaattcctcggtagatccttctccctggccacaaacaaaactactgaggttttcttttcgtacttgtcttatctttggaagatgtcctggccttcttcacttggataacctttcgctgagctcatttcaataagacgtttcggagccatggaaatgctatgtcgcttggagtcaatgtggatgcctaatttcaaatttttattcttcataaaaaaaaaaaaaaaaaaccaccaactgagggcgattgctttggtcggggtcatgtttgaaaaaaatttttttttgggcctgattgaaaattgtttattttggcccctgtcctggaaaaaaaaaaaaaaaaaaaaaaaaaaaaaaaaaaaaaaaaaaaaaaaaaactcgaaaagagggcgccggtac

SEQ ID NO: 28080 - DNA, 637 bp, Zea mays
  Clone ID: MRT4577_125621C.1
ccccgtcgcctccttcccctgaaccctactccaccatggccgccgcccgcgccgccctcctccgccggggcacttccgcaactacctcatgcccaagatgctcgccgtccccaacatcaacaagttcgccatactcatgcgcgagcagagcaagctttacagacgcgaagtggaggtggttgtcaaagaagtctcaaaggaggaggatgatgctcggcaagcggaagagaaactgaagcagtgtcaagcagcagcaaaacggctcgataatgctctcttggtgttcagacggttcatctccgaagggatcgagttgcgctctcctgtaacgaaggatgaaattgtttctgaggtggcgaggcaactcaacgtcaacatttacccagacaatttacacctggtgtcaccattgtcatccctcggagaatttgaggtcccacttcgcttaccgagggatataccacgcccagaaggcaagctacaatggactctcaaggtcaagatcaggagaccctaagcactttcggtgggcgatctttgctctccttccaaggtgctgaatggtaccaaaaggccatttcagccttcggatgaagagacacgctgaaatagaccgtcaaactcaaccttttccctt

SEQ ID NO: 28081 - DNA, 511 bp, Zea mays
  Clone ID: MRT4577_125622C.1
agccttcgtttaaacgaacttgtagacagtgggcaccccgtggctactggggcgcgcccggcggtgtcccgcgccgctcttggggggggccaaactgccggctgatctggagcggccccttaggcttcgcgggctgagctgttcccgagccggggttactacggccactgacgaggatacgccggcggcttgctccatgggcggtcaatagcgcaagcaggtgacgagcgtggggaacccgatggtgaagcactgggtcaagctccggctgtgcagcgcgtaccgacgctcctgccggcgcctgctactcgtcgggctcgggcctatcctggaggcgagcagtttggagctcaaggccatccattacttgctgctcctggacggggctaaggtaccggaggcgctgcgcgagttctctggtgatacaccgcacgtgagggccggggtgacgaagaaggtgtccagaacgcagtcctttagatgcaccgaggcgggtgctgtcatgcacatg

SEQ ID NO: 28082 - DNA, 308 bp, Zea mays
  Clone ID: MRT4577_125623C.1
tttttatcccacaccccacataacccggcggggtttaattatagggagcgcctcaaacaaccccccacatcacaagcaaaaaaaacaaggccccaccaagtggcacccaccagaccccacacaccggggcaacagctccccgcttggcccaacactccgagaccatgaccaacccaccgaattattcagggcggggccaatccccaaaacaaaaaccgagggaccgagcaccccgggggctacccaggtcgaaaccactcccccgacctcttggtcagggcagttcgcgccggaacccgctagccccc

SEQ ID NO: 28083 - DNA, 485 bp, Zea mays
  Clone ID: MRT4577_125624C.1
agacaaccatccataacgacgtttttaataacccagggggaaaggggggggggcataaccaggaaggcttacaacatcagggggtgcaaaccacaacgggggcaagagcagcacacaagcctgacgatgacagcatcagggtacttttaggactcataaccatcatcaccttcctcacccttataaaactcagcaccaacctccttggagtccttttcgagcgctggaagatcctcacgggccttaaaaaacttgcccttcttcatacccttaccgacataccaatgcacgaaggcacccttggggtacatgagggccaacttgggggcgatgcgggagaacacctccacaacactgggggagttggagaaaatgcacacagggcgctggaccttggccaggtcaccaccaggcaccacacttggagggtgggagttaataccgcacttaaagccaggtgggcaccagtccacaaactgggtggg

SEQ ID NO: 28084 - DNA, 338 bp, Zea mays
  Clone ID: MRT4577_125625C.1
ccctacgctcacttcattgcggaaaaggccgctgcgatgaaagaaacccttgagaacgacacaaactacattactgacctcatctgcacgcgaccaggatcttggatacaactgatagtggtataccttataccaccaaggcgcggcttgatgatcataccacaggctcataaactcatcgctgcattgaatgaaattgtagcacatgatgctgttgatgaggcagccgcctgtaaaatcaagcttgcggcttaatcaagggagctgctcgaacttttgcccaaaactatataggagcaacttatgcttgaaagagatccccatggcaatgatcaagc

SEQ ID NO: 28085 - DNA, 278 bp, Zea mays
  Clone ID: MRT4577_125626C.1
ccttaatttttttttgggggggacttataaagtgcactctgctgctaacaatggggatcgtagcaggaaaaaaaataagccggtggacagcaaagaggagaacgggccgccgacaacggttctagcacagggagaacattgatctggggtgatagcactcaacagatgcaagtctgaaacgcaacggtcttcaccagcgaaatcttatgaagacaatcgcacgaatgcactgccaacatagcaagcaaccaggaatattaatgatccaacgcggggcc

SEQ ID NO: 28086 - DNA, 1246 bp, Zea mays
  Clone ID: MRT4577_125627C.1
acggaagggccgactcgacccacgcgtacggctataacgcgtgcatgcacgccaccttcgtggacgccgacgacgaggccgccgtgcgcgccgcggtggtccccggcgagacgcgggtggtgtacgtggagaccatgtccaacccgacgctggccgtcgccgacatccccatgctggcgcgggtggcgcacgaggccggcgccaagctcgtggtggacaacaccttcacccccgtggtggtgtcgcccgcgcgcctcggcgccgacgtcgtcgtccacagcgtctccaagttcatcagcggcggcgccgacatcatcgccggcgcgatctgcgggccggcgagcctggtgaacgcgatgatggacctgcaggagggggcgctgatgctgctgggccccacgatgaacgccaaggtggcgttcgagctgtcggagcggctgccgcacctgccgctgcggatgcaggagcactcgcgccgcgcgctggcgttcgccgagcggatgcaggggctgggcctgcgcgtgctgtacccgggcctcccgggccacccgcaccacgcgcgcctggccgccatgggcaacccgggctacggctgcggcggcatgctgtgcctcgacatgggcaccgaggagcgcgccaaccgcctcatgcaccacctccagaacaccacccagttcggcctcatggccgtcagcctcggctactacgagacgctcatgtcctgctccggcagcagcaccagcagcgagatgccgcccgaggaccgcgcgcgcgcgggcatctccccgggcctcgtccgcatgtccgtcggctacaacggcacgctggagcagcgctgggcgcagttcgagcgcgcgctcgcgctcatgcagacgccgacgcccacgcaccatctcaaggccgccgccgccgaccgcgacggccccgaagccgccaacaaccaccaccgcaagcactgacgcgcttgcgcttccgagcgtgcatggcctgtgtggacttgtgtgtgtcgtgttcgtgtatatactactagtgccattcaagcaagaatattaaacaccatctgatccctctggttcagatggatcgatatgccagtgcaagcggcttgatctctggggaacctgggaatggacctgaataaatgggatttgtctttaaaaaaaaaaaaaaaagggcggcaaaccggtgtccaaaaaaaaaaaaaaaaaaaaaaaaaaaaaaaaaactcgagaaggggcgccggtac

SEQ ID NO: 28087 - DNA, 759 bp, Zea mays
  unsure (1)..(759): unsure at all n locations
  Clone ID: MRT4577_125628C.1
ccggccgggacattgtccccatttactgtcaagaaactctgcatcgtacatctttgagcaagaggctggtcgagcgacttgaactacatccagctgaatcggacaaaaagccgagagacgtaccaacactgccaccaccaatctacaataatcccgcgtatcgaatcagtagctgtctttttgtcttttccatcccttcaaaggtcaaaaaaagagaagacagaagcttcatagcattatacccgactggcgattccatccatctatcgacatccaaccaaaacccacctctacgagtctcggcactacattcatcgatactttcacactcaattcactgtcaagtcacaatgtgcaccaaaacatcaatcgagcaccgctgcggacatgtcgtcttgcgcggcaacacaagatgttaccgagaggactgtcctggaagaaaagaagatgtcaccaaagtcgacgacgactgcgcgcagtgtgaaaacaaacccagccgattcagatcttcgcggtggtgctcagttggatgctgcgtttgccagtaaggaaatacgagggaaaagaagagagggtaacgagaatgattcgattcggtcggagtaacacgggtttgaatttgggaatacggataatggaagggagggcttttttctgtggcaacgagnttgcttggagtttaccggcctctcaatttattacctagttatgagtcgaataatcaactcattgcaaaaaaaaaaaaaaaaacccgcggnc

SEQ ID NO: 28088 - DNA, 615 bp, Zea mays
  unsure (1)..(615): unsure at all n locations
  Clone ID: MRT4577_125629C.1
cacgcctgcgtgtgctgggcagctattacacggtcgaccttatgcgttcgatggtagaaaggtactatatttttcctgggtagccagaacctttaacacaaaagagtttattattgtgacgtataactcataataaatctcataaaagggcccaaccgatgatggggtgtgggtagaacgcttgatgaccctggcaaatccagacagtcataatggctattacagcagcaaccgtaggagcgtgccattgttacgagacatcgtgctgcaacaactgcaacaactggtgctagcaaaccttgctgcctactttaaaccacataagtggctgacaggcaaccaactaggttgatggaactatgcttcttatttgcagcatcaacaactaccatatagacaaatatctgctggctacccgcagcaatttgtttcattgaaccaactgagcagatggaactctactgcttatttacagcagcaacaactactaccattcaaacangtagctggtgtgagccctgctaccgtcttgaacaaacacagttgttgccgttgtaccatgacgctgtgcctaacgctggcaccctcttacaactgcaacaattggtggcattc

SEQ ID NO: 28089 - DNA, 485 bp, Zea mays
  Clone ID: MRT4577_12562C.1
cccacgcgtccgcccacgcgtccgaaaaaaaaaaaaaaaaaaaaatttttaaaaaaaaaaaaaaaaaaaaaaagaaaaaaaaaaaaaaaaaaaaaaaaaaaaaaaaaaaaaaaaaaaaaaaaaaaaaaaaaaaaaaaaaaggggggggcccttttaaagaaccaaagttaacgtccgcgggctggcaacttaaaaggtttttaaaggggcaaccaaaatcaaatccatggcccgcgttttaaaaaggaaagaacgggaaaaacccgggggtacccaaattaaatagcttggcacaaaatccccttttccaaaaggggaaaaatagaaaaaaggcccccaccaaacccttttcaaaaaattggcccaccttgaagggcaaagggaacccccccttaaccggcaaataaaggggggggggggggggggtaaccccaacaggaaccgttacattggaaagcccctaagggccggatctttgggttttt

SEQ ID NO: 28090 - DNA, 292 bp, Zea mays
  unsure (1)..(292): unsure at all n locations
  Clone ID: MRT4577_125630C.1
cccacncntcctnngctgacataaaataangatnactcnataactnntgaaaggtagaacaaaaattgatcacggtcacccaaccannaccancatctnctctnnagtcttccatcttttgaaccattatttccacttgttgtccattcatcttttttatttcaagaatacagatacatccataattccatcccacatatacatgatttcataattattaattactttcactgcttttcagactttcattcttcacaaattttgttttatcttacacaatcattctatccta

SEQ ID NO: 28091 - DNA, 584 bp, Zea mays
  unsure (1)..(584): unsure at all n locations
  Clone ID: MRT4577_125631C.1
canacggacgccgcggcgatggtggtggaggccatgggcggcgccgggggcaagcggggcagggccaagggcgcgggcgcgggcgccgagccggagcccaagctacgcgcgatggcggtggccgtgccgtctcccgccgcctcgccgtgggcgcagcagcacccggcctcgcggatctgccgcgtttcccgggcctcctgcggcaaggaccgtcacagcaaggtgtacacggacaagggcattagggaccgcctcgtcacgatctctaccgtcgccaccgccatccagttctacgacctgcatgaccgtctcggctacgaccagcccatcaaggccatcgagtggctcatcagggccgctgccgaggccatcgacaagctctcctcgctcgacgcctccgtgggcttccccgcgcacctggccttcgccaaggaccactcctagcctgtcggtgacgacgacgaccaccaccaccagcagcagcatctcacgaggtccggatgcagcagtacgtccgagaccagcaagggctacgtactgtccctctcccgctccgagagccgggtcaaggcgcgggagcgcgc

SEQ ID NO: 28092 - DNA, 347 bp, Zea mays
  Clone ID: MRT4577_125632C.1
ccgcctacacctacatacatgtattctaatgccagagcacaaactacattagcttgctatccttgaacattacccccagccatttaaacacctccactaccccacccataattcacgtaaactcctcaaccttctactccctataatgccatccctgaataatacataccaaaatctctccactctaacagaactacatatctatactgacctaccaatgttcctcatactctcccttaacacctacgacacaatcatttccagactcttaatgaactatctacatcatgcatcaccccttctctacattccacttgttataaacatactcttactatactcttcat

SEQ ID NO: 28093 - DNA, 707 bp, Zea mays
  unsure (1)..(707): unsure at all n locations
  Clone ID: MRT4577_125633C.1
gagcgcttttcatgtggaacaatgatcacatgntcagcttgatagcacaaanccgcccaagtgatcatgtctcttgttgttccagcgctagagcagaacattcagaatcactggaaccaagcggtcctgaatctggctgtgaatgtcaagaaaatgttttctgagatggatggtgaccatttctcgtcgtgcctggccaggtacaaggaggaagaagaaagacttgtgtcgctagaagcgaagcgtaaacttacctgggagaagcttgagtcagctgcagccttccagccagtgactggccaaacagccgtcctagtaggccaccagccgtcagcaaatatgatcgccaacctgatcttctagcccatgcatgccgaacaagcaaatgtgctcttccccccttttggtgaagcgcagcaagtgtaggtgttccctaattttctcatgctttttttttgcatttgttggtgcgagtaatcagtgtagtaagctgtaactatttctggatggttatgttcatcaggcaagaatacctgtaatgtgagactgctgagtgctggcactccttacatgtatctttgccaatttgtggatgaacaaattgtcctacagttgaatttcacctcagcttgcctattatgattggctgacgcagaatcatcaagtgctatttttatttccaaaaaaaaaaaaaaaaaaggccccta

SEQ ID NO: 28094 - DNA, 1112 bp, Zea mays
  Clone ID: MRT4577_125634C.1
gccggccgggcctccgatgagcgacaggagcctgagattcggatttaggattggtattctagcgcgggaatcaaagcggccacacgccggctggagcagcggccgatttggtacgtgcttttcctccacctattgtgcatagccaatttagtgttctgttatggactgccctatctcgatccggttcatcaattggcgcaattccaactggattccattttcccagcccctcttctccgtgcgagagattggttttagcttcgtttgttcaccgccgttgatttttctcgctttgagacttacttgatgcgaattcgccgaaagttcttcgatttttggcacacgtggtggttcccggacgagatctggctggagccgcaacatttccgcctgaattttaacttttcggcgaggtagtttgagtgctacggtttctcgaacctttgggatttttcctcgtcattttatatcactatttctctggccagtttgggtgagcacgccaacgccatgatggcaaacgggaggctccagaagcaggcgttgcttccgccgcggagcccgttcccggcggggagctcggcccgatcgcgcggccgcgggacgcgcaccaccgcggccaccagcgcacgtcgtccgagagcttcctcactgacgagcagccgtcatggctgcacgacctgctcgacgagcccgggacgccttcgcttgatgtcttcgccgacctcgctgtaccaatggaggcaagacgatgagcggattcacccttcgtcccacacgtcgccggacgaagacctatgacgaggtcgtctcatcttgcgacctcgtccaacatggaggcccacgtgtgatccggcccattgtaaaaggccctgcgtggtccctgcgcattacgggcctaatttgtaaaggtctccctataattacggtctataaccctgctttatgggaatattccggtgataacctaggtgcctgagggcacatgcgtccttaacactggacgctgcgcactcagatacctataaatacccccgcacagtgcccttgagaggctagattaacaaagctattgtcatctcgtgcaaaaaaaaaaaaaaaaaaggccccta

SEQ ID NO: 28095 - DNA, 307 bp, Zea mays
  Clone ID: MRT4577_125635C.1
gggacgcgtggggtgtaaacccaattctttaaccctacaggatccaggtggcatgcgcatacctaagacaccgctggagagatgtactgagtaagaagggaagttattggagcttgtgagcattgagctcttggatctaacacgcgagcgaaccagagagccatgaacctatcaagcaagcgacatcctggcctataacagagacatatgctaacacactcatggagcagatgtgattctcgcatgaaggaaggtgtgcttcatgatcatcaaggcactagaaccttaagctttttttcaaagtggt

SEQ ID NO: 28096 - DNA, 134 bp, Zea mays
  Clone ID: MRT4577_125636C.1
ttgtttccttctcgaccgtgcgctaacgtaggcagacaacaggtatgggggcgcgcggcacctatatccgcttccctcttcggccacctgatctcaatcgggcgcgtcagttaggctacttgggccaaggcgag

SEQ ID NO: 28097 - DNA, 862 bp, Zea mays
  Clone ID: MRT4577_125637C.1
gcaccagggagcaaatattcacgttttcttaggcaggaatttgatcttcgagtggctttgcctctgggtgtgctgaatggtgctctcaacgccggagtggctgcgggagtcatccatccattggaaaggggatctgcaggatctgtctcaccacttgtagaaagatttaacttgggtggtaatagggctctcgtgtgccgcttgggtggaccatcttcactattaggcttcaaaacaagagggctacgggcagcaacagagtccagaacacatgaccccaacactcctggcaatggcacttccccttcccctgagctaaatggtcttggaggtgaagtagcggtgacagccttcgccgacctgtcatttgatctgcctctgaagccgctcagggagctgggaatccatggtcatgcttttgtctgtgctggaaatcttggtagattaacggagtgtgatctgcggaagttccctgttactgaattcctgcagacgttcagaagttgtgcaggatggggcgtagttgtgccgaccagactgttccgcgtagagatgaattactgctacatcctaaaacagcttgatcatgatggggggaagacaggcatacagttgaacttctcatcctcctaatttgtaagatgaaaccaaacagagccctagtggtaacaaagctccttgtaaacatctcaatggcaaacctcaaaaaaccggatttattaataaaaaataaggtcaaaaaccggatgtgaaagattacgtaaaaaaaaaaccggagttctttagactttcatggtccactgtctgcgtttgaatgacagccagaaactcggctttgcattggggatcttgtatgttgact

SEQ ID NO: 28098 - DNA, 336 bp, Zea mays
  unsure (1)..(336): unsure at all n locations
  Clone ID: MRT4577_125638C.1
ctcagtaccaggggcagctgntgtatgtgaaagccctagttttgagcctataggagccagggggagatttagctggtatattagcttcagcacccttgttcttgcaacaatgattagacatagtacagcggtgacctttggtggatttattgttacagatcatgacggctcagcagctgcaacaacttgtgctagcaagccttgctgtctactctgagcaacaacagtgttcttccattcaaccagctggctgcattgaactctgcttcttatttgcaacaacaacaactaccattcatccagctatctgctgcctggccccagcaacttcttcca

SEQ ID NO: 28099 - DNA, 839 bp, Zea mays
  Clone ID: MRT4577_125639C.1
catgaacgtggtcctcaacggcggcgaccctgactcgtggcgctcctgccctccggcttcgcgatcctgcccgacggcccatcgtcagggagcagcagcatgctgcaaagcgacggcggcgtcggctcaggtgggtcgctcctgacggtggccttccagatactcgtcgactctgtccccaccgccaagatctcgctggggtcggtggccacggtgaacagcctcatcgcctgcaccgtggagcgcatcaaggcggcggtgatctccggccagagcaatccccagcagcagtagcttcgttgaatccaacagtgttcttatccttttgcattgaaggagcagcaaaattttagagctttcgtcagtgggaagtcaagaacgcacctcagactctcctttgccatgtggtgctcatagtttttactttttcgcctagtttcccccaaaatttctggggttattccaagaaacacttcagtcgccgaaggaaacgagtcaccacgacgcaagggtagttggttcgggtattgacttcctcttcatgttggcctctcggatgctgcttcctctgaatttaggcttcttctcttgtggtgtacaaaaccgttatttagcatgtaatttgtgctgctgctgctgctgcacctgttcagacttgttcagtatccaggattcccccaatagagatttgtgtcccttaatacctctgcacagtgcttgtgtctagccgccatttcagtcccaaaaatgtgcctgtgtaacgcggttgcatgcttgcattattgttcaatgtcttcgttgctattttgcagctttaagttcaaaaaaaaaaaaaaaaa

SEQ ID NO: 28100 - DNA, 537 bp, Zea mays
  Clone ID: MRT4577_12563C.1
acaaaaacccaagtttttgctttggatagggcataccattaatttagcatgacaaaccatgggtccaaaggggccactacaaaaaaaaaaacattttttgttcttttaactaaaaaggcaaaagggttcacggtttttgggtgaactacaaaaatccaggtcctctttttaaagctgccccaaattatgctttggtttgttcccgcaggccccggattgggtttttaaaagggaccgcactaacagggtttattggggaggccccaccggccttaaccttcccaaagtccttggatccccaaaaaccaactgtttttttttttacgggaaacttgccacaaaactcacaaaagtttttgggggggtggaaaacccccatttttttgatctgtttacgaaaacgggcaccatacctgggaccatatttgccaacgattcctgcctttttggggggtttcgccatctcgggggggaggaaggggggggcgtcaccggaagcgaaagcaaaaaggcgtttcgggggggagggggggcggg

SEQ ID NO: 28101 - DNA, 297 bp, Zea mays
  Clone ID: MRT4577_125640C.1
gttggccgctgggagaaggagcagttccgctctctcggataggtcgtacacgatgcataggagtccaacgctcacagcaacatgcgaccagtccgcgcagacgtggcactaggataggtgctcctgtcatcagcttcatatccacacgccgcggccaagctaatacttgcgctgacgccttagcatgaggcggccgctggcgatctcgagtcgccgtcgcctgctcctccttgtcgtcctcgtcgacgtcctctacactattcctgggacatgttcatccaggcatgtcacactcga

SEQ ID NO: 28102 - DNA, 313 bp, Zea mays
  Clone ID: MRT4577_125641C.1
aagccctttttctttcttctttctcttattattatatattctatggctaggttctatctgcatggggttagcatcttagcgtgtaaaattgtataatttggtgtgtgttaactcaagaaaaattggagctgtgatatataagtccttgaaaaggacgggaattttgctctcagagagtgacttatgcttctacccttaaattggaccgaattgaagctaaataaaaaattaaaaataaaaaaattaataaataaataaattaattaataaatatataaaaaatatgtatattaaatcaatgattaaattattt

SEQ ID NO: 28103 - DNA, 143 bp, Zea mays
  Clone ID: MRT4577_125642C.1
gggcactaggctgatggcctatgtatgtgatgtacgccgatgggctgatacctatgcgtacaaagtagcgcatcaaattttgggcccattatttgcactgcattacaaaaaagacgggctgactactcactagcggccctttg

SEQ ID NO: 28104 - DNA, 224 bp, Zea mays
  unsure (1)..(224): unsure at all n locations
  Clone ID: MRT4577_125643C.1
agcggagagagagccaagacgaggacgcacagggccagcagacagggagaacgcnagcgaaaagcaccccccnaanacaaggacgacgagaggaccgacggggacacccancacagcggggggggggcaccgaaaaagaagcggcggggacggggccgggccggaccggcgcagaccagggggcggcccggcaggcccggcggaaccgcccgcgggcggggccc

SEQ ID NO: 28105 - DNA, 465 bp, Zea mays
  Clone ID: MRT4577_125644C.1
ggccgcgggttttttttttttttttttgtaaatgagattggattattgatattagttgaatctgaatgcagccttgaaagggtagatttggaccttgtccatatcccaaacaccagaagtggcatagatatccttgctcaagttctctcgcacttgttctgcggaatcagcaatgcagacaagtgtgcttccggcgaaatccaagctactgggactatcgtctttgggaacagagttgaggatggcacctcccatcttccagtttccgctctcaacattgggtttcatgttatcgaaatgctgtcctcgaacttcaagtcgcttctcaagcataccgggcttgtcatgaacaacgacgagaaactcgtattttccaggaggaacggtaactgcgcctgaagccattgttcgaagtgttctgacagtagtgaaacagggtatagatttggttttgatcccggccgg

SEQ ID NO: 28106 - DNA, 2006 bp, Zea mays
  Clone ID: MRT4577_125645C.1
cattgggaccctcgaggccggccgggagcgtcccgcaaccctccgggcccggcgacacaaggcaaggaaaaaaaaggatggctctccggcgcaacgccggatccctcgcgctccgcgccgccgcctacctccgccgccaccgtccccatcctcctcccccactggccctcgccgcccccgctcccactcccatacgctccccgctggccccgcctttccggcacttcgctgctccgcctggtactcagaccaataggaagcgaggcaaggaggaggacgatgccagcgcgggcccgcgcatgaacaacgccatcgccgctcccttcgtcaggctcgtcatggatgaaggccacaacattctcccccggcatgaagccttgcagcttgcgatcaggatggacatggacttggttgaggtcgataggaaatcagacccacctgtatgcaaaatcatggattttcacagagagaagtataagaaagaaaccaaggagaaagaacgcttgaaaaccaagtctgctattgtcttacgtggtggggagaacaaagaagtgcgatttaaggggaagactgaactaaaagatttgatggtgaaggcagatgggattaccagattaatggagcggggttacagggtgaagtgcatggccatgccctcaggtaatgaaggagaagatttaggaacaccactctctcggttgttaggacttatacaagatgtgtgcattgtcgaaagtggaccacacctggactcgaagcatgcgtatgttattgtcaggcatgtgaagtttgcaacaaagaaaggtgggaagaaagctagccaggccatggaagatgcaggaaaaggtaccagcagtgctgtcccagagtcacccattgatggcagcaataccgaagacatggcagttggacatggtctcgggaaacctgatgatcgtaccatctcagatcgtgttaaggaaacagccacccgtctctccagagactcccctgcccaaaaggaggggcacgatagagaatttaaaagggagttcaattggccaaaatccaacccaggggctgggggaaacagaaataatcctggccagaggggaccacgagatgtgcaacctggcatggaaaagcgagtgcaagatcagggtcctgttgaaaccaacagatacgccgctcggaggcagccaataagaggagacagcagccaaggaataccccctcaaggtgatagaaggaatgaaaatggaggtcgttatgagaaccagagacctcttgaacagcagcataaccggccgttaccgaggttcaaccaaggtggattatcacaacaagatccaaggaacgaaaggagaagttcttttcccctaaataacaaccaaaggcaaccagcaggtggcggtgatcctaatcgagcaagcaagagttttgggatcttcagtagtactcagaaatctggatcatctgagcagaggaagttggatggtaatcctggtaataccgactcgcctaaaaggtttgggatttttagttctgggaaatgaggatggacaaagggctctacagaagaggactctgatatttttactttggcacgatggaccaaatcctacttgaaaggttcaacaaacctgcatacatggatgagtttttttggcggtgtttttttgtaaggattcatggacgatttggcgtttgtttagcctcaacagatgtcttgttctgatgatggaaaagggatcccgtgatagcaacattctgagaaatattttctgttgaggggctcttgttggcagggtaaattgctgccgttgtcaagttggaaatattatctggatttgaaatacagtacccctattattttgcgtagacaactgtcatgataatcatctgtacaaacaagcagaacccagtgatatattttttaaaataattatcctttgcttaggcttcaagaaaagcgcttaagcaaggaaaaaaaaaaaaaaaaaaaaaaaaaaaaaactcgagcccgg

SEQ ID NO: 28107 - DNA, 453 bp, Zea mays
  Clone ID: MRT4577_125646C.1
ggcaatatatattattttgtttagcaatacccagaaagagctctcatttttttgaaaaaaataatcatggtctggatccctaaaagctcagcaccgccgagtatctctgttcgatcactgtacgtaacgtacgccatatcaagaccgaccgaccggtcgcctctgcaggtacgtacgtgtcgcgtatatgtacgtacttggtttccatgccaacaaaaaaacaaaaacaaggtgcgtcacatgcttttaaatgattgaatgaatgaaagtcacacacctcgcccgaatccgatgtcgtgatcgccgaatcgccgtcgacatcagccggcgcccggcggtgaaggtcaagaagagcattactactagtgagatcactgattccgtacagcagcactaccacctggaactagcttagcacgcagtacttctgcctagcgcggacgcgtggccgcc

SEQ ID NO: 28108 - DNA, 383 bp, Zea mays
  Clone ID: MRT4577_125647C.1
ggttggggtttttttttattttttttttttttcctaattttttttttttttacccaaaaaggaaactttaaggaaaaaggggccaaaatttgggaaccaggaccaaaatgtcaaaaaacgaggtgatgttgtaaaatggaaaggaaatcgaaaacaccggaattcattaaaaaaggccccaatggggggataaaaaacacggttaaacacccagggccgaaaaacggccaaagaggcgcaaaaaaagggctagggggggcccttgtccttttgtgttttttggggagcccaaaaagtgtgggggggacaaataatcctaaggggcgcattctcggatgaaccaaccgggccctcaggtgggacttcaagactttgtttcccaa

SEQ ID NO: 28109 - DNA, 561 bp, Zea mays
  Clone ID: MRT4577_125648C.1
actgagacatagcacatcagtatcttaacaccttgccaaaccctgaggcttgaagaactcgaagcgtcataaataggctagcccgacgaagatcgacatggccgaccatggcgacgagatgacgacgaacaagaaggtggtgctgaggaggtacgtgacaggctacccgacggcggaggacatggaggtggtcgtcacctcccacgtccggctgcgggtgccggaggggtcgacggccgccgtggtggtcaagaatctgtacctttcctgcgacccgtggatgcgcggccgcatgagcaagcacgacgacggcgacgccgtgccggccgaggacttcgtgcttggagaggccttggtcaatttcactgtcggcgaggtgctcgattcgacgcacccggagttcgacgccggcgacctcgtctgggggatgagtgcatgggaggagtacaccctcatcacccaaacggagggcctgttcaagatcaaccaccccgagctgccactctcacactacacaggtgttcttggcttggcagggctcactgcatatgctggactttt

SEQ ID NO: 28110 - DNA, 300 bp, Zea mays
  Clone ID: MRT4577_125649C.1
tcgatgcacgcctgcggtagctcggaattcggctcgagttcactgctcctcagccctgtaatcaatcaccccccgcctcttacaggcggggcatgtttgcctagattgggcggcatctcaccatggaggcctcaccgtcatagatgatctcactgtcgacaagttctatgcaggtgacaaggcccacacaacataccagccgacggcaccaatgcccaacacctgtgtgtgcctcctgagacagctaactgacattaatactcgacgggctaactggacactctgcacccgggaaggctg

SEQ ID NO: 28111 - DNA, 143 bp, Zea mays
  Clone ID: MRT4577_12564C.1
tcacaaaatggtgcccccggttcaggtctctccgctcatcaagttcggccggtactccgctctgatcctcggcatggcatacggcgccaagcgctacagttacttaaaaccccgggcagaggaggagagaagaatagcagcgg

SEQ ID NO: 28112 - DNA, 771 bp, Zea mays
  Clone ID: MRT4577_125650C.1
aaaaaaaaacatgcacactgaaattgaaaattccattcttggactgcaaataaattaccaaacatagtcatcttagtgtttcatccggtaaagtggccaccgttgtactgccatcagcacatatgttaaataagtagggaatccaaatgttttgtaaataaaaatgtaaaaatagatgcttggtgtttatgttactaaattaggacggcgtattctggaacatgctgcattccaagtggaatgctcagcggcagcccatgcctcgtataagtaccaatcaatcagcaacactaatcaatgtatctgaatgccaggcgtggagtagcttgtgaaacgctcgagccaccggacgccaccgtggagtggagccaccagcgcgtgccctcgcagtagatcagtgagggcgcagggcgttaccactccggcgagggtggctcgtcgccatggatctgttgtccgaccatcgttgcagcgaacaacggtcgtcgtcacagaaggcagcgggtcacgatgtggagcacgcgcgatcagtcgtcctggaaggcagccggagaccgctagacttggatgtggatccagccactgtctgcttttgtgccgccatctccaacttggtggcgacgagcacagatctgaggaggtgtcgtcgtggcgacgaggtcagaggtaaggcgggccgatggagcggagctagctagcacgggcgacggctgggatgtgggttcccgggcgagttcgggaggagccgaggaggcatgggcgcggtgggac

SEQ ID NO: 28113 - DNA, 329 bp, Zea mays
  Clone ID: MRT4577_125651C.1
gttcagaaaggaaactgatgattgcaaacccccaagggggcaaggcacgaacatagcatataagcatcatattcgtgactctatagccctcgcgggatccatttaagacagccatggaataatactcccggggttttttttatagaagcctcttacgtcgggaatcaaagggctattattatctatgggaaggaccattttattttttgacctgtttggtaagatgctcaataggaagaaccgccttaattttcagatttgcctaagaaaacgatgccttgttttagaaattacgtgtcatcttattgtttagagctgaattttcgagt

SEQ ID NO: 28114 - DNA, 208 bp, Zea mays
  Clone ID: MRT4577_125652C.1
agatggccgccttcgccgcctcttcaacggccgccttcgccgccaagccgggcttccaacgcgcgcgcttaaccggggcctgctccgccaccggcggcgacggcaacggcagcagcagcagcagcgggtggctcgcatcctccgtgaggacgttctcggccgcgctggctctgtcgtcggggcttcttttctcggccgccacctccct

SEQ ID NO: 28115 - DNA, 578 bp, Zea mays
  Clone ID: MRT4577_125653C.1
ccccgcgtccgccacatcccagtcgtcgcctgtgctggctagctccgctccatcggcccgccttacctctgacctcgtcgccacgacgacacctcgatctgtgctcgtcgccaccaagttggagatggcggcacaaaagcagacagtggctggatccacatccgagtctggcggtctccggctgtcttacctgcagtagcagcggcagccgccgccgtgttcccggtgactcgcggcccatcgccttccaggacgactcatcgcacgtgctccacatcgtgacccactgccttctgtgatgacgactgttattcgctgcaacgatggtcggacgacagatccacggcgacgagccaccctcgccggagtggtaacaccctgcgccctcaccgatctgccgcgagggcgcgcgctggcggctccactccacgttggcgtccggtggctcgagcgtttcacaagctactccacgcctgtcattcagatacattgattagtgttgctgattgattggtacttatgcggggcatgggttgcagctgagcattccacttggaatgcagcatgttccagaatac

SEQ ID NO: 28116 - DNA, 183 bp, Zea mays
  Clone ID: MRT4577_125654C.1
gccaactacaaagagtgtgtttgttaacagaaactgcttttacaatacaagggggtcacttgccattttaaaaattcccactccatcctggagatgagactatgttaattcctaaggcctcccacggtgaaaataaaacgccgcgggttagtatataggaatttgaaacacaccctcccaaat

SEQ ID NO: 28117 - DNA, 267 bp, Zea mays
  Clone ID: MRT4577_125655C.1
agctaagccacgattaccggatagatcgtcgagatcgatgccgatggggaagcgctcactgtctgaccctcagtccccttggtgcgagggtcgtcctaggatacataattctgttacgtcatgtgctccactctgcctgtgaattcctgataatagcacaaacgcaacggagttctgttatccttgcgagatacaagcatttcaatcgagagatggctcaatgtatagtcttgccgctactgtaacgtcgaagctcagtgtatggga

SEQ ID NO: 28118 - DNA, 485 bp, Zea mays
  Clone ID: MRT4577_125656C.1
aaggaaaaacacctaacaggaacaaccaccataaaaaacccaggggcgaaaacacgccccaaaccccaaacccccttctgggggggggaacgttccgaccagaacaaaacagaccgggccccccccctatgggtaattttcggccaagggacccaagggttactcatttaaaacacccgggcggacggaaaaaggaacaaagggcctcccctttttgccggacccccccgcgcccgggggttccaaggggctccaactgggggaaagaacgggggcgtaaaactttaaagggcaaaaaccccccccggaggaaaaaaacccaaaagctggcaaaggaaataaagggcccaagaaaacacaaggggcggggaatgggcattaaaaaacttaaaccagggtttccgggtatgccttccaacgggggcttaaagcggggggcaaaccccaatttgggcctggccaaaaaaagcattaaccccatgggc

SEQ ID NO: 28119 - DNA, 305 bp, Zea mays
  Clone ID: MRT4577_125657C.1
ggcgatcgatagcacaaggctgcgtctgcgtgctcggccgccgcccgacccgaccggacaaggaggggaggaggcaaaaaaaaatatatagttagtcacacgcacgcagcacaggagggaggagagggattgagggataaagaaatttcgggagacaaggagagagagacagagatggagaggagcggctggacttggaggcaggcctttcactactcccgcacacagataacgatgtggtagctagctcctcttaggctaaggaaggaggtcgtggccgggatcccgccgatgatgatgacagt

SEQ ID NO: 28120 - DNA, 1290 bp, Zea mays
  Clone ID: MRT4577_125658C.1
atgatgtccttaatcttgctgcttctctctttctcaccacacagttgtgaaggaccagcgaaacaacaacttttagaattgattgatgaactcgataaaaaggcggagtttacttgcttatcgcctatcgagttgaactctaaagcttttgccaatgataggcttgccagtatcttgagagaggaagaagtacgtctcttccagagggccaaggtcaaacatctcctcgaaggtgacgataatacaaaatatttccatttagtggctaacggcaagcaccggaggcaacggattttttcgttggaggatgaggatggtgcatgcatagcggatgaggaagaacttaaatcacatataacgagttattacaagaatctctttgggaagcctgacataacatcggttgatctggatgaatcctttatccaaaacatttctcaagtctctgatactgagaatgaaattttaactgctaattttactatagatgaagttaaaaaggtggttttttctttggagcataacaaagctcctgggccggatggcttttcagtagaattttatcaagctttttgggaagtgattaaggatgatctatttgcgttgtttgtggactttcatcaaaattccctttcggttcatagcttaaattttggagtaattactctaattccaaagaaggacaacgtatttaaaatccaggattataggcctatttgcttacttaatgtctcgtttaaaatcataactaaagtcctttcaaatagaataggtcttgtggctgatagaattgtctgcccttctcagacaacttttatgcgcggtcgaaatattcttgaaggggttattattcttcatgaatccatccacgaattacagagtaaaaaattagatggaattattcttaagctagacttcgagaaggcctatgataaagtcaactggaagtttctccaacaagcgatgcgtatgaagggtttctctccctcctggtgtgcttggatccatacaatagtctctggaggccatgttagagttaaagtgaatgatgacgtaggtccattttttagtacttttaagggtcttcgtcaaggggaccctttgtcgccaatattattcaatattgttgctgatatgttagcaattcttttcgcaagggcgaaagaggaaaatcaattcaatggtattgttccgcatttgattccggagggtttgtctatccttcagtatgctgatgatacggtggtgttcttagatcataacctggagcatatatgctcggaacattaa

SEQ ID NO: 28121 - DNA, 433 bp, Zea mays
  Clone ID: MRT4577_125659C.1
tcggccgggatggcaatccttaacgccaagcgccttgatctttataacctgtacaaagaggtggtgtctcgaggtggattttatgtgggtaatggcataaactggaagggtcaagttttttcaaagatgcgtaaccataccgcaacaaacagaatgactgtatgacatataattagataccgatcgctggtaattgttggagccaacgtgttagacggtcggttaggtcgatagttgctgactttagcgacatgacatattctaatctatatacatatatcatgttagctagtttttaaccgtttaaaggctacaaattatattttttatttttttaattttttagaatatggctggcctttaagttgaaaaaaaaaaaaaaaacagtcgcccctatcactctctatttagctaacaccacttttattttact

SEQ ID NO: 28122 - DNA, 1397 bp, Zea mays
  Clone ID: MRT4577_12565C.1
ttttttttttttttttcgcgtaacaaacttgtaaaatatgatgaaactatacactgaaaatgaccttacacccaaccataatcattcgcgcaaataaaggtgcactattttgctttcctatgagcaacggagccttggaggattctgacgcagcatatattacatccataattccatagctcacggcataagaaaagaacatgaaaaccgaatacagcaaagacattacagactgcactcggtgttcttatcgagtctcgaactgaatagttgaaggcaaaggagcggcaggcggtgaatcgaatggcaggtggaggtgggcgccgcgggagggatcggacgacatagtatagtagcaatcaactgaaggccgccgatagaacatcgagcaccggcgatgccaagcctccggttgctgcgttgaccgcgacattgaagcttgtcttgagaagaaacttggcgacggaggaacgacggctccgtcggacgggaaggctctggccgctgctgctactttcgcatgcagaagcagaactcacctgcgcggtggcggcgctggcatgatgagcactgccggtgttgcttcggccacagtagtcagtgctctggcgaccaccgctgggcgcgccggagacgcacgcgatgtttactttcaacggacaagagcagacgtatggcctgtttggttcgtggctaactatgccacactttgcctaaggttagtcgttcgaattgaagaactaaccttaggcagaaaagttaggcaaagtgtggcaagtgaggctgcgatccaaacatgtccgtagttccacacggacagttcctcgcagccgcgcatgcacgtgccgattgaagggaccaggcgaaggtcgtgccgtgggtggagggggctacggatggtatgcgggagcatggtgcagagagggtgcacatcgaagaggcaatcggtgcagcggtacaccaagcctcccgggggaaattcccccaagcagaggtcgcaggaccatccgtcgcaggaactgggcatgcggcttagcgtgagggtgtgccaggggtgcgcgaagaaggagattgtctccttgaagtaatcgccgcaagcctcgtggatgtcgaagtcgcaggcgctgcagcggtagccggtgaggccggccagcttggaccggcagatgtcgcatacgtggcgggaactgctgttgtactgcgtcttcagaagcacatgtgggtcggcgaagtgtctccggtgaccagcagacgccatggcgatggccaaacaaggatatgcgtttttctttggttgggacttgggaggaagaggaacacgcaggagaactctgaagctaataagctaagcctggtttctggggagtttgggtattcccggccggccgcctcgaggt

SEQ ID NO: 28123 - DNA, 108 bp, Zea mays
  Clone ID: MRT4577_125660C.1
cgaatttatcaatacactaggttatataacagcaaaacagttcaggggctccaaaattggactaggagcttataaagagaaggggcagtacgtggactagaagggcta

SEQ ID NO: 28124 - DNA, 1770 bp, Zea mays
  Clone ID: MRT4577_125661C.1
tctcgagccgattcggctcgagtttttttgatgtacaagcccaaccttttttttttattattttttttttttttttttttttgctccaatggaacacacatgactgatcaaagcttggaaagggcaaaaaaatatcagggaaggaaatttatcaggacagaccacgtcgagggtaaaaacttgggatgtgtaatgcgcggcgtgtctgaccaaatacaaggaataaccaggcatggttacgggatctaagtaaataaaccattacagcttgtcttatacaaaaaaaggttgcccttctaatctcccacgctataatctcaattcacgaacccgctgatctgccctgaatcagtggatcgccaagccttgcatcccttgtgccccctcttcggtgactttgttagcttgtattgtgttgatagctctggcaatgtttcccctccaagctccgagctttgtgcgcagagcatgccaatgttccatcccaaagatcctctctgtgtgccgactgacaatgacagtctggttaagctggtcaaccttgcaatccaatatcttggatgcaattgccttcacaatccattgctccacctcgtcatcattgatcctgagttcaacagtgattgcagaataagggatttcaccagagcatcggctgctcagatcgagcaaagacatgaggcgcattttggttacacattcgtcatggacgagaccataatctttcagcaagtcagagtttgcactttgaaactccaagtaggaatcaagcttcttagtaaggaatatctttagtagttcatacaccaactgatacttttcgtccttctcaagctgtgaaacagctggcatgttgagcaaatcacactgaaagagattaggcgatttaacaaactcgatgattgccgcaacagcctcttccttcgcatcaccaattgtagctgattcatcatctgaccctttgaatgtggcaaggtacttattgagaaagttaaagtactccttagccatgcccttgtggtctttgaggatggtggtgatagcaaggtatagctccctcttctccaaattgtcaattccccactcactgacaaaactgtcaatgttcttgaaagatgggatgatgtactcagcagcctttccagccgtggcgagctcaagagccttcttgtaaacaaatgccttgccgtacgggctcgggagcagattgtacaagctgaaaagaactttgaggcgcagcgctggcttgtcaccgtgttgctgggtgagcttagcgcagatgagttcggtgatctgcagcgcctggtcctcggatccggccttggtgacgaggctgcagatgacggagagaacgcactccaggtctttgtccgagacgcgcgacggggaggtgaggaggaggtcggcggaggcgagcataagggaggccatgtcgagccaccgccccgcgaggatatgctcctgcgcctcgagacataggcgggcgacctcggggtcggcgacttccgggcccgcgtcggcccaggcgagctcagcggtgaagcggaccacggccagcatcggctcctcctccgtcgtgtttacgatggtcgccatattgtcgttccttcgctgcgcgtgagccggagctgctgatgccactgcgaccgccggagatggtgaagggctgaggggaatgggctcgtggggcagcaagtggcggcgggaggaggaaaccctagaagacgatgcgatgcggtttaagactatatccatcaacgtccctcgtgc

SEQ ID NO: 28125 - DNA, 1376 bp, Zea mays
  Clone ID: MRT4577_125662C.1
cctcgagccggccggggtccgcttcggccccctcttcgactcacggcccacccactgcacgcgcaagcgagaggacggctccgcctccgtcccatggatggccgccggcgccacctcatggtgttcacggtcgcggtcactgctaggtggtggtccggcgtgctagatctcacgcctccagggcaggctccctcgcatgggtcgccgtttcctcatggtgttcacggtcgcgctcatcgctcgcagcgcggaggcgtcgatctgcatctatgatcaggagcccttctgcgaggtggacaatgcctcctcctctctggccaatacttctctgccagtcgcctgctcccaaggggaggggcgctggaatacgggcccgcagatggcgtcggctgtgcaggcggccatgatcgacgaagcctcctcagatctgtgctcatcgccaccagggtgataacctttgtatctcgatcctgctcagcatctcggtggtcgtgcggtgccagctggttcggtcggggcagcaggcgctcctggcacccgcctatccccgagggcgcgaccaaagggagtccacgacgaggaagcgacagggccgaaatcagatatgaatgccattggagggttagtactaaattcttgttgatatttatagttttctctatttacataggtacaataagccggcgaagtttcgtggtggaatcagcagggtgcccaccggccggcgaggccccggctgcccgaccggccagccagtcggagtcgggccgggtggtctccgtcgcagggctatcaactttagatcttgaacatgggacccaaatcactggcctggagcacaatatcaagaaaactagcttatgattgcagatctcacccatgggtttaatgagtcaaaaaatcaaaattttcacggaaggtcgatgatgaggtatatgatgctttggccgaacaccttctttctatcttggaggatattgaaaatttgattcaaacaattacatcctctgtcagagcttgagttttgacaaaagaatccattgagaaaatcgactgtgaaagaatatgatcaagtaaggctaggatatccaagactttagaaagatgtcaaagaaacaaaagctagcatcgaaagggttgcagctgcttgcttgtgttgtgcaccacgcagccgagaaggctcacggagtgttgagctgcctcctgggcccacgagcatggagccatgaatctttatgaactgtcgacgcctgacgggattaaacaagggtgctctcaatttgcctcatgggcctgacgacgggatgggctgagaagatttgggctaaaatggaattctggactaggggctaatagttcggttttttggtttaaac

SEQ ID NO: 28126 - DNA, 138 bp, Zea mays
  Clone ID: MRT4577_125663C.1
gctcataaagaggactcaagatttatgtgattgagtgaggatacagatctcaccagtataaggcaatgatgattaaccagggcatatagtctttttatagatgctcggcactgaaacattatactgtagttatatgga

SEQ ID NO: 28127 - DNA, 474 bp, Zea mays
  Clone ID: MRT4577_125664C.1
ggccccaagggttttttttttttttcaaagggtcaggggccccttgggggggttttacattaagggggggccaacatacggggggaaaaaggggggaaaattcggtggggggggggttagtttggttcccaaaggggggccccctcacaaggggaaagttttttggggttttttcctaccccggggctttttggaataacgggtgggggaatgccaggggttgatctggcctcggggggatacaaagaaatagagggggcgatcaaggaaaccactttaaatttttccttcgggcctgaaaaaaggggttccccgttttttccagctttttggggtcccagggcaccaagggggttataaaaaaaaagatttggggggttataaaaattgccaggggtttttgcaccttttgggaaatccccaaactggttttttggccatccatgtttaccaggggatagacaccaaaagggg

SEQ ID NO: 28128 - DNA, 207 bp, Zea mays
  Clone ID: MRT4577_125665C.1
atgtgggactattcccaacatatatgacacgacctatagtacttcgacacggcacaacactatatagagcatgattggttgcatgcgagtccaacgcctggctcgttgtagctcaactggtcagatacgtgctcagaccgcgtcttcgcgtttacaagcaaaattgcttgatttggcttgaattgcacctgcacatccagggtttgt

SEQ ID NO: 28129 - DNA, 1152 bp, Zea mays
  Clone ID: MRT4577_125666C.1
tcttgaaggtggcatacaagtggtttttctcccctagtattaggtttctttcttgcttcattttatgtcctgaaccagctgctacttgtgctagtttttcctactgttattccttgcacttaccgttaccatttactttgtgtctaggcgtcagtggagaagaacgcgtgggaactgaaacagtacattgaggagctctactgggggtctggtaagcaggttctgctccttggtcatagcaaaggtggagttgatgcagctgcagctctttccttgtactggtctgagctcaagggtaaggttgctggcctggcgttggttcagagcccatatggtggcaccccggtcgcctccgatatccttcgagaaggccagatcgctgataaggagacaaggaggatcatggagctcatcgtatgcaaactaatcaagggcgacatcagggccttggaggacctcacgtatgccaagagaaaggacttcatctcccagcacaaactccccatcgatgagctgccgatcatctccttccacaccgaagccagcaccgcgcccacagcgctcgcgtcgctgacccgtgtcgcccaagccgagctcctcccatggctacccctgccacggttcttcctgtctgcatccgagtttgtcgagtcaatgctcgcctctctgaaggtccccgtggttgcgcctgtgtctgcagccatggcggtgacagccctccacctgcggctgcgctatggggagaggagcgacgggctggtgacacggcgcgacgccgaggtgcctgggtcagtggtagttagacccgagaggaggctggaccacgcgtggatggtgtactccacgctgaagatgggcagcgctgaggccgatgcgagcgagatgtgcgaggctctgctggccatgctcgttgagattggcaggaagaaattttgctgaccatctggtcatctggagttctccatggttttggttatatatgcacatatatgtcacgcatactacaaatgatagagtattacagtctttacagggaacagtggaaattagattaatttccttggtgaaagcagggctctgtgataaaaccatatgctacttttttgacaatatgcatactttgtggcaatatgcattaattttggacgaacc

SEQ ID NO: 28130 - DNA, 622 bp, Zea mays
  unsure (1)..(622): unsure at all n locations
  Clone ID: MRT4577_125667C.1
ggccgcgggttttttttttttttttttgtaaacagagatattcatctattcaagtctaccctctcaaagtattatatctcctctgggctcgtagtcgtaaatcatagcataatgttggcttcgagaaaaagctgcaaagatgccacccatgatctaggtattccctagacgtattccaccataataaaaacttttttgttatccctccctcgtacaccccggctcttcgtagcatctacctagcctcgcaagcttaaaagaaacgaaaaataaaaagtaaaaaaccaagtctatcgtccgaggcgctgctcgatcttggccttttcctgggaacggatggtcgcaacgtcgtcccttgtagcgttgtatgaggccgtggcttggttgaaagggttatcggggtgcttctcgaactccttgcggattctggtctttctctggtccagacgcagaccgacgccgctaccgtccttcttcatctcgtcaagtcgtcgctcctcgtacttggcgtatgcggcggngtatcttcgctcgggatgtcggtcgaccttgccatcatccttgttggtcagagacaaagcatcgagggcgttgtcgataccagaggcattgatgtctgaag

SEQ ID NO: 28131 - DNA, 226 bp, Zea mays
  Clone ID: MRT4577_125668C.1
atggggggtggagcggccgcgggggggtgctgatgcgttccctgtttcttatttcttaatcgtgcttcctttttcatccacggcttgatcttggtcctttaagctcgatgaattgatttcttgttggctggagagcctctttcctggctctaacaagaatcattggttgctctccttactttcattcgggggtcgcgtgagattttctgtgaaggcaaccgccttg

SEQ ID NO: 28132 - DNA, 377 bp, Zea mays
  Clone ID: MRT4577_125669C.1
agaggggggatgaccaacaacaaaatagaaaaaaagggagtccgcacgaacaaacgggtaaatgtaaaagacaaaacagaaaaggcccgcctagcaaaaccccagaacattacagaacaggagaaaaggcaccccaagccggaggacccaaagcaagcgcgaacgaaaaaccggcaccggcaaaggaataagcgggaccggccctggacgttgtggacgaataaaccaaaaaaaacaacggtgggaattaccggaaaccggctgaggactgaaaaaaaaagcgttggcacggagacaagcataaaggggccttagaaacatcagatggaggccaaagtgcgatggaaccagcacaggaaatgtcgacaccatgccga

SEQ ID NO: 28133 - DNA, 804 bp, Zea mays
  Clone ID: MRT4577_12566C.1
tcgagccggcctccctgatctcatatagcagctaaagacattaatctctacttcaactcactatctaactacagctatcagctcgtacgctgctgttctgcaataatgtccgagtcgatcctcactcccagacactgtgttcattgccatcaccgctgtcaccttccctgctggtgcagccgccgtggccatggacggcgtctgcgccaacgagctgcccacatgtgacgtccccgccgaggccgctgcacccgaacgcgatgcgtatggcgaccacgccctccgcgaccagctgcagctctctgcaatgattaaagacgcgagcgaatccatcttccaacacggaaagcacttgcaaatgtgttaccaggatgaaggcaccggacaccagtcgtgctccgatagcccacgtgacacagattatcaccgacctgtgccccgacgctacgtgcgcacatgaagcccgtccacttctacctgaacagcacgtgattcatggacatgtagaagaccgaccaggccgacatgctccgaaacgacgggcgcctacaaatccagtacactcgggtggagtgcaactggaacagcttggacatcgccttcagggtggacgccggctcaaacgccaactacctggccatggccatcgagtacgagtccggagacggggacctgcgcgccgtggagctgaagcagagcggcgcggcggcgtgggcgcccatgcaacgctcctgaggcgctgtgtgacagtacaagtccggctccaccaatctgcaggccccccctgtctgtccggctcacctc

SEQ ID NO: 28134 - DNA, 282 bp, Zea mays
  Clone ID: MRT4577_125670C.1
tcccgtcaacaacagcccacgttgcactgactgcatctcacatcctctgtggctccggcatgaatatgggggtatcctcatgtgacatagctaaactgggcgttccacaagccatgttgggatgaggcaagcggatagagcccgaccttctgccataccaagttgcgaggaccgctgtagaggctatttgaaaacatgcagagctcgcacatgttaccaccacactggatactcaccagcgtgtgacggaagacaacgtagaagccattttatccactggcg

SEQ ID NO: 28135 - DNA, 888 bp, Zea mays
  Clone ID: MRT4577_125671C.1
ggattgctgctcgtcggtgtaattcttgtccactttcgagaagtcgaggtccacgactctgggcggcgcgtgctccgggttccttatcgggtcgtacagcggggacgccgcgtcggcgaactccggcggcacccgcatcccctccggcacgtcccagctccagaacggcacggcgaacccggggtcgcccaggagcctcgccgcgacgcgctcgaagaagtagaggtaggcgcggtggaaggggaagaagagccacgagaagtggatctgcacgtgcagctccggccgccccgcctgccggtacgccgctgtgcagtaggcgcagtggatgttggcctgctggtagaagctgcgcgggtccgactccggaagcgccttcatcagcgccaccgcgcgcgcgtacctggcgacgctgtccgcgccggcggccccgtgcgctggccgccgcgtccggagcggctcgcctgggtcggggaacgtgaagttggcgacggcagcgtcggacgccggcgtcggcgggcagcagcggaagggcgggagcgcgtgggatgggaggcggggctcgccgcacgacagcaggtcggtgactatgggcctgccgccgctaccggccttgttgtggcctccatcgccatccgacagctgggccttggcggagccgtcgtcggcgcaggagatgaggtgagggtcgaggccgctggcggcgaggatggttcttggcagggagtaggcgcatggccttgtgacgagcgggaacaaggtggtggccacggaggcgagggcgcagaagaggacgatgcggagtgcgagcagcagagtgccgttgctaccggccatagctagcccagacctatagtttccccgcccccggcctcgaggtacccaatg

SEQ ID NO: 28136 - DNA, 253 bp, Zea mays
  Clone ID: MRT4577_125672C.1
agggagggaccaaattgttataggggccttaaaaaggcataaaaacaccttgggggacccccaaaccccgggaaagggaaaaaaaaaaaagggaggaacacattaaaaaaaaggaaaggtttcaaaaggcggccggaaggttctttttcctggaaaaaaactgtacgttcattttaagccaaccgcccctttgggccccctttacccttttttaagaggtccccgggcttttggccaacctttttaaaaaccc

SEQ ID NO: 28137 - DNA, 199 bp, Zea mays
  Clone ID: MRT4577_125673C.1
acaacactctatagtgagtcgtattagccaccctttttttttttttttttttttttttttaggcccaattagaaaaggtggtttccatcaaagaacccggtggagggaaaataatgggagacatcgaaagttaatttgttacatggtgtggccggtcaagagtgtctctcccgacctattgcaaaacggtaaagaattc

SEQ ID NO: 28138 - DNA, 563 bp, Zea mays
  Clone ID: MRT4577_125674C.1
gagcaggagacactcgtgaagctgtctaatcagtataacatcatgctcaaatgtttttaatattgaatataaattatatatatgtatatatgttttttctaaaataaaaaaatataatcgtgtcgggtcgggccagcactacgggccgaggctacggtccaagcatgtcacgacgttcttggctcttgcgaacattaggtcgtttttgagaccacattggcacaatggactccatggtgtttgaggttgctgaattggatggagtaacaatgatttgtcacactaacagtaaaatgaaaggttatttgttggttttaaacgttagtaattgctacgaagtagcataatttatatgaagtgcatccggtttttattaatgcctgactttagcaatcactccaattttgtcatctttttataagttacttctggtcttattttacaaactgagctcccaaattttgtctatttggtcctgatcagaatagtcattttaattttgtcatcgtcagcgttaatatttgtatcgcccttcttgtctgtgtaccaagacaatacccggg

SEQ ID NO: 28139 - DNA, 510 bp, Zea mays
  Clone ID: MRT4577_125675C.1
aggaccccggcccataagacatttcttttcccacgacgtgaacccagcctttactaggacagtggacagaacgttcctcttgatttaactataaccctaattttgttgggggacattaaccctaacttaaggtataactccagaagtccctcgttagttccagactacttctagaacagaggcgataacaaccctgacaatttctacaacatctttaacaacattgcagacgaaagtgagaacccaaggttgagtgaggaccccatcaactttaaaaggtttattgacaacttctttaactctaacccgttcattaaactgttaagttactcaggaggtctatgttacttacatcgagactcatttcttggacttgctggtatgcttgtagaccgtaacgatggttgtcttgcaactgctgctgcagtaacttctccttgagagagtcacgcagaaggttcaggtcctagagtacgtctaggtcgacaagttcttggtttacacgaccga

SEQ ID NO: 28140 - DNA, 568 bp, Zea mays
  Clone ID: MRT4577_125676C.1
ccccgcgtccgccaagtctcaccgccgtctctctcccagtcccaaatcttgagctcgatcgcaaaccctcagacacttcttcccccagccgacgtacatgaagcacccgagagacgccggcgccatgccgctctccctcgcgctgtccctcggcgccggcgtggcccccgggcacggcagcagcaagcggccccggcgcgcggcgggcggcggggacggcgagttggtctgcaagacgtgcagccgcgccttcgtctcgttccaggcgctgggcgggcaccggacaagccacctgcgggccggccggcacggccttgcgctcgggatgcccgcgccggcgccggcgaaggaggcgccgccgcccgcgacgacccacctgtgccacgtctgcgggctcggcttccagatgggccaggcgctaggcggccacatgcggcgccaccgcgaggaggctgccgccaccaccgcgcaggcgccgcccgtcctcctccagctcttcgtgtagagttttgcccgtccacggagtctagctagtagaaggaattcttcgcgttccctgtcgtcactc

SEQ ID NO: 28141 - DNA, 589 bp, Zea mays
  Clone ID: MRT4577_125677C.1
ggcacgaactacttttttttatttttttttctttttttttgttatgcaacaagggtagtacaaaactcataaccatgtatgccttacatttcgatgggccataaaaaattaagacttaatagcatcacggttgcaacgaaaggaaaaatactccatgaccaaggcaaacattagccatccatattattacgttgttcaccgccacaaactgcaaggcatggtcaacaagcacgagcacatctttaaagcttccacgaggcaaccaacaagcaaccacaaaaccacccaaaaaaaaacattaaatcttggcaaaagcctacatcaacttggctccagttgggtccttcttctccacactctggatgactacgacaggcaccggctgtctcatgtaacggacagcaaatcgaccaaaaggaggatactgagaaaaggtctccaccaccatgggcttagtgggaaccatcttcaccataccagcatcaccgttcttgagaaatttgggctccttctccaactccttgccggatcgcctatcaatcttggtaacgagctcagcaaacttgactgcaatgtgtgaggtgtggca

SEQ ID NO: 28142 - DNA, 479 bp, Zea mays
  Clone ID: MRT4577_125678C.1
gcggaaccccgggtagacccacgcgaacgaagcccgattcccaatccagcaaaccctaccagcctctagcaaactcagagagggacccgaaggcacccaaggcggagaagaagccggcggcgaaaaagcccgcagaggaggagcccgcggccccggcggagaaggctcccgcagggaagaagcccaagggggagagccgcacccggcgggaaaatgcggcggcctggaaggcggagttgacaagaaggggcggaagaaggccaagaagagcgtggagacgcacaagatctagatcctgaaggcgctgaagcaggtgcacccggacatcgggattcctgcaaggccatgtccaggatgaactccttcatcaacgaccaactcgagaagctcgccggcgaggcggccaaactcgcccggaacaacaagaagcccaccagacctcccgggagagccagaacctcgatcggctcgatctaccc

SEQ ID NO: 28143 - DNA, 299 bp, Zea mays
  Clone ID: MRT4577_125679C.1
ggttgaatgatatgaataatggaaacttgcattgtatgcatgagttgaagattaaagtgtcattggaagaatggatctcacgggaatagttgtcagtagcatatttgaaatgaaaaattggatcgacaagcttgggggaggatcaagtatagaatcttaaggtgttctatggtctaatatttatcaggcagtctttatcatgagctttgctagttgctgaacatgcagtaagactgcatggttgatatggtggtgtttgttgaaatataatataagtgaatttaccacctcttcatatc

SEQ ID NO: 28144 - DNA, 593 bp, Zea mays
  Clone ID: MRT4577_12567C.1
cccagcgtccgcccagcgtccgcggccgcgtgggtacggtggctttgcaaagctgtttgtttggtttaatgtctcggaataatatgaattggctgcaaaaaaaaaaaaaaaaaaaaaaaaaaaaaaaaaaaaaaaaaaaaaaaaaaaaaaaaaaaaaaaaaaaaaaaaaaaaaaaaaaaaaagaggggaacgcgaaaaaaaaaaaaaaaaaaaaaattatataaagacaccaaaaaaaaaatacaaatggccttatattttacacacctgaaaccagaaaaaaaccctggggttccccaatttaatccccttgaaaaacacccccttttcccccgctggtgtaataccgaaaaggccccctcaaaactctctttcaaaaaggtgtacaccctaaatggcaaatgttaccccctctttaacgccccattaaacgcgggggaagaggggtttacccccagagtaacctttacatttgcgagggccttagcccccgctcttttaactttttcccctttttttttccccactttccccgctttttcccctaaatttttaaaaagggggctcttttttgggctcccatttagagcttt

SEQ ID NO: 28145 - DNA, 292 bp, Zea mays
  Clone ID: MRT4577_125680C.1
ccgacgcgtgggctcacgctttccgacatctcaacaccacatagctctttacatcttacgggtgtccgctcatgcgcagtccgagaaccctgtaaatctcttcaaccgctggaccttcgactatgtccaagggaacgatttatccctgaacgactacctggactgaactgcgagctagcacgctacattccagactcacttcgacctgacctactgcaagatgcgaatactgaaggctcaacgcgccctctgcgatcgcctcaccaactcgctcatgatgcacggactcaac

SEQ ID NO: 28146 - DNA, 129 bp, Zea mays
  Clone ID: MRT4577_125681C.1
ccttcttctagctagcccctcacgcgcttgttggtgccctgtcgagtcgagcccgcatttatgcacgatcgagagcgagtgcaatacatgctgccgtttagagctttgcatctttaatatttgtataca

SEQ ID NO: 28147 - DNA, 362 bp, Zea mays
  Clone ID: MRT4577_125682C.1
attcggctcgagctggccggggcagccaccgttcgtctctttctgctccggctaccttgggccgccgctgtaggcgctgggcggagccacccgcctgtgtccctgtgtgctggcctcgattcgggcctgacttcctaccgcgctctccatgctaggggctgtaataactatgcgatggcccttcgccaccacgccgtcggtcgcgcacgccgtctgccgtaccaaggaggcaccacagacgccatcgcctacggggatggaggccgattaccacaaggcccatggagtagaccgagggccgggctactgcgagcccagagcggcctaccacttgctcgccatgtgatggcacggccacatgt

SEQ ID NO: 28148 - DNA, 696 bp, Zea mays
  unsure (1)..(696): unsure at all n locations
  Clone ID: MRT4577_125683C.1
cgggtataactactgctgatgcctatggaaaaatgcatagggaggaagcagaatcggtttaatgtgggtcttgttgtcagataactagtttgaagcatcaggaagaaaatggtatcccctttgcaccatcatcatccttacatgcgcctgaaatggagcaaagcacaagtgaccagatgaggcaacattctgtccatcagcgccatgaggatttcaattctatgttcaacaattcaaatgatcactgcgatatgcaaaacaacatggatttcaccgatgataattcacttccttcgaccgcgagtaatgacaggattgagattgacaaagagtgtgggtcaactagaagcattcagtcaaaagctgagggtttctctttctctccaagtaggtctgtagacattggtagcccaaaggatatattgtgcgagagggataaagactgtaatgtggagccttcctcagatggtccacttagtccacgatctccaactttagaggacaaacttgttgacccgttgtgtgcccaagaaaaagctaacgatgaggatgatcaaggcacggcttacagatcgaacctaacatgcaaaggagaatatgatgctaacgacgagtatgatgggggaccgttagtacaaagaagcaaaccggagagcantgtaaatgacaaagataccactgaagatgaaagctcat

SEQ ID NO: 28149 - DNA, 379 bp, Zea mays
  Clone ID: MRT4577_125684C.1
gttattatttgtttattttgtgttatttttgagtttttgataagatttttgggtttagtgagccgcaaaaagggaaaccatttggggttacataccccatggggagatgcaaaaacgcccacaagcgagaaccttggtttttgttgaagaagggacaaagcggcgggacccccgctgggtaaaaagccgggcgacgaggtaacatttattaccccggctgggtgaacgcgttacgggcaatgaacaggggccttgatccaaccattggcgaaagcccaggccaggcttaccaaggggggggacaagccaaaaattattatgtttggccggggggtcaaaaagggggtttacccctccctctccgccgggggctggcaaa

SEQ ID NO: 28150 - DNA, 364 bp, Zea mays
  Clone ID: MRT4577_125685C.1
gacccacgcgtccgcggacgcgtgcctggacacactcgagccggcttgtatactggccaagaatagggcacccagatcctttgtgcacatggaccaacatatcgcgcgaggaagtgatatggtgaaaccgattctcgacaaatacgcccttcgaatgaacggactgatttgtacagggtcgacattgctctccagtagttgatatagctgaagaaaagaggcaaagacctccacgctatggaggctgatcttatctatgtagaccgggtacggagacataaggatgaggctttttgagaagctgtcttacatattaagtataaaaactggcctgcctttttggtgctcatccactgataatttt

SEQ ID NO: 28151 - DNA, 2729 bp, Zea mays
  Clone ID: MRT4577_125686C.1
atcgaccgtgagaccccacgccaccctgtccctttccccgcgccaccgccctctccgtcgccgccgttcgaccgagcgccgctcacccaccccacgagctcccgcgcgggttcatgtccatctctccacacgaacgcaccggaggagcctattacccgcgcccgcacaaccctagccctagtccccaacatggcagcgacagacgccgccacggccgccgctcccctccggcatccgtctcgccacccggcgccgctgcggaagctagcgacggcggggtcggctcgagctccaacccagtggttccagctattggagaatctattaatgctcccgaaaaggtagttggatttataatatctggggaagagaatgatacatgtacacaagaggttggcaatgtttcagaatgccactcttcagaacagggggattccggtttgcctgtagataattttggctcagttgggtcatatcctgagagacctaaaatggtgggatcccttcaggctgaccatttggcttcaggttctactggactgggtaatgggactcagatagctgccaggaagaatcagaccgtgaatgctaatcacctactgaatttccagtatgatcctatttctcggccacagcccagaggccctagaacatatcttccgagaagacaaaggaagataaaaccttacaacaaggatctgttcatccaagcaaactataagtttgttgtattggatactgggaattaccagattgattcaatggatcctgataagatgcttcagtgggaagatattatctgtgtaagatactatagcccttctgaggtacaatgccctatttgcttggaaagaccattgtgcccacagatcacatcatgcggacacatatattgctttccatgcattttacgttatctaatgatgggcaaagatgattatagaggtgagtgttggaagaagtgtcctctgtgtttcatgatgatatcatcaaaggatttgtatacaatacaaattactcaagtccagaatgtccgtgctggtgacgttgtcacatttacacttctgagcaggtcaagaaattcgctcactccttccatcaaaagctcctccagtgaaagttctacaacagatgaagagcattataatgttttctcaaagtttattttgacatctgatgtggagttgtctgttcgagatgcaaaattggatcttagtaattggttgcatatggctgacttaggccttgttgatgacttggagaaacttccatttgtttctgctgctttggagcaactggaagagaagacgaaatattggattgattacagaaattatggtggtagtcctccatcaaaagatagcttctctcctggatctagtttcaagtctaggaactcttttgatgtgaatacttctcagcagatgagtgagcacaagatctctctttcagatagagatatggtcaatggtatttcagaactctccatgtctcccgagttgagtaaaacctctggtaaaggaacaatatctaaagtaaatgagaaatgtaccacaaccattgattcaaatgaacatgacccatacacattttaccaggtgtcagatggccaacacctaattctccatccactaaacatgagatgtcttctaaaccattttggaggttctgatatgcttccacctagaataactgccaaaatattggagctggaaactgtaacacagtctgaggctataaggaagcgctatcggtttttgagtcacttctcattaacaactacatttcagttctgtgaaattgacttgagtgatgtagtgtctcctaactcactggctccattcttggatgaaatcaagaagcgtgagaaacaaagaaaacgagccgccaagaaggaagaaagtgagagagtgaaggcggaagttgctgctgctgttcaggcatcagctatgcgatttgagtatacaaattcctctcaaagtcacaacgatgtcatgttctctctggatgactttgaagccctgggaaacaacgctgggccgtccaccagtccaccagcgagtgaaaggaagcttttctctgatgtaacacgcttgggttttgcatctgctcaagactcacctcccttaagactcggaactggggatgcaaatggccaaagtgaaacctcgagagaccaagggccgttagcgacacccgcattatcatttgccagcatcatatcttccagtagagccgtgactgcagctgacaactcggagatgcagaaagcaaatggcgctgggaagaagggtaagaaagcaactagagtgcttttgtcgactggtggtggccgtcgatactgaaggactatagatgcattggaacgaacagtttggttgtttccatataatgccgtagctcaatgcaatgtgcatagtacataacctggctgggatacgcttgtaagttgtaacactgagcggcagtcgtgtgtgttttgcctttcttgtgggtgtgcttgcgttgtgcccacatcctgtcccttgcatgatctggaaacgagcgcagagaagcgtgtaccataactaataaaggtggcgcaacactttagttgtggaacgccgctagtctgcccggagtgtcaaaatctcccaaaatggtgggcttttggtccaaaaaaaaaaaaaaaaaaaaaaaaaaaaaaaaaaaaaaaaaaaaaaaaaaaaaaaaaaaaaactcgagagggg

SEQ ID NO: 28152 - DNA, 495 bp, Zea mays
  Clone ID: MRT4577_125687C.1
ccggccgggcaccgccaaagaatacatacactccacgacacaatagacagacaactagaaagaaggccgggatagctagaaaccatacctcgtgatctccgcaccagccccaactccatcattgctactaacctctcccgttcactggaccgtgtacccgaaggatcgagatctgtccaatagatgttcgccatcacccaacaccctggcccacgatgattaagcttctgcataggtaactattcaaccatcaaaggatgctactacccagttatgaccatgcctatgggtgaatgagctcgaatacaatgcacccctgatcatgcttatggaaccgccggcctcccacactgggaaattcacccgaactcaaagcttgagctctagattgtagaactcaaagcccataatatatcgcatctgcctacctatgtaagacgctggctctgcctctctagcaatgagataaatcccgaggcacctcatggcacataa

SEQ ID NO: 28153 - DNA, 1171 bp, Zea mays
  Clone ID: MRT4577_125688C.1
gctgggtgttttttttttttttttttttttttttatgaattaaacgagtttctggaattatttatatactaaaaaatcaatttccgaaatcatttattcatttttactaatttctgaactgcgcacaagttatcacaagagtccaggggcaataacgcaaaagtggcccagactcaaactatactgccgcggaactgcgggttgttttctggaaagtgtaagggctcttttgtaaaacgggtcggctgaaggggtatgggtcatcttgtagccgttggattacaatccgagtgctcggattagatttacctcactgatgaaccggtattgaatacgggccaccggatccgagatccatggttaacaattgtccacgccgatgatgcactctatcccgtccgatcccaatccgacagaccagatcaggatacgcgaaaggggtatgcgtgttctcatcacagccgcacaacccagaatccacgatccagccaccgtcatcctcccatccgcccgacacctgggagcaggcaccagcacgggggaaagctcgttggcgccgccaccgcagcactggcagacaaggaggcacgcggagaggctagtctagagccggccttggtggatgccgccagcgccccgcccgccggtgagcttgtttgctcgggcccggtcgaggagcaccatgaaggttcaacgggtgggaacggtgctggcggggcgaagtcaagcagtttttggaggttggttcggatggtcatggaggagaggaagtagcggaagatcatggagcagtcgatggggtcgttcccgggcagtctgcgatggcccattcgctggacgagcgggatggccgcgcagggtagcatgacgatggtacggtagatgcccccgtagagcacggccatcgcgcgcgaagatgcccaccaccgagaggctgttgccgtagcgcagggaagacactgccggcgccatcacctgtttggttcttcggctcccagtgcgacgcgtcgattgttccatggacatctccctcgaacggcagcagaacgggagccacagcgtacgccctctctctctctctctctctcttctatctcccatgcgatggcgcttgcatgaggatgctgaacacagcgttcttttttggcagaactggggatttcccggccgg

SEQ ID NO: 28154 - DNA, 217 bp, Zea mays
  Clone ID: MRT4577_125689C.1
gggagagttttttgaccaaataataccagtttgcatttaatctccgttacgaaagagcacataacgtgcagcaccagagggtacaattaagaggtgtgtaaggatgctgtctaccttacacatgaaacgaaattgaccaggtgggtaactttttttatacgacatgtcacatacagcttacgttgctcgggagctacttactttttcatcatagtga

SEQ ID NO: 28155 - DNA, 200 bp, Zea mays
  unsure (1)..(200): unsure at all n locations
  Clone ID: MRT4577_12568C.1
agacaacanccatcttttagggttgcttaccaatcctgtctccccaaccctnccgcacattgaatccattttatgtcttacgggcncccacnnnctcantttccctaatttcattcactaactccataatactccaactctctaacaagcacctaattttatcttttacatactcaatcaacacctttagctcttgatca

SEQ ID NO: 28156 - DNA, 324 bp, Zea mays
  unsure (1)..(324): unsure at all n locations
  Clone ID: MRT4577_125690C.1
gagaccaactagcaacatagaaagcacaatagngnaccaacacaggcagccaaaatattttgcctccttatgctccttggtctttctgcaagtgctgctacggcgaccatgttcccgaaatgctcgcaagctcctatagcttcccttcttcccccgtacctctcaccagcggtgtcttcggtattgaaaacccaattttcaccctaaggatcaacagcatacagtggatttacttataccctgtctcacatatagctatacatagtcttgggctatgccaacatagaacactcaactggagaactgtgtcttaacagattcata

SEQ ID NO: 28157 - DNA, 131 bp, Zea mays
  Clone ID: MRT4577_125691C.1
ggggcgcgtagtcggtggcgctggagacctgtgagtctggtttgggccatgtgtgacagagatactgtcatagtaagtactgccgacatactacaatgtgactactaaatcgaaacgttggtttatttgtc

SEQ ID NO: 28158 - DNA, 293 bp, Zea mays
  unsure (1)..(293): unsure at all n locations
  Clone ID: MRT4577_125692C.1
ggagcgcttttggtttacctagctagctatgctaggctaggatggctgatcaggaggggggggcgacagaaggaggcggagactacggtgacctacagcgcgggggcggcatgcacggtgaggcgcagcagcagaagaagcagggcgccatgatgacggtgctcaaggccgcgacggccgtgaccttnccggggtcgatgctggtgctgtccgggctgatcctggacggtaccgtgatcgcgcttacggagggcaccgccgagctggtgatctttagcccggagctggtgccg

SEQ ID NO: 28159 - DNA, 1877 bp, Zea mays
  unsure (1)..(1877): unsure at all n locations
  Clone ID: MRT4577_125693C.1
cgagggcccgcggtttgttctagaagatggaaagagaacgccttgatatacgacagtattaacgcattaaactagccagaatggcctcatttagacaggaaaacaaaaaatttagtacataagcttcttcatcaggatactataatgctagtttcaaaaataaaagaaaaaagatactaaaatgctaactcaattacaaaggggatcctaggaacaccacctcctcttccaatgcacaggcgacacttagccaaccacttggaggtgcaggtcgattttgttttatttcttgatttcggactacggctaccacttggaggtgcaggtcgaacaaaaagaaaggctacggctctgttcttgatttcggacgaacacaaccacagaacgggaccctcttctttttcttctgcccgccaccgcggtccttcctcccatacagatagtccctcaaaagcacgcgagtgcgcttatcagagactttgagccttctgtactcgtgctcttcctcaagcttcagcaagacatactgaatcttctgaagctccagttccaaccttgccacattctccgaccctttctgcacctgctcggagatcttcctcctgctggaatacccttctcgctcggtgctcatattatctgacagtgtggggtagttctcagccgtcctagtcaatttgttgttcagattgatctgttccaagacatggccctctgtctcatgcacctgagcgctcacactgctgtactcagagttcataggggattttccctttgactgcccctccattttctgcttcagctcttcaatgctcgcttggatgctcaacagcctctgagcatcagaagtgagcctctcaagtacgttcttgctccacgcctcatgaggctctgcagctcccttcgacgcttctagcttattgattccaaggtctcttccccttgctagctcagacgaagggtgctcactcttcagatcctcgacggcttgtatgtcgtgctcagatgacgaggacttggccgtttggttcttgcagctcctctctgcagcctcccacagctgaagcatatcgtcatcgagttcggcatttgcaccagttccaagcggatagagggcagctcgagcaccatatggtggacaagtggatatttggtccagctcaatatccttcatgatctggacttgcttccctttggagatctcaacatcttgtttctcatgatcagaatatatttcttttccctccatgcgtgagccacctcttgctttaaggtcttgaatttctgcacttactgccgccaatttagctgcagactcagctgactcctgagccgcgcgatctcccggcgcgctcgagagcccaagtcgccgaatcccgtggccccgcgtcccgcccgccgcccaggcttctgaggggtcgcgcccgtcagcgcagcgcgcggcgtgcgcgantcgtgagggtactgnnnagggtttnntgacagatnnaacggcannatcttctnntccaacacactgnacnnatgatcagccaatgagtgctacnngagagctagatanntgtgttcaactcagnncgtttagttctgcatgnttcgtccctgaatgccagccaacttttntctgcaactcctcaatcttgttgaggttcatcgctcaaccctgtcgcaaccgcaacgtccatctccccgtcctcgctgcccggaggcctggcacacctcccagtagcagcggcctcccgaagcattgtttcaagttgttattaggcttcatggatatgtctcaagagcaagaacaggattttggcgtactgctgaagcaaggtgcagaaaggagggtatttgcttcgacatttgtgggacgaaagtgtgtaatc

SEQ ID NO: 28160 - DNA, 259 bp, Zea mays
  Clone ID: MRT4577_125694C.1
gaacttcaacagatatcacaccctcaaacgatatgcgagggaagcctattgtctggtcgaaacaacaaacctagcctgacgactggaattgttatttacccatccaaatttattgacatatcgcaacctccacggccaaatcttgacaagacaaataccgccagctctgtcatacttatcactcgacatttcctcaccatacttttctataaaaaaagcgatcaggaaagcctcaaaacatggaatttttgcatccctg

SEQ ID NO: 28161 - DNA, 443 bp, Zea mays
  Clone ID: MRT4577_125695C.1
atattgccgtgtcgacgagctcacttgtttttgccgcccttgttttttttttttaaagggagacacagagacaacagagggcaacctgacaccttggctgaagacgcacagctcctggtgtgcttggaagacgctttacatttacatgagtgacatgggagtactgatcgaacgaagcgctgatcatgttcccatctacttgcgctgtgtaaggctcacagggactgtgtacacgctgacggcgccatggcatttgtttccagtgcacctacaatggctttaggtcacccaggtggccctcggtccaattgagcagcttctgttcgtactgtgtgaacacgtcctgactgtgcggcagattgcgcgccagcgcgttcaggatctggtgtaaggcgttcccagcctgggcgggctggggtaacagcatggcctgcttcatggac

SEQ ID NO: 28162 - DNA, 552 bp, Zea mays
  Clone ID: MRT4577_125696C.1
ctcgtaggccggccgggaacagccttctccctccacactcttcccttccaaaatgcaactgcatcatcaaactgcgggagagaaacggagcaaaatcagaaggggaaaaatagctaaacccaaatcgataccaaacccagcccggaacgcacgccccccgccgccatcgccggcggccagccactacaagcgcggtgtccggaacctgtactgtactaccaaccccaacagcctggactctgatgagccccagttcatggcctgccatctctcccccctcttcaatctccgactcttgctgctgctcggcgctgtcctcggaaacgccgtccttgtccgcgccggcggggcggaggcgtcagatcgggctgagccggacccgtactcgatcctgacgtggcacgactactcgccgccgtcgcccccactctccccccttgacccggcgttgtcgactgtcacctgtgaggcagaccttcccgggaggggggattccttcacgctttgtcgaggttttgttggtggtttgtttccgggccacttttttccctt

SEQ ID NO: 28163 - DNA, 291 bp, Zea mays
  Clone ID: MRT4577_125697C.1
aggtaattgaatctgttgaagggcatgagggtgcatttactctcacatctgtcacaggtcctcttcctgttgcttttggtccatccaatcctatcagtataaagaaccacagccaaattaatgtttctggacttctcattccttctgttcaagaaaacagagactcatcctcacagagtaagttactagacaatgatattcaccgaagcactcttgttccccagaaaagctttctagctaatatcagcagacagattgaagcagagaaagcttccaactcgagaaattcat

SEQ ID NO: 28164 - DNA, 188 bp, Zea mays
  unsure (1)..(188): unsure at all n locations
  Clone ID: MRT4577_125698C.1
gccctaagcgagcgcgcgggggggggaccatatagaaggggacataaacttgagagccttgaccaatcggaaagatcgtttgcggtagttgaaataacggaattaccactaggttgggcgacgaacggaaactcaatcaaactactaatacgctcaatggaaacatacgggcgggggntcatttttga

SEQ ID NO: 28165 - DNA, 157 bp, Zea mays
  Clone ID: MRT4577_125699C.1
gagcggcgccgcctccaccatctcataacacgggcggagagacgaatacgaacctccaggtgcgggctcattcccgccggcggcggcggcgtctccacagtacagcatctgaccgggacgctccagagacgagccgggatctgtccaaggagccacg

SEQ ID NO: 28166 - DNA, 656 bp, Zea mays
  Clone ID: MRT4577_12569C.1
ggcaaaaaaaaaaccaagctacacactaggccgctgtacgtagtgctataagcctacatgatgatctgtccccctcggcactagccagcagctatgcaaccttctttggcatcaatcatgcagaaaggaattccttgagcagattgcaaacacatggatcttacgctatgctgcatgcgtttgggttctcatcgctgaacatacaagtgatattgatggcatcctctttgcccctgccttcttgcaccggaaagccagcatagccgccgccggcgccgtactcggccacgtaagggctcgtcgggcgatggtggctgtaaaagctgtctacggggtggttcgcctcactgcacatgcggtggccatggccgccagcgccgtacccgtacgggtggtcacgtactgtgcgcaccaccacggtggcgtccacagccgccggggtttctgccggtttggcctccttgtgctcctccggcgcggacgtatcagctggcgcggtctcctctgctctgtcgccggctgctggcgggtcggcgggaggtggtggcgctggcgctggcgcctgggcctcccctttggcttcggcttcttcggcttcggcagcgggaggcggcggctgatcagcctcggctgcggcggccgggtcggtgtgggag

SEQ ID NO: 28167 - DNA, 326 bp, Zea mays
  Clone ID: MRT4577_1256C.1
gagctggagtgtattctagagatgctccgtatttctgaagggattcaagttcaaacctgaaattattgtatttcttctaccaaaaaaaaaaaaataaaaaacaaaaaaaaaaaataaaaaaaaaaaaaaaaagaaaatacaaaaaataaaaaaaaaattaacattaactagaacaaaagacaaaaaaaaaattagagctgaaaagtatgaactacttgggggggcgcttttaaaaaactaatctttagcctacaggaaataaaaaacaatcttttttattttaactgcctaaaactaaaaaaattgggcaccgtttaaaacaacga

SEQ ID NO: 28168 - DNA, 521 bp, Zea mays
  Clone ID: MRT4577_125700C.1
tttatctcacgtcctggaagtgtagatttagatggaaaggatgaacgggggcctgtaccggtcagacaaaatttgatcccacccccacacggttttgtggaggatcatggaagaatttactatatgccagttgtaggaacaaagacaaagaaacctgatgggagctgggactcacaaaggtatacatacatgcaattatcatggtaatgatggctttgaagatcgttctgtactggactggtacctgcatgtagaacttgagcggttgtaaccttcagtccactgcattattactttattttttccattactttcttttattttaaattttcactattactttttctatatttctctttatatatattccttctttttctcttactctttttttcctttttatttctcatctttggtttattaatttatttttctgaccgtttttctctatagatattttctctattatagtgtaagtctattacattttggggggtttttttttctcctctgtttttttt

SEQ ID NO: 28169 - DNA, 1126 bp, Zea mays
  Clone ID: MRT4577_125701C.1
ttcatccagcggggcatctgctccaggtcagaccacagttgccacaccaattcgatgggggcatccacttccacttgcacgctatgttctaaccaattagccatgggttttgccgatgtttaccaaaattactgagatgccaggactgcagtttgcaaacgggcttggttggccaaaatcgcctgggccgcttgacgaccggacagggtggccccctccatactatcgatgtaatcctgttgggtgtagctaccggctaaaaagaagttggctatgggggttgcttggctggggcggaacaggtccatgcccggtgcttcccggtacaaagattgggctagtttaattacgctgtaccaagtcatattcaaatccgccgctgaggggaaaagggctttgacttgtttgagtacccgataggcgatcgcctcgttggattctttcataaaagggtcaccgggggtcaataccagttgtaatagggaaccttcccctgggcggtaatagtcggcggggctagtgagggcgaggtcggcaaaacaggaaaactctgcgtcgctggtgtagagcaaattatctaagccaaaggcttgttccaactgtttgcgtttagcgggatcttagtcctgaaagctttccgccggagtgctatcagcgttacctcaacggttacatctacgcttcccgtgaccaattgccggattgtgccatcaattgtgcagtgcaatgtttcaccgtggcggaatcccagtccagaatagttgcccccattgtttttgaccatagcctttggggcctgctgattgtgcaccaatgctccagttcccgcacttggcaaacggcagaaatccaactgatgcaaagccttggtaaccaattggcgatcgccattcaacaatcattactgtacgaacgtttgcaggaggagttatcggaaaggcaaagggccgaacaaaaactgttggaagtgaaccaactgcaaaaaggcatttttgatgtggccaactacatgattatttccaccgacaggagggggattatcagtacctttaatcgcactgcggaggaaattttgggctatacagcggcggaactgattggccagcaaaccccgttaattttccac

SEQ ID NO: 28170 - DNA, 600 bp, Zea mays
  Clone ID: MRT4577_125702C.1
tttggtatctcacacattattgatactactgcaatttctattgggaggagatacgcgaggaccgatgagattggtgttccatttgccgtgacagtggattcggcaacaaacgtgacgatccgagagagggacagcaaggggcagatccgtgtggacatcaacgaggtggcgtccgtggtgaagcagctgacagaaggacaaagcacctgggcagatgtttctgcaaagtatcctgcccatgttggaccccaaggtgaccaggagtgaaaaatcctgccatccttatgtctagccatcgaccgagaaggattgccgagaagattgactagcctaaacataaccgcatttggtatttgacacgatccagcgcggtagtcccccttctcatacatacatgatacgtgctgttataaaatcggcagagctcaccaatgtttttgtttcttgtaaatgtctttttttcttaatatattgtctcacccacccaaacttactatttgagttacttctgaactagttgcccttttgtaaggtcaaaccgagaaaatgaactggatccacagtggaattggaatttaaagagtatggttgtttgcccgt

SEQ ID NO: 28171 - DNA, 589 bp, Zea mays
  Clone ID: MRT4577_125703C.1
tcgctcactgatgactcgctggtggatgagtctctggccatccttgccctgctgtcaggtgaccacgagacagtagaggagatcggcgagaccggcggcgtggcctccatgctccatgttataaaggaagaccagtgcaagcgcaacaaggagaatgcagttgcggtgctcttcgcagtctgtgtgtacgaccgcaccaaactgagagaggttgcggagcacgagaagctgaacgggtccctggcctggctcgtgcagaacggcacttcaagggcaaggcggaaggccgtcgggatccttgacaagatgaagaggaccctgcaccagccgcactactcgtgctagtgccccgcctaccatggttgtgtaattaggggaataagggggggtgttggttgcttcgctgtatatattcagcctgcatatatagctatactcttgtctttggtttggtacatatgaggttataatacagttttcgtcccgcagagtaagtggtggttttccctctgaaacgttattgttcatctgaaattttgcggttcacatgtttcttcagggtctttgcacatggtcctgaatcatatct

SEQ ID NO: 28172 - DNA, 317 bp, Zea mays
  Clone ID: MRT4577_125704C.1
gcagcaccacaaatccaaatacattattccgcaaaaaagggtcaactcgtcacagcattctaagcatgttggggttctatctaggcactggttttttttggttcagaatttcaaggcatatcccaaacagggaagagttccagggaaaaagatttccaacgggggtaactaatcgatcggggctttgcacaacaaaccataaacactggctcccttagggataatctcaaaagggcagtatacacatgatcatttaaactgctattaaaggtcccagctaccaaccgataaatttgaccatcacaactggcactggt

SEQ ID NO: 28173 - DNA, 1179 bp, Zea mays
  Clone ID: MRT4577_125705C.1
ttttttacatttccagggttggaccattgagtttctcgttttcacatttcaatagaacatcaagagcgggattaggtgtaaggctacggagaggctcgcctttaggtgttggagcgtgaatacaagacatttatgggcaaacaaccaaactctttatattccaattccactgtggatcccagttcaattctcggtttgaccttacaaaagggcaactagttcagaagtaactcaaatagtaagttttgtgtgggtgagacaatatattaagaaaaaaagacatttacaagaaacaaaaacattggtgagctctgccgattttataacagcacgtatcatgtatgtatgagaagggggactaccgcgctggatcgtgtcaaataccaaatgcggttatgtttaggctagtcaatcttctcggcaatcggagaatgaaatccatcctggctccttctcggtccatggctagacataagggtggcaggatttttcactcctggtcaccttggggtccaacatgggcaggatactttgcagaaacatctgcccaggtgctttgtccttctgtcagctgcttcaccacggacgccacctcgtttatgtccacacggatctgctccttgctgtccctctctcggatagtcacgtttgttgccgaatccactgtcacggcaaatggaacaccaatctcatcggtcctcgcgtatctcctcccaatagaaattgcagtagtatcaataatgtgtgagataccagcagttgttaatgccttggcgatttccttggcagtagcatcaaactcttgattcttgacgagggggactcagtgccgggttcctgcactgggcggagtgatgctgctgtcgaccttgccggagccgcagtcgcccgtggcgcaggaccccttgccggaggcgtcgaaggtgcagccggagcggcccagaagcggcccgaccacccctgcggcgcgtacagagagcgcgactgccccagcgcgagcgcgaagcccgtggtctccagcggcggcgtccccgagccggacagcaggcccgaccacaccgtgtcgccgcagcggttggtgaaggtgaacgtgatgccgcataccgacccttggaagaaggagaggatgaggacggcgatcgaggccggcgagcccggcaggcgcgcccgagatgccat

SEQ ID NO: 28174 - DNA, 279 bp, Zea mays
  Clone ID: MRT4577_125706C.1
ggccgcgctttttttttttttttttttgggcaaagatgcgtatcgtaacactgataatagaggcgcgcaccgagagagagcgagatgcaggcagggcacgggcgcgagaactccaagcttacatgatcttgcgctcaaatgaaacccaagcagtacgtactgctcgtacgtaaattatctacttgtgctcatagagatatatagagagatatatggaaggaaatgattatgcgcaggagaggttcagctacttgagctgtctgatgacgacatctgcgg

SEQ ID NO: 28175 - DNA, 315 bp, Zea mays
  Clone ID: MRT4577_125707C.1
ccgaaaaaaaaaaaaaaaaaaaaaaaaaaaaaattttttaaaaaaaaaaaaaaaaaaaaatatgggggtgtatataaaaatattagggggggccgatgtgggggatcccatgtttgggagcgcgcggttgcctcgccatggctttttctggggggctccttttgggttggttttatttttctggctttttcctggcaatcctttggtttccttgtggggttccttaccttttttgtcctgggcggttttccccctttgcgcctggggagtaccgtcggtggggcccttttgggctgtttttatccattttttttt

SEQ ID NO: 28176 - DNA, 480 bp, Zea mays
  Clone ID: MRT4577_125708C.1
gccatcagtagctaaggttagtagtaactatctgttttggggcttacagcttcacactttggatggttcttcaattaatagactaggtatgtgtccgtgcgttgtcatgaggtgggagaccgtatggagcggcgcctaggctacaaatatttttttttatttctaaacacaagatacgtgtggtctggtggttagctccaaatttttagaacagagaggtgtgggttcgagtgctcgtttttgcactgtttttttgtgggcgctgggcgtagggagggtgaagccgtagtagcaccaggtgcctacattaggttcttaatagagtagtatagattagaacagtctgcttgtcacttctttaggttgtgcgtacaactttgttagctatttagcctgggattgctaaatttaccttgaattggatgctggcactattctttatgtccggttgggtttcagttaattgggtatgttacctta

SEQ ID NO: 28177 - DNA, 354 bp, Zea mays
  unsure (1)..(354): unsure at all n locations
  Clone ID: MRT4577_125709C.1
atattagcgtcctggcactcgtggacaaacgtccataggtcggtggagatcttgctgagactggggagactgattatgatttctaagccaccggctaccaagcctaccacgcccaagccgaccccgtcaacgtacacccctttttcaaagcctccgacacccaattcgaccgcggcgacgctcacccagtgtgagaagcatgtgacgcccaagccgaccccgccgacgtacacttcaagccctaagcctaccacacacccgactcccaagtcgaccccagcgtcttttacattgacttgtacatggataggattaatgncgaccccaccgacgtacactccttttttaaagtct

SEQ ID NO: 28178 - DNA, 194 bp, Zea mays
  Clone ID: MRT4577_12570C.1
gggaacccccccataatgaaaatttgccctatttttttttttggaaaataaaggctgcccctaccattggatgttttcaaaatgaagggatgaccccaaatagtaccggacggtagtgacaaatttttaaagatgcaagggcacacatataaaccaaactgggggtgcccttggcagatgaaccacattaagcc

SEQ ID NO: 28179 - DNA, 205 bp, Zea mays
  Clone ID: MRT4577_125710C.1
aataacaaacattaatcttatttatgattaatattaactatttggtcataccaaactcataatatccattccataattaatccaaaattgatctaattatatgtacatatcttaataatctaataaatctttcatatggatatgaagaaacaattctaactcatattacattgaaaaaattaaacatactactatgtatttaatt

SEQ ID NO: 28180 - DNA, 234 bp, Zea mays
  Clone ID: MRT4577_125711C.1
aacacaaaaaatatttcacacacaatcccataacaatttttaaatccataggctcatcaatttttacatcacaaaagtctcatccataggctcatcatcacaaaagtctcacaaatttcatcatccagttctaataaaagacaatatctcatacataggcataataaaaggctcaaggttcagaacacaataacatgggagcttacgggcgccgatcaccattgatacctccac

SEQ ID NO: 28181 - DNA, 807 bp, Zea mays
  Clone ID: MRT4577_125712C.1
gtcagccaacgagtcagggagaaacgaacgtagagccaaacccggggctttaaatgtagagtgccaatacgacaacacagcgcttcttgccttttttttttccttaccacaggtggttttgatcgggggtgaagcggatggtaattacataaccacaggaaacgaaaccaggtgataattacagaagctgcagaaaacagatggcactccgacctcgcttcaaggcaagcaaacaagctcgcgcaacagcaaatctcgcgtcaatcaaccaagcggtgagaaaattgggggaatttatttccgcaaacccactatctgcagactacaccttagccaaagggcacgagaaacaacctactacttccgcgatactggccagggctcacatgctaatatgtacagcattcttccaggaagggctcagcaagccgcttgataatgatagtaatccaccttcgcagtgaatactcctatgttttgctaaccgatccagcagctgctgacaatggctgacgatcttccaacaatgtttgagctgaaggaagagaagaaaggctcattctggcagctcccttgtcttgctgatcttctatctccttaccgtctgaacctgttctccccctagaaggtatagaaaaactgcgggatatggatccaggcggtggagttggtaaaggtgaagcagtactgggaagcatttgtcttgccctaaaatggtcttgaactttgggtgtcagagatgcaggatttgctaccaatggggccgagtgggcaaccaaactgggaaatgttgtgttttttgatgta

SEQ ID NO: 28182 - DNA, 182 bp, Zea mays
  Clone ID: MRT4577_125713C.1
ttgtgtagacacaccacaccacacaaccccgggggagttattaggactaggtggccgataaatacgaaaacggcgacaggatggtggctgtaggttgcctccatggctgtggcactattggtggagtgggcgacagcggcggcgtctcggaaggaactggacttgccgttacagaagaacta

SEQ ID NO: 28183 - DNA, 329 bp, Zea mays
  Clone ID: MRT4577_125714C.1
cgccgatcttatttgcagatgcatctttcagaggatgaaggggtactctatttatgcaggttccaaggacaatccgcttagtgcctggatttatgcttattgcgttgatctggcaaaactaattattgtccacttatggttcttaatcattgccattcttaatgcctgttctatcatgaactatctctaaggacagagttattccattttctgttgccctacagttcggaatcttgaaggaatatcttttgttaactggctatagtgctttggaagctacccttgctcctgatgacttgtatttttatttttgggctattgcacaagga

SEQ ID NO: 28184 - DNA, 608 bp, Zea mays
  Clone ID: MRT4577_125715C.1
tcgtttaaatattaatagagctcctgcagagatctgggggggggggggggggggcatcgcccggaataccaccgccctaccctctcttcgcgatcacaggttatgagtccctactaagctccacaaccctggacacatgaagccaccgccaccgaggtctggagaccactcgtccgctcagctacccaccccaacgccatcgccaaagaaggaaagcctgagtcttacctagaggtagaattcggctgcgaacgctagatcatctgcgttgtacaacaacgccaggaacaatggtgtcttatagttctagttctacaagttcttctcaaacgcttcgtagaacaatgccttgtttgcatctaatgccaaatgtgaacagttggtcaatgtgttcaagttttagttgttgaaagttttctcctaggactaacgtcccggaggtcggctagtggtctactgagtgcaggtgtcctacaggaagtgccgagaacagtgacgagataacttctacaaggaggtccgcaggcgctggtagaacagcgtaagtattcgtgccagtcgcagttacaactagtaaaagcggcactacgactacgcttccctcttcc

SEQ ID NO: 28185 - DNA, 192 bp, Zea mays
  Clone ID: MRT4577_125716C.1
acgtccagaccgaggcctacagccgttcaattgttgggaaggtactgtccacgatgcaaagaatctgtctctcagtctactctaactctatgtagaaaattcacatagctcacatccattgaggggttgatgctccaactactacgggttgtcctataatcaagtatcgcgagtggaacgtattgtgagctg

SEQ ID NO: 28186 - DNA, 1136 bp, Zea mays
  Clone ID: MRT4577_125717C.1
cggccgggccgggctatccatccgctatatatcggatcgacggtctccccgcatggacgcagcgagactccgttgcgccgccgccatcgccaccgccacagctgtccccgccgcccgggcgctcccgattcgccgccacccggcctttttccgcgtccccgccgccgttggcctccggttctcgtcgtgccggatcccggtgccgaggagagcggccgcggccatgtcgtcgtcagcggcggcgcaggggacggagcacgaggctgacgcgtggtacgcggtaccgggcctcagcctccgcgaccaccggttcgccgtcccgcttgaccactccagtcccgagcgcggggacaccatcaccgtcttcgcgcgcgaggtcgtcgccgctgggaaagaatacatatctctgccttatttattgtacctacaaggagggcctggatttgagagtccccgtcccacggaagcaggtgggtggttaaagaaagcttgtgaagaccaccgcgttgtcctgctagatcagcggggaacaggattatccacaccgttgactccatcatctctttcgcaaattaaatctcctgcaaatcaggtggagtacctgaagcatttcagggcagataatatagttaaggatgcagaatttattcgtgtacgtcttgtaccagatgctaagccttggacagtcctaggacagagttatggtggattttgtgccgttacatatttgagttttgctccagaaggcctgaaatctgttcttttgactggagggctcccaccactaggagaaccttgcactgcagatacggtgtacagagcttgctttaaacaggtccagcggcaaaacgagaagtactataagaggtacccccaagatatacaggtcgttcatgaggttataagacacttaagtgaatctgaagggggaggggttcttcttccatctggtggccggttaacccctaagatgctgcagtgtcttggattatcaggtctaggttttggtggtggatttgaaaggctgcattatctgcttgagagggtgtgggatcctgtacttgtcgctggagctaaaaagaggataagctattacttcttaaaagagttcgaaatgtgggtagattttgatcaaa

SEQ ID NO: 28187 - DNA, 122 bp, Zea mays
  Clone ID: MRT4577_125718C.1
agttgctgcatctactgagaaacatgctgctgatgtttcatcacatgctaaagagatcccacgaaacattcagccagcaaaagttactgatgatcactacaagagaagtgatggcgcccttg

SEQ ID NO: 28188 - DNA, 375 bp, Zea mays
  Clone ID: MRT4577_125719C.1
gggttggggttttttttttttttttgcattccgcagcttgggaggggttcataattcaagaacaagggttttacactttggccatacaaatggcgcaaaatttggatgcctggataatttgattaccggtagaaaaacacatttgagttcatttccaagagaaatggcaaaaaaaaatcaagagtctgcaagggacagctcttttgttagttaggggggtggggggccctaccatttgttccagcggtacagtaacctaacacgggaaaacagcattacggtaaacaacaacggcattgataggaatctcttccttttgagggggaaaaaggatttttatgggtttctgcatcgggcagcccgggcaaaattatt

SEQ ID NO: 28189 - DNA, 490 bp, Zea mays
  Clone ID: MRT4577_12571C.1
agagagagaggaggagacagatatttcccccgaggtcaagtcgtctcgtcccgtgttgcctttctcctcctccccgcattcgccgtctgcggttcgcaccaccggacaagctcacacatcaagacaataaatagagccttgtctgtttggggccaatcaaaccaaacaacaagttcatgtctgatctcgacgtccaggttccaactgcttttgatccgtttgctgaggcaaatgctgaggactccggcgctggtgctggatcaaagaactatgtgcatgtgcgtgtccagcagcgcaacggaagaaagagtctgacaactgttcagggtctgaagaaagactacagctacaacaagattctcaaggatctcaaaaaggaattctgctgtaatggtactgtagtccaggatccagaactaggccaggtcatccaactccaaggtgatcagcgtaaaaatgttgctacttttctagttcaggctggacttgc

SEQ ID NO: 28190 - DNA, 789 bp, Zea mays
  Clone ID: MRT4577_125720C.1
ccggccgggataatatctgaaaaaaaataaactctcgctccgttgctcgcctcgaggcaaaccctaggcagggagttgatttatccgctgcagccatgagtaagttgcaagctgagtctgtcaaggatgacatctcccagattgctggggatgccaaggagaacatacgaagttcactgagactgtggaacttcccattgctctgcaagaattatgatccacagaaggacaagcgtttcacgggctctgttaagttgccccatatccctcgtcccaagatgaaggtgtgcatgcttgcggatgcccagcatggtgaggagggctagaaaatgacacttgactacatggatgttgaggctctcatgaaaatgaccccgaacaagaagcttgctaacaggcttgccaagaagcaccatgctttcttggcatcagagggcatcatcaatgagattccccgtctcctgggtcctggtctcaacagaggcatgctagatcccgaccctggttactcaccaggaatccctctgagtccaaggtgaccgatactaaggctacagtcaagtctccgcttcgaaaaggccctttgcatgaatgatgccttcagcaacttgtggatgtaggcgaaccaaatccaggagatacatccagatgagcgacagcttccttgattcccttctgaagaagaactggcacaatgtgagacgcctgtacgtcaagagcaccatgatgaagccatacagggagttctaagtctgctcatttgtgaattctgctagttctgggcaccga

SEQ ID NO: 28191 - DNA, 538 bp, Zea mays
  Clone ID: MRT4577_125721C.1
ggtggcgcagccggcggagccttgttgtctctcaccttctcgaagaagacggtgtagccgatgttctcggcgtcccacgagccgaacttgggcacgaccgcgtgcccggcctgcaatcaatctcaatgagcaattgctgcaaattttatgtacgaatttgcatttaaagaaaacgagaaaacaaatactaaggagtaagtccggctacgtgaaaatgagagttgtacatgttaaccaactactggtactagcaggatttgccttgaacagcacatgacatgacagacagctgtatgtacgtacagctccctgcgtctgcgtcttaacaccgacgacgacgaccgaataatacatgctagtccgtagttgcgtgcgagcaccggcacgtcgcagagatacagctagtacgtagtaggtacgcgcgtagctcaagctcttagggcccgaacgatcacatccggcccggcaggcaagtcgccctcctgagggcaggcagcctactgtggagccgacgccggcacatgggctgacaactgag

SEQ ID NO: 28192 - DNA, 442 bp, Zea mays
  Clone ID: MRT4577_125722C.1
actgaaagggaccacaagggggggacggccattattggatgatataacattaaccccacacctcttgttttttttgggtcttcctttttctgggttctgttttggcacaccaaaaaaacctgacccccggatgatctacctagatgaaaataatgataataataagcaaacggaacaaaaggaacaatggttttgaaatcgctttggggaccctgcaacccaacgcaacgcgaaggaacggccgccttaaccctcagggcttccaaaaaaaggggggctcggggaacatggaggggaccacgtaggggtccatgttggaccccgggcgggggtccttaaaaaacccttggcgttttgtttcgtttcccggcccacgcccaccgacgcgccggggttggccaccccccaactaaacgtgttaatgtcgggggtctcttgcctg

SEQ ID NO: 28193 - DNA, 468 bp, Zea mays
  Clone ID: MRT4577_125723C.1
atggctgctgctgcagcagccccttggtgggcctccttatgctctgacactacacccctcctggacaagcagctcgttctcgagctgcaacatgatggtggcgtcgcccatggggacggagacgccgtcaacgaagatgatgtgacaaaatttggcgttgtccctggggatgggcacgccggtgtccaggatgtggtgaaaaaattagcaggcgatgctgcccatggagatagggacgctggttgccaggatggcatgatgaaggtggcatgcggcgcagcccatggagatggggacgtcggttgccaggacggcgagacgaaggttacatgcggcgcagtccatggagataaggacgccatttgccaggatgactccatgaaattggcagcagaagccatggaatcagatcgaaacccaagctatctgataccagatgttatggtcactagatcggtgagggattag

SEQ ID NO: 28194 - DNA, 372 bp, Zea mays
  unsure (1)..(372): unsure at all n locations
  Clone ID: MRT4577_125724C.1
cggaatcccaagacgacgccacgcgtacgtatcaacatacatagtncaaccacacttacagtatttataccattagtgttaatccactaggtgtggcgtaattaccctcgttactctatcaggaagctcttctatctcctcttttatttgactatggttacaacaatacctttctcccatgacagccgtgggattttattacccacatatacaatgctacatgtaccaacaggccatcataatgaacatcttactcacattacaattaacccgtatacaacaatatccttttatgtaacagtcatgcttaatgtatctgtatctgcaaataatccggggacagtaaatataacaacatttgctttcaactat

SEQ ID NO: 28195 - DNA, 2820 bp, Zea mays
  Clone ID: MRT4577_125725C.1
atgccgtcctcctcttcttccactgccgctacgccgccagccgcttcctcgccgccggccgccgcctcgtcggaggagacgctgagtagtctgatggcggaggaattgcgcgccggcgattctgttgatttcggcatgtcgcgaatgacgtcagcccgcgttcgagatatgcagcggttgggctactttggcggcggagttgctcgtgctccagggacggaggaagtccccgagccggagggggggttggtcgttttcgaggcgttcttcgccgccggtctccgcttgcctgcgcaccggtttgttggcgaagtcctgcgtagattcaacgttcaaatacatcagctaacaccgaatgccgtggtggcgctgtcgaagtatgtctgggcgacgacttcgtacggcgggcagccatcggttgaagtttttgcgaagtattattgcttgcactggcagaagaggatgattggggacgaagttgctcagtttgggtcgtgcacattcacgccgaagaccggcaagactacaatgcaagtggtggagctggttccatgggcccgcaacaagtggggcaactggaatgaattttggttttacgttgctgagggtaccgtcgaaggccatgagggacttcccgtgtctgagatgtgctctcatttctactcagcgtatccgccctttgaagtggcagaggaggatgcggacgaaggggcccttcgatgcgccgccggtcagagcagtgggcgtgatttagttgaagagttcgtggcgtacggggtgtggcccctggcgcatggttggacgctgggcgaagtgtgccctcgccagatgccttttcacggaggaagggtggtgcgaagccctgccttcgcactgaatctgcgaaaccgcgacccggccgcctttgtgcgcgatgcggaggatggggcggtgcggcttgtgggacgttacgtgccgaggacggaaggccagcgcagctttgatatccgcgggtcaaatgaccgtctgaatagggtcttcgaattgaaccaactgccgtatgacggctatcctagtcaagacgatgcggaccgccgagggaagaagccggtggtggagactaaagacgaccctgcgccggcggccgccccatcctctaagaagaggagactaggtactgccatgggaggacttggggtttccgatggctttgctagagagttgatgaggacgtgcgcggccccgggggaaaggatgtcttcgcccgagctccgggagtcttcggctcggatgctagaggttaccgggggttgctggcctaggaatgttcctatcccccgcgcggccagcggggacgtttttacatctcgcatggttcgcaaatggagagtttttccttacgggcggaatattgctgctgttgtgtcggcagtgatggacaaggatcgccagggggctgcgcaaaagcgccaggaggctgtcaggcttgttgaagccaggccgaagaggcagcgggggtcggcgaaggctgcggcccttggcggaggcaagccgccgcaggcggcgaagtcaggcgtccctgcatctagcaaagcgccagagacagcggcaggcgccggaggctccaaactggcgaaggctgtgccgccgcccagcagggtggcggaggccgcgaaggcggcccgagcgttgccgtcggcaggcaagcatgtcaccgatttcgccaccgacatttgcgtggaggactatcttggtgggccagcttgctacagtgcgcctgccgcggcgatcgcgacggctgccacggtgccgaaggcgaggggcgaggctcttggctccggaggcgaggtgtcggccctcgcggttgtcagggacgaggcgggcgcagcgacccgccggctgaaggaggtgacggaggcgctgagtcagagggaaaaggctgacctccggcgccaactggcggcggagaggagggaggccaacgaggccatcaccaaggagcaggctacgcaggcggaggtcaaactggcgtgggcggagggcaatcttgccaaggagctcgccgaacatctgcaggagcggctcaccgccctggagagccgcgcgaagggggccgaggccgcgatgcgtgcggaggccgaacggacgcgcacgcagcttatggatacatatcgtgagctgggtgcgcggaccggtgacttcgaggtgccggaccgagagcccgggctttgttgtctgcaatgggtgcaggaggagctgcaggaactccctgctgtcgtgggggggtttatgtcgtacgcctccctggtcacctgcgagggggcgatgaacgcgctctcccgcgaagggtgccggcacttcgaggtcttcgaccaggcggatgaagattttgatcgagatgtctataaggttgaagacctcgtggtgaaggattctgccggggccctctacgaccggatgtggggtccgcacggtcgcgaggtggtcagggagcgggcggagacggcgatggctcaggcgttgcgtggcgagcgggtggacgacctcggggcattgaacagcgcgctgcctgacccggagccggccctcacggaggccgtgtccggggtcgccctggagccgaccccggagaccgcggaagacgcaccggatgcccccacatctgcagcggctggcgaagacctgcccccgaaggtggccgaaggcgcacctgatgcccccgcggctgctgcgccgagtgctgaagatcccgcggcggtggcggcggaatcaacagcggaagcagcggcggagccaatggcggaggcttccgtagcgccagggccttcgcaggtggcgtag

SEQ ID NO: 28196 - DNA, 248 bp, Zea mays
  Clone ID: MRT4577_125726C.1
tatgattccaaacaacatatattctccttgccatttgttgtgattttcggtgccaaaaggttactgtttcctggaatcatatattctgcttgccatttgttgtgattttcggtgccaaaaggttactgtttcttgaacaagtactagcttcatattataattacaggaaacaataatgataatatgtatctagtactcgatcatgaaattgaacagctacaatgctacttgtctaatatagaaactcc

SEQ ID NO: 28197 - DNA, 1029 bp, Zea mays
  unsure (1)..(1029): unsure at all n locations
  Clone ID: MRT4577_125727C.1
gtacnncctcgaggcnncggccgggaaanaannnaaaaaaaaaaaaaaaaaaaaaaaaaaaaaaaaaaaaaaaaaaaaaaaaaaaaaaaaattcgatcgatcgagtttaattgcgccactgctcgttatcctcctcttgcattgcattgcaggtcgaagttgagcagcagcaaccacaggatgtcggggcaaacgtacgtcaatgagcacctcatgggcaaaatcgagggccaccacctgagctctgccgccatagtcggccacaacggcgccgtttgggcccaaagcaccgcattcccacagttcaagccaaaggagatgaccaacatctttaaggacttcaacaagcctgggtttctggccccaatcggcctcttccttggccccaccaagaacatggtcatccaaggcgagcccggaactgtcatccgcggaaaaaagggatctggaggcataactgtgaaaaaaaccggacaggcgctggggatcggaatctacaacaagcccatgacccctgaacagggcaacatgggggttgaaaggctcggggactacctcgtaaagcaaggcctgtgaatgcttccaaacaacgacaccaacgccaacattaattaattagtagcctccatgccctgggattgtgcgtgagcgctggtaacaacgcagagtacgcgggtggtgtcgttccggcaaataattttgtgtggtttcacctaaaaatttggttgtcttatgatttgtaaacccagaacagtatctatatgtgattgaactgcgcctacctattcttttattatacgggaatatatgtatgtatttcgtgcagaaaaaaaaataaattgataaaaaaaatagaaatgttcggttaattggattttgggtngggggccgtggttttataaggttnnaaaaaaaaaaagggtctttgggttgttccccctgcttaggggcgatttccccccccctggcggccgtttctgggggttccgtttgttcccccccgctcggtgtcttctcgttttttttccc

SEQ ID NO: 28198 - DNA, 373 bp, Zea mays
  Clone ID: MRT4577_125728C.1
gcgcgcctcggcttcagcgccatggcgccctccaggaagttcttcgttgggggagactgggagaagaacgggcggaagcacagtctgggggagctcatcggcactctgaacgcggtcaaggtgccggccgacaccgatgtggaacgtgctcagcatactgcctatatcgacttagtccggcagaagctagatcccaagaacgctgaggctgcgcagaactgctacaaagtgactaatgacgcttgaactgatgagatcagccctggcatgatcaaacactgcggagccacacgggcggtactggggcactcagagagaacgcatgtctttggggagtcagatgagctgattgggcacaaagtgcgccatgctc

SEQ ID NO: 28199 - DNA, 293 bp, Zea mays
  Clone ID: MRT4577_125729C.1
gttcggaggaggcaacggtgcaactttcttcggtcgtcccgaatccgggttcatccgacaccagccacctccaccatgccgcccaagttcgaccccaacgagatcaaagtcgtgtacttgaggtgcaccggaggcgaggtcggcgccacatccgccttggcccctaagatcggtcctctgggtctgtctcccaaaaaagttggtgatgacatcgccaaggctaccggtgactggaaaggcctcaggattacagtgaaactgaccatccagaacagacaggcccagattgaggt

SEQ ID NO: 28200 - DNA, 366 bp, Zea mays
  Clone ID: MRT4577_12572C.1
gcgtacgcgcctgtctgtctttccccgggctctcgaaaccctaggtgcgtgccgaccggcggcagcggcaaggtgatgtccatggacccggacgcggtggccaaagcctgcgtggagcactactaccggacgttcgacaccaaccgcgcggctctggtagagctgtatcacgagacctacatgctcaccttcgagggccagaagttccagggcccattcgacattgccggcaagctcggatctgttcccttgcaggcctgctagcaccagatcgtcaccgtctactgacatccgacgtagcccgatggaggcatgctcgtattcttctgcggatgcatacgtaccggccacgaagtgcacgctatc

SEQ ID NO: 28201 - DNA, 957 bp, Zea mays
  Clone ID: MRT4577_125730C.1
ccacgcgtcccccacgcgtccgcccacgcgtccgcccacgcgtccgcgatcgagcttaattgcgccactgctcgttatcctcctcttgcattgcattgcaggtcgtagttgagcagcagcaaccactgcacaggatgtcgtggcagacgtacgtcgatgagcacctcatgtgcgagatcgagggccaccacctgagctctgccgccatagtcggccacgacggcgccgtttgggcccagagcaccgcattcccacaggtgataccaatttgcatgatccttgttcgttctagctcttgcatgccgatcagatcaatcacgcggtttccttgtgcgcatatgcatccagttcaagccagaggagatgaccaacatcattaaggacttcgacgagcctgggtttctggccccgatcggcctcttccttggccccaccaagtacatggtcatccaaggcgagcccggcgctgtcatccgcgggaagaagggatctggaggcataactgtgaagaagaccggacaggcgctggtgatcggcatctacgacgagcccatgacccctggacagtgcaacatggtggttgagaggctcggtgactacctcgtagagcaaggcctgtgattgaatgcatccaaacaacgacaccaacgccaacattaattaattagtagtctccatgccctgggattgtgcgtggccgctccgttgaacaccacccatccttcgttcggcattttttccccccttgtttatataattttattgtatcgttttggcaaataattttgtgattcgaccccaaagcaagtttggttgtcttacgatttgtaaacctggaacaatatataatgtgattgaactgctttgtctaaaaaaaaaaaaaaaaagggcggcctttttgttcagcttgaagagccaatccatgtacacgcgcagttgcaccactttgttcaaatt

SEQ ID NO: 28202 - DNA, 228 bp, Zea mays
  Clone ID: MRT4577_125731C.1
actccctcaaatgtgccaaccaagcacacaaataaagttgtaagcggaaacaccgcgccaacggaagataactctcggcagaaactgggccagccagcaactgcagcacactcaagactgacaacaaaccgctaaccacaccacctcgaacttggggccagggccgccgtggccgggaggggcgtactagacaatgccgccagacgccgaacagtctaaacccgcgcc

SEQ ID NO: 28203 - DNA, 231 bp, Zea mays
  Clone ID: MRT4577_125732C.1
tccacgcgtccgaacacgcgtacagctctcagtcacctgcgccgccgccacgttcggggggggcctccaatacggggagttcaattgaccgacctcgttcttctggacaaggtctactaacgtattaacatttccgccgtcaacaatgactcttcggtcacacactatgatatttttcaacacaatgctattttcgctcacttgcagcactttactatctatgaccagttg

SEQ ID NO: 28204 - DNA, 340 bp, Zea mays
  Clone ID: MRT4577_125733C.1
gggaagggatcaaaaagagttcttttttttagaaaaaagaagggattcacgagattacaactaccaagaaatatgaaatatgaccaccttattggcaacacaaacttggatttcccatgcccttgtgggagtggcaaatcctaacatttattccttgggaagaaccttggcaatttggtacaaagtggtgttcagaccataaccaggggtaaagcttggaaaacaagtcccggtgtttaaaaaacactccgatttcttcaatgggtggcgtcttattcacagaattgtggggacttatcatcatccacgggcgaattgggggcacctcaattggtggggt

SEQ ID NO: 28205 - DNA, 302 bp, Zea mays
  Clone ID: MRT4577_125734C.1
agcaggggtaacaacgcagagtactttttttttttttttttttttttttttttttggttttttttttttttttttttttttttttttattgtttttttttttttcgtttaaaaaaaaaaaggcaggcgggttgtccccaatagagctgttcatattttgaaaataggccctacgggccgccccttattattggcgaacagccccccagataaaaggggggaatggttactactaataaacgcgcagcttaaagggggagctttgtccttagaaacaagacattctccgccccgggcctcagg

SEQ ID NO: 28206 - DNA, 491 bp, Zea mays
  Clone ID: MRT4577_125735C.1
tttttaacaaataataagatgacactaatgcactacctctgcaaggtacttgctgcaagatctccacagcttttaaacttctatgtggatcttgttagcttagatgctgcatcaaagatacaactaaaaatgttggctgaggaaatgcaagcagttagtaaagggctggaaaaagttcaccttgagtatgatgcttcagaaagggatggtccagtatctgaaatttttcgtgagaaactgaaagagttcaccgacaatgctggagctgatgtgcagtcgttatcttcattgttttctgaagtgggtaaaaaggctgatgcgttaattaagtattttgcacatgaggagaacctgaagcaagctgagcttgagaagaaaaaagctgaaaaagaggcagaagcagagaaggccaagaacgcacaattaactggcaaaaatgactctaaaccatcaaatccaagacggcaggctaaacaaaccttagagaggac

SEQ ID NO: 28207 - DNA, 425 bp, Zea mays
  Clone ID: MRT4577_125736C.1
cgggggaaaaaacggttaaacaatttttaaaagggggaattaaagttttacagtttgttgaaaacccttttcaagaaccaaaagcaacaaaacatggtgataaaaccttttgggaagggtgttttttttccttgcagataaaaataaaaccttcccttgcaaaaagctccaagccgcacatttagagaactttttccttggcaaaaccctgggcaaaaaaatcccgccccctttgcttctcgatgatgctgagtttgatacccttgcccttggggaggtttacccccgggttgtttccctttccgatggggaacaccttttcccatgcgggggggaaactgggggcccatggagtccctacagtggttggttttgaaaccccccttgggctttccctttttttgaaactcccacccccccggggt

SEQ ID NO: 28208 - DNA, 620 bp, Zea mays
  Clone ID: MRT4577_125737C.1
cgaatggccggctattgtggctgtgcttctgatctgcttgcgaggcaaatgaacgaccgcatgatgcatttctggcaaggggagtttcgtggacggacgccgtggcatccgtcgggtgcagcgcgatcgcatcaaagaaactttacatgataccagctgcggactctcactggagaatgccggcttctttttttatccatatcgtccatcagggtccagtgctaacttctgactgctgtaaagagcgaatgcgtcgtcacacccagcgtagccaattcatcagggatctggaggaggccagaaaggacgaagcggcggcggtgccgtgtcctcctgtcctgatccacgtcgccgccactgacagactcctctctcaccgtggcacgaattgatgagccacgaattgaggattgatcaaggtcttggcatcaacaaagctgccagcggtttttcagcttcattttagtttgtttatatagatctgtgccttgatcgaggtaggacgattcctagttaggctttgttcgtttacaccaatcccgctctggattagcatggattggaattaaatccatacctcaatccatgccccaaaataatccatgactacttaatttttt

SEQ ID NO: 28209 - DNA, 2930 bp, Zea mays
  Clone ID: MRT4577_125738C.1
cggacgcgtgggtagaaaatgtatggatataatgtaggagtatcagcctatcaggagtaggtatgagatgtaaagctcagcccgtagtttagatgtaaagttttgtactgagtataaaaaaaaaaaaaaaaaaaaaaaaaaaaaaaaaaaaaaaaaaaaaaaaaaaaaaaaaaaaaaaataaaaaaaaaaaaaaaaaaaaaaaaaaaataaaaaaaaataaaaaattagaagaagcttgaatatcatcgactcttctaagatcggcaacttgggaacgcaggccggacaggagctccaccaccaccgcctcctccaggagctccacctcccccacccccacctggaggtggtggaagaggacctccaccacctcctgcacctagagggcatcttggtggtcctcctccacctccaccaccaagtggacgtgcaccaggtgtgccacctccacctagagcaccaggtgtgccgccaccaccaggaaataatccatccttaggcagaggacgtggggctgtacgccctctgggatcagcttatggggctgctgcctcacgtaagtcaacattgaagccattacactgggttaaagtgacaagggcccttcaaggtagtctgtgggaagaattgcagcgcaacgatgactcacagagtgtttcagagtttgatatatcagaacttgagagcctttttcctgcagctgttccgaagtccgatgacagctcaaaatctgaacgtagaaaatcacttggatcaaaaccagaaaaagtgcacctaattgagttgaggagggcgaataacacagagatcatgctaacaaaagttaagatgccactctcggatttggtgagtgcagctctggcgcttgatcaatctaccttggatgttgatcaagtggagaatctcataaagttctgtcctacaaaagaagaaatggaacttctcaagaattacaccggagacaaacaaaatcttgggaaatgtgaacagttcttcttagaattgatgaaagtgcctagaatggagtcaaaactgcgagtattctccttcaagatccagtttggttcacaagttgctgatcttagaagaagcttgaatatcatcgactcttcatgtaatgagatccgaacttctctcaagttgaaagaaataatgaagaaaatccttctccttgggaataccctgaaccagggaactgctagaggtgctgcagttggcttccggttggacagtcttctaaaacttacagatacccgggcaacaaataataagatgacactaatgcactacctctgcaaggtacttgctgcaagatctccacagcttttaaacttctatgtggatcttgttagcttagatgctgcatcaaagatacaactaaaaatgttggctgaggaaatgcaagcagttagtaaagggctggaaaaagttcaccttgagtatgatgcttcagaaagggatggtccagtatctgaaatttttcgtgagaaactgaaagagttcaccgacaatgctggagctgatgtgcagtcgttatcttcattgttttctgaagtgggtaaaaaggctgatgcgttgattaagtattttggtgaggatcctgttcgctgcccctttgaacaagtaatctctaccctcttaacatttgtaacaacatttcgaaaagcacatgaggagaacctgaagcaagctgagcttgagaagaaaaaagctgaaaaagaggcagaagcagagaaggccaagaacgcacaattaactggcaaaaatgactctaaaccatcaaatccaagacggcaagctaaacaaaccttagagaggacaaggtctgcaagcagacgaggaagagatgttgggtgataacccgaatggtcagtaattttctgtgcttctgatctgctcgcgaggctaatggacgaccgctgggcaagagaagtttcatggacggacgctggcatccgtcgggtgcagcgcgatcgcatcaaagaaaactctacaggccacccctcaacggtctcactggagaatgccgacgtctgtttttatccatgtcggccatcagggtccagtgctaacttctgactgctgtaaagaattgctaacactgacgctaactccattctttcttttcttttttcatgttacttttccattctttctaacaacggtggccaagtacagccatggcttcgaaaaactaccgcctggtgcttaggtggaaaattgtaaaaaataggcatctgggtgaaaaaaaggtatggagataatctaggtggcaaagagtatcaggagtaaatatgtgatgcaaactcagccagtagtttagctgtaaagttttgtagtgagtgtgtattgccgccactttgtattctatgatcatgaagcagtgaaggcggcgttttctttacgatacgtagtcagatagccttgtcggctacgtgtcgcctgtgtacgtgtgatatatgtactgtcaattttccagcgaatgcgtcgtcacacccagggtagccaattcatcagggatctggaggaggccaaaaaggacgaaacggcggcggtgccgtgtcctacggtcctacctgtcagttgccgcggtgtcctcctgtcctgatccacgtcgccgccactgacaaactcctctctcaccgtggcacgaattgatgagccccgaattgaggattgatcaaggtcttggcatcaacaaagctgccagcggtttttcagcttcattttagtttgtttaaaaagatctgtgccttggtcgaggtaggacgattcccagttaggctttgttcgtttacaccaatcccgctctggattagcatggattggaattaaatccaaaccccaaaccaagccccaaaataatccatgactacttaatttttttgttcggttaaacccatcatggaaaataaaccaaaggtttagg

SEQ ID NO: 28210 - DNA, 2061 bp, Zea mays
  Clone ID: MRT4577_125739C.1
cggccgcgtgggcggacgcgtgggcggacgcgtggggcagaggacgggggcctgtacggcctccgggttcggcttatggggctgctgcctcacgtaagtccacattgaagccattacactgggttaaagtgacaagggcccttcaaggtagtctgtgggaagaattgcagcgaacgatgactcacagagtgtttcagagtttgatatatcagaacttgagagcctttttcctgcagctgttccgaagtccgatgacagctcaaaatctgaacgtagagaatcacttggatcaaaaccagaaaaagtgcatctaattgagttgaggagggcaaataacacagagatcatgctgacaaaagttaaaatgccactctcggatttggtgagtgcagctctcgcgctagatcaatctaccttggatgttgatcaagtggagaatctcataaagttctgtcctacaaaagaagaaatggaacttctcaagaattacactggagacaaacaaaatcttgggaaatgtgaacagttcttcttagaattgatgaaagtgcctagaatggagtcgaaactgcgagtattctccttcaagatccagtttggttcacaagttgctgatcttagaagaagcttgaatatcatcgactcttcatgtaatgagatccgaacttctctcaagttgaaagaaataatgaagaaaatccttctccttgggaataccctgaaccagggaactgctagaggggctgcagttggcttccggttggacagtcttctaaaacttacagatacccgggcaacaaataataagatgacactaatgcactacctctgtaaggtacttgctgcaagatctccacagcttttaaacttctatgtggatcttgttagcttagatgctgcatcaaagatacaactaaaaatgttggctgaggaaatgcaagcagttagtaaagggctggaaaaagttcaccttgagtatgatgcttcagaaagggatggtccagtatctgaaatttttcgtgagaaactgaaagagttcaccgacaatgctggagctgatgtgcagtcgttatcttcattgttttctgaagtgggtaaaaaggctgatgcgttgattaagtattttggtgaggatcctgtccgttgccccttcgaacaagtgatctccaccctcttaacttttgtaacaacatttcgaaaagcacatgaggagaacctgaagcaagctgagcttgagaagaaaaaagctgaaaaagaggcagaagcagagaaggccaaaaacgcacaattaactggcaaaaatcactctaaatcatcaaatccaagccgacaagctaagcaagccatagagaggacaagatctgtaagcagacgaggaagagatgctgggtgattatcccgaatggccggctattttggctgtgcttctgatctgcttgcgaggcaaatgaacgaccgcatgatgcatttctggcaaggggagtttcgtggacggacgctgtggcatccgtcgggtgcagcgcgatcgcatcaaagaaactttacatgacaccagctgcggactctcactggagaatgccggcttctttttttatccatatcgtccatcagggtccagtgctaacttctgactgctgtaaagagcgaatgcgtcgtcacacccagcgtagccaattcatcagggatctggaggaggccagaaaggacgaagcggcggcggtgccgtgtcctacggtcctacctgtcagttgccgcggtgtcctcctgtcctgatccacgtcgccgccactgacagactcctctctcaccgtggcacgaattgatgagccacgaattgaggattgatcaaggtcttggcatcaacaaagctgccagcggtttttcagcttcattttagtttgtttatatagatctgtgccttgatcgaggtaggacgattcctagttatgagtttcaatttcttgtacgccaaggactggatctggaactgcggtcggtcggttgtaacgttgctttattatggcttcaaagaggctaggaaaggagactttgaggcgctag

SEQ ID NO: 28211 - DNA, 199 bp, Zea mays
  unsure (1)..(199): unsure at all n locations
  Clone ID: MRT4577_12573C.1
tnttttttttttttttttttttttttttttttttgtttttttttatttttttgggggtggaaaaaaacttccacttttttgcttgtatgaacaaaccccgaaagagaaagggggttaccgggtaaaagctaaattttttcccatcaaaacataaaccctggtaaacctaagaaggttgctctaatttaaaaaacaccaa

SEQ ID NO: 28212 - DNA, 1039 bp, Zea mays
  unsure (1)..(1039): unsure at all n locations
  Clone ID: MRT4577_125740C.1
gggtacctcgaggccggccgggccgggatgtctgtgttcattatcatctaaggaggggagcgacggcaacaacagctcgaggagacgcgccaccgcccaccagcgcaccacgccaccacccccgcccccgatcaacgcagcagcagggacgcctataaacattggggttccctcgggggcgggcggggacgccccggcgccttcctgctagcactacgccactaccagtcagggcaagactcgcagcccggacaaggtaaggcgacgtacggcggcgatggcgccggtggtcatgatgagcatgtgcgtcgtcgtgtcgctggtggcggtgcagctgcaggcgacgagcagcgacggcgccacggccgccacaccgtccgtggtgctgccgccggtgacggtgccccgtgtgcgcggccggttggaggccggtcgtaagctgcaggccgtcgacgccgtcgggatgggcatggactccgtggtgcgtcggacggtggtgctcaccacgatgcagacgagcaactcgccctccctgggctacggctcgctccgcccgaacaacgctgtgtgcgggtccagctgcgccggcagacctcctggtgagccgtatctgcatcagatccgcccgtgtggggagtattatcagtgtccgtctacaccgtcttaattagatctaggcggcgcggcgtacgtttcatcaaattcaataaacataaatatgtataggtgagaactctatgaaatatatatgaatgtgtcatgtatatgcacgatggattatgaaatatgtatgttatattattctataatagtacacaaaatgtttctaccaaaaaaaaaaaaaaaaaagcggccctggtgtttcttagaacttagaacccctagtgaaaatcgacgtcttctttttaagaactgccgatataaatatttatttacaggcacgtgtggttttgttaagaaaaccaccaggtttgattaatctgcngtataaaaaatggagtcggtctatttaattaagggtctagtgtttgatgatcac

SEQ ID NO: 28213 - DNA, 634 bp, Zea mays
  Clone ID: MRT4577_125741C.1
aaaaaaaaaaaaaaaaaaaaaaaaaaaaaaaaaaaaaaaaaaaaaaaaaaaaaaaaaaaaaaaaaaaaaaaaaaaaaaaaaaaaaaaaaaaaaaaagggaaaaaaaaaaaaaaaaggggggccgccccccccccctttggggggggaaacccccccttttttgggacccggaaaaagggtgcccagggtttaaaaccccccccccgggggtggcaaggaaccttggggcccccgaaaattggcaggggttttagggacctccccctaacttggggcgtggggggcccgccttttcccccaaaaaaaaaaaagggacccccaaccttgggggggcccggtttttatccccccggtttagaaaatggcaggggcctccctcactgggggggtggaaaagctggtttaatttttaaatttaacggttccagattcaaacaaaaaaaaaggggggacttttttccctaaattgggggcccataaagggaaaaattcctttttttaaatgggggggaggaccccttatggttttaacaaggttttttatttttaaaaattttggggggggttaataaaaaaaaaggggttaaaaaaaaggggattttaattttttaaaaccatcggggcccaaaggctt

SEQ ID NO: 28214 - DNA, 645 bp, Zea mays
  Clone ID: MRT4577_125742C.1
attcctaatctcgccgccgccgccgccgccgcttcgtcgagtcccgctgcagttcgtccggatccggaagaaagaagaggaggagcaaattcggacagatgaaggcacggcagttggtgaacgtggtgatgcggaggtacggcatgggcagcagcctctatgcggtgagccgcatcaagcccgaggagcagctcttctacccatctaccaaggaggcgcaagcatccagcacgggggagatggagaccatctccatctccaggatgcccgcgcccagcctgaggctggagctctccgtctccaaggaggacaagaggctggatttcctgcctttctacgagcgcggcagcggcgggcacagcaagatcctctgcgtcgacgccgagggccgcaccgtcctgtacgacaccgacgccggcctcctccactcgatgccctgcctcggcacccccaaggggcccaaccctgtctccttctccatcctggacagggagccccgggatcccgggcgggcggacgccttgtacgtcatgggcaggtgctgcgactactttgacttcgaggccctcatgtattgcgacccctccagcggcaggaaaggctggcggtggcatcagctcccgccgccgcctgtgcctcgcgccg

SEQ ID NO: 28215 - DNA, 748 bp, Zea mays
  unsure (1)..(748): unsure at all n locations
  Clone ID: MRT4577_125743C.1
tcctctcccagtcgccccagcaccgcctccgtcgacggcgtccttgcctccgccgcgctcgcctcaccaccacggccnttcctcgtctcatctccgccgctggcctcgccctcgatacgctactgacggggtgcccctcgccgtcgacacgtgacctccatcatttgcatctcagctccaagatctactccaggtgaggtcgaagatccagtgcaagttcctctcctagacttgcagatggattggttgctctacctgtttctcagatcattaaaatggatgtgttgttctaaattccattcaagacgctggattgctgtaaagtgaggttggagtacaccaacagcagggcattgcaggctgcagcagcgtttatcttatggttgggatgtcattgggtactactattacagcagtactagcagagcgatacgatgatgtagctagcaagagtactagaaataagtactattatnntatgtaggagttcttggctagttgtttatcaacagtgagaaatggggtagttaagtttgatgatctatcagctgattggatagggtaggctttttcagatccatatcatagtggatagccatgttatcggacgagctgttccattggctttaatctgaaatggttgcagctgcagcagtccgaacagctggctttaatctgaagcgaacagctcggaaacttaaagcatgccatgcatggtctgtccatgtccaacacttgattgattact

SEQ ID NO: 28216 - DNA, 187 bp, Zea mays
  Clone ID: MRT4577_125745C.1
gataaacataaagctcaattgagaatccatactctgagcataagaaaaaagaataaaaggggggcagccgatctaagggatccgggcttccttcctcctgcaatcgacgacatacctctaattatcatggtctcgctaagattgcaattgcacttggcgcgtggcaaatgcaacgtcaaggatcggt

SEQ ID NO: 28217 - DNA, 871 bp, Zea mays
  Clone ID: MRT4577_125746C.1
ggagacacccccctccaaaactttccccaatccaatctcccaatccaatcttccctctcctctcctggaaccctaagcctcctcaggtacatgacccacccttcctcgtcctcctcctccgccccggcggccgcgccggatgacccgacctcccttgccccgggcttccgcttccacccaacagacgaggagctcgtctcctactacctcaagcgcaaggtgctcggtcgcccgctcaaggtcgacgccatcgctgaggtagacctctacaaggtcgagccatgggacctcccggcaaggtcgcgcctccgcagccgcgattcccagtggtacttcttcagccgcctcgaccgcaagcacgccaaccgcgcgcgcaccaaccgcgccactgcaggaggctactggaagaccaccggcaaggacagggaggtccgccatggagctagggttgtcgggatgaagaagacgctcgtcttccacgctggccgcgcgcccaagggcgagcgcaccaactgggtcatgcacgagtatcgccttgagggcgatggcgcagccgggatcccacaggattcatttgtagtgtgccgaatcttccagaaggctgggcctggtcctcaaaacggggcacagtatggagctcccttcgtcgaggaggagtgggaggcggatgaggatgatgattttggtcctatgccagtgcagagggacgtttttggtgagcatgaggctcctggtgctatggagaaagatatcttcagatgaatgatctcattcaggacttggctggtcaaaatgagaatggcagtgttgttttgccagtttctgacacttcaaacaccagcagccattctgaagacgaaaagggaaattc

SEQ ID NO: 28218 - DNA, 1389 bp, Zea mays
  Clone ID: MRT4577_125747C.1
atggcttcacttggtcaccctgaccgctttcagtctgaggaagcgctcaacctggtgcttggcctgcttgggtggagcgcgccagggctcaccggaagaatccatgctggcgctgcccccctcggtgatctcgccgcgggggaattcgtgttcttcacctcctacatctcttgcgggctggcgctaccaattttgcccttctttctactgctgctggaggagttcgggcttcagcttcaacacctcacgccccactccgtcctccaggcagccatcttcgtccacctctgcgagatgttcatagggattactagggaaaattttgtccccgagtccctgatactcccccagaacatccctgcgctctgcaacgacccaggcctgaggacagcaaacttggccaccctgctgacccttgacgacagcggcgtggcggttcgccagaccggaggctgggatccccaccgtaggatccagatctccgatgcaccagttggaggtccccagcccgccggtgtggctcgtagcgccaatcccgccgtggcctccagccccttggacaagggcaaagggactgcaagcggtgcctccgccccagggacaccagcagcagcaacagcagcagcagcagcagtagcaggagcggcgatcgccgcgcttccagggtcactggaaggtccagggccccaactcacgcctcctccgccagataccaggcccatcgacgggtctagctctcagcagcaagaatctgttgagggtggtgccggcagtacgcccccagctgctgccaagacagcgccagcggcttcccatgccccagccaaggatccagcggcagcggtaccagcgtcgggtggcgtcagcgtcgcagcggtggaggaggtcccagatgggagattcgcacccactcccaacactggggtgacgcaggaggcacgtctagctccaaccacccgcctgctccggaggatatggaggtggtgttcgggcgacaactccagtcgggtgccaagcaagaagctgtgccagtccccctccctccgcacccaactggaagagcgcaccaagacggcgtcccgccagttcatctccgagcagtcccaaatcgagcgggaccgcaaggagtacaagagggacctccagaaggtcaagggtgtggagaggctgcaaaagtggcagcaagagctcgagggcaaggccagcgacgccgccctcgccgaggagaaccttaaggcgaaggagcagtccttggacaagcgggagatggacctcgccaggcgagagacggatcttgtcttcagggaagaaatgctcacctggcggggcgagttgctggccgagcatgagctcgaggcagaggagaaagagaggaagctggaggagtag

SEQ ID NO: 28219 - DNA, 422 bp, Zea mays
  Clone ID: MRT4577_125749C.1
gcgaattgtgtaccgggccgcccgtctaggcgagcgctattttttttttgaggcctttagaagccaattcacaaaaacctattgagaagtacggctttgtgtgtatctgcggccaaacatgaacatgggtactacactgcttgaaatcaccacaaaattacgcactttatccaaatggctcagttaacacatggtggctgtaagttatcacgcacaaatagtgctagctttgagttttctttatttcaagaagggctcaatgaaccattcagagggaccacaccatgatccgaagcggagtcatgcctggctataaccctggctgactgctcaaaaactgtagatgcgagatcaattgctcctgtggcggtgttcttgagaactatgctgatcggttaccatagaagaggctaacacttacc

SEQ ID NO: 28220 - DNA, 176 bp, Zea mays
  Clone ID: MRT4577_12574C.1
gccggccggttccatttaattttacttattccgtggtatctagaagacgctcatgccgctctcggcactcgtccggctacctctcctctctttccggcctatcagcagccaggttctctcgctggcgtgagctggttgaggaagcacctggccgctggcgtccaactacatccaca

SEQ ID NO: 28221 - DNA, 205 bp, Zea mays
  Clone ID: MRT4577_125750C.1
aaacaatgttcatcgtccttggttataaccatcctgtacagtttgtcgtattgttatgtccagcctatcctctacaggaaggacttgacgagactagactcaacctccacacagaatataaacatatactgtgcaatcccccattcgcacgtaatcctgaggttgatacgtataaacaccttcatggaacatacacaccccaccc

SEQ ID NO: 28222 - DNA, 178 bp, Zea mays
  Clone ID: MRT4577_125751C.1
acgctcacacgtccgactatatcaaccaatatgcgccaaacacacatgactattagagcactagggcacacattaagaggcacagcacatgttaaaatacggctacgactgatgacgaaggttgaacctaatcggtaatgcactatatgtaagggaatgttgactaagtaataaaata

SEQ ID NO: 28223 - DNA, 228 bp, Zea mays
  Clone ID: MRT4577_125752C.1
tccgtccgagtctgagctcatctccgcgcgctgccgccgccgccgccgccgctcgacgcccaccgggcagccatgccggcacagaacgatcatcctgaaggagagggttcttgagtcctccgaggggtagcactccgccccctcttctttcttccacctgctcacccccatccaccacctccccacccccctcctggaccttctactcaacctcactatccatctgca

SEQ ID NO: 28224 - DNA, 265 bp, Zea mays
  unsure (1)..(265): unsure at all n locations
  Clone ID: MRT4577_125753C.1
catggcngctggcgtggccattgcctactgcggcgcagaggcatcgcctncgcncgcgacggtcctctgtgcctcaaaangcccgtgcggcctttatcctggtgctatctcagttatggcaagtagtttcatggcaagttgaacatcttagcagaaaagtgccatgaatagtatgtagtatgtacgcttatgtttgtaacaatataaaaatatatatatatcattagctgcaaaaggaggtcgttttcttagaccttattatttt

SEQ ID NO: 28225 - DNA, 394 bp, Zea mays
  Clone ID: MRT4577_125754C.1
gagctcacttgtttgcggccgccctttctttttttttttgttggttttattaactttattgcttgtgagggatctaaatgctacactggtgtagcagatacagcggaaaacgatggaagtgggtcacagctgtgaagtggggtgtagaaacaggccacaaagcaaattcgcctccctatgccttaggcagaaagatataagcttggtaagagcatcaagaaaagatgatgaatcaatggccaaagagaaggagatccagatttccatggacaaaacagtccctggacacaaaatcacggactgttttttagccagcttggaacaaaggtcaaaaatatcatggatgcacaggcataagatacaggcttagtttcaccatgacaaacatggaacc

SEQ ID NO: 28226 - DNA, 221 bp, Zea mays
  unsure (1)..(221): unsure at all n locations
  Clone ID: MRT4577_125755C.1
agaaacttacaaataatattataattantaagacaanaaacaaaaggggaggggcaatttaaatgtggttttgaccacccaacaccaagggaaaaaaacaatcgaagcataaagccgtaaacaatgcacgacaagaggcacacgatcgccagcgccgcgccaatagcccaagacacaacgtaccgtgctgcataaaaggtttcaaataaaagcacctggtc

SEQ ID NO: 28227 - DNA, 403 bp, Zea mays
  Clone ID: MRT4577_125756C.1
attcggcacggggtaccatccccatcctaccgtatgttaccggtgagtagaacatgcccctcctccacgtgccgacttccgctacgcaccgccattcctgcgaagccctaccctagcccagcgctgggctcacctagatccgctccgtacaagttcgacgcgaggaattttactcgccaagggttccgcatacgccgcacgataggactccaatctatggagattgaggagctgcgactgccgcatatcctccgccctgtgccgtgccatgagcctcgcgggacggcccaatccaacgtcgacgctgcgcagccgacgctgcctacgcatgcgaccgacttactccccgttctgcgagcccttcactgaacccccggaaacaggcgaaccatcatatcctgct

SEQ ID NO: 28228 - DNA, 424 bp, Zea mays
  Clone ID: MRT4577_125757C.1
cgcggctgcgcccctgcccttccacgacgacgaccacgaccacagcagtacagcacccgcgagtccccgaccccgtcctcggcggtggcccgccaggccttcttcttttacgttcccctctgacacgggtttcttttcctggcctcggagtccgcgccggccgcctcgtgcccgacccgagatcggatctccttcgaggccgggctcaggcctcaagggtgccgccaccgcctcgtccgtctccagggaccgcgagctgtcccctcgcctccagcgcagccgctcatccgccggcggcggctccaaggcgtccctgtccccggaggtactgcacaccaccgccttttgttgccatctcccacgctacgttacgcacgaagccgaacgcctttggaacggagtcaagaccgatcaggggcgccgg

SEQ ID NO: 28229 - DNA, 295 bp, Zea mays
  Clone ID: MRT4577_125758C.1
gctccctttagtttggctgtacagctacgtgcaaaattggtacctgacagcctctcgagagttgaaacgaatggattccatctcgcgatctccgatctacgctcaattcggagagactctgaatggtgtctccaccattcgagcctatgccgctggagaacggttcatcgccaccaacaactacaaacttgatctcaatcaagccgcttacttcgctaccatcgctgctaatcgatggttggcggttcgactcgaagcggttggaaacgctgtcgttctcttctcagtttcttcg

SEQ ID NO: 28230 - DNA, 520 bp, Zea mays
  Clone ID: MRT4577_125759C.1
aggaaaagattgagtctgaagctatcatggttcaaccttaatgcatccctttttcaatagtggagtcagtttatgcaaagtatttttccttgtctataaaaaacaaattgaacagtattttaattataaggaaatataaacatacattttaaactagccaatttgcagtatcataaaagaaataggacgttctttcccttcccctcccccaaccattcaaatcagagaagaatactggcaaactttaagaaacccactggctatcatcagagtaactacagaacaaggggtagcacagggatgaaactatttctctatattccagaaggcagaagcttgggtactctagctttacaagtaaaagtagcacaggcaggcaaaagctcacagtaaatgcacatcagaacaggagcctgggtgaagttgtctgactgggttactgcttttacgggtggaggggtggggggaagacaaatctgaaatggagtaagaaacaaaaacaaaaaaaacaaaaacaaac

SEQ ID NO: 28231 - DNA, 188 bp, Zea mays
  Clone ID: MRT4577_12575C.1
gagaggagaccccaaaatcgcacacgcgcgaatacgctaggagatatacccggccactcgccaccaccgcccgtgagcacggaggagacctgtatgtgcccgctcttgccgatgtcgcaaccatagatgtagaaataccaagcgaggtagaactggagatgtgtctcatcacgattaggtgatttctt

SEQ ID NO: 28232 - DNA, 370 bp, Zea mays
  Clone ID: MRT4577_125760C.1
ctgactcgtgggcggacgcgtgggtaaaaacaaaactaccgacaaaacccaatttcgagaacaagaagaaggccacaagttggcatgtataaagacttataaacttgccactcaagcagacaacctgtaatggacaccattagaagacaacgccgtctcttacagcctcacctgatgtgaaaggaactttgtgctgatggacttagatgacctactcgctccttcaaggtgatttcttcttaacttctagatgcgtacctcctgttggaagaacaacaacgagtccggaaactgacgtgtactcatgctgcgatagacgaagcttacgctttagaaagatctatgcgcgctggggacattagagaacaga

SEQ ID NO: 28233 - DNA, 400 bp, Zea mays
  unsure (1)..(400): unsure at all n locations
  Clone ID: MRT4577_125761C.1
cagggaaaaaaagaaatcgangcaatcaagttgtagattttatcatagaggacaccaatacggcagggaggtgcgaggaagacgaagaaaaacaccaccaaacagccgagacggaaaanagatgcatgacaccgagagtctccccgattctaaggtttccagaggaaaaatgaactgtctgaatcatatcagagagagaggattcacccgaaacgcttgccgagttcatgactgttcacttacttgcttcgacgagccttttttctccaaaaaacaaaagatgtgatccactgcacatgaaataataagacgaatcacttaatgaggattgaaagtaattcaccagataatttactacataatgaaaaacatctattaaaaacaatgttccctctaacaa

SEQ ID NO: 28234 - DNA, 649 bp, Zea mays
  Clone ID: MRT4577_125762C.1
ggccgcttttttttttttttttttcttttttttttttttttttttttttttttttttttttttttttttttttttttttttttttttttttaggcggaaccaccaacacgggtagaacttttttagatcttaaaaaattgggggggaagacttcaaccacaaggaaacattcgctacggggacaaaactcaaaaggacaagaacacagacaaaacaggttcctccgaaccccaaaactaaaagcttaaaaaaccatttcagggggcttggcaccatccctgaaagaaaaccgggccccaaaaaaggttttcagctccggaacagcctaaaaagcctcgatcagagcaaaaaccaaagcctttggggcatcctttttgaaggcaggcagggacttggatgcccccttttttggctaaaaaaggtcgccctggggctttttaaccttttggtttttctccctggaaaagaacttggaataaaacttggggacatcaacaccagagagggcaactttgggggggggagcaaagacatagggctgggtcacacgggggagcgggcccccattgatcctgaaaggcccaaagataaggagcaggccggacttgagctgtttgaaaaaaccacttttttccccaagaagcgccct

SEQ ID NO: 28235 - DNA, 590 bp, Zea mays
  unsure (1)..(590): unsure at all n locations
  Clone ID: MRT4577_125763C.1
nccacccttcttcccttgcttcctggacccctatgaatttcgcaatccacccaaaatacagtctcatcctatgctgtcgtgggctcatacatcttgatttccccgcaaccagagctagtggtaggaacctatgctttgtgggggggggaacaagacgtgggagaagatccacgacgagaacctgccttttgttggccaggctgtgccactctgcggcagcctcttcgccgcctgccccatatccaacaacagtatcactgcttctgcctctgtgttccacatgtccatcaaggtccccccatccacccttgttgcggcagtgagcactccctcattatcaatccaagggttcaaagtggtggcatcagagtacaagattccctggccactcttctgcccccgtggaaagggcagcttctgtttcatcaggttggggtcctcttgtcgtcggcagagccgcaaagccttgaagcggcttaagtcccagggagccaaggctaaggatctgctagttgcagttcaagtgaaggaacagagtcatacatgcaaatccaagggcctatttggcatggctgtggttgctgccttct

SEQ ID NO: 28236 - DNA, 191 bp, Zea mays
  Clone ID: MRT4577_125764C.1
tggcattcgcagtgcccagtgatggcattactctgcactatagccatttgccccaacttaagtttagaaattacaagtttcagtaatagctgaacctgttcaaaatgttaataaaggtttcgttgcatggtaaaaaaaaaaaaaaaaaaaaaaaaaaaaaaaaaaaaaaaaaaaaaaaaaaaaaaaagaga

SEQ ID NO: 28237 - DNA, 1624 bp, Zea mays
  Clone ID: MRT4577_125765C.1
cattgccggcctcgaggccgggggggcccggcctttgggctgcgtcgagggtacgaaatcaacccaaaccctagcatcccctttgctcgagggagacgaagatggcgccgaagaggaagacgagtggcgacggcgtggtagaatcgccagctgacgagttcgcaaagccggcggacgacacgaagggatcgccagccgagttcgccaaaccggtttaccttgtggcggcgcgcgacgacgacccggcggcctactccgttctggagatcgacgccgctgccggtggcgacgagccgccgcgcatccgcaccgttgccggtctgacgggcttcatctccgagcctggcatgtccttcgtcgcggcgcattcgaagcacggctcctggattgtcggcgtcggcggtgggttaagagcgggcaccatcatcttcgacccgaggacattgaagactttccgcggcccgcggctcaggtaccccaagcgcgaacccgtcctgatctcgcacggcagcgagatatacgctatctcacgccgccccctggtggtgcgcccgatcgactgcgaaccatggttcgaatgccctcagcttcaacaagggtgtgccctccaaagattgcggcctttgcgtccactggagcatcctgccaccaccacccttcttcccttgcttcctgaacccctatgaatttcgcaatccacccaaaattacagtctcatcctatgctgtcgtgggctcatacatcttgatttccccgcaaccagagctagtggtaggaacctatgcttttcatgtggtgaacaagacgtgggagaagatccacgacgagaacctgccttttgttggccaggctgtgccactctgcggcagcctcttcgccgcctgccccatatccaacaacagtatcactgcttctgcctctgtgttccacatgtccatcaaggtccccccatccacccttgttgcggcagtgagcactccctcattatcaatccaagggttcaaagtggtggcatcagagtacaagattccctggccactcttctgcccccgtggaaagggcagcttctgtttcatcaggttggggtcctcttgtcgtcggcagagccgcaaagccttgaagcggcttaaggttagcttgactgccttatggatcgaaaacattgaggctatcatgactcactgtcagtcccagggagccaaggctaaggatctgctagttgcagttcaagtgaaggaacagagtcatacatgcaaatccaagggcctatttggcatggctgtggttgctgccttctccatggacactgaaaatgttgagctgggggatgaaacgatggatacaaatgcaagctgcgccactaatagcactgtcttcgaagcacctgtaattcgcataggctgatgagtgccaacttttgtgttaaacagatgtagatgtcccttctcactctcccatttggtcgtgtctgattcatttaaacaaacttggtcagacataaaatggtagttagttatccatacactgctacggtttctataaactttgattaaataatatatttatcgaaatataattattttttattttccaaaaaaaacccacgaaaaagcggccgcgtccg

SEQ ID NO: 28238 - DNA, 695 bp, Zea mays
  Clone ID: MRT4577_125766C.1
agagaagaagagaggagcgccctcactcacctttgccttgcttcagtgaattctaccactctgaaccaaccaccccgatcattcttggctttagctctatgccaccacatcattgtgatataagtcggtatatcctgtgaagtctgccactcatttagccagcatcggctgttgaaggagcaaggcgccaacagatacgacgtacacatagctacaacagactattacattggcaatacacaccagactgctcggacatgagatgtcccacagactgtgaataggacttgagatggggaggcatacgtcgtgacacaagaataagtcacaaaaggcgctgtcaccccctgacaaggatgataaactgatgaaccacataacaaaacatggacaggattgatgtagtattattcacaaactatctgagactgataggtgcggaaagacatgtaacatgaggtatataaactatgtgatgccataccttaagagaggggcgctactaacaagactaagaaaacttatattgagctgcacacatggcttggaaacaacgggtctcaaattgcagctcagctgcccgggcggactgatactgatatcaagaatctatggaactcgtgcatcaagaactagctcaagcataaagctattgatcccaacacccacaagccccttactgaggactgatcgca

SEQ ID NO: 28239 - DNA, 804 bp, Zea mays
  Clone ID: MRT4577_125767C.1
catggggacccggccgggcgtggccgtcgcttgcagttgcagcatcacaagcaaactgaagtcactcacagctctccagcttccatccagaaaggagaaggaaacaagctagtggacaaccaaccatgatcagcgccaagaagattgctcatctcgccaagaagtggcagaggatggctgcacaagggaggaagcgcctcgccttgggggcggcagcaaagcaagccgacgagtgctgcagctatgtggcgagcaagggccactgcgcggtgtacacggccgacggggcacggttcgaggtgccgctggcgtgccttagcaccccggtcttcggggagctcctgcaaatgtcacaggaggagttcggcttcacgggcggcgatggcaggatcacgctgccctgcgacgcggcgatcatggagtacgccatgtgtttgctcaggagaggagcctctgctgagctagagcaggcgttccttagcaccatggccatgtcatgccactgtgccagccacatggcgccgtatgttggacgagctcacgagccagacagcagattgttgtttagtttctgttcagtgtagtgtagatagtggagcaaaggtattagctagataaatattattccaagccttctgatcgtgtgcaaggatgcgactaatcaagcaaggtcttaagaagttagagagacatgatttatgttctgtacttttcgaaaattgtgaggactactcacattacatagcgaaagactttcttgtgccaaaaaaaaaaaaaaaagggcccctaaggccgcggccgctc

SEQ ID NO: 28240 - DNA, 770 bp, Zea mays
  Clone ID: MRT4577_125768C.1
tgggtacctcgaggccggccgggatcacttgcagcatcacaaagcaaactgaagtcactcacagctctccagcttccatccagaaagaagaaggaaacgagatagtgaacagctaaccatgatcaacgccaagaagattgctcatctcgccaagaagtggcagaggatggccgcacaagggaggaggcgcctcaccttgggggcgacatcagcaaatggagcggacgagtgctgcagctctgtggcgagcaagggccattgcgcggtgtacacggccgacggggcacggttcgaggtgccgctggcgtgccttagcacccctgtcttcggggagctcctgcagatgtcagaggaggagtttggcttcgcgggcggcgatggcaggatcacgctgccctgcgacgcggcggtcatggagtacgccatgtgtttgctcaggagaggagcctctgccgagctagagcaggcgttccttagcaccatggccatgtcatgccactgtgccagccacatggcgccgtatgttggagccacacatcagatcgctgtttagttgatgttcactgtagtctgtagtatagatatatagtggagcaaagatattagctaggtaaagaactaaagattattcaaaaccttcgaatcctgcaaggctgcaactgagaaagcaatgaagcaaggtgttacaagtacaataagttagagagatatgattcctgttctgtacaaatgtttatgaaaattgtgaggactactcacattgcatactt

SEQ ID NO: 28241 - DNA, 491 bp, Zea mays
  Clone ID: MRT4577_125769C.1
gtacctccagggcggccgggggcagattccaaacatattggccccgcctcccataactaaccgcacatgctcgacgtggacgtggccacataagtgcttgtcgccgcacaccctgcctcgcaatgtacgatcgcccagcgtcgccccccgccggtgcgtgctcaccttcttggtcggcggctccctagtgcaccacgctgacgaccacctgcgccacgagcaagagagataagtcgtacacaagcatctgtgactaccaggactccgtcttcgacaggaggagcctcaccaacgactgaaaagagaacgtgttcacgcaccgctcgcacgccgagcaggaccaaggtgtcagcaggggagtagctgcgcacgatcgaccgttccaaatgcaggtgaactcctacgcagaatgtgtagcgatgcgaaacgcaatatattctctggtggggagcaagtgctctgaaagggctttaacgttcgcatctacagat

SEQ ID NO: 28242 - DNA, 233 bp, Zea mays
  Clone ID: MRT4577_12576C.1
gcacgaggacaaagtagcaattctagcagtcctgtcatcttgtagacatggtaggcttgtgcaggaggggatgaagatattcaaaaatttgaaagctgattattcaattgaagctgatatggagcattacatttgtgtggtggacatgctatgcaagtgtggttatttgaaggaagctgaggtcgtgattagaggcatgcctttccaaccaagcactgccatatgtcgcacat

SEQ ID NO: 28243 - DNA, 567 bp, Zea mays
  Clone ID: MRT4577_125770C.1
cgattgggtacctcgaggccggccggggtccttccctccgcctccgtactcggcgctgctccagaccaaactgaatcctatctgacaacaatcgtgtcacctcttcacgaggagactgagcggaatggacaccgtcgccacatgagggctaagcccggtcgcgtggacccacccggagatctactacctctggaagggggactggccacgcaagtctagggcaatggcaccgatctcaatgggacaactctggatcgcttagtggctctgtcatcctcctcggatctcatctcaatagcacatatgccctacctataacccggggccaatattataatcacaacaacgtatctcgctactatccaaaagctttgaacgaacacggcttgttcaaatgaattcaaccgataacttggtaacaaaggagtgttcacattgcactcgtaatcccggttacatgctcttgaacgaacattagaagaaatccacccctatacagcatcctattctggttgcacgagctctaggccagttatggggcttatcttgctgatgactctgactaca

SEQ ID NO: 28244 - DNA, 299 bp, Zea mays
  unsure (1)..(299): unsure at all n locations
  Clone ID: MRT4577_125771C.1
aggatcagccgcggcggcggctctgtctcgcggtaccacggcctcgctccggagatggcctctgcggctgctgaaggggagggggaggaggaggacgtggtggtggtggaaggggacacggtgttttattatttttgtggagatggacgcgacggtgaggcgggagctggcgatccggagactgcgagaggaggccgaggaggaggcgaacgaggtggtgacgaggaggaggagcagtagaagggattttgttgtgtttgagactgttaggggtgacgtgttttttatgtaatngtgga

SEQ ID NO: 28245 - DNA, 397 bp, Zea mays
  Clone ID: MRT4577_125773C.1
ttcccggtcgagcacgcgtccgcccacgcgtccgccacgcgttcgaccacgcttacgtacgatccttcttcactgctgcaggggaggagggctctctcgttacgcccgaccatgcacgggtggttgtacttgaatcacccgaggcagcatcagaagaagcagaaactcgagaagtttgtctttgatcaattacgaacaggcttgcatctgggcgtgggctctatttgcagcgtgtgctactacataatctactggtacattcatatcatatgacatttactattttttgcaccttgagacattgcttagtacttctgtgttgccttgtgaaaagagagtggtaaggcttggatccgctgatgctcttgtttaaaaaaaaaacacttccagactaaag

SEQ ID NO: 28246 - DNA, 672 bp, Zea mays
  unsure (1)..(672): unsure at all n locations
  Clone ID: MRT4577_125774C.1
ttcctacttttcttcctctgctaatgtgctgtttctctgatnnnnnnnnnnnnnnnnnnnnnnnnngcgattattgctgttattctgcgcctannttttccgcgccacttcccagattggttagagcttcccggttccatcatcctgctcacagcagtcgcccccagtctgttcgcacacaccttcagggatgacctcgtcggtgtcttcatatgccttgcgatcggatgctacctgctccaagagcacatcagggcgtcagatggactcaggaacgccttcaggaagggcaatggcgtgtccaactccattggcatcctcctgctcttcatctaccctgtctggaccggggtgctgcagatcctgtaggcgctgttgcctccgtgttcccgtctgctgtccaggcgtccagctccgttgccgttcgtctcttgtgcaaatgtttcttctatggtgatcgtggttctgtgctatcgggatgggatgtagatcgagatgttggccatattatcaggcgtgtaaacccttgccgcttctgttaagttgtcgcaagtttgaggatgggtgtttatagcaactactgtatatcatttgatgttatttctgaatatgatgtcaagcggtgacaaatattgaaacatgaaaaaaaaaaaaaaaaagttgtcctccaac

SEQ ID NO: 28247 - DNA, 1355 bp, Zea mays
  Clone ID: MRT4577_125775C.1
gcgagcgagcgagagcgagagcgagagagacagagagattatccgcgcgtcaccgactcccggcgaaactcccggcgaagacgatggggaaggggttcgcatcctacctggcgatgaagacggggccggagggaggcgacgcggcggcggcgcagcaggctctgatcgacgcggacctgcgggagctcggcgtcgccgcgcggaagctcgccaaccacgcattcgtcctcggcggcgggctggggttcggcacctccttcctcaaatggctggccttcctcgccgcagtgtatctgatattggatcgcaccggaagccaacatgctgacatctcttggttccttacattttcttcaccctgcctaatcttctctgatcaggacttacatgtagatgtgaagtatgctgtagtggtagcacgctttagaggattctatacgggaaatgttatgcgattattgctgttattctgcgtctattctttccacgccacttcccagattggttagagcttcctggttccatcatcctgctcacagtggtcgcccctagcctgttcgcggacagcttcaggggagacctcgttggtgtcttcatatgccttgtgatcggatgctacctgctccaagagcacatcaaggcgtcaggtggattcaggaacgccttcaggaagggcaatggtgtgtccaactccatcggcatcctcctgctcttcatctaccctgtctgggccggtgtgctgcaagtcctgtaggcacattgcctcagtgtttccgctgtgcttcgtgcccgtgcaaatgtgtccctctatggtgaccgtgatcctgtgtcacgagtaggtgatgtttttatgtgtgcttgagttgatcggttgggcatgttgccatgttggtggacagttttgtttatctcatttgttgtagttcgatgtcagcatttggttcgttcgagtacataaacgccaataaaatcattagccgtggcttgatgtagatcaaaatgttggccatattatcaggggcaaatccttggcggttcagttatgcaagttaaaggatgcatgtttataccaattattttctatcctttgatgctatttctgctcctccagacccgtttctctatggattcgtgtgagaaaggggatccgtgatcccacttttgggcggggtctttgatcttatgattcgcgaatcgtttattggcaatttgccatatcgtagtagatagagttcgtgtcataaacgatcgctctttatgggggagaatccagacctaattgggacaacatggggatgatactgtgtaactgtagcacttaactttctggctcacgtaccctgcatacggacttg

SEQ ID NO: 28248 - DNA, 544 bp, Zea mays
  Clone ID: MRT4577_125776C.1
aactacggtaactcgtctgctcgcatttcctcccaatccatcccgcctccaaacccgaactccaagtcgccccgcatcgatggcgcccaaggccgagaagaagcccgcggcgaagaagccggcggaggaggagcccgctgccgagaaggcgccggccgggaagaagcccaaggcggagaagcgtgtcccagcaggcaagtccgccggcaaggagggcggcgagggaaagaggggccggaagaagggcaagaagagcgtggagacctacaagatctacatcttcaaggtgctgaagcaggtgcacccggacatcggcatctcctctaaggccatgtccatcatgaactccttcatcaacgacatcttcgagaagctcgccgccgaggccgccaagctcgcgcggtacaacaagaagcccaccatcacctccctcgtatgttcgcgtgtcttgctgtagttaggtgctgctgtgtcaggtctcctccggtagcaactgttatctgatggaacagtaacaatgcttattgaatccagctagttgctc

SEQ ID NO: 28249 - DNA, 1408 bp, Zea mays
  Clone ID: MRT4577_125777C.1
gttctagaacgcgagcgcccgcccttttttttttttttttttttttttttttttttttttttttttttttttggaaaaactcggaaaaaaaaaaaaaaaaaaaaaaaaaaaaaaaaaaaaaaaaagcgggcgggggccaggctatccagcgtgccacgcgctcacgccagttcatgcacatccacacttacagagttacagttacagccaaccaaccacatcgcatatcaaagaccagaaagctcaaaccaagaccggcgtgcgcggacgaagcacagatccatcggagtgacagcgagcgagcgagagcgagagcgagagagacagagagattatccgcgcgtcaccgactcccggcgaagacgatggggaaggggttcgcatcctacctggcgatgaagacggggccggagggcggcgacgcggcggcggcgcagcaggctctgatcgacgcggacctgcgggagctcggcgtcgccgcgcggaagctcgccaaccacgcattcgtcctcggcggcgggctggggttcggcacctccttcctcaaatggctggccttcctcgccgcagtgtatctcttgatattggatcgcacaaattggaagaccaacatgctgacagctctcttggttccttacattttcttcaccctgcctaatgtgctgtcttctctgatcagaggagaggtggggaaatggattgcgattattgctgttattctgcgtctattctttccacgccacttcccagattggttagagcttcctggttccatcatcctgctcacagtggtcgcccctagcctgttcgcggacaccttcaggggagacctcgttggtgtcttcatatgccttgtgatcggatgctacctgctccaagagcacatcaaggcgtcaggtggattcaggaacgccttcaggaagggcaatggtgtgtcgaactccatcggcatcctcctgctcttcatctaccctgtctgggccggtgtgctgcaagtcctgtaggcacccaccattgcctcagtgtttcccctgtgcggtccaggcgtccagctccgttcccgttcgtgcccgtgcaaatgctccctctatggtgatccgtgatcctgtgtcacgagtaggtgatgtttttatgtgtgcttgagttgatcggttgggcatgttgccatgttggtggacagttttgtttatctcatttgttgtagttcgatgtcagcatttggttcgttcgagtacataaacgccaataaaatcagtagccgtggcttgatgtagattgacatgttggtcatattatctcgtgcaaatccctgcgtctcttctgttatgcaagttaagaggacgcatgtttatatatcaaccaattattttctaaaaaaaaaaaaaaaaaaggcccctattctgaatag

SEQ ID NO: 28250 - DNA, 481 bp, Zea mays
  Clone ID: MRT4577_125778C.1
agactggtaatattatactacatcattgcatatactaagaatcaatcgttggaaaattggtccttataagccacaggttcagcaaaacctttgtttctataacttcgcgggtctttgagaacaggaaaaggtctataggaaaggcaaaaactgacataatgaatagggtggacgaacaatgtactaatactgctacatatggggcttaatttaaaggtatatgcacatgatgcatgctcgaactattcgcgctcacaattcttgtcaacatgaagcggatttcacattgtatggtgggggcaatcctactcactcaatcattgaatactagtcgcactctcataaggtttaggttgcgaacatacataaccagtaaggtacaaccctttcaaagcttacacctaaacctaactaatactccttgaagactagaaccatttttcagccacagagacacctataacactcctgattacctatg

SEQ ID NO: 28251 - DNA, 779 bp, Zea mays
  Clone ID: MRT4577_125779C.1
ggcacgaggtctgctcgcatttcctcccaatccatcccgcctccaaacccgagcttccaagtcgccccgcatcgatggcgcccaaggccgagaagaagcccgcggcgaagaagccggcggaggaggagcccgcggccgagaaggctccggccgggaagaagcccaaggcggagaagcgtgtcccagcgggcaagtccgccggcaaggagggcggcgagggaaagaggggccggaagaagggcaagaaaagcgtggagacctacaagatctacattttcaaggtgctgaagcaggtgcacccggacatcggcatttcctccaaggcgatgtccatcatgaactccttcatcaacgacatcttcgagaagctcgccgccgaggccgccaagctcgcgcggtacaacaagaagcccaccatcacctcccgcgagatccagacctccgtgcgcctcgtcctccccggggagctcgccaagcacgccgtctccgagggcaccaaggccgtcaccaagttcacctcgtcctaggctgcgtggcctccgcttgcaggcttctctcgtatgttcgcgtgtcttgctgtagttaggtgctgctgtgtctggtctccttctgtagcaactgttatttgatcgaacagtaacgatgcttattgaatccagctagttgtttatttgtggatcatctctctttgttgttggccacctttatctcgtgatgtttgtgtgcatgtgaatactctgaatgtgcatttcgaagtttgagaaaaaaaaaaaaaaaaa

SEQ ID NO: 28252 - DNA, 487 bp, Zea mays
  Clone ID: MRT4577_12577C.1
gccaagattcaatcgctgcctgttgggaaggagcttggggcggaccgtcgagctgcgggtggcggtcaagctcacccattgcaacctgccctcggggctcgaacactctaccgagctgcggcgcaggacttgagcaaacgcgccaggagcttgcttaccttctggagtcaaaggcgtgcaggcactgaataccgtcacaccttatcatttacaccactggcttttcaaccaatcaccgtatgaccaatgtagtaagcatatgaaacggttggctcctacgaactacggggaatgactatacagggtgcgggcactgagagcgtgtaaaactatactctcgataacttacagattaccctcaacttaacttccctattggcggatgaacaatgcagcacttggtgaattttgctcatcaatgataacaaggagccaccatcaaatgattaaaccgcaccttatctatgaacgcttgacctgacacaag

SEQ ID NO: 28253 - DNA, 315 bp, Zea mays
  Clone ID: MRT4577_125780C.1
agcatacaaaaacacaccaagtaaatttcactaacaacaacctaacaacaggcggcgccaaaacaatagcccacgcgccacaacaagccctgcaagagaacgcaacaaatgcgaacattaacccacagagcacacttgcaacaagtgccattaacccacagcaacaaccaccagggaccacaaagggccatgaacacaacacccacacaagccaacaagctccaactaaaaactgccgacagcgacctacaaccaccaaatgacaaataccaacaacaaaacttgccacacataaaccttcaaaccatctgcaac

SEQ ID NO: 28254 - DNA, 793 bp, Zea mays
  Clone ID: MRT4577_125781C.1
cattgggtacctcgaggccggccgggaaagaacagccaacatatctcctcgcattttccttgcaaccgattgcctatccccctcccaacccaagaccgatggcgcccaaggccgagaagaagcccgcggcgaagaagccggcggaggaggagcccgcggcggagaagacgaccgccgggaagaagcccaaggcggagaagcgggtccccgcgggcaagtccgccggcaaggagggcggcgagggcaagcgtggcaagaagaagggcaagaagagcgtggagacgtacaagatctacatcttcaaggtgctgaagcaggtgcacccggacatcggcatctcgtccaaggccatgtccatcatgaactccttcatcaacgacatcttcgagaagctggccggcgaggccgccaagctcgcgcgctacaacaagaagcccaccatcacgtcccgcgagatccagacctccgtgcgcctcgtgctccccggcgagctcgccaagcacgccgtctctgagggcaccaaggccgtcaccaagttcacctcctcctaggcttgcacgctcgccctttgtaggcttctcttgtgttgatgttcccccttgtgttgtagttagatgttgctggtttctctctgtcggcgctgctcgtaactgcgtcatgtaaccctgcaaggacttgtttatttgtgaatcatcaacactttgttgttgatcactttatgttccaaattctgagtttgacgctcgagcatgcctcatttgttcattctaaaaaaaaaaaaaaaaaagcggcc

SEQ ID NO: 28255 - DNA, 1175 bp, Zea mays
  Clone ID: MRT4577_125782C.1
gtcaccgcttgacatcatattcagaaataacatcaaatgatatacagtagttgctataaacatccatcctcaacctcaaacttgcgacaacttaactgaaccgacaaggatttacacgcctgataatatggccaacatctcgatctacatcaagccaccactaatgattttattggtggcgtttatgtactcgaatgattttattggtgtttattactcgaacaaaccaaatgccaacgtcgaactacaacaaatgagatagcaaaactgtccaccaccatggcaacgggtccaactgattacctcaagcatacattacgcatcccaccccgatggcacagaaccacgaaccaactcaccatagaagaaacatttgcacaagagacgaacggcaacggagctgggcgcctggacagcagaggagaacacggaggcaacagcgcctacaggatttgcagcaccccggtccagacagggtagatgaagagcaggaggatgccaatggagttggacacgccattgcccttcctgaaggcgttcctgagtccatctgacgccctgatgtgctcttggagcaggtagcatccgatcgcaaggcatatgaagacaccgacgaggtcgtccctgaaggtgtgtgcgaacagactgggggcgaccgctgtgagcaggatgatggaaccgggaagctctaaccaatctgggaagtggcgcggaaaaaataggcgcagaataacagcaataatcgcaatccatttccccacctctcctctgatcagagaaaacagcacattaggcagagtgaagaaaatgtaaggaaccaagagagctgtcagcatgttggtcttccagttcgtgcagtccaatatcaagagatacactgcggcgaggaaggccagccacttgaggaaagaagtgccgaaccccaacccgccgccgaggacgaaggcgtggttggcgagctttcgcgcggcgacgccgaggttccgcaggtccgcgtcgatgagcgcctgctgcgccgccgccgccgcgccgtcgccgccctccggccccgtcttcatcgccaagtacgacgcgaaccccttccccattgtcagccgaatctttgcgttattgcgtttccgtttctaatcatgtctgccggccgtccggccggaagtctaatgaaggtatccaag

SEQ ID NO: 28256 - DNA, 232 bp, Zea mays
  Clone ID: MRT4577_125783C.1
atactcacacacacacctatacccattgatgaacacattatttgacttcaaaactatctattacaagcgtcgccttatttctacttgtaactcatcaataaaaatataactcaaatctacaactcatactactttccaaatcttactacacaactttaaaatgctaaatctattttatctaacttaatgccatagtataaattcatctatataatatcttcactatctacat

SEQ ID NO: 28257 - DNA, 218 bp, Zea mays
  Clone ID: MRT4577_125784C.1
ttttactctttttctttcaaaggggagttttttcattatattgggggcccccgcgtaaacttggacggttgttggacctaacagtagtcgcacaaatttttccgccgccgtcaaatactttattactgtttccaagcttgttgcctactgctgggcgcactgcacccttttggcgcctaaccgggatggttcttattcctagtgcgtacgcccccctg

SEQ ID NO: 28258 - DNA, 969 bp, Zea mays
  Clone ID: MRT4577_125785C.1
ccggccgggaactacggtaactcgtctgctcgcatttcctcccaatccatcccgcctccaaacccgaactccaagtcgccccgcatcgatggcgcccaaggccgagaagaagcccgcggcgaagaagccggcggaggaggagcccgctgccgagaaggcgccggccgggaagaagcccaaggcggagaagcgtgtcccagcaggcaagtccgccggcaaggagggcggcgagggaaagaggggccggaagaagggcaagaagagcgtggagacctacaagatctacatcttcaaggtgctgaagcaggtgcacccggacatcggcatctcctctaaggccatgtccatcatgaactccttcatcaacgacatcttcgagaagctcgccgccgaggccgccaagctcgcgcggtacaacaagaagcccaccatcacctcccgtgagatccagacctccgtgcgcctcgtcctccccggggagctcgccaagcacgccgtctccgagggcaccaaggccgtcaccaagttcacctcgtcctaggctgcgtggcctccgcttgcaggcttccctcgtatgttcgcgtgtcttgctgtagttaggtgctgctgtgtctggtctcctccggtagcaactgttatctgatggaacagtaacaatgcttattgaatccagctagttgcttatttgtggatcctctctctttgttgttggccacctttatctcgtgatgtttgtgtgcatgtgaatactctgaatgtgcatttcgaagtttgagaagttacgacgcgttaaaaaaaaagcgtgcaccacagcccgtcccgagcgctgcacgacctcacggggatcaagaagcactactgccagaagcacagccagaagaaggtcaagtgctacaggtgcaacatgcgctacgacgtttagtacgacttgaatgcgcacgtcaagacctgcagcgaccgcaagtatct

SEQ ID NO: 28259 - DNA, 818 bp, Zea mays
  Clone ID: MRT4577_125786C.1
cattggtacctcgagccggccgggaaagccaacatatctcctcgcattttccttgcaaccgattgcctatccccctcccaacccaagaccgatggcgcccaaggccgagaagaagcccgcggcgaagaagccggcggaggaggagcccgcggcggagaagacgaccgccgggaagaagcccaaggcggagaagcgggtccccgcgggcaagtccgccggcaaggagggcggcgagggcaagcgtggcaagaagaagggcaagaagagcgtggagacgtacaagatctacatcttcaaggtgctgaagcaggtgcacccggacatcggcatctcctccaaggccatgtccatcatgaactccttcatcaacgacatcttcgagaagctggccggcgaggccgccaagctcgcgcgctacaacaagaagcccaccatcacctcccgcgagatccagacctccgtgcgcctcgtgctccccggcgagctcgccaagcacgccgtctctgagggcaccaaggccgtcaccaagttcacctcctcctaggctgcgcgtgcacgctcgccctttgtaggcttctcttgtgttgatgttcgccttgtgttgtagttagatgttgctggtttctctgtcggcgctgctctgcttctgtaggaactgcgtcatgtaacctagcaaggacttgtttatttgtgaatcatcaacactttgttgttgatcacttatgttccaaattctgagtttgacgctggagcatgcctcatttgttgctggaatttgagctggtggtttgcataaacagatgaaatttatttcggtt

SEQ ID NO: 28260 - DNA, 786 bp, Zea mays
  Clone ID: MRT4577_125787C.1
cttcggaacccttccagccttctcgctcctcccacccagacctcaacccttccgtccccgaccatcgacccccgaaggacctggcggtgtccagatttagcatcccccatccagcccccggcgatcgtgcggaacctggcggctggggacgcgggagaagcggcgagggctagctggagatggacacggcggagaagatgcggtggcccttttcggacggcagcgtcaccgatctcctggacgcccgcagcctccacggctcccccgtaaggccccgtggagcagcaaacccctgggatttctcctagcgctttaggcggcatttatgctttgctttggatcgaattggtcgattcgtaagggttcgtgtcggcgaatcgatgattcaaagtgattggcgggggcggttttggatgagttagtgggtgctgggttgcatttccggatcgttacttttgattaggttgaaactcagaagggtttgtggacatggaggaaccagctgttgttcgatgcgcagcctgataccagtaattggattagaatagcggtttgctatataccgtatctgtctttagaaattaattaatatcgggccacttctgaaatggtgcagtatcaagttgacttcagaattcttgctctttatgtggtgcaaacctgaaacaacctgctgaatgttcaaggtgaaagtgaaacaatacaaaagaacgcatattgatctattcttgggggtggtgaggtccttaggtaatggtggaatgatatggccttttggactatatg

SEQ ID NO: 28261 - DNA, 645 bp, Zea mays
  Clone ID: MRT4577_125788C.1
cattgggtacctcgaggccggccgggccggcggcttccaacccgctcgttgcagtgggcgaggtgagcacggcggcggaaggatggcgaagggcggtgctggcaatgggctgatctgggcgacggcggaggatctgggcggcgccggccggtggttctgtctctgtaccggcaggtccttcgggcgctaaactcgccggcgctgccgctggggcacgcggcgcggctggcaaagaaggcggagtgccgagccatcttcgttttcggtgccgaggagaggtcgctccacaacatccgggacctcgtcgcggctgcgcgccacacgcttggcctcctcaaccgcggccgcctcccgtagtgagaaggcagaggtacgcagagtctcccgagcctagctgccacccgaatcttcattggtgtctcatacctcagcttccttgctatgcccgattgtaatatttaggcctgctgcatgttgacaatgactgaattggtgtcgtctgttctagtactctgtgtctgaattgtttctctatgcatactgcggaaccgatatgctattattatattgtaactgttaggaaataaactaatccgtaccatttcccattgtttcccaaaaaaaaaaaaaaaaaagccctaggcc

SEQ ID NO: 28262 - DNA, 451 bp, Zea mays
  Clone ID: MRT4577_125789C.1
atagtgccacgactctgccagctctgttctctggcctctggcctacgcaccactgactcgcagacaggatgtcgtcatgggcactccgctgcttctcgggctccgcacatcttcctccggcgaaccttacgcaagaatgatacatgcccgatcaccacctacgtcctgagctacctcacgctccatcactaccacgcgatcgctcactctttctgcgaagatgccacggccgacgactcctacgacccgcggaccggcaaggtctgcaatggcatcgagcgcgtcctcggcgtcgaggtcaaagagggagcgccgggaggcatcatcactcaccgtatacatgctcctcgcggagatgtgcaacgcgcactctgcacagacagagctcccacctgactcaaggatatcaagaccagctgcaccgagaggcaagaacacgtcgcgaaggaat

SEQ ID NO: 28263 - DNA, 273 bp, Zea mays
  Clone ID: MRT4577_12578C.1
gtccgacgagatcctcaggtgggcctttctcagccgttgtctgtttatccatgccaccggcgaagatatgttagagctggatggcgctggagctgagtgccccaaagatagcaccccaattatgcaggtgtttgaccacaacgtaaactagtggacttatgacatgcaggatgatggtggcaatcaaatgccatactgaaacacgtctgacgaggagcaggtggaggcagcatgccatgccatgccttgcctgtccaaggaccatagacgcgt

SEQ ID NO: 28264 - DNA, 500 bp, Zea mays
  unsure (1)..(500): unsure at all n locations
  Clone ID: MRT4577_125790C.1
gtgttgctgttctcccagtgtctctgtctctgatgaggttagtacctgcactgctccgccatgctctccgccgcattcctcacccaggcttgctcgcagctactactgttgctttcggcactggtctggctggcggctcttggctgagaaatatcaaaaacattgccgcaccaccgtccgctgcgctgcggctggatggagatggattccgccccccccgcccgcttccagatcccatctccgccaccaatttagaaatggacgccccggattggccgccccccctccttcccttcattccttccaccaccgccgtccaaggatgttttggtgaactcaatcaaccgtcgaggcgcttcacgttccttccttccagcttccacacgcaaaggcaaagctcagtactctacctgcttcgcatctcagcagcagtgctgtcagatgactggacttatttgatgctcttgccgttctcgacttgnggcgcgagccgatggatc

SEQ ID NO: 28265 - DNA, 396 bp, Zea mays
  Clone ID: MRT4577_125791C.1
agatgagcgggtgcatggtctaacgccaacacattcacgacgggaatgggatgcgggaatgatgcgtatgttggagaagcgtattcttgttgcattgacggaggcgaatgctagacatgctatgttggaagagctcctgtcgtatacacctggcacaatggacataacgtatgaggtgcttgtggagaaaacgtgggggcattctggctatgatatcagactggtatgcaaggaagcataattgctctcattaaaacagagaatggcatgtattgaatgcacgatataagagggctctgaggtttagttaactgaagtggtgctagtaactacagaagatattgaactatgttcgaggaatacaataccgtgtgcacatgtttatgctcatagatt

SEQ ID NO: 28266 - DNA, 383 bp, Zea mays
  Clone ID: MRT4577_125792C.1
gaatttacggttcgccaagagactcttattgctataatttgatcgtgttgggggagacttcatacttatggaaaaaagggggggttttcggatctcgttcaaatttactcttggaatatctctgttgatgcccaaacaagtgcgattgactcaaatgtaggagaacgaatccgctctgcaaaaacaaaccaaggggtggcaaagaatgacccacatatgccaaattagagtccaaaacaatgcggtcttaactatcaaacgatgtggcatgtactggattgctatgtgatgtgtcggcataaatcaccaaaaagggggagatagaaagggaaatgtgcccttgggccattcactataagaattggagatgaagtgtccaacac

SEQ ID NO: 28267 - DNA, 1455 bp, Zea mays
  Clone ID: MRT4577_125793C.1
cggacgcgtgggcgggccggtgtacgtggtgacggacccgtcggaccgcgaccccgtgaacccgtcccctggcacgctccggcacgccgccatccaggagggcccgctgtggatcgtgttcgcgtcggacatggccatccggctgaacgaggagctgctggtgaacagctacaagacgatcgacgggcgcggcgcgcgcgtgcacgtgggcggcggcggcgcgtgcatcacgctgcagtacgtgtcgaacgtgatcatccacaacgtgcacgtgcacgactgcgtgccggcggggaacgccgacgtgcggtcgtcgccgacgcactacgggtggcgcacgcggtcggacggcgacggcatctcgctgttcggcgcgcgggacgtgtgggtggaccactgcgcgctgtggcggtgcgcggacgggctggtggacgccatcatggggtccaccgccatcaccgtgtccaacagctacttcgcgcaccacgacgaggtgatgctgctgggcgccagcgacgcgtacctgcccgactccgggatgcaggtcaccatcgccttcaaccggttcggcccggggctggtgcagcggatgccccgctgccgacgcggctacttccacatcgtcaacaacgactacacgtcgtgggagatgtacgccatcggcggcagcgccggccccaccatcaacagccagggcaaccgctacatcgcgccggccgaccccaacgccaaggaggtgacgaagcgggtggagacggcggaggggcagtgggccgggtggaactggcggacggagggcgacatgatggtgaacggcgccttcttcgtgccttccggcgaggggatggaggacatctacggcaaggcctccagcaccgaccccaagtcgtccgcgctcgtcgacgtgctcacgcagaacgccggcgtcctcggcgaccccaggaacgacgccgaagaaaccgggtacaggggcgtcaactacgccggcgggagaactggcggcggcggcggctacggatacggctacctcgggatggtctacgccggcggcggcgaccagagatggagatcgcactcggcgctgtcactggtttcttcagctatcaccgtcgttgcgctcggatgcttgcatttgttgtaacatgtagacgtgtgattctcagttggaaaagttagcaagatggtggggaagattgtagctggggtagcagtaggaggagcgggggtaggcaggcaacagaaaccctgtgtgaagttgcacatgggtattgggtgggaggatattgccaagccagtcactgtacttcttacaaggagaaatggacgactcattctaactttagaacctctgggctctggtctctctgtgatctcccatgtcattataattctgggaacagaaaatgtaatgggaaagcaactttagcctaaaaaaaaaaaaaaaaaaagaaaggg

SEQ ID NO: 28268 - DNA, 213 bp, Zea mays
  unsure (1)..(213): unsure at all n locations
  Clone ID: MRT4577_125794C.1
ttggaccctcgaggtcggccgggacgcagacggtgttgccgtgtagcagaagcagtctcgcgccccatgtncncctngntnccggcggcggcgcgcggacctctctcctcccttcttcgttcacnnccggcctcttnncatncccgncccccgcggccttntcctcgcgccgtccctctccaccgcccgctcgcacggggtccctcacctcgc

SEQ ID NO: 28269 - DNA, 212 bp, Zea mays
  Clone ID: MRT4577_125795C.1
gggttcattctaccgctttctccccctacattcttacatttcacgggttcatatgagaccaggctagcaggacaaaaagtgtcactgcagcactccttactcaaactcagaacccactcactctgtcacactcatctctgaactgaacacacccaaaaccaaaccagtactggatcagaccaaaggctaaaaacatggcagcagccacgcca

SEQ ID NO: 28270 - DNA, 510 bp, Zea mays
  Clone ID: MRT4577_125796C.1
cagcactgcacatacgtccctttcttaggactgaggacgagaggcatccatggcgcccaagcccgagaagaagcctgcgccggcaaacaggccggcagctgaggagaagccggcacctgaggagaatcccgagaaggccccggcggcggcccgggagacgtccaatgctaccgagacgtcgtcggtgccggccacgaaaccgcggccaagcgttaggaattcattcatcaacgacatcttcgagaaggtcgcggagtaggggcgcctggtctcgagcgctacggcaagaagaccactgccaataaataccatcatggccatccttttagtcctcgcccttccgcgaggtctgaatgcatgcatgcctgcatgtgttgtcattgattattactctctcatcatttttattcagtgtattttagtccttgagaagattgcttggttttgcctctgctttcttcttttggtttgcaactgtctgtctgggataataaaacatctaccgcatac

SEQ ID NO: 28271 - DNA, 626 bp, Zea mays
  Clone ID: MRT4577_125797C.1
ggccgcttttttttttttttttttattttttttttttttttttttttttttttttttttttttttttttttttttttttttttttttttttttttttggaaccctggccagggaacccaataaaaacaacccatatttggaagggaaaacaaactacccctttcttgggttccaaaaaaaaaacggggtttaggaattgggcccaaaactatttgtattccggggtttgaaacaaaaagggcaaacacacattactttgaaaaaatgtatgttcaaaaacagcattggcccaaagaactacactacccttaaaattttaaactatttacccggcaaattcgttggggtgaagccccaccgaaccatttttcgccttgaactaaaaccaggcaaaattattccctgaaccgggcataaaaacctttagccagcacctaacaaaaaaccgggcaccaaagctaagtttttcacacgtttgagtaaaaaaagtcaaatccggggataatcctgtactgaaacagggtggaaaaaacccgggcccacactccgaaaaaaagggactcgtcgtccgggctgagcgggatcccggcaacctcaccaaaaaagtcgatcccctgccgtttttt

SEQ ID NO: 28272 - DNA, 1013 bp, Zea mays
  Clone ID: MRT4577_125798C.1
ctggccggtgtctagtgtctactctactatgcccaagtcaatcgtgctgctcattcgctcgcaatggacgctgcaagtcgatcgatcccaagctacgttacatctggtgatcacctgtctgtcaatattagtagaacggtggtgccttctgcatccgcgtcagggttcaaaaaatagcacaacgacgttgctctgaatacttagctccgtgaccactgggaccgggtgtaaaaaatacttgcccggagacagtgcctgctgcacgaactgcccgttgggatgttaactaatccgtcgtcaggaataataactatctcaaagaaaacaacaccaccgtccggctccggcggccatgttttactgccacccataggccatagggcccctaaactaaactattgccggtcagatcagatgcagagacggccggtttgtatactccactccaccatctgcacaggttttcagagaccccacctgcttgtttacgtgcttctgcaggaccgtcgaactcttcggccgggcaacggcagccccctggagaaggcgaggaatccggcggcggggtcatgcgacggcagcagctgctacgggggcgacacgaccaccgcgagcacgccgtccagactagtgcaggacatgtagtagtgatgggtttgtagccagctgctgctggccttctgagctctgcctgcgggctgcggggcaacatggagatggacatgctgcaactctgctccgtcgttaattaaaggttcccttcctaggtgttgattttggactcaacagtgacttgacgtaagttttgccgcccgatggccaactgtttgtatagggaactgctgctcttcatctcaggccctaagtttgactgttctttgattcgcgtcatgatgtaaaaataaaagcgtgcgtctgtattggtcagctcctacagtcttcagacagaagtgctagaccaaaaaaaaaaaaaaaaaaaaaaaaaaaataaaaaaaaaaaaaaaaaagcggcc

SEQ ID NO: 28273 - DNA, 413 bp, Zea mays
  Clone ID: MRT4577_125799C.1
cccacgcgtacgggagaacataaaaacacttaatcgaccaaagtgagagaaatggtaaagctcttcaagaaaagatgaaattgaacaaaaaggcggctcaactctgtaatcgtgtggatgctttccgcggagatgccataatatttatgagggtcttgaatttactgagaggtcttttacctatactaaatactagaatagtttatatggacattattaggacattagctgaatcaactttgtgagggtgagaacgatatgctatttacttaacattgccatgccaatggttataccatctttattgataaaacataatttatgagttttcaattatagattattttttatgttttaacactattcatgatattgacacaatagactaattattatcaatttattggataatt

SEQ ID NO: 28274 - DNA, 397 bp, Zea mays
  Clone ID: MRT4577_12579C.1
agcagtggtaacaacgcagagtactttttttttttttttttttttttttttttggaaacaagagttccggctttagcatacaaatgcgtacagccattacataacgattattggaccataaagcagttgcttgaataattaaactaactcaaagaaaacaaaactagcatgtaccatagcggataggtaaatcagagaagttgcagctgtagcagcatgtatggataccacataccaatacagtcttatctccaattggagctggtcctgccttcaaaagctatatacggtttaggtgtacacgctttcgcggtctggcctttggacaaaagccttcccttagctgtgacaaaggggcttcaagaggaaaacagcatcatggcattggcatgggcgg

SEQ ID NO: 28275 - DNA, 747 bp, Zea mays
  Clone ID: MRT4577_1257C.1
gccatggtgactttaggaattccgccttcatctacctcgattgatgctcaagtggtgttcgatgaaaggcagccaaggtatctccctgctaacctcaccaatgcatactcagttgatggtgctggttcggttctgtaaccagtggcacacatgttgttcagaagatatatgagggaattgttgctcaggatcttgtgcatataaatcaaccatggcctccaccagctccattgggtattcagctagtgttcgatggcatgcctagtaggtacatcacctttttcgcccatgtatacttggttgatatggttgggtcatatggttctgaagatctccatgatgcccagagggtgtttgagagtgtgaccaaatatgttttggtaatgccttggtcactacttggggatgtgtctaacaaagtgccttggccaccacctattcagttcaggattcatgccactcaacgcaggccaattccttggccatccttcattggtattaccatttggagacactggttaaaaacattgtcattggtgccccactacgcagtgaacatgagaaagagcatgtttacacattgttcatttagtgtgatatgttggaagcattgctttgagtttctacaaaatgcatggtcgggagttgacacagctactacattgcgtctttgaggtaatgtccagcaacatgagctcctcattcccattgattctggatcgtcccatgattttatcagtgatatat

SEQ ID NO: 28276 - DNA, 337 bp, Zea mays
  Clone ID: MRT4577_125800C.1
ccatttgccaccaaccccgacgagcggcgatgaccggcacggtgtctaaactggcggcgccccgtacggcggcaccgccaatacggacggcgtccctccgaaccgccgacctcgccttcgcccactgcgcgcgccgagtccgcgtatacgttgccgggcgagccacgagacctataattgcgatggcttgggtcaaggaaagaaatggagcaccgaccaacaggactgcgcttcatgatctgtaccagatccagggcctgttcccgaggtacgacaaactatgccgccctgtcacagacttaatgcccaatatgcgtcagtggagaacaaggagtta

SEQ ID NO: 28277 - DNA, 383 bp, Zea mays
  Clone ID: MRT4577_125801C.1
gtcaaaaagccagcggcggaggcgcctgcgacagagaaggacataaaggctgcggcgaggtaaaagaacagggcctacatgcgcctctcggtgggcaagtacaaagagggcggacagggcattgatgggacaaaaagggcaacaaagaacctggagacctacaagatctacatattgaaggtgctgaagcatgtgcaccctgagcatgccaatttagcacaaggtccagtgcatcatgtactacgttataaacgacatattatagaagatgagggacgcgttcgacaagctgtctcgctacaacaagaagcccaccatcacctttcgtgagatccagacctaggagcgccttgttctcactgacgagctcggcaagcacgcct

SEQ ID NO: 28278 - DNA, 674 bp, Zea mays
  Clone ID: MRT4577_125802C.1
tctatctttctataccaagaggcactcctcaactcccccgtcatccgcgtcatgtcctgactgctccccatggtctcccccactcgacctcgactacataggcctctcgacagacgcggctgcctgcgctgctcacgagctacatgaaaggtaccacaattccgacgtgccttgccgagaccctcgacgacataccgtccaaggtgagcttgccaccccaacctccctatacctgctctcggctaaggccaccaagccatgacttatcggtactagacaaccacgcgcatcaccacggtgcactgttccgggaaacctgagaacctacaggaacatgagagaaacaataaagctgcatctagaccgaagccggcttcaaaaatgcagatggcgcgatgcacaccaatcaagaagatacactgaaggaactgtgatgtcctacaatcgcctacctagaataggagctgggtacacgctgaggccaagaaggaccattttaatcctgtacgacaaggtcactatgtgtgcggcgcctgaactcacctagattaacctcaagacttaccagaactgacaacgactgtgacacactgaggttaacaacatgaatcagagtttatttgactgcttcggacggcatatgtaactaccgtaagcaccttgaatacgatctg

SEQ ID NO: 28279 - DNA, 285 bp, Zea mays
  Clone ID: MRT4577_125803C.1
ggctgcatagctcagtgggcttgaggccatctgggaccaggtatttaaaatggatgctatgttggtatgaactagtcagttccatgcgcctggtggggatgagcttatttgtcatatggggataactcctcacactcacatccctaaagtgtaccaggagaatattgtaaacaattttattgcactatattttctatgtttggcggtggaggtgggaggtcttgatattatctgaaacatgaagctgtgtaaaggggatatgtctgtggtatcagaggaagctgc

SEQ ID NO: 28280 - DNA, 207 bp, Zea mays
  Clone ID: MRT4577_125804C.1
tcgagcggccgcccgggcaggtacaagctttttttttttttgtttttttttttatacttttttttatctaaacatgtgaagtttttgaagctgcacaaaacatagcgaccagagacagcgatgatattattacctcgaatccaggcacacattttaatgcacttgaaagactacacacgactcgctaggatacaatctaaggataca

SEQ ID NO: 28281 - DNA, 541 bp, Zea mays
  Clone ID: MRT4577_125805C.1
cggccgggataactcccattcctcttcagatatgtcctttccaatttctctacgtccgagactacgccaatttcagccttcatacgattatggactccactgcaaccgtacgacgaggcatgaggaaatgctatctcctcctgcggtcacgtcgctatcacagaacaagacacgcgcgctgtcagctaaactgcctcgacgatgccatgccggctgatgcgctatgacctgtagaaagaccattacgggcaggtttgatgctcttcgaccctcttacctgggactggtgctgggaaacatcggccccgagctgttgttgctcgccgtgaacgctctgtcctccaagaagaaaggactgattattacccgccactcgtttatcgtgatcagctcatacgaggtaatgaggaagctggtaaccagtgtagcccatgcgcactacgccattggctccgcagatatcttgaccgatgccttgatcgcaacaacaatgttgacgacttctgcactggtctccaaggatgcctcgtcttccacgatg

SEQ ID NO: 28282 - DNA, 697 bp, Zea mays
  Clone ID: MRT4577_125806C.1
gccggcccgggtgcgaaatcaggctatcatccagtacgtcatccatcagcaggaggcggggagagtgacttggccgtggcccgtgggggggagatcgagtgagagctgccaaggatcgaatcgaaggaagctaggagatcatccagccgccggcaagaaattaggcagcagcagtacgtcatgtgggagatgctgcgggcgacggacgggctggtgccgctggcggagaaggaggccgccgccgtcgcggccgccgtcggcgccaggaagcgcaagaacgcgtggaggcgcttcgtctactactgctgcgcgttctgagatcgatcagtctgctggtgatcctagctcgctatagctcctgaaagatccaaggtcgcgaggttcatgaactcgcgcgtcaccaaaaaatcttcagcgcgtgaccggggttgtcgtcgctcgtcaggagacagagggcttcttccaaggagctcgttcggggagacacgagagtacgagactgtcctgtcctatccccggagaagattgactgattgagagacgatcgttcgttccggcgagagaccatgtgtacataggaagagatatttgaagcgcatagagaaagctttgatcgaaatttgatcgaagtgtacccaaaaagaacttcaaatcaaaaaaggcttttgttccaaaaaaaaaaaaaaaaaggccccta

SEQ ID NO: 28283 - DNA, 422 bp, Zea mays
  Clone ID: MRT4577_125807C.1
gggacgggaaggggaataagctgaggggaaggcaaggcaagcaggaatcggctggattgcgcgccgacttcctggccgagtttttctagccatccgagcgaggcagtcccatctgcgaagacccggttccgttcggcggccatgcggatggtttctctgcttggtctgtcaggtaggctggcgtgtggcgtccccctgattgatgtccaagtgaagtgatcttggtttggagttctgcaattgctcttgtcgtgctgggctctgctcagttacttgttgatctgcggtagcttggtcttgcttattccgatcgacaataaagatagcaaagcttttcttcgtgttcgtgcaaaatctgtgcttttacctttcttgcgcttatagcagcctgcctgtgaagaagtccctgtttcaaatccagc

SEQ ID NO: 28284 - DNA, 412 bp, Zea mays
  Clone ID: MRT4577_125808C.1
agcagtggtaacaacgcagagtacgcggggcaagaacgcgtggaggcgcttcgtctactactgctgcgcgttctgagatatcgatcagtctgctggtgatcctagctcgctatagctcctgaaagatccaaggtcgcgaggttcatgaactcgcgcgtcaccaaaaaatcttcagcgcgtggccggggttgtcgtcgctcgtcaggagacacgagagtacgagactgtcctgtccccggataagattgactgattgagagacgatcgttcgttccagcgagacagcatgtgtacataggaagagatatttgaagcgcatagagaaagctttgatcgaaatttgatcgaagtgtaccaaaaaaaaaaaaaaaaaaaaaaaaaaaaaaagtactctgcgttgttaccactgctt

SEQ ID NO: 28285 - DNA, 441 bp, Zea mays
  Clone ID: MRT4577_125809C.1
tccagtcatccatcagcaggaggcggggagagtgacttggccgtggcccgtgggggggagagtgagtgctgccaaggatcgaatcaaaggaagctaggagatcttccagccgccggcaagaaattaggcagcagcagtacgtcgagaaagatgtgcaactgcatggaccgagctgccgtgccggtgaagagggtctggctcggcatcgccgcgcgcctcggcctccgccgaaagaccggcctggggaagctgcggaaggaggtgcggacgtgcgagtaccgcgacgtgcacgtcatgtgggagatgctgcgggcgacggacgggctggtgccgctggcggagaaggaggccgccgcggccgcggccgtcgcggccgccgtcggcgccaggaagcgcaagaacgcgtggaggcgcttcgtctactactgctgcgcgttctga

SEQ ID NO: 28286 - DNA, 951 bp, Zea mays
  Clone ID: MRT4577_12580C.1
gcaccgtcgtgctcaggtttctggtgttttctccattgcgttcatctccctctgtgctcctccctgtcgcgccctccctggtggacacgtgcagctccctcttccttccatgagttttttgaaaccaagatatcaccaagactggacttctaaaaaatacgccatccccgttttagaacgatatgtgctgggctcctctcgtgacggcttctctcccggcgcttcgacgccgcccgggagtgccccgttcttagaacggatatgtgctggagctcctctagtgacgctcttctctcccggcgctggagctcccctatcaagtcttgtccgacggcactccggggcgctcctctccctggtcgcggcggtgctcctcttcctgatgttgatgattactcggcccagccagcagtgcttctccgccagcagtgcttccccgccagtgcttcctcgctcccggaagtgcttccccgcgaccggttatcgttccctgagacgctcggtctcgctcccgacctcaacaatggagaccccgccaggagcgatgacgtcggcaccggctgttgtcatccccgatgacaaccatggttcattcttagttgaacagttaccttgttgttgtgctaaaccctatacattattcattactacacattgtgttagatgcgtataggtccgtcactattgaagatgttgaccactcattgattaaggcaccaacaacgcttgaggagatcggtgctctgcctcctatggatgttgtaaagcttcgttaatggtcaatggccaatgagagtgttatgtacccaatgagagtgttatgtaccttaaacttgtatttctaagtactataagtgaactttcagtgaacttgttgttttcagtgagctttcagtgaactgttaaccggtattagaatcaatgaactttcattgaactgtgaactaggct

SEQ ID NO: 28287 - DNA, 2260 bp, Zea mays
  Clone ID: MRT4577_125810C.1
acaacaacctaacaagttaagaacagcaagagttcgttgattcagcgctccattcactaaacgggcaaagccttgggcgtcaatcaccttgagctctcccgccgctaccgcaatctaaatcgactcgtgcagcaagccaaacccaccctgatcaatttccaccaaggtgtctgccgctaggatagcgggcgcttcgataaacaccagtcgtcgcaagtcttcctgggcttggttttagaagtggaaaaattttgctcgcttatctaaactgtcccatttgcgatgtttgactttacgagtctgcctaacgagaaatcaaggttttcgggtaattaggcggtgaaattgtctcatttatagtcataaatgggacattgagaattcagataagttataaaatttgatgcctggaagcattggtagataaagctttcagccttaacgaccaaaatttttccgttgctaatactaagctacgtccaacaaaaactgctctaacaaaacaatcgaacacgggaaggaatcttccacttctaactccaataagtctttgtcgcctgtgattagataatcagcctgtcctaccagcgccagcaccaaaaaaggtacatcaaagggatcgctgttgcagtgatttcggccgcaattgatatttatcaagcccaacaattgggtaaatttatttttcctaaagatgcagttgctatttttaccgttgtattactgaatggtattttggggtatgtgcaggaacggggagcggaaaaggccctagcagccctcaaagacctatctacgtccagggtgcgagtcattcgagagggcaaaaccaccgaagtggaatccacggagttagtaccgggagacctgattctgctagaagcaggggttaaagttcccgctgacggtcgtattttagaaggggccaatctccaaattcgtgaagccgctttaacgggggaagcagaagcggtaatgaaacagggagatgtgctgttacccgccgatagtgccttgggcgatcgcctaaatttagtttactccggcacagaagttgtccagggccggggcacagtgatcgtgaccgcaacgggcatgaagacagaattaggaaaaattgcctcagccctgcaatctgtagaaccggaacccactcccctccaaaagcgcatgacccaattgggcaatgtgttagtcagtggttctttgatcttggtggcgatcgtcgttgtggggggaacgctcttcaaaccggatttgtttatgcagttggttgaagtatcccttagtatggctgttgctgtggttcccgaaggactacccgctgtaattaccgtcaccttagccttggggacccaacgcatggccaaacgcaatgcgctgattcgtcaactgagtgcggtggaaaccctcggttccgtaacgaccatctgctctgataaaacgggcactttgacccaaaataagatggtggtgcagtctattattagcgatcatcaatgatttcttcataaatatattcccctaaagattttaagaatttttcgggagaacttttatcaagggaacctactgaaatataaattgcagtatagagtgaatgtttttttagcttattttcaatgattttggcaattgatgtttttccaactctcttttgtccaaagatgattgaagattctaattcgtcagagaaaattttattttcaagctgtctaatttgttctgaacgaccaattaaatcgttttctttagaaatagcctctaaactgtagggtttttccttacttaatttttcccagtttagttctgtattttgtggaagcaactcaccactaaattcttcatggcacctggtcttgtcgcagttataccaatcaactctacccaagataatttcttctagtttttctttgtttttctgcacaagaattttggcttcaaatatccgatgtgtagattctaatggctcgagatttccaatatatattttagggtcataaagcatcaataaactatcatctacatcaagagtaacttcaatatcaaaagcttttcctttgcctatattattcacttgaatttctatatttaatagttggtcttttatgtggagaggatattttttctttatgagttctacacgtattattgttggaacaatatcatctctctttgtataatcttcatcaactaaattaagtagcctcttgaaaaaattaccaatacaagtttcaactaattctgattgtttggaaca

SEQ ID NO: 28288 - DNA, 393 bp, Zea mays
  Clone ID: MRT4577_125811C.1
ggtaccccgagccgccgggccattccacttcgcccagggtgccccgaggcgggggggtgacctgaaaaaacactgccccctgctaccccgccccgctcccgctcgcccacgcgaaccctaagcagctaggctttgctgataaaagagctccagcgaccgacgaggagaagacaataaagctcaaatcttgtatgcgcccgaaccgggggggacacctgccgcacaaaagccgcaagatgtaaagatccttgaggtttggacggacaacctcgagacagagctagccaagatccggaacatcgccaacgactatcccaatggaactatggacactaagttaacgagcgttaaaagacaaccggtcggaacttacaaaccggagaactagttcaa

SEQ ID NO: 28289 - DNA, 327 bp, Zea mays
  Clone ID: MRT4577_125812C.1
ggacggacagccaaggaacgcgttaacaagaaccagggcacaccagtacacccacgaaagacgtgtttctggggcggtcgaacagcgcctgggcgataagagactgtacaagagtgggggcaccaccaagcaggacggcgtatcctaagccaaaacggcacactgacaggcacgtctgcgacgagacggccgaccccacgccttcataagaagagggccatgccgctacacggggctaacataaacacaacgaacgcgggtacaggtgcaacaacgacacgggggtcatactggcagcaggacacgaaccgcgcttgtactatgacc

SEQ ID NO: 28290 - DNA, 355 bp, Zea mays
  Clone ID: MRT4577_125813C.1
gggggtgtttttttttagaagactcaagtcttcacagatagatagatagatggataacactggtaaccagttgcataaacaggttcatgggtcataaaccagttgcatagatcgattgatggatattatttttttggccctttattttccctggggtgggatgtatgggtgcgcagtcctcctgcgctctttcggaaaaaaaaaaagtttcataagcaggtgcatggttcacaggtccccaatgggtcgggtgctttgctcgtgatgaggaaatggcgcatggctgatgtggcgggtttctggggggcgtctctgtttactgacttttaagaggcggatggctgtttctggtgct

SEQ ID NO: 28291 - DNA, 527 bp, Zea mays
  unsure (1)..(527): unsure at all n locations
  Clone ID: MRT4577_125814C.1
agcagtggtaacaacgcagagtacttttttttttttttttttttttttttttggtttttttttttttttttttttttttttttttttttttttttnccccgctaaagagctaaaaaaaaaaaagtttcaaaggagggagggaacaaaaataggctaactacccactcaaaacacaaactagtgggcccagcccagagcccccatattttaaaacgacacgggggctttacggcccacccccaccgatgggctgaaagggcaggccatataacccccgacgggggccccacaaacccgacaggggatcggcacacaaacccattttttattcgcccacaacaaaaaacgacgctcctaccctcctttacaaggggggccccgccgccccacgtaggacacgacgggaccccgaacacaaaagcgggtttttcctagggacctatgccggccccatcccgtgctgttgccggggcagggcccccagcgcggcccaccccagggggaaggctgacccagggagctacccc

SEQ ID NO: 28292 - DNA, 431 bp, Zea mays
  Clone ID: MRT4577_125815C.1
cgttgataaaaaatcatatcttctagtggataatccgaaaaggattgcagcaagatgtatctcctcttggttcatttttgacgtttgctcaacaattccatatcaagcgtttggtctactatttaaaaagcatgcaaatggcctcgcttacagaattcttaacatgctacggttatggcgccttcgtcgcctcagtgatctatttgccagactagaaaaggatattaggttggactactactggataaggtgcatcaaactaatatctgttactctttttacagtacattgttcaggatgtttcaattacctgatagctgatagataccccaatccagcaagaacctggataggagcagcaagaccagactacagatcagagagcctatgggttcgatatgttacatcgatttattggtctattacaacac

SEQ ID NO: 28293 - DNA, 1366 bp, Zea mays
  Clone ID: MRT4577_125816C.1
ctcgtgggatcatcactgccatctctctctgactctgtgtccgtctctaaactctagtctgtgcgaatctgctgccagcagcgaggaacagaacagtagccaatttgccatctcacagttgcgttcctccgattccccgtcccccgatggacctgtctcccagctcgtcggcgccatccgcgccgccggtgccgtgcgagtggtccggcgccgggctcggctccgcggcgtgcggcctcgcctgcagggtgctctgcgccgtcgccacctgcgtcttcgcggccgtggggtcgctggtcggggcggtgacggggtccatggtggggctggcgaccgagagcgggatgctgcgcggcgccggcatcggggccatctccggcgccgtcttctccatcgaggtcgccgagtcgtcccgcgacctctggcactcgggcgactccggcgtctggaccctcctctacatggtggacatcatctccagtctcttgagcggcaggctggtccgggagaaggtggggccggctgttcagagcgccgtgcagagccagatcagcgccatcagctcgccgttcgaggagacgagcgacctgttcgagaccggcagcgtgaggggcctccccgaggccgcggtgcgccggctgccggagacggtggtcgcggaggacggcgccgtggacgcggccggccaggcgctgtgctgctcggtgtgcctgcaggacttccgggtgggcgaccgcgcgcggaggctgcccgggtgccgccacctgttccacgtgccctgcatcgactgctggctcctcaggcacggctcctgcccgctgtgccggcgagacatctgaaactgtgaatccatcgcccgcggtcgtctactctgtgactgtgaaccgccatccacgtcgccggaaaccgggtgtagtgttgctgctttggacgagatggtcagttagttgagtagggttcctactttgtaggacggcaccccgatgcccgtaagggaaatggtgcgctctgacgctctgttaactaaaaaaaagaagagagaaaacagcccctcagcttcaaagaatcaaaaggggaaaaaaatcataatagtgaacaaacgttcaacgacaaaacggcacaactgacggtcgcatgcaggttcaggccgagcttatctgcggattcagaattattcgtagttagctatagttggagaatgaaaccctaatcagggtgattagggttgatagtgaatatatatagctgagtgttatgggtcaaagctaattaacgaaggtatatacagagacgtaaaccatactctaaaaccccgtagtctcattatatcatgtacaagtgtcgataccggagcgaaactcacgaa

SEQ ID NO: 28294 - DNA, 582 bp, Zea mays
  Clone ID: MRT4577_125817C.1
aatgacaaagtgtatagagataaatgtcacaaatatcataaatgtcatcattacatagcggaagtcttacaaaaataaatgataaatataaagcgaactaaacgtccatcattggcgccataaagttgactgagagacgccacctagatcaactcgtactcctcattgtacggctcctcttggaccacatgttcttctccttcaatgagctcctgctcagcaacttccctgctgaacacctgactcctcatccactggctcttcctttgccgggtgatgatcaagaattgtgacaactccgcaaccatcatcccggattgatggattcaggcggtgcctgtcaggttgagcgtccgtggaggcagcagcagatgggcgcacggccggagagggagccggaacaagcacaccagtcatgacggtagggtgctccactgccgaccgttcgtagagattggtcaacttggagacgtgaagacggatgtcgaccacggaaccctccatgcagggatgccaaccgtcgaaggagatggccaccgactcaagctgagacaagcgcgtctagttagccagggagagcga

SEQ ID NO: 28295 - DNA, 709 bp, Zea mays
  Clone ID: MRT4577_125818C.1
agtgccagcaacgcaggagagaagctcatggtcagcgtcagcctgctgtaagcatgtaactgacctgtttcttccgtctgtttgtcgtggacgcacgcagatcagcgccatcagctcgccgttcgaggagacgagcgacctgttcgagaccggcagcgtgaggggcctccccgaggccgcggtgcgccggctgccggagacagtggtcgcggaggacggcgccgtggacgcggcgggccaggcgctgtgctgctcggtgtgcctgcaggacttccgggtgggcgaccgcgcgcggaggctgcccggttgccgccacctgttccacgtgccctgcatcgactgctggctcctcaggcacggctcctgcccgctgtgccggcgagacatctgaaactcggtcgtctgctctgtgaaccgccacccacgtcgccggaaacgtggtgtagtgttgctgctttggacgagatggtcagttagttgagtagggttcctactttgtaggacggcaccctgatgcccgtaagggaaatggtgcgctctgacgctctgttaactaaaaaagaagaagagagaaaacagcccctcagcttcaaagaatcaaaaggggaaaaaaaccataatagtgaacatacgttcaacgacaaaacggctcatctgacggtcgcgtgccggttcaggccgcgcttatttgcgggttcggtatttttcg

SEQ ID NO: 28296 - DNA, 607 bp, Zea mays
  Clone ID: MRT4577_125819C.1
ctagaagactctcgagttttttttttttttttttttttaccgtctggaattttacatgcgaaaaatttgcagacgaggaacacaagagttgcctacgtacgatttacatcttaagaccttactttactttagggtaggaaaaagaacctccgacgtaactaagatcagtccagtaattaaattatttacctaggacgccacgtcacgtcagtcgtcgatggccttggccctcatgcagcaggacgggccgcgggccttctgcttgggccgccggctgtcgcgccgccgcccgtacaggtactccacaagctgcacccgcgaccgccgctgcacctgcacggtggtgctcgccgccgccgccttggccgcgcgccgcgccgcgcgctcctcctcgtgccgcagcagcgcgtgctggaaccgctgcagctccagctccagccgcccggccttgtccgacatcttgcgcacgcgctccaggatcttgcgctggctccggctgcgcaggtccacgtcgccgccgccgtcgcccgccgacgtgaactcctccgccttcttcaggagcttaacgttcgcgtcgaccagctccgcgatggcgccctccgcgccg

SEQ ID NO: 28297 - DNA, 294 bp, Zea mays
  Clone ID: MRT4577_12581C.1
tgctatgctggttatatgtatgtgaaagaaataatagaagcgttgcatcgtctatccaaaaagaaaaaaaagaaaaaaaaaaagaaaaaaaaaaaaaaagaaaaaaaaaaaaaaggaaaaaaaaaaaaaagaaggaaaaagggatgaggataagaaaagatgagagcgtacacggagaggcgagtgcaaggagagaggagtaagatagagacgcctaaagataaggaaggggccccgaacgaaaaacgtcagggccggaataaacatggggatgccagggaaaaacggggggac

SEQ ID NO: 28298 - DNA, 275 bp, Zea mays
  unsure (1)..(275): unsure at all n locations
  Clone ID: MRT4577_125820C.1
agcggccggggggccgggcgcggtgcacctaatatactctacgggagccctaacaaacccaatggaatcttcataggccttgaggacctacatctattcgggcgacccccccttcacccattgtttgtgcaacagatttgctatcgaatgggtcgtgattccttgcgaggaggggcgaangttatttttctgtagtccttcggctgattacacaactgataaaaaaccgggggataaaaaaggaccaatatggcatcgaggatgacagtggtgag

SEQ ID NO: 28299 - DNA, 453 bp, Zea mays
  Clone ID: MRT4577_125821C.1
gtgccatcatcagcgttggagaaagaagaggtggacaggttatggcagccgcatgccaaaaggggaggggcaggggcagggcgcgtccgctcgtcgtcgagaaagacgcgaggagcggcgtcgggggcgaccatcgcgtgcatcccgctccgagtcgttttcagcaggatcaacgaggcgctgagaatgccctagctgggtgccttttgtggccaatgcatttgctttgggaaatgcttgttgtggcctgtcactaggaaggagcatggtgctgatgtatctatctatctatctatcatgtggttgagccactccactccactcacagtaataaaaataaaataaaaatctgcttctggtgttggtgatgtaataaagaaatgaaaaagcaagcaaacctggacagtgaggaaactgggtattggtacaacgaggacccagtcaattcttacc

SEQ ID NO: 28300 - DNA, 3694 bp, Zea mays
  Clone ID: MRT4577_125822C.1
gacaaaacagcccatttctgagagatcgctttcagctgcaactactgaaattgaaggattgcgggacaagaaagctgcattggaagaatcgtgcaaacaccttcattccaaggttaatggccatcagtctgagagagccatgtttgttgcgcggattgagggcatttctcataccatggagaagctatcagagaagaatgtcttcttggaaaaattgttatctgataacaataccgagctggagttgcttagaaggaagctgaatgattcagaggaatctactcatacattccgcaaccagaattctgtacttcgatctgaaaaaagaactcttatgcgcgaggtggatagcatcaatagtgctctactcagtttggaaacccaatatgcagagttagaagggcgatatttggatcttgagcaagacaaagacaaggccctcaatgaagtgatcaaacttcgagagctgttgaggctagaaaaacacaaacacaaagaagccaccaactcagacatgactaaattcagtgctatacagaagcagataggccttctgctaaaagaagttcaccgcagggaggaccagcttcaagaggaggagcacaggattgttgaagctcagactgaaatttttatcttacagaggtgcttaggtgacatggctgaagcaaatgctgatgtcttggcacaattgcagaagcaacaagtggtatgcaaggatcaagaggagaaagttgatttcttgtcacagaacaaccagcagctgactgaagggataggttctgtagtggaagtactgaatctggatgagaaatacgaatcattggatctgatgaagattgatgttgttgtgcagctcctcttgcatgagatcaagtgcctactgaatactatttctgatgctcaggatgtgaagcagaaccagatccttgagaagtcccttgttgtcacgcttcttgagcactttgggcgagaggtggctgacctgaggtcggaaaggagtgttctgaagcaagagtggcaagcaaagagtgaggagctgcagcagctgcagagtgaaaagcatgacctcctaaagataagctgtgagctacggaaggaaatggaggctcgtaaccgcaaagtggatgaactgaaatctgaggcaaagttcttggttcgacaactgtcggaattgcaagagtcacggcagtcgttgcaagcagagattgtcaagctgattgcagagaactcttcactctctagcaaagtttacagatccagagagaaagagacgtcatttgatgaggatttcagcacacttgttgatgaagcgatcaggacagatattcttggtgtcatttttagaagcctttatgaagagaggacatcacaattgcagcgtttgcatgaggattttgggtctctacatgcagcaggcaatgagctgtatcaggaaatcaagctgatgaacaagaagctcggagacctacagcttgagaacaactatcttgagaaggaactcagtagaactctaagcatctgtgatggctctggtacagaaatttcctccggaagaaggcgtgctatgaggagggacacgaagctattaaaatctggcaggaaaagccaagagggtggccagaacatggaacaacgaaaagaagttgacaatgctggcctcgagaaatcgaacgaaatgcttagagtggagctccagaagttgaaaaatgaactgcaggtccttaaaagcaaggaacagcctgtgattgacgtgaaatcttgtgacgcagagatcactaaactgctggccagcatgcaattggccacagcgaatgcgtctctcttcaaggagaaggtgcttgagctcatcgtgacatgcgagagttttgagatcagtgacatggtgcagaaagaggtgctgaaagaggagatcactcggaggaactcttacgtggatgagctcaaggacaagcttaatgccattgagattgagaacagaaggctgaaggttgatctgaacggcgacttcacactgctcggagcattgcaaactgaagttgatgccctggagaaacaaaccttgtctctagccaaggattgcctaccaccaagcatgctcaagaaggaggagaatccactatcacctcagctgtcaaagattgctgtgaggccaagtgaagatcagaacaccacaaaggtggtgaaggacatggagctgcagaaactccacgggaccatcaaagcacttcagaaagtggtgtcagataccggggtggtcctggagcaagagcggcttgacttcaacagcaacctccaggacgcgaggaagcagatcgagatgctgaagctgaaggagatcctggacagcgacgccagcgacgtgaactacgagcggatgatgaaagacatccagctggacctcgtccatacgcctagccggcgagccgccgcatcctcacacgggcgccacaggaagaagaactcagtagccgcgacggcgcagtctgacgacaacaagatgctcgcgctgtggagcgtggacagggtgagcagcggcagccggcggcacgacatggacctgcggccaccacagagcgaggcggccgagaacgacaagggaaagaagcggtcgtcgtccgagccggtggttaccgtgaaggacctcagcgtggacaagcaggaggtcctcttgcggcccattgtgggtgcggtggtggtggcgacgggctccacgacggagccacaccgggagtggaagaagaaggtgatcgaccggctatcctcggaggcgcagcggctccgggacctccggtccatcgtccaggagctccgtgccggcgtggaggcgtcgtcggacgcggagctggacggcgtcaaggcccagatggccgacgcagaggacgctatcgcggagctggccgacgcgaacgcgaagctcctgaagaaggcggaggagttcacgtcggcgggcgacggttgcggcgacgtggacctgcggagccggagccagcgcaagatcctggagcgcgtacgcaagatgtcggagaaggccggtcggctggagctggagctgcagcggttccagcacgcgctgctgcggcacgaggaggagcgcgcggcgaggcgcgcggccaaggcggcggcgtccaccgccgtgcaggtgcagcggcggtcgcgggtgcatctggtggagtacctctacgggcggcggcgcgacaaccggcggcccaagcagaaggcgcgcgggccgtcctgctgcatgagagccaaggccatcgacgactgacggtgacggccacgcacgccctcatcagtattcggtagtcaacccgaagatgatggttagttaattaattaatcaggagaaggtgcagtaacgtttgatttaaaattttgcttaagttcatgtcgtcctaggtaagtaattattactggactgatcttagtacgtcgttttttaaacctaaagtaaagtaaggtctaagatgtaaatgggtagtagcctagtaggcccgcagccatgactgtaatcttcggtctcattattcctcgtcagtaaaatttcaaacggtaatcttcggtctcaaaaaaaaaaaaaaaaaaaaaaaagagtaaaaagaatagtcagcttataccaactatggccttcttacactaacattaattactataccatatccatgtctgcctatttggtcttgttttttaataa

SEQ ID NO: 28301 - DNA, 239 bp, Zea mays
  Clone ID: MRT4577_125824C.1
cttttgaatgtttaaccaaatctgttttgagaccgatagtattgaatcagtgatgatgtccaagctcgcctgatggggagtgatagcaagccacatgattggcgagacagattacaccatcattgctgaccttacaattggtcagtctacaggccaaatcatgacgggagctccttgtctggctgagcgcctggccttatacaatcagctgctcatgatcgaggaagagctatgcgttt

SEQ ID NO: 28302 - DNA, 341 bp, Zea mays
  Clone ID: MRT4577_125825C.1
tttggggcggccggccttggtttttttttttcttttttttttttttttttttttaaaaaaaaaaacactcccatactttatggttaaccaaattatgagttttcggtcctcaggtaaccttacccacttttgaaaacaaaacacaaaacaatgtgccaaatttctccttttggtatgcaaaatggcaaaaagcttaagcattcattaacaatccccaccccaaagtcttacacctgccaataaagggctgcatacgaaggcatccaagactataataacctcgcaagggcagggcgcttaacaaggaggggctaaacataattaaacctttacacgaacca

SEQ ID NO: 28303 - DNA, 253 bp, Zea mays
  Clone ID: MRT4577_125826C.1
tcttggacgcgtgggctggtacaagggcccaaccctacttgaggctctggacttgatcaatgagccaaagaggccttcagacaagcccctgcgtttcccccttaaggatgtgtccaaaatggtgggattggaaccgttcctgttggacctgttgagactggtgtcaataagcctgggatgggtgttacttttgggcctacaggtcttacatactgaggttaagttcgttgtgattcctcttgaggctttttca

SEQ ID NO: 28304 - DNA, 412 bp, Zea mays
  Clone ID: MRT4577_125827C.1
aaaactaatattttcagtgtcagtgtagaattgccagaatcgtatgaaaacgacgagacggcagctttacaggatccactcatacgcaatccaacatgctacgctatactttttgtatataatcacctatatactcttcactgtccaacaagttcacacctcatattacctgtaaaactgttccgtaacctaattctaccctcttactgcataaccctcttttgccagatcctgcaaatgacaatattcccgcaccaatcccacttcccaacatttgtgcagtcctacatgccaatgacaatctccatgctcaacatcattaagtgcccgaaatctgtcccttacatccacccttacctgttcatttagaacaccattaccgccaccatattcaactccatggccttccttc

SEQ ID NO: 28305 - DNA, 1168 bp, Zea mays
  Clone ID: MRT4577_125828C.1
tttaatttttttttttttttttttggggcatgcaacggtcgcctctttattctaccatcgataacgcaccaacgtgacagacagtacatgcatggacatggacatgtggtactggtactacactggtagcgcgcgcgcgcacaggagacagcacacaacgtaaacaacaaacagcacacgaccgtgcgcgtgggcagcagggagatggtcgaccgtctcaatcgcgtgcatccaccgacaccattgcaggtgcctctcgtatgggcatggatccatcatccacgttcttgtcgacctcgtaggcgttgcgcttctggacccaaaggccggcgaattcgcagtccttgtacctattgaaccacggcccgccggacgtgtagtgtatagcgcgcggggccgtgccagccttgtcggcggggtcgacgcggttgtgccccacgaggaagttccacacgaacggcacctcgccgatctcgtcgtcgtcgagccacatgaagcggtgcaggtacgcaccgctgcgcgtgctgacggcctccggcgtgagcgcggcgcggttcttggggtggccgcagttgaagagcaccatggaggaccagttcttgcgcgggtacgccgtctgcacggcgccgtccatcttggtggcctccgtgggcgtgtagtcgtggtgcacgcacagcaccgcgcgccgcgggtcggcgcgcgccagcgccaccagcccggctacgtcggccacgaacaggaagtcgcagtccacgaacagcgcccacccgcggtaccccgccaggtagggcgtcaggaagcgggtgaaggagaactcggtgctctccgtcgggccgcgctcccgccagtacagccccgcctcgcggagctcctgctgcacgatcggggtgatctccagcgggatggacgagcggcgcagaagggagcgccggcacacgcggtacgccacgtcctcgcgggagtcgtagcccacgaacacccggaacggctccgcgccggcgtccgcgaggcacgatgacttcgtcggcgacatttccgcgcacacacggggtgggggtgggggtggggggcaccggcgggcagctaggcgcctgcgctgtaggttcggcagataagcagatgcgctttgctgctgcgactgcgagttcccggcccggccggcctcgag

SEQ ID NO: 28306 - DNA, 301 bp, Zea mays
  unsure (1)..(301): unsure at all n locations
  Clone ID: MRT4577_125829C.1
cgggncgacccacacgggcgaggccatatcttcagcaataaacccaaaacagtcacatctctcgtcttttccacactcacaggaggcactgactgacttctaagtgcagccttcaataaccgaatgcattcccctacactgtttgcagaggggtgccccacttaaaaaactatatgctttaatataaaccctggctacctagatagatgaaacatttaacggggatcattgaataataatgtgtcacacattaccattggtttaagattcacactgagcaatgacacttaatgaacaattg

SEQ ID NO: 28307 - DNA, 538 bp, Zea mays
  Clone ID: MRT4577_12582C.1
ggatcgagggccgcgccgactcggacctcgtcctcaacacaatcatcttcaactgcttcgtcttcccacgggtttgcaacgaggtgagctcgagggagatggagagggtgaacgtgctccgaggcatcctagacaacaacgtgttcgccatggtgctcggcagcaccgtggtgttccagttcgtgatcgtccagtgcctgggcagcttcgccaacacgacccctctcagcgtcgcgcagtggggcgcctgcgtcgccatcgggttcgtcggcatgcccgtcgccgtggcggtgaagatggtgccggtggagtaggcgggcctctcgatctctctcggagttgagaaactggaggcaggcaggcgggcagtagttgttggcttgaaatgtctataacagcagtattcttttttttttttgtggtaagaacagaacagaacagaacaggctttatccatctgtgattctactacatttggtgtttttcttgtaacatgctccttgctacattactgcatatgtgggccagctgaagaact

SEQ ID NO: 28308 - DNA, 156 bp, Zea mays
  Clone ID: MRT4577_125830C.1
cgtgtctgagcttactgaacagtttgaaccagtgcaactgcttagagcatatctgagggatgttgagaaactgtcacatgccaggactagcgcatgtctcctggagcacagaatgagatgaatcagcgtgagttgtgtgcactgaaatctgtcatt

SEQ ID NO: 28309 - DNA, 202 bp, Zea mays
  unsure (1)..(202): unsure at all n locations
  Clone ID: MRT4577_125831C.1
caagtcatatctaggtatagtagctcccttgagaagnatttgagggaggagccatgtctgaggagaagcaccataccacctgtttcacaccgaangnaagaggaggagtcggagggcgcctccggcgtaggtgattacgagaagaaggaaaagtaccataagcacatggcacaagatcggcgagctcaggagacatcgacga

SEQ ID NO: 28310 - DNA, 269 bp, Zea mays
  Clone ID: MRT4577_125832C.1
gggaaggaccgggccgaccacagccttttcgggccacggtttaccaaactgcattttccatttcttgaaggcggcacgttccggggacgccgggcaggaagctggggcccctccggcctccacccttgttgtttgccttgctgggtcgttcgcggcctcggttggccgacctgggctttggtccaggtttcctgggtggcccgccggaaactcagtagggctgtctcgccggataccgtcccgtcctctaggaggggggctcccggaat

SEQ ID NO: 28311 - DNA, 641 bp, Zea mays
  Clone ID: MRT4577_125833C.1
tgaaatgatttttggattggacaaaagaacaagaccttaccaactatcaagattcaagccggtccatatttccaagcatggatcacaactccgagtgaaaacgaaaaaaaaaattatgatcaatacacattttacacttgtgtcgtcatatttgatctgctccatccgagaaagccacgtaccagaagcaagccccaaaagaaatttcaaaaggaagccggttgttgtgcatcacttccaagactgagttctctttcgcgcgaagaacatgacaatccgcgggaagaaggtcttcctctgcctcgcgtccgcatccgcatccgcatccgccgccgatcccgtcatcaccagctccgtccgcggcatgtagcctgccctcgggctgactatgtgcgggttcccgcgcccctcgccggtgccctggtcgtggagcacggagatctcggcgaggcccgggcggggcgagtcggtgtcgccgggcgcgcgccgctgctcgtgctcggcgcgccactgcctcagctcccgctccgctgacagcttgtcgaactccgcctcctcggcctccagcgtcgcggcctccagcgccagccgcctctgctcggtctgcttgtccagccgcgccaccttctccagcctcctca

SEQ ID NO: 28312 - DNA, 275 bp, Zea mays
  Clone ID: MRT4577_125834C.1
tgcctgtgggctgtgggtctgtactgtgactcaggaccagagcactccttactcctggcagccttataaagtcatgccaatgatcatgattgaggactgggagggaaaggcctcccctctgcaaatctttcacaactacactcctaaaaataactcaagtgcatgtgcctggaagcgcagaagagtgacttcatgacataccaatcatgttgtataatataggttgtataattcacgttaaaattttaccgttctatgtcagcagtattagaaat

SEQ ID NO: 28313 - DNA, 353 bp, Zea mays
  unsure (1)..(353): unsure at all n locations
  Clone ID: MRT4577_125835C.1
tagaagagcnagacggggcaggcacgcgnacagaagcgcggaaaacggcncgaggcgaggnncgcnggccggcccccgaagggggggcgnngacacagaggggaggcnncngccncccnagcagcaacggcnacaggcagcagcagccgncggcgacgaggacaggcgggcaaaggcgaaggaaaaaaacgcgaggagggggacgaccggagaaggcacnacgggacagcaagcacgcaagaaangaccaaaaaagagaacaagaaggcagcggagaggcgacggcgggccgccccgagaggacagggcgcaccccaggaagcagacgcacaggacgcgcaaaggcagacagc

SEQ ID NO: 28314 - DNA, 2151 bp, Zea mays
  Clone ID: MRT4577_125836C.1
gggcttgatgcccatgccggcaaggaagtaatttactttgtggggtggtctgttttcacacaatccacctcgtgagagatggcactcaagctccatcacttggggacctgttgaagatgaagtcacaggaaggggtgcgtgtgttgctgcttgtttgggatgatcctacatcgaggagcattcttggatataagatggatggtttcatgggcacaagagatgaggagacacgcagatttttcaagcattctccagtccaagtgttgctctgcccacgatctgctgggaaacgccacagctgggtgaaacagcaggaaacaggaaccatttttacccatcatcagaaaacagttattgtggatgctgatgctggcaactataggagaaagatagttgcttttgttggaggcctagatttatgtggcggacgatatgatacaccttggcatcctctgtttcggactcttcagaatgaacacaaagaggattattacaatccaaactttaatacagttgatgctcgtggtccaagggaaccatggcatgacttgcattctaagatcgatggtccagctgcttatgatgttctacagaactttcaggagcgttggttaaaagcggccaaacgacatgggattaaaaagttggcaaaatcctatgacgatgctctgctcactattgaaagaataccagagattataaacataaatgatgcaatatattttagtgacaatgatccagagacatggcatgttcaggtgtttcggtctattgattcaaactctgccaagggatttccaaaggatccacgagcagcaaccatgaagaatcttgtttgtggaaagaacgtacttattgacatgagcatacatacggcttatgtccatgctatccggtcagcccaacattatatttatattgagaatcagtacttcattggttcttcatttaattgggattcaaacaaggacttaggggctaacaatttaattccaattgaaattgctctcaaaattgcaaataagattaaggcaaatgaaaggttttctgcatacatagtggtacctatgtggcctgagggtaatccaactggggctgcaacacaacgaattctttactggcagaataaaaccatgcaaatgatgtacgagacaatatacaggaccttgaaagaagaaggcctggatgatatgtatgagcctcaggattatttaaacttcttctgtcttggcaaccgtgaagttgctgacagcactagcacttcaaacgcttcgaatacagcaaataatcctcaggaacaagctaggaaaaataggagattcatggtctatgtacattcaaaaggcatgattgtggatgatgagtatgttatcattggatcagctaatattaaccagagatccatggaaggaataagagacactgagattgcgatgggagcgtatcagccacaatatacatgggctaataagctttctgccccacgtggacagatttatggctacagaatgtccttatgggctgagcatattggaagcattgaggaagacttcaactatccggagagcctggagtgcatgaggcgtgtacgtcatcttggggaagagaactggaagcagtttgttgccgatgaggtgacggagatgagaggccacctcatgaagtatccagtaagcgttgaccgtaaaggcaaggtgaaaccgctacccggatgcacaacattcccagatatgggtgggaacatctgtggctcgtttgtggccatccaggaaaacctcacaatataaactttagctgtgcaacttacataatgtctggtggcctctgcccagggggaccctagcactagcttatcctctttcttgagagcgtagatagggtgaaaattttgcaatagctacaggttgcaggcaagcaggggaaatggtaatatgggctttctccccttgacctttttttctggattcgttcagtacatatataagtagccaatcaatttatacctttattgggtacatgtatagaaaaattaaagaggttcaggaatatcacatttggaccaaggtattccaatgtagatcctggaaagtactggtaaatgttcagaatgtaaattgatcctgcagaaaattttaaaaaaaaaagcggttt

SEQ ID NO: 28315 - DNA, 226 bp, Zea mays
  Clone ID: MRT4577_125837C.1
attcttggagacacacgggggggagtataaaaaatgttggtgtgtttataaaatagatcctacatggagtaaacaagatactggctacacaaatttgacatcatgaagagcgcacaactttaaatcggccacccaagaatacaactgcaattgcccgaacaaagtaggagccaagttacccaaacttcatatcaacaatgcctacgacggcctcatcaatgcacac

SEQ ID NO: 28316 - DNA, 459 bp, Zea mays
  Clone ID: MRT4577_125838C.1
gtaaccttgcaaacttttctctgagtatgtgatcaccacctctaggactgattactcttcacctcctgaaggaaagcagaagttcacgtgcaattcaaggatgttcctgatgacattttagaagtatgttcatagaagttactcatagagtagtatactcttaccatagatttacttgtatagtaatgatagtgcctttacataaccactaaccagacacaacaaagcaatatgttctttcataggttagagatcatggggtctgaaactatcaaaggattagctaaaggttcaatgactacagaatggggtagggcagatccatgcattgatactggaaaaccagtatagtggtccctttttagattgaatgaaatgcagttgtgcagagcatgtgcattgctgcaactatttttatactgcttttttactgatattgctatggagatcaacaatttt

SEQ ID NO: 28317 - DNA, 265 bp, Zea mays
  Clone ID: MRT4577_125839C.1
ttttgtttatatttcaaaaaaaggggggttaatacacataaccaaagtccctcatggaataacgtggcataacataatatcacctaactacagctcgggagagagggaccactacaatttaacccgtaatgcatccaataccgaagggaattcatggaggaacataaccaacacaataatcagctacatcccattacctctactaatcatccaaccctgagttataaactgcgagcctatgaacaggatacacatctacctgggg

SEQ ID NO: 28318 - DNA, 602 bp, Zea mays
  unsure (1)..(602): unsure at all n locations
  Clone ID: MRT4577_12583C.1
tcgaggnnccggccgggaagtgccacatgcgggcgcttttacaccttcacagtctgcgccgggtcatggatttgtgaagcatcgctcctcgtgcgctgcgctgtgctcatgttcttcatgggatgggcttctgcgctgaacatcgggggtgtgtccttcaacccatgccacgtgctgcaactctatagcgacatcagggccatcttgatctacgggtaaatagccgcatgactaatgcataccaccgcatcgaggtggtcaacgacaagctggagaagtatatgttgtacgaccacaagtccgacaacatggtgcagcatggacgtcgcgcactgacgctcagcatggtcctcgataagaactacgatgaaacagtaactaggaaacatgagaggatatctgacttgcacatttcttccaccacagaaggatgaaggcattcatatattacactaccacaatggtgataaatatgaatgctactacgactacttccatgacaataataatcataccctgtgatcgcatcgtattgccactgcgatgatgcacctatcgaatgcccagaaggcagaagagaccatcttccccaatgctgatgg

SEQ ID NO: 28319 - DNA, 897 bp, Zea mays
  Clone ID: MRT4577_125840C.1
cccacgcgtccggatttctaaagtaggtcagtggtactggattcttttttttaaaaaaaagtatatgctattttctattttctttagaactaggtttgtcggtttgtttggcaaacacgatctatgtactgacctgaactttgtgtattccctttttccaagcaggatctcacgttgacttactctgtttcgttgcgctctttcttttcaaaactagattaactaccaggattatctcaagttgaggacaagggtcgaattcctccaaactacacaaagaaatattcttggcgaggatctgggtccgcttagcatgaaggagctagagcagctggaggaccaaatagagatatctctgaagcatatcagctcaagaaagaatcaaatgctacttgaccagctatttgatctcaaaagcaaggaacaagaattgctggatctcaataaagacctaaggaagcagctgcaagaaacaaggccagagaacgcgctccgtgtctcctgggaggaaggtgggcacagtggcgcaagtgggaatgttcttgatccttatcaggggctccttcagcacctggacaacgatccttccctgcagttcgggtaccatcatcaagcctacatggatcagctgaacaacgaggacctggtggacccgaatgagcatggtcgatctggatggatatgaaatgctctgatgaccccaaataaagttgatgcacagcagggattcaccctgcaggacgcgagactatgtattgaggctaagacctcgtgtgtgttgtgttgtgtgcgaagcttggaactttataaatcgttgtcatgcccatggctttctaaaaaaaaaaaaaaaaaaaaaaaaaaaaaaaaaaaaaaaaaaagggcggccgtcgcgttcta

SEQ ID NO: 28320 - DNA, 349 bp, Zea mays
  Clone ID: MRT4577_125841C.1
gtgtagttacgttgccaatttcggttggttctcataaactcttttcgaattttatattcaaactcttctttcttttcgacctttctagttaaaatgtcaaacaacaaacaatctgttcttgagacgggggaggggctttctagctccacaaatggaatgttgcgcggggcaacgacgggaggtggcgtgatccaccagccgatgcggttggggttcgatagtaggaagttttcctacgatctgaacaccgcaagagcgtccacttatgtggattttggggtgacgaagatggaccgcttggatccggaccgggcaagggtgttgtttgacaacatccgagaaaggtacg

SEQ ID NO: 28321 - DNA, 1311 bp, Zea mays
  Clone ID: MRT4577_125842C.1
ggagagtctgagaccgagagagggacgatagaaggcataggagctaggagcgatgaccgtacgcgcatatactaggagcagcaaattaaaggcatatatagacaaatagtagtagtagcgagtagcgacgggcgagagagaaagcagtgctactgctacgactactccttagctcgtagccgggtagaaggtgacgagagagagagagagaaagggggagagagatcttgatctagttctagtagactgctagcagtgaacaggcccggtggaggagctgaggtagctgggaaggagaaggaaggaatcgaagaaaaaggcagcaaaacaagcaggatggggcgcggcaaggtggagctgaagcggatcgagaacaagatcagccggcaggtgacgttcgccaagcgccggaacgggctgctcaagaaggcgtacgagctgtcggtgctctgcgacgccgaggtcgccctcatcatcttctccagccgcggccgcctcttcgagttctccacctcctcatgcatctacaagacgctggagcgataccgcagctgcagctttgcatccgaagcatcagctccactagaggctgaattaaataattatcaggagtacttgaagttaaagacaagagttgagttcttacaaacaactcagagaaatctacttggtgaggacttgggtccacttagcgtgaaggagttagagcaacttgagaaccaaattgagatatctctcaagcaaatccgatcatcaaagaaccagcagatgctcgaccagctctttgatctcaagcgcaaggaacaacaactgcaagatgctaacaaagatttaagaatgaagatagaagaaactagtgaagaaaatgtgctgcgactgtctagccaggatattgggtgtagtggatctagtgggcatggtgatgaagccaaccaagaacaccttcaacttgctcttgatccttcgctgcatatagggtatcaagcttacatggaccacctgaacaatgattaagttgcttctttgtgcgctgtgtgctctagtggccatggatcttctatatatgttggacgtaatgcttttgataaatcctctatatataaccatatcggtcctagctttatgcatgctactgtatgtactaaactaagaagccctacgacttctgttgaggaagaatgttctgacgatcatgactttttcttgctaaataataactactgtatctcattttgaattgatcgtctaatgaagagccatgcttttgtgagtacttaaaaaaaaaaaaaaaaaaaaaaaaaaaccacccaa

SEQ ID NO: 28322 - DNA, 1634 bp, Zea mays
  Clone ID: MRT4577_125843C.1
ttgggtaccgccggccgggccgggatccacgccccccaaattgctggcaacgaggactctgctgcttagagctagagagaggacacggaggtagagagagacgaagctagagggacgcaaaacaagctagctaggaggaagatgggtcgcggcaaggtggagctgaagcggatcgagaacaagatcagccgccaggtgacgttcgccaagcgccgcaacgggctgctcaagaaggcgtacgagctgtcgctgttgtgcgacgcggaggtcgcgctcatcatcttctccggccgcggccgcctctttgagttctccagctcctcatgcatgtacaaaacactcgagagataccgcagctccaactactcacaagaagtaaaaactccactggacactgaaattaactaccaggattatctcaagttgaggacaagggtcgaattcctccaaactacacaaagaaatattcttggcgaggatctgggtccacttagcatgaaggagctcgagcagctggaggaccaaatagagatatctctgaagcatatcagctcaagaaagaatcaaatgctacttgatcagctctttgacctcaaaagcaaggaacaagaattgctggatctcaataaagacctaaggaagcagctgcaagaaacaaggccagagaacgcgctccgtgtctcctgggaggaaggtgggcacagtggcgcaagtgggaatgttcttgatccttatcaggggctccttcagcacctggacaacgatccttccctgcagttcgggtaccatcatcaagcctacatggatcagctgaacaacgaggacctggtggacccgaatgagcatggtcgatctggatggatatgaaatgctctgatgacccaaaataaagttgatgcacagcagggattcaccctgcaggacgcgagactatgtattgaagctaagacctcgtgtgtgttgtgttgtgtgcgaagcttggaactttataaatcgttgtcatgcccatggctttctatttctttctcggagctgcgcaaaaccgtctccatttctgggcttctcaggacagctggacgcgggaagccggaaccaaaaactctgttccgcactcatctcctctgctccaggcttcaacatccgcgcaggagcgaaaacgcgtcccaaatccttttttatttgccagaaatttctgagccctaacccgcgtgcgcgtggtgcctgggccgaattattaggagatccataggctgtctcactccctctggccagcagcctgactgtgaactccagactccgatcgtctggtcctctagctctcatgtcatggactcatggaggctactactcggcatgttcctggcccaggaaggagtgagcgagctcgccagcccaataccaaatgcgccggcctacaaatccaaaagccccaatttagcgctgagtcctccaggcttcgagtcatcgctgccacgtgtgtatccctacccatcgcacatgggtcacttgccacatgtttggttcagttttttctgattcttttaataagaatttggctgtaaaaagaatcttgctgtgtaaaaatccaaaagcctcaatttagcgctgagtccttcgggcttggcccttgcgtg

SEQ ID NO: 28323 - DNA, 336 bp, Zea mays
  Clone ID: MRT4577_125844C.1
cccacgcgtccgtgtatctctcctgtttcggccttgttcgcgtgttcccctcttttgctgaggccgacctctacacgggtcgacataaccattgagagggcggtcgagagaaactagagctgccgacaccatggggagctctaggaccattgttgcgaccaccgtgctcctactcggcctcgtactactggctttcgcagacaccgacaacgctcgtgttgttgcagaactgtttggttaggaccaagttcagtagacatgcatccaggtgcacttcaggaagaaatgcctgagcttgacaaggctcccgagggtgacagctctgcgcgaactgct

SEQ ID NO: 28324 - DNA, 387 bp, Zea mays
  Clone ID: MRT4577_125845C.1
aaggacctcgctttttcataatttaacaaaaaaaaaaatgccgggcccaaaagtaaatccccgctggggaccttggtctcaaccccaaaatttgcccccaatatcaaggggtttgacttattaaaacccccccccttccaaaacccccaaataaataggggcttccaatctaccgccccaagctttgcaaaatataccgggcctacagatccctggggtcccgaatggcccctcaagccgggggcccaagcaaaaatgcattgacagcaacccctttattcccattcttcttataaacctcaaaaaaccccttgatctcttgcaggcgatgaggaaaccccccaccggtggcggtggagggaccattttcaggatcctcaacccaaa

SEQ ID NO: 28325 - DNA, 427 bp, Zea mays
  Clone ID: MRT4577_125846C.1
gggggccacaacccccccccctttttaaaaattaaatcggggcccaaaaacaggggaaattccctcataggcgggggaaattaaccgggtttatttcccaaaaaaacggcccctaaaggggcctaggggggaggccaaaaagggccctaatttgggggggcgtttttccttaaaaaaggccggggggcgtctgggggtccccaaacacaaaggggggaggggcccccccccattttggggatttcaggggctggcccaccagggcaaaggggggggcccctggacggggacctgccccctcgctccggggaaagggggccggcgcccacctcctggccgggggccacactccacccactggggggccctttgccgatgggggaaaacggagcgtttcccctttggccccccccgggtacctgcccgg

SEQ ID NO: 28326 - DNA, 351 bp, Zea mays
  Clone ID: MRT4577_125847C.1
attcggctcgagatctaccggcccactcagggggagtgtgtccacatgtcactgtatggttcctgggggtctctatgtgtgcacgcaggtgtgtacagataacatcattcagggttacgcagaacctgactctggatctctagaagctataaggtacagactgaaacatatgtacgagagcgtgtcgtcaacaccagaggattctggtgttccgactttaattgggcatgataaagtgtcggtacggttggattgagatagtcatagaacactgcaggctatatgtgctggtatacacgacatggagaatgagtctgcggttgcatgggtctggaatatcgattggcatgg

SEQ ID NO: 28327 - DNA, 668 bp, Zea mays
  Clone ID: MRT4577_125848C.1
cattgggtacctcgaggccggccgggatacttaaattcaacatagctactagaccatgtcgattgctagcaaatctgccacccctgccgagatcaggtccgaggacgtcctctctgccaagaccgacctctgcctctcgaacgccatcgtgacggccggtaccggtctcgccgtcggtgtcgtcgcgtcggccatcctcttcaagcgtcgcccgtggcccgtcttcttcggactcggttggggactcggccaaggctaccaagactgccagcgcgtcttcaaccccgccgccatccccggctaccgaatccaaggcgagcacgacaacgtcgcgtcgcccttcacgctgaaccgatccacttcgtcggctccgtcggcccaagaggcgtcgaagaagtttgagcaaacaaaggagcaaaccaagtccaaggtttctgaactcgtccaacaggcaaaggtcaaggcgtccgaggcggcgcaaaaggtagaggacaaggcggtcgaagtcaaggacaaggtcgtccagggcgagaaaaaggcagaggccaaggtcgacaacttgaaggacggcaaaaagtgggtctaaaatatcaccaatttaattctcttgcggtagtttgcaaatcaaaacagtatatcagtacaaaaaaaaaaaaaaaaaagcggcc

SEQ ID NO: 28328 - DNA, 316 bp, Zea mays
  unsure (1)..(316): unsure at all n locations
  Clone ID: MRT4577_125849C.1
cctcncttttttttatattataaactggaactgtggtttttttgggtgggaccctatttcatttataagggaacgcggcctgtgaaattccctgcttttaaaagcaagagagaaacctaaactactcagtgtgggtaacatggacccctacacacaaaaaacggttccacttgattccaagacatctgggaaactacaaatttgggcccaggagtgagaagaatctgggtcctttggtacggaggaaggccacataacacgacaaggacccaaagaccttggtgataaagggggaacattcgggggatcctcaacc

SEQ ID NO: 28329 - DNA, 527 bp, Zea mays
  Clone ID: MRT4577_12584C.1
tcgagcggccgcccgggcaggtacaagctttttttttttttttttttttttttttgggttttttttttttttttttttttttttttttttttttttttttttttttttttttttttttaacaaaaaacgatttttcttggaaacctttccaccctccccaacaaaaagggggcccttccccccctacctcaaaattcgggtttcccgggggaagcaactagcccaaattctcccatctaaaaccggtgagacccccaagggggggaaaaagcttttagcccctgaacaaacccccttgaaattgggggggcggcaaacaatgggccctttgaaccccccttcttgggggggggcattcaagcccgtttggcggggggtgaaaaaacccccccctaggccccaaaaaaaccgtcgtttttacccccccccccgggccccccccggaagcaaatgactttgcaagaagatcttcatccctccccggcctatttttaacaaaaggggcgggtctcccccccccagtttaa

SEQ ID NO: 28330 - DNA, 267 bp, Zea mays
  Clone ID: MRT4577_125850C.1
attattttttatatattttattccactattttattttttcaatcgaatgatttttttttatttactcctccacatacaaacaatgacccaaaaaaaccatgaatacaccagaaccacggacacgaacacaaaaaaaaaatccaacaacaacagcaaaactcactcaatcaatagagaacttaccccccgaatcaaacctaaccacccaaactatccccttacgttcataggctttaatttcttcacgctcttcatccacatccctgc

SEQ ID NO: 28331 - DNA, 138 bp, Zea mays
  Clone ID: MRT4577_125851C.1
agggcatgcaaggtcacgacgatgcccgttttcatccgggataccgcataggctgtcgcccatgggcaccatagccaggacctcggctcacaaaaaggtcctccgattctcaaaggccgttttgctcggcatcacgta

SEQ ID NO: 28332 - DNA, 360 bp, Zea mays
  Clone ID: MRT4577_125852C.1
tccgcgccggggccggcgcgaggcccgcgcgcgcacccgggggaccaagggcgccgcgcgcgcccccccaccccggacgccgcccgaggagcggccccggcaccgcgcccctccgccagggcccgccccgtgctggacccccgctcgccggggcctcttcgcggggggggtctcttgccctacccgcccttctacttaccacgcacggcggctctgccctgcgggaccgccgctgacaacgccggcgcgcttctgggggggggcctcctgtgggcgcggttctagcctcgcggggttttggtctgtgcgggctgtgtggtgtgcggccctgcgaccctgacggcgtccctggtggggacc

SEQ ID NO: 28333 - DNA, 1647 bp, Zea mays
  Clone ID: MRT4577_125853C.1
atggcttcacaaggtgatcaagccacgccaccttcggccatgaagctagtgttcccaatcacaggcatttcaagctctaaaccagcgaataagaagcagaagaaggaagcacaaagaaggggtcttattgttgtgcatggaatccaagaggctgctagaagggccgaagagaattggatagattccaaggccattcacaatatagatgaagttgaagctcaccagcagcataagtacataagagataaagctgcttcagcggatcaaccaaagtctatgcttttgtttgaagacatagctgaacaaaaggtgttgtttgggtcccaattatctaaggaacaagaaaaagcactattaaaattcttgttcaataacaaggatgtttttgcttggtcagccaatgatctttgtggtgtcaacagagatgttatcgagcactctcttaatgtagacccaaccatcagaccgaggaagcagaagcttcaaaagatgtcacatgacaaagccgaaggggcaagaaacgaagttaaaaaggctcctcagtgccagagtgatcagagaagtaacatacccagaatggctagccaacattattatgatctcgacaaggcgtgcccgaaagatgaattccccttgccaagaatagactccctcatagattcggcagccacttcgaagctcatgagcctgctagactactattcaggcaatcatcagatttggatgaagaaggaagatgagcccaaaataagcttcataacccctaatggaacttattgttatcttatgatacccgaggggctcaagaatgatggaggaagctttagcaggatgacttccaaagaaggctggcctcaagttaaatccaaaaaatgtgtcttcggggtgaagggaaattttcttggttgtctggtatcaacaaaggggatcgaagctaacccaagcaatatagaagctatactttggatggagccattaaagtcaagaaaaggtgcccagagattaacaaaaaggttggcatcattgaatagatttatttcaagatcagctgaaaggaatctaccattctttgaaatattaaagtcagccgaagtctttcaatggggaccggttcaccaaaaggccttcgaagatttgaagcattatcttatacagttaacaaccttgactccacattcatcaggagcttcgttgctattgtatgtagttgtttcccacgctgcagttagtgcagcgttggttcaagaaaaacaagatgaacaatcaaagaagcaggtcccagtttactttgtctccgaagtattaagtctatcaaaaaggaattacatggaattggataaggacatcataagaaatagagaagctacaggaaagcttggcaaatgggctgcagagctgaacgaatttgccattgattttgttcatagatccttgatccaatctcaagcactagcagacttcgttattgattggacgacaagggctcatgaagaaggacacctaacagataccgaagcctggacaatattctatgatggatcgtggggaactttcagcgcagccagattggagttcaattgcacaaacaacattgcagaatatgaagctgtccttttgggcttcaaaaacatagggccatgggaataa

SEQ ID NO: 28334 - DNA, 265 bp, Zea mays
  Clone ID: MRT4577_125854C.1
ggggcaaaccggaaaaatcatggtcatggaccccctgggaagctttgatggtggaacaagggaaaccgaaggggtgacaaagggggaaaaaaaataaaacctaaattcatgtttccaaaaaaaaatgagggggggggggtttgcccattaaaaaaacccggttggtacattacatacataaacctggtttgagggggggtctttatatcagggtttcaggagtatatttgccaggctatattctccattttttgggggcccgggg

SEQ ID NO: 28335 - DNA, 277 bp, Zea mays
  Clone ID: MRT4577_125855C.1
gagaattccttgtgctggagaacaaataattacatgaatgagtcaagaaattactatattgcgagccggtgcattgttgatattagtgaggtgagcataaatgcatttttcatatttgcacaatgttttaatcatttcaggggtgaaattcagaaagtaaataaactgatcaatagtcggttttcaaacatgatataccagatgaaagttatctatgattggttttaatattttatcaggctcccacatttatcccacgcgtccgcggacgcgtggg

SEQ ID NO: 28336 - DNA, 737 bp, Zea mays
  Clone ID: MRT4577_125856C.1
cctgcttctgactctgggcacagtctacacccaccaccaccagacccctgtcgcactcgtgtgccggccggcgacggcgatgatggcgactggcccatcgctcgccggggtatactccgccagagccacccgcctcgtgcctctacgcgccggcgcacgggcgccctgcgccggtgccgccgcggccgagcctgcggtcgagcacgtgcggaggctcgtggcggagttcgacccggcggtcccgctggactccgcggtcacgccgccgagcgggtggtacaccgacccggattttctccagctcgagatcgacagcgtcttcttccgcgggtggcaggctgtcggtcacatatggcaagtgaagaacccaaatgatttcttcacaggaaggctaggaaatgtggaatttgtcgtatgtcgggatgcaaatgggaaacttcatgctttccacaatgtgtgccgacatcatgcttcactccttgcatgtggaagtggtcataagacttgcttccagtgcccttaccatggatggacatatggattggatggcacccttttgaaggctacaagaatatcaggaattaaaaacttcaataagaatgattttggtctcataccaatcaaggtggctacttggggaccttttgtgttgatcagatttgatgatgagtccactgaagataatgtttatgacacagttggaaatgaatggttgggtagtgcttcagatctgttgg

SEQ ID NO: 28337 - DNA, 1986 bp, Zea mays
  Clone ID: MRT4577_125857C.1
gggtacctcgaggccggacgcgtgggcaccagacccctgtcgcactcgtgtgccggccggcgacggcgatgatggcgactggccgatcgctcgccggggtatactccgccagagccacccgccccatgcctctacgcgccggcgcacgggcgccctgcgccggtgccgccgcggccgagcctgcggccgagcacgtgcggaggctcgtggcggagttcgacccggcggtcccgctggactccgcggtcacgccgccgagcgggtggtacaccgacccggattttctccagctcgagatcgacagcgtcttcttccgcgggtggcaggctgtcggtcacatatggcaagtgaagaacccaaatgatttcttcacaggaaggtgcttacgtcttgtttcgatgcctcagtagttccagttagtagtaattttgctacgcctttcgtacatatataaataattttgctacctcaaaatgcttctaaatatggtgatttatgctggagactgctaaccttcactcatctaataagatgaagcaacaggctgggaaatgtggaatttgtcgtatgtcgggatgcaaatgggaaacttcatgctttccacaatgtgtgccgacatcatgcttcactccttgcatgtggaagtggtcataagacttgcttccagtgcccttaccatggatggacatatggattggatggcacccttctgaaggctacaagaatatcaggaattaaaaacttcaataagaatgattttggtctcataccaatcaaggtggctacttggggaccttttgtgttgatcagatttgatgatgagtccactgaagataatgtttatgacacagttggaaatgaatggttgggtagtgcttcagatctgttgggtacaaatggcattgacacttcactgccgcatatttgcaggcgagaatatattatcaactgtaactggaaggtcttctgtgacaattacctagacggtggatatcatgttccatacgcacatggggatcttgcatcgggtctgcagcttcaatcctatgaaacacttacatatgaaagagttagtgttcaaagatgtgaaagtgcaccagcagaaccagatgacttcgatcgcttagggacaaaagctctatatgcctttgtttatccaaactttatgatcaacagatatggtccatggatggacactaatctagctgtcccattagattcaaccagatgcaaggtggtatttgattattttcttgacaagtctctgctggatgaccagtgctttatcaagaaaagcctcgaagacagtgagcaagtacagatagaagacattgcactgtgtgagggggttcagcgtggcctggaatcgccggcctacagtgttggaagatacgctccgtctgtggagatggccatgcaccacttccaccgcctcatgcatgctaaccttagtgagtactgagtaattattctcatggacgcatcttgcaaagttgtacagaaccaaacgctttttttttggcaggacactgcatgaacactgttctctattgcaatcttgtgaattcagccacatttcagttacacagattggttgtttttatctaatttaacttggaccaatcttcaactaatggggcgcttcatcctcggcctcctacgcatgcacttctcctgcttctcctgctgagtcatcgggccaaggtgcacttttcctccctgttctgttcacgtgcccatgtgtcattcttgtttttcactgtttacgatcgtgagggtgttattgcaataataactgatggagaaatgagaatgattttcaaatgatgacatgattggcagaatgagagcgacaaatgaatgagctaaatcttttgaaatatgaagcaatctgatttctttccacagttatattccttcatttcctatgcattgcttaaaactgctattacatgttcacctactaatacccttggttttcttgca

SEQ ID NO: 28338 - DNA, 360 bp, Zea mays
  Clone ID: MRT4577_125858C.1
aaaaaaaagcaaaggggtttttttggcaaccatgtttgttcatacagacaccacgacggtgggacatttaaaaccctggtggggcatttgacatttttaaaacctttttttaacatatttggaggaccccgcccggtggtgaaaacaaactaaagttggggcagggggacacccattccaaggaccagcctggttgttgcgcgtccataaaataccacaaatttttttcccatgggggcggggattcaaaaacctggggcgctttttatgccccatggcccccaaagtttggggggggtggggaaaattctttaaaaggtgaggggggtcgccccttttaatgggccccacgtttcaaaa

SEQ ID NO: 28339 - DNA, 395 bp, Zea mays
  Clone ID: MRT4577_125859C.1
cggaacgacctgctactgatccgtgacgggggtgagtctttcagaatcatcgacaagactaaaagggacgacgcaagcactatcattcaaaaaaaggagtgggcccagtccaaaccaaacctggagaagcatttcaggaagctcagagactttgactactcgaattggttctaggaaaggttttcaccgcatctactgttgattatcctggagctagcagctggtttgatccactgagagatgaccatttcgaaattagataggttcggtgtaacgtagaacatatgccatctagggagcatggtaagctcaaaagtcaaaatattgtgattctgctgaatgtactactctttttttaaaaaaaaaatccttcacgaaatgagtttgttgaaaaa

SEQ ID NO: 28340 - DNA, 633 bp, Zea mays
  Clone ID: MRT4577_12585C.1
ggtaccctcgggttcggccgggatcgccccgcgtaaccctagcttcccgcaactgccgccgccactcccacgctcgcagccatgccgcccaagctcgacccggcgcaggtggtggaggtgttcgatccgtgtgaccggcggagaggtcggcgcaccgtcttcgctggcccccaacatcgggccgctcggtctttcccccacgaagatcggagaggacatcgacaaggagacggtccaggactggaagggcctgctcgtcaccgtccagctcaccgtccagaaccggcaggtcatggtctccgtggtgccctccgacggggtgctggtcatcatggcgctcaacgagccaaacaggctccgcttgaaggtctagaacatcaagcacagtggcaacatcagcctcgacctacctatcgagatcgtcaggaccctgaggcacatgtccatggccaaggaattggccggcaccgtcaaggagatcctccgtacctgcgtcagcgtccggtgcaccgtcgcctgcaacgaccccaaggacctggagcaagagattgacgacggcgaggtggagatcccgtccgtttaagaaggattggtgtccaggactgtgttatctgtgctgctgaagccattctc

SEQ ID NO: 28341 - DNA, 254 bp, Zea mays
  Clone ID: MRT4577_125860C.1
ggcgctaaaggcatgaagctgtatcacgattgaattgtgttgctgttcacgatagcatatgggtctatatttatggcctccttacaaactagatgggaattaacaaaagatgcatccatccattattttgctggccatttataccaaaccaaacagagagcaagaggattctccataactttttaacgacacacagacttcatcttctgagctagagattcattattcggggacagaatgtgcaattggttgaa

SEQ ID NO: 28342 - DNA, 1313 bp, Zea mays
  Clone ID: MRT4577_125861C.1
cctcgaggccggccggggtcgaagccgcagccatggcgaccaccaccaccaccactccacttatcgtctccttctcgcgcagctgcagctgcccctatccacaccgccacttccccggcaagcccaagctgcccgcacccacctcctgctccctctccctccgcctcctcgctgccccccttgccgtcctgccgcggcgcccgcgtgacgtgtcggcggcgtacggcgacggcgacatggacgacgacttcggcgacttcgaccccgacgacgcggacggcgtcggcgaggacgacgacgtcgacaacgagcaggactacgacgtcgactacgaccgcctcctagctcccgtcgtcaagccgccgtcgccgtcgggcgcgtcggcgtcgcccggggaggagggcgacatcgccatggtcgccgccgacagcttcgtctccacgcgggattcagcgtccgacaccgtcgtcgactacgccgtggatgaggacgagtttcacaagattaggctgctccactgcgacttccttatccgcaaggtgcccgaccccgacgacgacgtcttcgacttcagagagatgtatgtcacgccaccggacaccgacatctactccattccgagggttcttgccccgatgccgcagaagtacgcgaggtgcacgaagaaaaactttggccgttaccacgtgagcgagccaccagttgagcatttgcgcgatccactgtacaagacagagagggagatcatgaaggttttcttgaccaagcactacagaaacaggcgcgctgacgacccagatttttttcttgattttgaggagatctatgttatcgactcgagaacaaggtcaatcacaagagctaaagttgtggttagtgttcctgaaggaaagaaaagagaccggcggaacgacctgctactgatccgtgacgggggtgagtctttcagaatcatcgacaagactaaaagggacgacgcaagcactatcatacaaagagaggagtgggccaagtcgagacaagacgtggaaaagcatttcaggaagctcagagacttcgactactcgaattggttctaggaaaggttttcaccgcatctactgttgattctcctggagctagcagctggtttgatccactgagagatgaccatttcgaaattagataggttcggtgtaacactagttatagctcgtagaacatatgccatctagggagcatagtaagctcaaaagtcaaaatattgtgattctgctgaatgtactactcttttttttaattccttcacgaaatgaatgcactgtttgttgaat

SEQ ID NO: 28343 - DNA, 436 bp, Zea mays
  Clone ID: MRT4577_125862C.1
ccggtcgttcgtttggaagggttaattccaacacactggcggtcttaacgaatgcaaccggggtcccaaccaagggggaattaatgacagacataggtcctgccggggggaaatagtcattcacaaacacttccacaaaacaaaccagaaggaaacataaagaaaaaagggggggctcccgaatgagccaacaaacaaacattaagtggggatcactgaccgcccccttgccagcaaaaaaaccgggccacccaacttaataaatgaaccaaccaacccccagagacaggcggaaaaaggattgggcaatctttccctttctaactgactaactccgtgaaaaaggtcgtttgggtggagcgagctgtaccaactcactgaaaggcagaaaggcggtcacccacagaagcgaggactcacgcaagaaataacatgc

SEQ ID NO: 28344 - DNA, 244 bp, Zea mays
  Clone ID: MRT4577_125863C.1
ggtcttatggaaatactgacactggatttgcagggcaaagccgcagtggggcgcacatcttctgctaacatttcactagcagctggtaagattaaaatgcatgttgtaattaataggatggccacaagttgtttcgtatccatcaaccagaccatgctgtttatagatatcagttgccgacgtcttgatcttaattactgttgatgttttactccagatgaaaactacaaacatgtccattata

SEQ ID NO: 28345 - DNA, 822 bp, Zea mays
  Clone ID: MRT4577_125864C.1
cattgggtacctcgaggccggccggggtctttttcctttcgtctttgagatttttgcagccaacctcacgacctacgttactatctgatggactgatggtgcaaagcgttcgggcaagcaagctagacgcaatggcagctcctcttctcctcatcgtcgtcctcgtcgccaccaccgccgcggtctctgctgcaggctcggacaccaccatattccccacagaagcgctaccgaccaagtccggctacctcccgatccccgcggccaacgcttccatgtactacgccttctacgaggccacccacccgctgaccccgccggccgccacgccgctcctggtctggctcgagggcgggcccggcctgtcctccttcgccagcaacttcctccagatcggcccctacgtcttctcctcctcgcccgccgactccgacaccgactcctccgacgcgtcttccttcgcgcccccctcgctgcgcttgcgccccaacccctacgcgtggaaccgccgcttcgggctcctcttcctcgagagcccgctcggcaccggctacagcgcggcgccgtcgccctccgccatcccgacgacgcagcccgccgtggcggagcacgtcctcgccgcgctccagtccttcctctcgtcgcagccggacgacgccaccttccgcgcccgcccgctcttcctcaccggcgagagctacgccggcaagaccatccccacggtcgccgcgctcatcctggccaccaccaccagcaccaccaccaccaacccggctctccccgagcacctggtcacgaggatgaggatcaacctgcgcggcg

SEQ ID NO: 28346 - DNA, 308 bp, Zea mays
  Clone ID: MRT4577_125865C.1
gacacgcgtggggatgaagcgtggtgattgggaacaactcaatggatatatacgggctttagatgcaggcgctgtaacatcactgtactctggtgctgaaggcactagatgaactggcatggatatatataagctcatctcacgatgcctttacaccagcactcatgcaaggactttctgcttaccacgattgggaaagagcaccctttatcagaaaaaaagtaagggccggctgctttagatgatcaaggctatctggcgcaggcacatcaggactctatcctgtatcgatgcaggtaaggtcaact

SEQ ID NO: 28347 - DNA, 252 bp, Zea mays
  Clone ID: MRT4577_125866C.1
gggagggggtgcataagggggagaaaattttcatgtccaacctgggcataactacatattattttacggaagaacatctgcaatgtttttggcgaaaaactttggaaccacgaactctcattttaaatactggaatttaataccaaaactccattttacacaatctttcggtaaaaaaaaatggctgattcaaacaccttattcaggtgatagactgataaatttttttaaaaccacatatccattaacttt

SEQ ID NO: 28348 - DNA, 243 bp, Zea mays
  Clone ID: MRT4577_125867C.1
tgcatgcctaccagtccttttctctttgacatagctcgttggattgcaatctcaagcaaagcagactacaagcccatccataaacattcctgcgatcattgcccgaccgaacacgatgtggggggggtgtgcccctgcctacagtgacaatgccatgcgtaatcttacataggaattggatgcatccatgtgatggatcgctgagcaagtacaggtggatgtagtgagagatgtgtctgggcc

SEQ ID NO: 28349 - DNA, 321 bp, Zea mays
  Clone ID: MRT4577_125868C.1
cctgatttatgtgcttgtttatgtgttgaaaaaaaaaaaaaaaaaacacaaacccaaaaaaaaaaaaaaaaataaaaagggaatggataaaccaacacgagtttgtgccaccatattactacgtgataatacaatcaactcacagcgtaatccaaacccaacctaaccgttgatggcacataatatacagatcaatcaaatttcggtgccaactaatccaacagttcacttctatacatctcccccgttaatacgtgcaaaatttaacagcttcgcatcgactgtccactttactagccgtttagatcgaacgttcaaccg

SEQ ID NO: 28350 - DNA, 217 bp, Zea mays
  Clone ID: MRT4577_125869C.1
aacaaaatctataaggctcattcttttttcatatcacacaaataactcaggctcagatgatgcataatggtcgaaaggaaaaagaaactaatgatatctaacagggtatcagcaaggtgatcaaggatgatgaaacaaaagcatttagatgatctaatgactcagttgactcatgtgcagaaacaataccttgagatcatcacaaacttaaacttta

SEQ ID NO: 28351 - DNA, 521 bp, Zea mays
  Clone ID: MRT4577_12586C.1
tttttttttttttttttttttttttttttttttttgaagaacatatttcatttttattatcttttaggcatagacgggtatgttaatccatttccacgtacaattctggtaacacagacaggaagtgagacttgaactggcaagacctgtctcctattgccaaagcgttacattggagagatgcaagctccgaagttaaggatggtgcagtatcttccttcccagcctcgctgtgcatgtggctcccgttacacaaataaactccgctttttttctccaggcattgattcaatagtaatagtgctgtcccctttgtccccggcaaacttcctgctttccatccagagctctgagtttcaaatgttctgctctttaggttctgacagctgtttttggacttagttaactacagcaagtggaagccaagaaataattgtagtattaccctctctattgtgacagcgcttctttctgtaaatatatcttaggagttagactttgaatctttgatctcccacacc

SEQ ID NO: 28352 - DNA, 1016 bp, Zea mays
  Clone ID: MRT4577_125870C.1
acacccgcatccacaccccccgagctcagcttagctccactccagctccaatcgcagtcgtgaccagagcgagagccatctagctagagggccgtgaaaatgccgatcaataggatcgccctggggagccaccaggaggtgtaccacccgggcgccctcaaggcggcgttcgctgagttcatctccaccctcatcttcgtcttcgccggccaggggtgcggcatggccttcagcaagctgaccggcggcggcccgacaaccccggcgggcctgatcctggtgctcttctccaatccaattggtaaattttccaatccggtgcccccacaccggcatcctcacctcgtcagcgccgccggccgtccttctattctccatccccgctcagtcggataggcgccggttggggaaaattctgttcggactgttcatcttgtcggcatgtctcattatcacagcgccgattttgaagagatggaggatgagtacgacatgaacgagccagtcgatgacatggagggggaggatgagtaccaagagctcgtgattagggactctgatgcggaggatgaagacgatgcggaccaattgcataagctctccgacacttcagcagcagatgcaagaagtgggaaagatattcaaggaataccttgggagacgatagaagtcacaagagaaacgtacaggcaggcccgactagagcagtacaagaactacgagaacatacctaattctggagtagcagcaatgatgctgagaaatttagtatgggcaacatcgaagcatgatgtctacctggtattgcattactctgtacttcactggtcggccttaaacggtgtggatacagaaattatggatgtacatggacatgttgcaccgagtgagaagcacccaggaagcttattagaaggttttttgcatacccaaattagtaccatggcagtgaaggataatttgttagtagctggggggttttcaaggagagctaatatgcaaacacctagatcgag

SEQ ID NO: 28353 - DNA, 427 bp, Zea mays
  unsure (1)..(427): unsure at all n locations
  Clone ID: MRT4577_125871C.1
accgcatcccacaccccccgagctcagcttagcttcactccagctccaatcgcaggcgtgaccagagcgagagccagctagctagagggccgtgaaaatgccgatcaataggatcgccctggggagccaccaggaggtgtaccacccgggcgccctcaaggcggcgttcgctgagttcatctccaccctcatcttcgtcttcnccgnccagggggggggggtgnccttnannaanctnaccnnctncnnaccnaccaccnnaaanttacttancnncatnaaaatcaatncttcnttaaatgtgggaaacataggttcccatgacagggatatntttttaaggtatgtttatggtgaatgtaagaactggggggtactgagagggcacaagaatggttttnttgagttttaagggactactgatggg

SEQ ID NO: 28354 - DNA, 2055 bp, Zea mays
  Clone ID: MRT4577_125872C.1
cctcgaggccggccgggctctccaatccaaattggtaaatttcccaaatccggtgcccccacaccggcatcctcacctcgtcagcgccgccggccttccttccattctccatccccgctcagtcggataggcgccggttggggaaaattctgttcggactgttcatcttgtcggcatgtctcattatcacagcgccgattttgaagagatggaggatgagtacgacatgaacgagccagtcgatgacatggagggggaggatgagtaccaagagctcgtgattagggactctgatgcggaggatgaagacgatgcggaccaattgcataagctctccgacacttcagcagcagatgcaagaagtgggaaagatattcaaggaataccctgggagacgatagaagtcacaagagaaacgtacaggcaggcccgactagagcagtacaagaactacgagaacatacctaattctggagtagcagcaatgatggcatgcaaatcaaccgagaaaggaagaacatattatgaattcagacgaaatactagatctgtgaaatccactatctctcactttcagctgagaaatttagtatgggcaacatcgaagcatgatgtctacctgttattgcattactctgtacttcactggtcggccttaaatggtgtggatacagaaattatggatgtacatggacatgttgcaccgagtgagaagcacccaggaagcttattagaaggttttttgcatactcaaattagtaccatggcagtgaaggataatttgttagtagctggtggttttcaaggagagctaatatgcaaacacctagatcgagaaggaataagcttttgctgcaggacaacatatgatgataatgcaattaccaatgcattggagatattcaatacatctagtggagctcttcacttcattgcatctaacaatgactgtggggtaagagagtatgatatggaaagatatcagttgtttaagcatttccgattcgattggccagtgaatcacacgtcattgagccctgatggaaagcttgttattattgttggtgatgacacagatgctttacttattgatgctaattcaggaaagactattcattccatgaaaggtcacttggatttctcctttgcttcggcttggagcccagatggcctgacattcgccactggtaaccaagacaaaacttgtcggatttgggatgccaggaatctcaccgagtctgtccatgtcttgagaggcaacgttggagcaataagatctattcgttttacatcagacgggcacttcttgtcgatggcagaagcagcagactttgtccacatctttgacatcaaaagtgactacaataagagacaggaattggatttctttggcgaggtatccggtatgtccttcagccccgacacggacacactttatgttggaatctcggacaggacatatggcagcctacttcagtttggccgcctctacaattattcatacctcgactcactactatgaaggtcaaagaaaatatgtgttttccctcggcttataatcaacccagattaggcatcccaaatgaaatttaatttagcctggtattcctcgtaaagaatcctgtaccctggtgtatgtgtacataaaaaaactgtattttatagacaccagtagtctgctaccctgctttcagataggtatataaggtgtcaggattcaaatcgcaagttagatctcaattcgttatagcacaagatgaatccataaagtcagaactttgcatgttaagggcttgctccttttgatctgaatccatatggattaagtgagattgagcggggttaaataccaaacaagtcaaaatctttcataatttttttcaatctcatataatctatatgggataggaataatcgaagaaaccctaagttggatctgattttcttcttagatccatggtggagtggagatactccacggtgaatctaggtgaatgtcagatctaaattcactttttttattattgaagctctaaaaaaaaaaaaaaaaaactc

SEQ ID NO: 28355 - DNA, 203 bp, Zea mays
  Clone ID: MRT4577_125873C.1
aagaagggattgatttttggaggctcagctgatttgggtgtttaccacacaaggcccatgtttcccacatgagtcccgcggggcgtcgtatctgacaacaagctcacttgagcaaacacaaaggccataaagaccgcggaaccaaataccgcgagccagatggggacggcagtactaaaccatcaagcccaggcttataaaac

SEQ ID NO: 28356 - DNA, 361 bp, Zea mays
  unsure (1)..(361): unsure at all n locations
  Clone ID: MRT4577_125874C.1
aaaacccggggcgagccacgcgtccggttgctcgagattctttacagctttcaaaaaactgaattctggtacctcaaagagaaagggcaaaaaaactatgggttggcgacaccannccntcccntgagccaccccncccaggagaaaaggtggctgcccgtgccgtgcgtcgccaagcccggtcttactgagaccgcgcggcgagacctccatcaaaaacgcgactgctcgagccagatccacaaagcggccatggccatcaacaatgcccttcttgccgagataccgatcccccacctgtacaaagaaacactacccaaatgcgggcgggccaacattggggatcttatctatcttcaca

SEQ ID NO: 28357 - DNA, 874 bp, Zea mays
  Clone ID: MRT4577_125875C.1
gttcacagagaattcgtatgaaatttattgaacatgaaaaccctgaaaatttagtgagcatttttttacgtatcgatgatcatttgtctctattttcttgctccgaatttggagatgagtttgtatcgccacaccgcctaccggcacccttggccttggtgcacttccagaatccagaccgtgcattcctggtctgttcgaacgtggcaatcactcgtcaaattgacaccgctaccccttgcataaacgtgagatagttaaggcatgcttatacgtttgacacatcacacacttcgtctagtgcttaacatacgggcgccaggccgagcggctagcatcgcgcgctctcgctccggcggcgttcaggggaggacggggacacgtgccggacgacggacgacgtgcccagctgggtccggctcccctgccggctcgacgtcgccgtgcgtctcgtggaaaggatggtcgggcaacgccgccggccagacagcaccatgcttcttgtccaacgggtggtggtcggccaacgctgctgctggccccacaacggcgagggggcgctggagcgtggcgtccggatcgcagaccttctcgcacgcgtagctgcagtagtctctcatggacttgaacctggccatgcagtccttgaagcagtcgtcgtagcagtccgcgtgcgcgccgcccgcgagcagcagcagcaccgccgccgccgccgccgccgcagccaccatggccgccgctcgtccagcggccacccccatctcccgttgcgcctattgacgcaatctgctcgcactatggtggtgtgggctgcagactcgatcttctttgcgtctgcggccggcctcccggcccgccatcgctcgagggagtg

SEQ ID NO: 28358 - DNA, 1046 bp, Zea mays
  Clone ID: MRT4577_125876C.1
cattgggcccctcgaggccggccgggacaccaccacccgtcctcggccctcctctctctctctattcccccctccccggaggccggagcgctcgtgcggaccacgaggaggaggagagagagaggcagggagccctagccctgccctgcgcgccggcgtcgccagggttagggtctccccggggcccccgccttccttgccaatccctccgccgtcttctcgctctggccgatccccccgcccgacgcgcggggggcgcctagcggcgtgtctgcgttcggcctcgacggcgcggcgcgagccaatgctgtgtgcctgaccgtcgctttgggattgattccactcggaggtggccagctagccacccgagctcgctgtccttgccggtacggcgtttcctgaggaggttccgtgcgagatccgaaggccggcgtgatgcagcacgatcagcgcaagaagggttccgtggaggcagagtttttcacagagtatggggatgcaagtcgatacaagattcaggaagtcattggtaaaggaagctacggggtggtctgctccgctgtagatgtccacactggagagaaagtagcgatcaagaagatacatgacatctttgagcacatatctgatgctgcccggattctccgtgagatcaagcttctgagactcctaagacatccagatattgttgagatcaaacatattatgttgcctccatcaagacgggaattcaaagatatttatgttgtttttgaacttatggagtctgatcttcaccaagttatcaaggctaatgatgacctgacaaaggaacattatcagttctttctctaccaactgatccgtgctctgaaatacatccacacagctaacgtttatcaccgggacctgaagccaaagaatatattagcaaattctactgcaaactgaaattgtgattttggactagcacgagttgatggttctaactgcaaactgaaaatttgtgattttggactagcacgagttgcattcaatgataccccaacaacgatcttctggacaga

SEQ ID NO: 28359 - DNA, 233 bp, Zea mays
  Clone ID: MRT4577_125877C.1
accaggggttaccccggccgcgccatataccgctgcgccgcgctaatgaggcacacgccaccgggaagtgggccactacatggaaacatgacgggtaactgtatccaggaaaagatatagaaaaatctttttaaaaaaaaaaaaagggcggcgttaagatcaagctactccggctgcgagctacttttatggtacaataatatggcgcgttaacgcggaggaaactgcgtccc

SEQ ID NO: 28360 - DNA, 307 bp, Zea mays
  Clone ID: MRT4577_125878C.1
ggaaaatgctgagcgtgatgagcgtgccaagaagtcggtgagcatcaacaagttcctgagacctgttgacggataaaggtactacagccgtcgtggtcgtggaaggggccgtggggatcgtggtggctttacagtcggatacggagggggatacagtcgtggcctaaattctgttgttacatccattgaagtatcatgctcaattacgaagccttgctgggaagtgaatggcgcccagcttctgctgtcacccagcggtgcgctgtctgctggagttatatttcaattttgtccagaaacacttttt

SEQ ID NO: 28361 - DNA, 308 bp, Zea mays
  Clone ID: MRT4577_125879C.1
ccaacccctcgacccgagcgggttttttgcccaaaccgcggcggccggaagccgacggccaggaccgccaggaaaaaggagcacgaccgcgagaaaaggcaggccgaaggcgccaggaccaagcgaaagaacgccgacagaactcccgagagcgatgcgaaagtgctgacactgacgagcacgagagcgcgaacaataagtacattgcgcctgatgatatcaatgagtgcctagggtgactatggggggaagaacagaaccctctcagtcgagccaaagaccttctaagtgtaagagataaatagagg

SEQ ID NO: 28362 - DNA, 530 bp, Zea mays
  Clone ID: MRT4577_12587C.1
ccggccgggcactggtttccgcacgctactacttccattgctcgcgttcattaaatcagaatcacacatgcatgcagcactctaggttgtaggtcgctagaactggactccagcctgctacaccatgaccgcaaacacacgtaagacgaggtaggttctgaatacaacaggctcacccttgacgaggcattcacaacgcacataccaaggacaaactcgctggtatgtgaaccaagacacacagcatcgaactgtgaccacactttgctgcaggactgacccatgcacgcacggacgctgtcactgctagcactgccacctatgctacttatgacagcgactatgccccaaatagcactactgcccgcgcattgaatggccataccttaccggctaagatggatgcagcccaaatacccactgacgagaatgacacattcgccaatgagtcaggtatcatccatgaactgacccattcacatcgatatcaaggatctccagtatcatactatgaaatgactgctaagcgt

SEQ ID NO: 28363 - DNA, 256 bp, Zea mays
  Clone ID: MRT4577_125880C.1
cctggcttgtctagcttatagagttcaaagcgaagtccaagccgaagcgatcttaaataaacgatgcgcatcccagtgagtttgccgttggacgctcggtcctaaacatgctcggacggacctcaagtacggagcgacaaaatcactgaccagccggacgaccagcatactgacgcgtgccagcgacggctaaagtgcagagatagaagtaacctaaagacactatgatgatcgctggggcacaacggctagactg

SEQ ID NO: 28364 - DNA, 105 bp, Zea mays
  Clone ID: MRT4577_125881C.1
tgggaagctttgctagcttcatgtaaggttcacggaaatttggggttaggaagaatagcagctaagaagattctggaaattacaccacatgattattctgcatac

SEQ ID NO: 28365 - DNA, 323 bp, Zea mays
  unsure (1)..(323): unsure at all n locations
  Clone ID: MRT4577_125882C.1
acgcagncaggcaccgngnangaaancnaacaaggcgcncancgncanccncggcaccggcacccnnggagcngnaggcanaggcnnggnnangccggnaccgccgggccncnngcggngaancggccaggccgacagcancgccagncacnanggcgngcngcnagcgcnanangcgnngangcaannncnangcgcacccgnncncggagcacgggccgaccgcnnnggccgccgcccagnccggcncgcnncgcnacccggagccacnancgacnacgcgancanggcgaccacacccgnccggggganccccnacgccg

SEQ ID NO: 28366 - DNA, 1961 bp, Zea mays
  Clone ID: MRT4577_125883C.1
gcagacagggcgagcgctcgctagtcggctagtgctgtgctgtgcagcggttgctcctcctggtcctgctactgctccgctctcctcgtcgcttgctcgtcttttttccacactgggcggatttctttctcgcaaggagcaggaggaggaggagggggaaaggtttgtccgtttcttgcgagagcccgttgcagagatccagccaggcagcaggattcaagaacctgacctttttgtgctctactccccgagagattttcacccaaagtttggtccttggagccgattcgatccctggaaacaaccaagtgaaggtgccgcaaatccgttgtgactgcacaaaatcccaaaacgcctctgccacctatctatttgatcgttgggaacctagctccatccatctgagccaagaaagcagcagccgcagggtgggggggaggggaggggagaggagaggagagggcgtcctcttccgagcagcccgcattgccgcctgtcgatgagtgagcgctgcctccgatgccgtcggggtgctcggtgtccagtctcgcggcgcggttcgccttcttcccgccggagccggcgacgtacgccgtccggaaggacaaggccacgggccgcctcgtcgcctccggcgtaccgcgggacaacgccatggacgtcctgctcgtcgacaccagcagggggaacaaggtggtggccttctacttccggaacccctgcgcgcgcctcaccctgctctactcgcacggcaacgctgccgacctcggccagctgtacgacctctttgtgcagctcaaggtcaatctcaagatcaacctgatggggatatgactattctggatatggtgcatctactggcaagccaagtgaagagaatacatatgcagacattgaagcagtgtaccaatgcttagaaactgagtatgggatcagccaggaagacattatcttgtacggacaatctgtcggcagtggaccaacattacatttagcctctcgtttgcctagattgcgtggggtggttctccacagcgctatactgtcaggcctccgtgtggtttgccatgtgaactttactttctgctttgacatttacaaaaatgtcaagaaaataaaaaaggtcaacccactgcctgtcgttattcatgggacggacgacgacgtggtggactggtcgcacgggaaggagctgtggaggctggcgagggagcctcacgacccgctctggatcaagggcggcgggcactgcaacctggagctgtacccggacttcatccgccacctgtcgcggttcgtccgcgagatggagaccgtgacgacgaaggcccggctgaggaagatccggccggccctccaccagctccgcaagaaggcggcgcaccgggcaagcacggcggcgacggcgacggcgacgaccaccagcaccaccaccttcaccgccaactgctgctgccgcgtccgcgtccgcaagccgacctgccccagctgcggctccttcggctgtgactgctgctggccgcttaggagctgcctcgcgctccggtttcccaggtgctgccggcctcctgctgcctgcttcacctgcggcggctgctgttggtcatgcaggtgcaggagctgcttcaagtgctgctgctgctgctgatgtggagacgtgcgtcaatgagtgccgcccgccgatcgatccatgcgcgcgctcgcgtgcgtatggtatagtgaagaggaatgacagtggtcatgggatccctgctaacaaaccctttaaacgccgtagactataaaaaaacctagatttgagctggctgctgaacgttgtattaacagatcccaggactccccgccgtttgtggttcctctcgttgtagttgcttgtcagattggtgattcgtctcattattaatccgtctgatgtttgtgcagtatagagcaaaaataatgcccctggactcgctgccgcg

SEQ ID NO: 28367 - DNA, 760 bp, Zea mays
  unsure (1)..(760): unsure at all n locations
  Clone ID: MRT4577_125884C.1
atatctcaatgctgcgaagcggtctctctgttcatgctaaccgcctgtctgccttatcttctctcgtccacactaggtctcagcctctgctcgcgctcttgtggatatactacgtgacacgtcaggaccgcccgaccccacgccgatctatccaggctgctccagtgcttcacacccgacaccgaggacgacaacccactactctcataaatggtagagacggtgttgaccccctcttntggaaggaattgaagtcctgcgataggtcgagagaatgagtgcattgctcacgcaagacccgttccttgtgatcgccatgcaatgcaagaacgttggcatgtaccgtgcacaaattctagtacgctgacgatgagtagattgccacagaatgatatcgctgctgatatcgcaacgctggagaaaaatgatgcttcttatccatcacagtatgaagacttgcacaactatggtccacagaaaaaggtcaaaacaacaccgagagaggttcctaccgatacacgaatgaccatcggcggctcacgagggccacggactaccttgccgaggtggtccgtaacctgcttgatcatccagactgtatcatgactctagcatgcactgattcttacgccaccaccctgaggagatatcactggctgggttgacaacactaggttaaccgaggccatgaagctctctcctagtacaatgaactcatggaggtcattaacgtaactggtggtatcaatgcagatattga

SEQ ID NO: 28368 - DNA, 115 bp, Zea mays
  Clone ID: MRT4577_125885C.1
agtagaggtcctggagagggtcacaactatagtctcatatattgtttattgaggatgccatcgccttggtttgagatctgtaagcagttcttttatccacaaacaagttggtact

SEQ ID NO: 28369 - DNA, 1249 bp, Zea mays
  unsure (1)..(1249): unsure at all n locations
  Clone ID: MRT4577_125886C.1
ggccgggcaacaatctcgggccaccgcactcgttgactttgtttgagcttatgtttagttgcccgtacatgggagacgtagacagcatgagtggatgcaaaacaagttattttaaagttattaacctgcatctgtctgaacgcctaaaactaccgtatccagctacccagggcacgtccagcctgttcgtacatgcgcagctatccaatcaagctcatttagaagtataaacattggaattcaaaataattctaccacaaagtagcagtgatgcatcacattggtttagttgtgtctttgaactactggcaatttgttttttacatttactccaaggaaagcattcctagccatccagcagttatgattatgaaaaacatagacaaagcctgagtcatccagaggtgtgcaagaaaactgccagtttaattggtgtgcaaggaaactgccagtttattggggtttaatggttttgttggttatgtgaataagtttaatgtgataattttaatgcagcattaggttcaacttacttccattgaatcaacacccctgccactacttattaactggcttgtgtgattagagcaatcctatccaacattgtcaactgacttgtgtggtttaattttataaactatgagtatggattttccttagattagaaaaaaaggtgaatcatttcttagtccactgtctgtcatacacagtgctagagagtagagagtagagacactgtctgtcatacgcactgttcattatgtatgtgaattcgccaggagggtcaatgacagcttgtaataccttatctaacatagtatgtttgtgttagttgcttcaattagtgctaatggattttccgttttctattaggaatggctatatttgtgaacataaaaattagtaatctggagagggatttacaatattgtactattttaacctagacgagcaaaactgaagctaaagtgttctactcgtttagtgcttttatctaacctattttactaatcattctggtttcttatggttatagcaaagtttcgtttcctgtagcattccttccaagttgtccaaatgttaggcatggaagaacatggagataggaggtggcaatgatgcaaattattaaggcaacacgtatgttactattcatccacgtgctcataatttttttgtagaccgattggcttgctaagttttggtgctactatatctgnggtgatcttttaactggaggaacatattt

SEQ ID NO: 28370 - DNA, 313 bp, Zea mays
  Clone ID: MRT4577_125887C.1
cgagtactggtactctaacagatcttggattccttgtgcttcacagaatcataccttgaatacccatgtgatattaagctacaattgaaagctccgtcacgaagctgctggagaaccatgtcattgaatcaaaagacgctaatattctagaacgcattaagctctcctctagcctgtacactgactgtggtaagcatgcactaactcctctcaagccgagatgactttatgatgtacatgtagctggtgctgatccttgctcagatcttcattgtcagaagctcaatgagatgatcattacgtactatatgag

SEQ ID NO: 28371 - DNA, 357 bp, Zea mays
  Clone ID: MRT4577_125888C.1
cgccaacgcgtccgggcagcgacagctggctcctatgggcgggcgatcgctggaagcttcgaggggcgcgtcctctacggcaagggcgtctcgacgaggagggccgtgcacgcacttgcgtacgacaagaacctggaggaccacatgcgcccggcgttcgtgcctgacgatgtgatcggcagtgccaggagcccggacaagtactggagcccccaccccatgaccggcctgatctgccccgccgttgtggaccccaagctgctcgatggtggcacaccagacgccagcacatatgctgcatgacgcacggagctggaccataacgtgtggttccagccggtcgaggacgtccagaag

SEQ ID NO: 28372 - DNA, 705 bp, Zea mays
  Clone ID: MRT4577_125889C.1
ggcttctctccggtggcgttcagcgaggacgttgccgacgatgtgcggtcgttgctccgtcggtatcgggaaggctggtcgatgcgggacaccggtttagacgactcggcagccggagcaggcatcttcctggcgtggaaggaacagcctctcgtgtgggcaagcgcgtggaggccatgatagagatccatgagctcgtcgacgcgcaaatgcaagctcggtgagtgcactacatggaccgcaggcccgcagcccataggagaagccggcgtggatgcgtcgatccgtgcattggatcgcgcgcacgtgcatgtatgtatggcgagttctctcctcctctgctcgtcttgaaagctgaatggctcacgcgtgtagggttttggagcagcgtaaccggccagggtagagattggtagctcacgcaggggccggcagaccgagtacccagccacctcaggcctagtttggatactcgtattgaggtgggttagatgtaacttaaactaatttataacacaatccacctcaacacatatggattaaagtcaatactagagtatccacacagccttatacggtggtctgggctgtctcgccagttctaatagatatatagaagcaagtatgatacgtagaagtaaacaatcagcgtagcatgtatagagcgaatacatagacatggaggatcgtaatgtaatcttggct

SEQ ID NO: 28373 - DNA, 242 bp, Zea mays
  Clone ID: MRT4577_12588C.1
ccgaattccggggaaggtttgggcactgtttacgtctgtcacgcgggccctgcgccaagtgttcgttctcatttggtttgtcgcgcgcgtgcagcagaggcagagacgacgacgacgacgacgagcaaggccgtgtgcaacacggacggccccgtgtccgagacgtgcgacctggacggcgacgtccgcaccaacggcagcgccctatctgtgacgttcgtcccggtgagcccgtcggagcg

SEQ ID NO: 28374 - DNA, 596 bp, Zea mays
  Clone ID: MRT4577_125890C.1
cccacgcgtccgcgcagcccaccgaaatggggaagctgctccctcgccacccttcccccctcctgctcctcggcgtggcgatctgcatcttcagcagcagcctcgcggccgtccggggcgcgccggtgtaccgcgcggactacctggtggacgggaaccagctggtggacatgcagggggacatgggccccgtcgtgtccgggacgccgaccaacctctacctcatctggtacgggcggtgggaggccgcggcgcaggccgtgctccgggacttcctcgcctcgctctcggccccggccccgttcccggccgtctccgactggtgggcgcgcacgccgcggatgtacgcggaccagacgggcgccaacgtgacgggcgccttcgccgtcgccggggagcactccgacgccgggtactcccacggcgcgttgctccggcgcatcgacgtgcagtccgtgatccggtcggcggtgtacgcgtacccggacccgctgccgctggacccctacagcggggcgtacctggtgctgacgtaccccgacgtgcaggtggacgagttctgccgcgccctctgcggcttccactacttcaccttc

SEQ ID NO: 28375 - DNA, 351 bp, Zea mays
  Clone ID: MRT4577_125891C.1
aatgagggtgcatgctgacatgactgcaacataaattgggggattgtcaccaaacggactaagttcatcaaacgcaacccctagttatcatggtggcggtttaacaatgactcgaaacaacaaagtctggacttgatgcctatagacggaatctgactagctaagcaatgcgaaaacgacactgcgaaagatgacagtcagactgccagttctccatgtaagcgatagaactgactgattatttgaaagcccaaaccgagttgagctgtattcagttccaactggtttaggtgcgaggcagcaactaatttacctaccaggtaaacatccacttaattcataatggtatgt

SEQ ID NO: 28376 - DNA, 207 bp, Zea mays
  Clone ID: MRT4577_125892C.1
ctgacgcgttggcggacgcgtgggcgtactttttatctatatcagtgggagctaaatgacgggagggaccatatctacccacggacggtctctcacggtcattactgggggcagcgccatgatgccgttgtgtatattctacgttcacatagtggtcgtcgtacacatccaccacttactccaggagcgctacttctgtgacaaata

SEQ ID NO: 28377 - DNA, 367 bp, Zea mays
  unsure (1)..(367): unsure at all n locations
  Clone ID: MRT4577_125893C.1
ggctatatnncccgaacttactatcatnggttttgccttttatatccnaanaccaaaacgagaggcnnccagctgtataacaacctgttcttcgactacccaccccatcccatctgagtcccggagaaatcgatcgtagctctctgtgcccttcacttaaaaaaatatcgcttctctctagaggggaaggaaagttcatttctttttgtccaattctttcaacttctacgttccaatcccctcaattttccatttaaccgaacgcacttcgaacccttaattgctttttgcgagtcaagtttcaattcgagcgttttacggtttctcatttgaatccggcgacaagataaactcctttgggggggtt

SEQ ID NO: 28378 - DNA, 225 bp, Zea mays
  Clone ID: MRT4577_125894C.1
gaaatctgacccgggtcacactccgctgctccgccatggcgatccgctccatggcctggatctcgctgctgctcgcgctgaccgttgctctctccgccctggcggaggaggagcccgccgccgtggcggagggcgaggctgtgctcaccctcgatgtcgatagcttcgacgaggccgttgctaagcaccccttcatgtgtcgtcgagttctacgtcccctggtgt

SEQ ID NO: 28379 - DNA, 391 bp, Zea mays
  Clone ID: MRT4577_125895C.1
attcaaagtctagtagaattcccttcgattcatcccgctgtgccggatgaatcgaagggaattcaaagtctagtagaattggaattcccttcgattcatccggcacagcgggctatggaccttcagcagcaagctaattaagttggcagcatgcaccgctaaccttatatactactgagacttccaaattctagtatatgtaatccttttgttcgggttcatgatcgaattccaaagagtggaaaacaagcaaaaggttaaatatacatgccatttttggaggcatttttttcatgagggcatgtttcgatatatggaccactaaatatacatatcatttactttcctacaaatttgctacatccttggaaatgcatagtctgtctccaag

SEQ ID NO: 28380 - DNA, 848 bp, Zea mays
  Clone ID: MRT4577_125896C.1
gggagattgtggaggaggccgtggcttcggacaccagagcagcgcccgcaaggatgaaggcgacccactcggtgagtattgtggctgagaacgtcaccaatccgaggccggggagccggtcgtcgaggcggtcctcgcgtgacttcgagcacaacgacaacacctacgcatccctgctactggaggacatccaaaactaccaccagcagagcgccagcgctgccaccgccactgccactccagcgccgaccttggcgctcccagcgtgcgtgtcgaatgccttctcgatccttgaagctgtcgccaacctcaaactcctcgtcgcccgacaacaagagcttcgagctggagaggtcggtcaacgacaaggaatccgtcgtcaacgggaggtacggcggcaatggtgcggcgggcaccaccctcgtggtggagtcggaggtcggcgtgaaggacgacctcatggagccgagcatgcacaagtacgtctccgtgcgtgacatccgtggggagaggagggagaccgagccgcaggagtctgcggggagcaacagctttgccagtgacgcctggacgtgctcgtgggagcccaagtccgttgactccacagaccggaccaggagtaggacggcctcgaagtcgtacaacggtgccaaggtggagcagtcgtggcagagcaagcagaagctgtcgtcatcccaggagcccagcccccgtggttttactagcaatgtttatgcttagcgtccagctaaatatcgagagtgtattgctcccaatcgtacttcgttttagttttgtttatggtgcaacagtttttgttgtcaactctttcttggaattccatcatc

SEQ ID NO: 28381 - DNA, 311 bp, Zea mays
  Clone ID: MRT4577_125897C.1
tcgaaggaatgcaaagcccgtgacgccacgcccgacacatgttcgacgttgtgcctgtccgccttccgcgagatggcaagccacggggtggcacctgacgttaaagactgcaacagggtgctccgtgtattgcgtgatgcggccaggtgggacgacatgtctgctgtgcatgccgagatgctccagtttgggattgagccaagtatttgcacatacaattctttgctggatttctttttgaaggttggttggtaagtctatattttctttgtcgctgtatgttgttgtattcctctttttttttgtttttt

SEQ ID NO: 28382 - DNA, 547 bp, Zea mays
  Clone ID: MRT4577_125898C.1
aaactggcaaccaatttttaacattttttcagttaaaaaataaaacagggggccaaattttactttcccaaacccgtttaaacacccctccatgggccctgattaaatccgggggaaaaagcatcctttttcccccagctcacgaaaatttttaaaatcctgaacggcctacggcccaaaaattttaaatgggtggccaaccccttttttcccttcccccccaggggaacagggttttattttccccgggggttttcaaaaaagccaaccctttcaatttttggctcacataaaactataaaagttttgacccaggggccggggcccttttttgaacccggggcccccttgataaacccctaaaaagccttaaaccccctggaaaaaaaattgggggccccaatgcggccaaatgaaaggccccccattttttggcccttgggacccctgccccctaaaatgatcccccggaagggccaaaaaaccgcccggaatacctttttgaaaaccacctccccgggctggaggtttttgaggaacccccggg

SEQ ID NO: 28383 - DNA, 331 bp, Zea mays
  Clone ID: MRT4577_125899C.1
gccatacgtgcgggggtaactggtcctgcagcgggtcatgcaactgctcatcctgcgcctcgggctgatccgtgcgcctagccctcttgctaccgggctgagtagtggagggagtagtgtactgttcaacgaggatctggacgaaacaactagcgctacttgtagttgaggacgctcatgaggataataaaggggtttgtgtaatgctcaccagacgcatcacgcgctggatatgcatcgtggagtcgggtagtaagttagcgtttgaataaacactaccactttatgtcccgcaaaaaaaaaaaaaaaaaaaaaaaaagggcggccgatc

SEQ ID NO: 28384 - DNA, 766 bp, Zea mays
  unsure (1)..(766): unsure at all n locations
  Clone ID: MRT4577_12589C.1
gggtacctcgaggccggccgggccgggaaagtacccagctacctgcctgcctcgcctcaacttcgccggcggccgctgccgcatagaccggaagagaaaggaagcagagatcggaggcaggcgaagatggggcgcggcaaggtgcagctgaagcggatagagaacaagataaaccggcaggtgaccttctccaagcgccggaacgggctgctgaagaaggcgcacgagatctccgtcctctgcgacgccgaggtcgccgtcatcgtcttctcccccaagggcaagctctacgagtacgcctccgactcccgcatggacaaaattctagaacgttatgagcgatattcctatgctgaaaaggctcttatttcagctgaatctgaaagtgagtgccctagggcttgaggagccacgttggcggcttttgagcaccctaggtctcgaggaactcaagggctttaatcttttatcagcgtcatagggaataaggagcctcagaagctttagattattctatcctaggacatccaggcactaatgagtttcagtcnncatagagtgggccctgggcccctgggtcntctttattgttctttacaagatttagtgcgtagctatcttttcggggcattttcatttcaagttatgcagcgtcaagcctctctatggnagctcggaaaggtccctgagccccgaggcatggagccctatgatagctgatttgttctgggaatccttgatgcatcttggaaactggtcggaagtc

SEQ ID NO: 28385 - DNA, 329 bp, Zea mays
  Clone ID: MRT4577_1258C.1
gttaggccgagcagacggttcctcctacggcacccacattttttcacacccgcgaccgccaccagaacgaagagcgaggaggatcgttcgcagccagaggagtacaccccttgagcaaccgaccaagactaccactcacttccactgctgggtcgaaatccataccagagcgcacaatgctaccctactcctggaggaccaaacagcaaggagaagacctcctgctgactagccagtgacacggaaaccaccgacgccaccaaacaacaaaagaacatgacaaccgaccaaaagaaaaaaattttttttttttggcccccccccccccc

SEQ ID NO: 28386 - DNA, 711 bp, Zea mays
  Clone ID: MRT4577_125900C.1
tgcttttcagacatctgggggtgttcctggtcttgaagaaatcggggatgtttccaacagaggaggaagagaattatcaacagaaaggtctacatgtgaagatcatggcaacgcaatcataatggaagaaaaagacactacaacaaggatatcaaaggcagagcatgcatcatctcccttggagacgatgtgtggtgtaactaaatctgctgaagctcccacaacagttcctactgtgacacggaaaaaagaggtacatggagttcagaggaccaaagagagggagaacatgacaacagcagatagtgcatgtgaaaaggacaaagggtcttctcaaagagtacaggaggaaaacgaaagtgaaaggagattggagaaagaaagagaagttgaagagaaggaaagaaggaaattggagaaagaaagagaacttgccgaagagaaggaaagaaggaaatttgagaaagaaagagaacttgccgaagagaaggaaagaagaaaaatggagaaagaaaaagaacatgccgaagagaaggaaagaagtaaattggagaaagaaaaagaacttgctgaagagaaggaaagacataaattgaagaaagagagagaacttgctgaagagaaggaaagaagaagattagaagaggcggaaagggagagggagcgtaaaaaggatagacttgctgttgaaagagcgacaagagaagcaca

SEQ ID NO: 28387 - DNA, 309 bp, Zea mays
  Clone ID: MRT4577_125901C.1
tatgtgatgtcatgtgtgtgtttgcaccaccggcgacatgggcagcgtggtagacaggcatggccttaaatgggtaatgcaaacatacgggtgaaggaaaattatggagggaggcgaagggccacccaacgggggagagggaagcatgtgaacacacctttgatttcttgtacagtacgatgtttatgctccctgttctcggaaaattatttgttctgtgcccttgggcctgtaatacagttgtaactggtccctctaagatgatgcgaatatgttggacacccaaccattttaaatatatattttggg

SEQ ID NO: 28388 - DNA, 367 bp, Zea mays
  Clone ID: MRT4577_125902C.1
gatgtaaagcctgttggcaattacagcatgtggttctttcgtcaatcatattgtagacacactaccgcgagatgctatattgaccggacaattgcattaaaaaaaaaaaaaaaaaaaaaaaaaaaaaaaaaaaaaaaaaaaaaaaaaaaaaaaaaaaaaaaaaaaaaaaagaggaaaaaaaaaaaaaatttttttgtcctcggcctccacttttggctgcgtgggggggggattagtggcccgcttgcagtattgggggtaatagctgtccgcggggaaaaattggactcgcctaacacgcccccacaacttaccagccggcggtatgatgagtaccgggggggctgcctgggggggggacctgcca

SEQ ID NO: 28389 - DNA, 170 bp, Zea mays
  unsure (1)..(170): unsure at all n locations
  Clone ID: MRT4577_125904C.1
cnacgcgtccgctacgagagatgaatggatgaccacattgccacctgagaaaaaagcaagagtgccaatgcattcaagtacatcagttaatatgaatggtaaaaaaagacgtggagacacaagtgtctggactgatacccctcttggtagagcacaaaaagcacaacaaa

SEQ ID NO: 28390 - DNA, 282 bp, Zea mays
  Clone ID: MRT4577_125905C.1
tgctgatattgcacccctacttcagcggcgcggcagacatcggcgacgaggggacgacggagaaggcgcgcaaggcgcgggccgacgcgttctggcggttcctgtgccctggcacccacagtctcgactaccctctctccaacccgttctcggaagccgtctgctgtagctcggcgcgcgtcgccgacgagcgcgttctcttctgcgtcgccgagaaggacgacctcttggacaggggcatatggtactactagagccttaaagccagcggctacccttgcc

SEQ ID NO: 28391 - DNA, 711 bp, Zea mays
  Clone ID: MRT4577_125906C.1
gccctctctcgagttttttttttttttttttttttttttttttttttttttttttttttttggaaggggaaaaagctgtatcctcctttttttgtttttgtttttgtttttgacagggtatgtaaaagctgcccacaaaaaaatttacagggggggtaacctgccctcgtttgtactttgtcctactactacatgacaatcatatgtcctttgtttttatccaaggttgaagacgtaaactgaggccatttatttattttgggccatgatatatttttgcacaaacacggagccttttcattaaacggatgggttttaatagctcaatatcaccttttgtatatgaccaccagcagcagctgccttttttggatttgcttcatgagctccaggttgccgaccctatttggcccatccggggtatgtgcagcggatgaggaggaggttgcaccggcaagggagggttttgaactcaatatttgctcccaaagttgtacctcctcaagcagcaagcaatacacctgccatttttggggcagcaccatcaaaaacatggagattccgatgcttccaaagtccagggctccaggctcaaaaaattgaggtatttctgcactggtccgttagctggcccgaatcaaaggatctatcttcaaagaaggtgacagacctcgaaggccaaatccccgcaggagattgaacccaaaatgt

SEQ ID NO: 28392 - DNA, 2893 bp, Zea mays
  Clone ID: MRT4577_125907C.1
cggtgacggcgggcgggcgttttcgctcccccaatttccctcccattttctactccctcccctttccttccttcaccggcatcggcataggcgtctctccctgatctacctggagtctctctcctcgtactccagcgccgcctgcccctccgaccaccgctgcggcagcgcaccgacttcccgcctgaaccccagatctcacccgcgccatacacgccgccagccccagcccagatctacggcgcgcccgccatggacgccggcgccggggccacggccatccgagtgccctaccgccacctccgcgacgccgagatggagctcgtcagcctcaacggcggcgctcccggaggggacacgggcccgcccccgccaccgcccaaggaccagccgcggagccgcgccgacaggaccaagctcgtgctcgcctgcatggtcgccgcgggcgtccagttcggatgggcgctgcagctctccctccttacgccatacatccagaccctaggaatagaccatgccatggcatcatttatttggctgtgtgggcctataactggttttgtggttcaaccttgtgttggtgtttggagtgataagtgccgttcaaagtatgggaggagaagaccatttattttggctggatgcataatgatatgtgctgctgtaactctaatcgggttttctgcagacctcggttacatcttaggggacaccactgagcactgcagaacatataaaggttcaaggtttcgagctgctattgttttcattctaggattctggatgttggacctggcaaacaatacagtgcaaggtcctgctcgtgctcttctagctgatctttcaggtcctgatcagtgcaattctgcaaatgcaatattctgctcatggatggctgttgggaatattcttggtttttcagctggagcgagtggggaatggcacaagtggtttccatttctaacgacaagagcatgctgtgaagcttgcggtaatttgaaagcagctttcttagttgcagtagtatttcttttgttatgtatgtctgttaccctgtacttcgctgaagagagcccactagatccaaaagatacacaaggactatcagattctgctcctctgctgaacggttctagagatgctgcccatgcatcaaatgaaccaaataatgaaagatttcctaatggccatgtgggtttaaacaatgtgtcggctaacaacaacactgaggaatttacaaatgtgaattccaacacagagaatggaggagtcttcaatgatgggccaggagcagttttggttaacattttgaccagaatgaggcatctacctcctgggatgcattcagtgcttctagttatggccctaacatggttgtcatggtttccctttttcctttttgacactgactggatgggacgcgaagtttaccatggggatccaaatggagatttgagtgagaggaaagcttatgacaatggtgtccgagaaggtgcatttggtttgctattgaattcagttgtccttggcgttggttcattcctcgttgatccactatgccggatgattggtgcaagattagtttgggccattagcaacttcacggtgtttatttgcatgatggctacaacgatactaagttggatctcttctgatctgtactcaagcaaacttcatcacatcatcggggcaaataaaacagtcaagatcacggcattggttgttttctctcttctcggattgccactctccatcacttacagcgttccgttttctgtgactgctgagctgactgccggtacaggaggtggacaaggttcgtgttgcgcatatactgtattaattagcagccttgcgaaccacagtgactggtactgtttatgctccatctccaggtttggccacaggagtcctaaatcttgctatcgtggttccccagatagtagtgtcgcttggagcaggtccatgggacgctctgtatggaggagggaataccccggcgttcgtcttggcttcggtcttctccctggcagcaggtgtgctcgcagttctcaagctgccaaagctgtccaactcgtaccaatctgccgggttccatggatttggctgatgctcatgcccaaaacacccccgtctgccatgtaaaacatcacaccaacacttggccccattttgccattcgtttacagagaaatgattcttttttcctcgtacaactacagaataatgacagtgaaagtaggagtttaggtgagagagagagagaggctaggtaggttgatgtgaaggtgtaaaagctgtatcctcctttttttgtttttgtttttgtttttgacagtgtatgtaagagctgtccacaagaaaatttacaagtggtgtaacctgccctcgtttgtacattgtactactactacatgacaatcatatgtcctttgtctttatccaaggttgaagacgtaaactgaggccatctatttatcttgggccatgatatatttttgcacaaacacggagccatttcattagacggatgtgttttaatagctcaatatcaccttctgtatatgaccaccagcagcagctgcctttcttggatttgcttcatgagctccaggttgccgacgctatctatcaccgagaatggcaggcgttccacagcattaggaaacagcaggccgccatttggatttcgacaggaatgaaaacaagcaagaaacggacatccagccgacaaatagtgagcgaggcgtacttggcccatccggggtatgtgcagcggatgaggaggaggttgcagcggcaagggagggttttgaactcaatatttgctcctgtcgatcaagcgcaccaggaagccaaacaaacagaaaactaaggttaataaatgttgtta

SEQ ID NO: 28393 - DNA, 665 bp, Zea mays
  Clone ID: MRT4577_125908C.1
attctgttgagtttgctgagcaagttatcgagacaaattactatggcacgaagcggatgattgatgctatgataccgctaatgaaacgctctgcgtatggtgctcggatagtgaatgtaagctcaaggcttggtagagctaatggcagacggaatagaattggtgatgtgagcctaagagatcgactgttgaaagacgattgtttatcagagcagctgattgatgagatgatcacgaaatttctcgaacaagcgaagcaaggtacttggtccctgaatgagtggccacagatgtacacggactattcgatctcaaagctcgctgttaatgcttatacacgactcatggcaaggaggctctcggatcggcctgaaggccaaaagatatacattaactgtttctgccctggctgggtaaaaaccgccatgactggttgggaagggaatgtttctgctgaagaaggtgctgacacaggtatatggctcgccttattgcctcaggaaacggacacaaacggcaagttcttcgccgagagttgtgagataagcttctaaggtgactgactaccttatccatactcttgccttaccttcaagtaggaaatatcaggactcaaagatcgtaaacccatcttcacaaactgttctgattgctactcaccacca

SEQ ID NO: 28394 - DNA, 136 bp, Zea mays
  Clone ID: MRT4577_125909C.1
gctaaatctcctatggaaaggattccccgacacgtgcatggcggcttgggggggcttgggaccacatgggatggcgcactcgcaatttttgggagcacatggcgcgcacccgggcggtcagacgactccgactact

SEQ ID NO: 28395 - DNA, 356 bp, Zea mays
  unsure (1)..(356): unsure at all n locations
  Clone ID: MRT4577_12590C.1
aactgnctgctgttcggatgctcatcacaccttctcatctaccccaatctcccgtgctcctactctgcttcggatgcggatctttcgtgacgccctgactggcaacactatcaccctacgaggtgataggcgcctgacccgttgacttgttaaggtcgagatcatggacgaggagggcatccccccagatcggtggacggatcatctttgctgggaatggcttgtggacgtgcgcacgcttgctgactacaacatccagaaggatagcaccctccatcttgtgctccgtctcaggggaggagatgcattatctttgctgaaaagccctgaccggacgagactatacacacctcgca

SEQ ID NO: 28396 - DNA, 249 bp, Zea mays
  unsure (1)..(249): unsure at all n locations
  Clone ID: MRT4577_125910C.1
tgagggagtgnatntngatanatatnggtaaggngggtattaggtnggaaagngtggtgggagntgtattgtntngagnatggnattnaggntgatggtnagatgnntggtganaagaaaattgggggaggtgatgatgntttnaanannttnttnagtgagaatggtgttgggaaagagtnnnngtgtgttttgtganttgatnatgtatgatgaggaggaatggattatngnagntttttattttga

SEQ ID NO: 28397 - DNA, 273 bp, Zea mays
  Clone ID: MRT4577_125911C.1
ttatctttttaaactctttttttttttggaaaaaacaagcccagcaatttcttggaataacacctaatcaccccaccgaggagattcaaaggagattagagtcgcggggacagccggtattcatcgtttctacaggggggggcttaacaaatatcttcatgacaagagttatcggctgacttttaaccgtaggtcaggcggaacatgtcattttgcaccaataaggacccagcctcccggaaccaaatggaatgcccgaaaaaacttgatggg

SEQ ID NO: 28398 - DNA, 257 bp, Zea mays
  Clone ID: MRT4577_125912C.1
gaatggaatgaacagtacacctgggaggtttatgatccatgcactgggtcacaattggggtatttgacaactgccagctgaacgcggaaaagtaatggtgccgggataccagaatggagggtccgatcgctctgacctgaaactgatcggtgtatacccactcatacctttattgcctgacacctgtggcgttaaaaagggcgagggcactgctgtcgttcacgtgtcgtcactgctcaacatgatcattgtcacac

SEQ ID NO: 28399 - DNA, 131 bp, Zea mays
  unsure (1)..(131): unsure at all n locations
  Clone ID: MRT4577_125913C.1
ttncagaagaccttcgtatcccctctcagtcgcacggggctgtcccgtgcatgggttggctgtggggatgccaggtgggcctggcaggactccagatgaggacaagagggacaaggtatggagttggagcc

SEQ ID NO: 28400 - DNA, 397 bp, Zea mays
  unsure (1)..(397): unsure at all n locations
  Clone ID: MRT4577_125914C.1
cccccccggaaaggggggtaatccgggcaaggaacccttttgcaggggccaaatgggggggtaacaatgttttagtcccggaatctagcgggtctggtaaagccaaaaaactttgcaacaacccactaaaaacgttttaaggaaaattttaaaaaaaagcaggggcggggcacctggggaaaaaattggccaaaggatgccggtccaccattccactggttggggaaaaaatttgggtttaaagggcccgccccttgcttggggggggccctaaaaggggggccccacccttactttcagaagttgggcagggacaagtttttttccggggttttttttaacaccttgggccctggcatttggaaaancccccgggggaaaggggccccttttttaa

SEQ ID NO: 28401 - DNA, 2009 bp, Zea mays
  unsure (1)..(2009): unsure at all n locations
  Clone ID: MRT4577_125915C.1
ctcgagnagacggttgccgaaaaaaaaaaaatggaacctgaggcatgtgaatcttgcacacaagactttgtactatgctaatttgctggtgaagtgggtgggatatctgggtggaagggttaaccttgtggcactgggctgcatgggcaaattcctgctgatttctcttcccgattggttggattgaaggttctcgatttgtcacggaacaatatcagtggggtagtcccagacatgagttctcttggcctacacttgctggacctgtcggtgaacaatctcacaggtgagatacctgtggcattggtgaagaagctgacatccatggatcggttcaacttctcatacaacaacctgactgtttgcgcatctgagctctctgcggaggcgtttgccactgcatttgctcagtccaggaatgactgcccaattgctgtgaatccagacagtatcgtgaaaagtagagggaaacataagggaatgaagttggttctggctgttgtgctctccttgttcttctctgttcttgggttgctttgcttggcagcggcatgtcgaagggggaggaagaggtgtgatgagctgcctgtggttaagcaggtgtcgtcgttcgatgagcctgctgtatcagggccattttctttccagaccgattcaactacatgggttgctgatgtgaaggttgcaacttcggtgccggttgtcatctttgagaagcccttgctgagcctcacatttgctgacctcttggcggcgacatcaaacttcgacaggggcaccttgttggcagaaggcaggtttgggccagtgtacaggggattccttcctggtggaattcaagttgctgtgaaggtgttggtccatggatcagcaatcggagaccaagatgctgcaagggagctcgagcggctgggacggatcaaacatccaaacttagttcccttgactggttactgtgtggcaggggttcagaggattgccatctacgagtacatggaaagcggcaatctgcacaacctactgcacgacttgccactaggagttcaggcaaccgaagactggagtggcgacacatgggaggacaacaccggtggtgttgcaacaactgaaatcgtcacgccggaaggtactgcaacatggatattccggcacaaaatcgccctaggtgccgcaagggcgctggcattcctccaccatggctgtatcccgcagattgtccaccgggacgtgaaggcaagcagcatctacttcgactgcgcaatggagcctaggctgtccgatttcgggctgtcgatggtggcaggaaccagggccgatctgctacaccattccccgggctacgcgccgccggagttctccggctcggagaacgccgcggcgaccgccaagtccgacgtctacagcttcggcgtcgtgctgttcgagctggtcacaggcaagaaaccgctgggcgatgagtaccctggggcgcagaaggaggcgagcctggtgagctgggccagggcgatggtgaaggcgagcctcgcgccgagcatcatcgaccccaagatccgcgacacgggaccggagcggcagatggaggaggcgctcaggatcgcctacctgtgcaccgcggagctgccgtccaagaggcccgccatgcagcagatcgtcggccttctcaaggacatcgagccgaaggtggaagaggagggggactgaagatctggaggagtgtgatcggttgcaccttgcagcgtgtcggatggtggtgagatttgtgtagtgacagcgtcggcaggcaggcaggctgtgactgtgagtgagctcgtggttgttttaccatcgtcgagctcactatgccatgccttgctctgcatatatctttttcatccttctttcttccctttttcccgcttctctctcgctgattcttccagttgctgaagattattgcaatactgctctgttacattacacctgccccttactaaccatgccactgctcgagagatactgaaagtccctgt

SEQ ID NO: 28402 - DNA, 378 bp, Zea mays
  Clone ID: MRT4577_125916C.1
gagcctactagtcggcggccgcccttcttttttttttgggtttttttttttttttttgtttttttctcttttctctcttgcgtttccccaacagaaattaaaagaacgccccccagatgcgaatgcaagagggcccagcggccgatggctcgtcccccccaacaaacaaagaaaaactggccccggggcccaataacacacaacacgagctaatagaaccagataaggaagaagacgtttcaccacagaccaggtggcccagatgccctccaggactgaacagagccccaacaccgagagggtggggggccaaacacactaataaccaaagtaccaccgggggtgtaacaagaaccaccaattgggcaagaaaacaga

SEQ ID NO: 28403 - DNA, 254 bp, Zea mays
  Clone ID: MRT4577_125917C.1
atctgcatcaacctcgctgtttggccgtgatcatagtagggaatcctccgccggggttaccaagtctttttgaggaccaagggactgaaccttgagaacatgttgaacccccgtggtcctttcaacccctgggacctgtctggtgccccaaacaagaccgccttcttaaaggtgaaggaaatcaagaacggccggttgaccttggttctccatgttcgcctttttaatccaggcttacgtaaccggaaaaggcc

SEQ ID NO: 28404 - DNA, 894 bp, Zea mays
  Clone ID: MRT4577_125918C.1
atggccctcgtcgtcgggccctcgatagcacttccagcaacaaatgacgacacatcgccaagggatgacctcacaatccccacaaatgaagcatcaacgactaccactatgcgtccgaccgaagaaaccaaaagagctaaccttggtttcttcgacgagcgcaagacgtcgatcatcagttccagcctcactgccaaattggaagacacgctcgtccagtttctccaagaaaaccaggacgtattcgcgtggcaacccgtggacatgctgggagtccctagagagctggacgagcacaaacttaagcaagttttcaacagtttgaggcgctattgctggaaacttaacccagagaaatgcatatttggggtaccagccgagaagctgctcgggttcatcgtcagtcaccagggaatcgaggccaacctagagaaggttgaagccattctgaggatggagccaccgcgatcacagaagaaggtccagatgcttactggctacatggcagcactaagtcgtttcatctcatggctccgcgagagaggaatgccattatacaaattgctcaagaagataggagacatactccgcaatagagaagaagtggggaggacaaccaaatgggtgtgcgaactcggagctcacgatatagagtttcgacctggcaaagtgatcaagacccaagctctagtggattttatatcagaatggatcgagcaacaaatcctcaaaagcctcgagtcagtagaggtttggaagatgtacttcgatggatcgctgaagttacaaggagaaggggctggcatcctcttcatcacccctagaggagatcagctcaagttgatggtgtatggagattctctggtcgtcatcagcctagtcaacaaggactag

SEQ ID NO: 28405 - DNA, 193 bp, Zea mays
  Clone ID: MRT4577_125919C.1
aaaaaaaaaaaaaaaaaaaaaaaaaaaaaaaactaaaacctaaaaacaaaaccacaacaaaagacaaaatactgaaaatatccatacacattgtccctacgctcgagcctccctttaggagggctctcttttcgccctctattaaatcgtatgacaattcactcttccttcttttggccccattttgccttat

SEQ ID NO: 28406 - DNA, 468 bp, Zea mays
  Clone ID: MRT4577_12591C.1
cgagattgaacaaggcatttttttttaattccaagctaactgcaacactccctggggccacaacgtttgcacacccagagtggtgctacacttccaggtccagcaagtgaatcacacaccaatatttggagaaataaagcctgctccatgctacagacccaatatctgccacgtcatagacaagaaaaacaagaccatttggggctggcacatcaatggctaacactccagacgacccactattttgctcagcattagctcaaccgacataaaatacaccggctttctcctctgggagcccatttggctcaacaaatcctgtcggcgtgtttaccaccagaggggctcctctctttttaacaccaccacttttaccacctgcccccccggagagaaataacatgcactccttcgtaccgccatgaaaaccaggagatgataccggtggactcccttgtttgccccacc

SEQ ID NO: 28407 - DNA, 792 bp, Zea mays
  unsure (1)..(792): unsure at all n locations
  Clone ID: MRT4577_125920C.1
ggaggaaggtgtgacggcggacccagtgctcgaggcgccgtaaggtggaggagaagaggtagaacgaggtgcggggccggtgtggggcggtaaggagggcgaagtgggccaagttgtcccaagcggaggaggtgacccaagcgtactcgggcttagagcactgggtgcggacgaagccggcgggatcggtcacgcggagcgtgcggacagcgcggacgtagaggaatagggcattatacacgtcctctggaacgagacggtggcgcagatcctggtggagggaggagggctcggggatggcgacagcgcgtggacccctgaacgaaatggagtcgtgctcggcgtgcatgggggggatgccgcgttggatgaggagggaatggcagtgaccccacgagtcgagcctggagacagtgagagaaacgcctggtccgcggatggtggtcgtgcggagccagtcgagggcggatcgaggttgggtgtagttgtgggcggggttgccctccaactcatagatcagacggtccccgtcaaagcgaaagcggtaaaggtctggatgaagagagatagaggtgaaggaggactcggggggcacgccaagtccggcggctgtggcggcggttgcggtggcggaggtggctgcggcggcggaggctgtggcggnggttgcagcaccgtgttcaacgcatgatctcggtggagtggaggcatttgtgcagacatgcagtcgtcgtcgtctattgctagataccacatgctacagcatactgggtattgctgggcttaatctac

SEQ ID NO: 28408 - DNA, 567 bp, Zea mays
  unsure (1)..(567): unsure at all n locations
  Clone ID: MRT4577_125921C.1
aaaaaaaaaaaaaanaannaaaaaaaaaaaataaantataaaaaaataatatatataaccaatggaacctcgagacggacgggttcggttccaaaaacagcagtaccggacgccttttttcctctccaactctcaatttcccaccttgaatcctcctcctccccgccaacgagtccgattccgcaccggccgtcaaaccacccaagcggcggccactgtcccttcgcgacgtccaccgcgcggacgacacatttggttgagcagccgctccgctgccaacgcgcgtatcgccagaggtgctaacgaggccactgagttggaactgcaggatgtccttttgtgggcgcagagggagctattgtgtgacaacgtcagagcaagatgaactaacaatacatctttgaaacagtctgatacattgcttccatgctgaccaatgataaactcccaccaaatgcagtcaggcaatgggctaaagaactgtgagaaccttaatgagtgacctgcaaaaagtaataatgagactggcaatgatgaggacttcactactatttttgctgatagtga

SEQ ID NO: 28409 - DNA, 339 bp, Zea mays
  Clone ID: MRT4577_125922C.1
ccaagcaactgccgcaatatataataaataatacaccatgcgtttattcagagaagctaaagcgctaagaaatggacggccgttttaaaattgcacttgcttgcactcgtctgtccagaaaagatacaggtattaaagcttgcccttattgggcagtgggcacatcgcctacctgttcctgactggatctaatttgatcagcacttagcttgttaatttctccctagatttttgtttaaaaaaatgaaatccaccgggcaccggccattgcgctagctagctagcatggcgttggcgtgtgctgcttgggccggatgtcaacccccacccacgcgtccg

SEQ ID NO: 28410 - DNA, 427 bp, Zea mays
  unsure (1)..(427): unsure at all n locations
  Clone ID: MRT4577_125923C.1
gcttgtaacacttgttaggacagctaaaggactagcatcgacatatttgttattgaagatgatgatcatttcaaaattcaaaactaccacttcgttaaaaaattcaatgcattgtangaacaattgtagttaaggagttcaagggaagactgtattcttgcagagtttgtaccatgttgtaatctttggctcacgggtatgtgctacacctgccgtacatttaaatatcttccttaggtatgctcatctgaacttcaggtcaccatggccccatatccttgtatgtggtgcttatttaattgtttcttctcggngtatcatatctgttcttgtccctgtccaatattttatacggtacatgctgtgtagatttggatacgtcgtcacatcgattcatatatcccagtggacctatcactggtcaaac

SEQ ID NO: 28411 - DNA, 372 bp, Zea mays
  Clone ID: MRT4577_125924C.1
aaacatcactgtggggaaaaaaacagatggtcatattaaaacctttcaaatggatcaaaacgctggggaatacccaaaagcagcaaaccatgaaggggacacatattgacaagggggccctacttcctggcatatgaacacaaaaacggccatagcaaaaagcttcaaacttatcaatcatacaacaggtgcctggggagcaacctgagcagtaaaagctcgccttctttgcaaggggaggatgctcagcctggcaccctcgccatggggcgggctcacccaccaacagtgcccatggccaatgcggaacaccgtttcccacgcgaacacacaaactggggacccatggaaacctcgacacagattgaagag

SEQ ID NO: 28412 - DNA, 582 bp, Zea mays
  unsure (1)..(582): unsure at all n locations
  Clone ID: MRT4577_125925C.1
taactgagtgaagcactttaatggacagatttttagttgtatttataaattatctgatctagaacctatttttcttgaacaagatgtacagctacctcttgtctgtattttgtctcttgtaagtatgggaaggtgggcagaaatttatgtacatgctgaggaagatatttattcatgactatattaatctttgatcaaatagttgactagcatcttttgttgaacagccacaactagtatacacagctcttgcctgatattagcagtttcatggcgggcacctaattaattgcccagcagatattgcttgcgttgtagttttatctgttattgaaaaatgaaaatatctgaaatgagatatggattattagattatatatatatatatatcctatatgataatttagcaagttaagagagaaaattctgatagaactatatcaccacctgatgattgttgatgagcatcatggaaaccaaaggaattgcataggttacctntatgtggtatgtttacttngtaactcgaaaagaaaataatgtgntcctcattttcatttggcaggtgctccatatgtttag

SEQ ID NO: 28413 - DNA, 625 bp, Zea mays
  Clone ID: MRT4577_125926C.1
ctcgcgccgccgcctccttcgccacccagcgctcgagctcctcgctccctgcgagcgcgcgccgcaacgccaccatgaagttcaacatcgcgaacccttccaccgggtgccaaaagaagctggaaatcgatgacgaccagaagctgtgagtgtttcgcgtcctccatctgctctgtatttttcgtttctcttagatccgtgggagtggtgttttgcttcgagcccactttgtagctgatggtgccttgattgagtatttgagtgctagtacttgatgcatcggtttgttctatgtggttttgccaacttgtcccttgtctcattaagcacccttcctgcttagattcatttacttaggctgcttgctgttgcccactggaccatcttatacttcctatattcatatatattagctttattatccggatataatataatgccttgtatgcaacagtaaattaggaatataaaaacatacatgattagcatagacttctgaggtattgaatttttagatatacgccacccccattttgttgtttcttgaatggatcattgctgggttttttcgtgtccattgattaaaattaggaaaacatcttgatttgcgttaaatgttgtttaa

SEQ ID NO: 28414 - DNA, 1448 bp, Zea mays
  Clone ID: MRT4577_125927C.1
cccacgcgtccgcccacgcgtccggcgcgcgagagcttgtcggagggctctctgtctctgtgataaaccgatacgcagaggaagctgcggagaggtgtccctgctctgctggtgagctgcggccagcgggtgaagtgaagtggaccggacgtggacgaaggagagagagagagagagagaagaaagggcgccgcgggggccatggctggacacgcgccggcgagggacaagaccaccaccggcttcgccgctacgtgcagcctgctgagccagtttctcaaggagaagaagggcggcctgcagggcctcggcggcctcgccatggcgccggcgccggcagctggagcaggggctttccggccgccgaccaccatgaacttgctgtccgcgctcgacgcgtccgccggggagccggcatgccggccaaggccaccgtcggggagccagaaggccatggccgacgcaccggcgggaatccaagggaggcagctggggaggaggcgcagcagctgaccatcttctacggcgggaaagtggtcgtcttcgacaggttcccctccgccaaggtcaaggacctgctgcagatcgtgagcccgccgggggccgacgccgtggtggacggtgccggtgccggtgccgctgtccctacgcagaacctgcctaggccttcacacgacagtctctctgccgatctgccgatcgcgaggcggaactcgctgcacaggttcctcgagaagagaaaggacaggataaccgcaaaggcgccgtaccaagtcaacagttccgtcggcgctgaggcgtccaaggcggagaaaccctggctgggtctgggccaggaacaggaaggaagcgacggtcgtcaagcaggagaggagatgtgatcgatcagtagagactagattcgttcgtgcgcgcgtcgtcgtagcttcaggttaagggaaagaataatccaaccgtcggttaattgctcggcttaattacactgctctactacgtagtactggcactgctaccaccaccaccaccaccagagtgaccaagttaagctagggattgttacataggccggccggtcggccgttcgttcgcgagattgtttcgctgctggagatgcgcatgcacgctcgcagcagcttcgctggtccgcgtggccgcgtcttgtgttcgcgcaacgaacggtgcacgttccggtacgttttcatttgtctccgacctgtcctgtgtgtgtgcgtgtgtttttgcactggatattccccctcccctctcgtggtcgtagggagggtttgtatgttcagtggaaagatgtttggtatggtctactccattctatttcatgattcatgaatatgtatgtatgtatgtatgcgtgtgatgtactactgtggtatgctgtataaatttataaacacgcgctttattaaaaaaaaaagagataaaaaaaaaaaaaa

SEQ ID NO: 28415 - DNA, 150 bp, Zea mays
  Clone ID: MRT4577_125928C.1
ctcacacgtattgccacgagtacgtgcagttcatcatcggccacagcgaggggcaggttctcagggttggtgtacatcatttacaagggcaagagtctgctatggctgggcacagtgctagatacatacggtgccgtcgcagcgcacgct

SEQ ID NO: 28416 - DNA, 1352 bp, Zea mays
  Clone ID: MRT4577_125929C.1
cgcgagagcttgtcggagggctctctgtctccgtgataaaccgatacgcagaggaagctgcggagaggtgtccctgctctgctggtgagctgcggccagcgggtgaagtgaagtggaccggacgtggacgaaggagagagggagagagagagagagagaagaaagggcgccgcgggggccatggctggacacgcgccggcgagggacaagaccaccaccggcttcgccgctacgtgcagcctgctgagccagtttctcaaggagaagaagggcggcctgcagggcctcggcggcctcgccatggcgccggcgccggcagctggagcaggggctttccggccgccgaccaccatgaacttgctgtccgcgctcgacgcggccaaggccaccgtcggggagccagaaggccatggccaacgcaccggcgggaatccaagggaggcagctggggaggaggcgcagcagctgaccatcttctacggcggaaaagtggtcgtcttcgacaggttcccctccgccaaggtcaaggacctgctgcagatcgtgagcccgccgggggccgacgccgtggtggacggtgccggtgccggtgccggtgccgctgtccctacgcagaacctgcctaggccttcacacgacagtctctctgccgatctgccgatcgcgaggcggaactcgctgcacaggttcctcgagaagagaaaggacaggataaccgcaaaggcgccgtaccaagtcaacagttccgtcggcgctgaggcgtccaaggcggagaaaccctggctgggtctgggccaggaacaggaaggaagcgacggtcgtcaagcaggagaggagatgtgatcgatcagtagagactagattcgttcgtgcgcgcgtcgtcgtagcttcaggttaagggaaacaataatccaaccgtcggttaattgctcgccttaattacactgctctactacgtactgctaccaccaccaccaccatagtgaccaagttaagctagggattgttacataggccggccggtcggccgttcgttcgcgagattgtttcgctgcatgcatgctcgcagcagcttcgctggtccgcgtggccgcgtcgtgtgttcgcgcaacgaatggttgctgccttagcctagccttgatcgatcgatatgttgaggaacggcgtgtagtgcggtgcacgttccggtacgttttcattgtctccgaccagtcttatgtgtgtgtgtgtttttttttgtttttgcactggatattcccctcccctctcgtggtcgtagggagggtttgtatgttcagtggaagatgtttggtacggtctacttcattctatttcatgaatatgtatgtatg

SEQ ID NO: 28417 - DNA, 720 bp, Zea mays
  Clone ID: MRT4577_12592C.1
cattgggtacctcgaggccggccggggatacttcacaccaccgcaacgaacaacacagatgagaccctctctcctgtcaggaaatcgcaccgcccgtctctatctgatgcactgcgctgtgtgcctgcctcgaactaggagctcgtcatgtcgactaactccatgctcaccgacatgaaggaacagaaaaaatatcccacccatcatagcagtgaggtcctgatgcctatgacgatgtcaccatcgtcaagctagcatactatgggaccagctgaccatgctgtatgtgtgcaaggaggttgtttagtgtcacattaatttgcctccagattaccccaacagatctcctcaggcaacattcctgaccatctcattacatgcaaataactatggtcatgctaggatatgtccacaaattaacacagaacttagcacgcctactaacacacacacgtacaggaccgtgcaccatctgctcgatgctggctcacacatcattctccatagcactacaagtgcgtcagatttgacgcactcatatgacactcccctggaagccaaaatcacacgagaccgcacctggaagcataatgcacaacgatatggtcatgaacgctaaactgctcttcactccactgtggtaacgacaaaacgtgtgtggtctgcaccgatcgctcgatgaaatcgtgtcccaactggaagatccataagccaactatg

SEQ ID NO: 28418 - DNA, 188 bp, Zea mays
  Clone ID: MRT4577_125930C.1
acattccgaattacgggtcacccacgcgtccaaattactgctccctgtttttttttccagccgagcaagcctacggaaacggatcgtgccgagggaggtgggctcacgcaccttgcctgtacgcttattcgtccgatcgttcgccggacctagcctatccctccgaagtatggcggatcccgcggcta

SEQ ID NO: 28419 - DNA, 2646 bp, Zea mays
  unsure (1)..(2646): unsure at all n locations
  Clone ID: MRT4577_125931C.1
ccccgagcccccccccctctgctcccactcccgtacccgtgctctcttggtagccgcttcccgccggttacccgcgagccccccacttccttctccgcgctcggcacaaaacaacaatttcatcattccagcagcttcatacaacaatgtcaccagcatacaacaatttctggtattcaagtagcatcaagttataggacgataatacaagcaatatttgtggaatgataatgcacaacattctagcaacactataatttacccgcgatgagcccaagacttgatcacttgatacgatgtccctccttcgtcgtctatcggctggcgcctggggggtttcacgcgcccctcggccttgggctggccgtgcaccccacccggtttttctggagttgaaatgtatcagaccagatacactcattttggacactccatccttgtctactctaaagctcaccattgataaacttggtgcaactgcccgagttgatggccttctgcgtttgtcgaatcttcgcatagaatcactggattttagttcccttttcccagcattcatggacaatcaagctatcaggacattggagctcgagctacctgagtcttcaagtcaatatgaacttcttgaagcagttaacccggattatcttctaagaaggctagccagcttttgtgaagtcaagctgggcccaagattttcacgtgaactgaaactatgtcttgcccagtacaaagatatccagtttggaagttgcctgaagaagctcctaattcatgtcccgcaatcagggagttgtttccatctcatgcccctgtttgagatctgtgcacctttgtgtgaggtgactgtgcttttccacgctgaatcagctgatgctgtccgtcgtcaagatgcaatgtcgatttgtatgcagaacttcccagagatcagatggcagtggggtacctggcagtagtaatactgtctatatatgcatattcgtacttgtaggcatattggttacataactgaaattatctgtgtgactgatacttgtagttttgctaacatagcagccccttctacacgattgggagctggttttgtttgatgacatactgtgcactagcattgtacgcagcaagtatggttgtctctgtttaatccattctatattactatcaggnagnataatcgaccattaatcaggtgagctgatgtgcacatgccaaccctgtctgccaaataatcctctccgaaaacacaaacatgaggtgccgaataagatctacagtacatctcaagggacggtgcctacccatctaatttcccatttggcaagaaaaaaagcttctgaatcttgtcgaagcaaatcgagttccggccaataaagtgatatcccgccaatttgatctctcacgtcacgtgcagaggcaccaggtgcaccggcagaagctagggcaggagcaactgcagcagccgcatcgccaccactggcaccggtaccaccaggagcaatcgaaccagcagcagccgcagcagcagcacccggtgtcgctgctccgccgctcctcctccgtcgtcatctccatgaaggccgacacggggggctcgagctgctgctgctcggcggcggcggcggcggcggctgtcgcactccttctccagcggctggtacagcgcgctgttgacgaggtctttcttcctcggcgacgtctccgccagtattgggaacgcgaaggagaagttgctggagctgcttccggagccgctctcgtgccgccggaacgcggcggcggcggcggcggctctcgtgacgtcgttgcccggcgccgcgaactccttgggctcggccgcgtccaccggctccgcgccctccgccagggacggaagtttggagtccgcctccgccatggcctcgtcgtagaagaagtcgaagtgcgacctgctgccgccggggtacaggtcgccggcgccatggatgctgaagagcgactcgttggacgccatgctccactcggcttgcgacaccgacgtcctgtgctggaacacggacgccgggatcctcccggggtcgaacccgccggaccccgcccccgccgctccgacggccgcggcctcgggccggccagaccggcgcctccgccagcgaggccccgccgtccgacgacgcgaacgagtcgtcgacggccggaggcggtggctccggccacgtcgcccagtcgtccggcttggcctccgcgctgtgcacggcgggaccggcctgttgtacgtcctccgtcatcgcgcagtcagccggctcgccgtgcacgtgggcggctccggctcgttcctccttcggcgtcgccgatcggaccgttttggcctcccctccgtgttcgtgctcgggcagcaccgcgcccaacggtttgacgagctcgacgtcgatgtggcacgggatgtcatcagccgacgacgcggatgacgacgaggaggaggacgagctggaggtcgacttcctgcccggatcgacttcggtggcctcctcctctggctcgtccggcgctcccatcggagagaagggcgacgacgtcggcgacccgggctggggctccatgaacacgtcctgaagaacaggaggggacggggctgccggcgccttgcgacgaccgagggaccggggcttc

SEQ ID NO: 28420 - DNA, 249 bp, Zea mays
  Clone ID: MRT4577_125932C.1
tgagtcgtattatcgtagtcaggcgggtgtgcaggtcgcccgcgctccaacagcatggagacggtcaacgttgtcatcctctcgttcttcttcatctttgctgtcgagcgtttctttaaacgcctcgatatcaggagcgggaaggtgaagcctctgccagtgggcggtctagccagcgcggtcctctgccacctgtaagtcctcgtctataggaatattcagcacatgttcacgcgcctctctgtgcgc

SEQ ID NO: 28421 - DNA, 271 bp, Zea mays
  Clone ID: MRT4577_125933C.1
cccacgcgtccacccacgcgtacgccaagacatatgtcaaaatcatgaagactcactggggtctatatctatacgacgggtcctcatgaaaaaacttgatattcaaagtatctaccttcatctacccaattcttataaagagcttaccatccaaaaaaggacatcctttatgtgccctagtactgattcaaattatatttttttttgttctcatagaattatctatccaccatttgaagattcatttacagttacccaagtttctatttct

SEQ ID NO: 28422 - DNA, 451 bp, Zea mays
  Clone ID: MRT4577_125934C.1
tcaagaggacgggcgggaatcacccgtgttgcccttaccatagcgcaagatcgctgaggcgccgcccctacagcgcgctgcccagtttcccctccctggacgctagcgactgctgcttgtgatgatctctcgaacagacgagggacctcaagagcatgagattgtgatccgttttccaggttctagcaatgaaagattacctcgtggcgaaccgaagtgatcgagtcctgatgagtgccacgagattgaagagccgatgattactacggtgtcggttcgatttggtgccctatatgctcgggcaacgaacaagcgccgaggcgcgtctccagcatttcctggagttcgaagagctcgaggagtacactaatctccttccgtagcaacttgcgtgtggtgagttaaatgacgtcgcctacgtatctagcctgtgcacattgattatattctg

SEQ ID NO: 28423 - DNA, 290 bp, Zea mays
  Clone ID: MRT4577_125935C.1
tttaatatccttcgggcttcggcacagcaagcacgacccccttcgtcaccgccaccatcaccgctaccgctacggctttccacctaaaaaccctaaccctaaaccccctccgcgcgggagcccctcgcccacggagaaccccaggccccaggccccagcactcacccctcccatggccccgctccccgtccccatccacccgtcaatcgatccaatccccgctcctccgtcccgagtgcccgcccccgtcccagacgtcgttacattcatggccttcacacccactccct

SEQ ID NO: 28424 - DNA, 243 bp, Zea mays
  Clone ID: MRT4577_125936C.1
aagttgctgccaactagatggggtggctagcttattagaacttgaacatgtttctagcttgcttttttgttgatggatggttcaagcactagggaagccatattttcctagtccctcttgttgtaatgatcttttagtaaccacttgtaatttgattttcaagtgtctgttacctatattgctcttttagttcttaaatgttaaagaggtatatgagtcatttaatttggctcagaaattttg

SEQ ID NO: 28425 - DNA, 752 bp, Zea mays
  Clone ID: MRT4577_125937C.1
ttcggtgcctttttctagcggggaggaggcaggcggcgcaatctggcaccggccatcacgttccctccggccgcttccccctccctgccctccctttccccagatccgaagccattaaaaccagcggatctcacctcggggcgcgtccgcggcatctgggcaagcgagtggtagagccagcagccatgagatggtatgcatcggtagcctcctgagggcgctggtcctgagtgcggcggcgtctgcgggcaggcgccgggggcccaggatcctgtgtggccacgaggcggatgtacgcgtgactcctcggcacggacacggctggcgcggattccgggcagtcacgggaaggatgatgctggactcctctgactgtgcctctgctgccgccgccgcggagacggggcaggtgcagccgcagcgccgcgcggtgggggccgtgcccctggcgcacgacggcggctacgccagcggcggatgggagaggtaatgtatgtgcgtgtggtttgagaggcttcaagtaatgtaacctgtcggcacttgcatgtcgtggtgcggaacggggcatgtgaaccggttagaatgctgcatttgtgtgcagttttgcattgtgttttgtgttgcctgcagtataagggactaattggcctgaacactgaaacatgcaaatgccccttgtgctttttgttacttactacagatgtgccacattttactattccataccacacattagaactaaaaagatattc

SEQ ID NO: 28426 - DNA, 961 bp, Zea mays
  Clone ID: MRT4577_125938C.1
cggccgggggcaccttccatcacgttccctccggccgcttccccctccctgccctccctttccccagatccgaagccattaaaaccagcggatctcacctcggggcgcgtccgcggcatctgggcaagcgagtggtagagcccgcagccatgagatggtatgcatcggtagcctcctgagggcgctggtcctgagtgcggcggcgtctgcgggcaggcgccgggggcccaggatcctgtgtggccacgaggcggatgtacgcgtgactcctcggcacggacacggctggcgcagattccgggcagtcacgggaaggatgatgctggactcctctgactgtgcctctgctgccgccgccgcggagacggggcaggtgcagccgcagcgccgcgcggtgggggccgtgcccctggcgcacgacggcggctacgccagcggcggatgggagagagaagatggcaaactgagttgtggatactcaagttttagaggcaagagagctacgatggaagatttctatgatgtaaaactaactgaaattgatggacaagctgttagcctgtttggtgttttcgacggtcatggaggatcacgtgctgctgagtatttgagggagcacttgtttgataaccttctcaagcaccctgatttcttgacagatacaaagcttgcgataagtgaaacatatcagaaaacagatacagatttcttggaatcagaagcaagcgctttcagggatgatggttcaacagcttcaactgcacttttggtgggtgaccatttatatgttgcaaatgttggtgattctcgtgccgttatttcaaaagctggcaaagctatggcgctttcagaagatcacaaacctaacagaattgatgagcgaaagagaattgaaaatgctggtggtattgtcatttgggctggacttggagggtgggtggtgtattggcaatgtcccgtg

SEQ ID NO: 28427 - DNA, 2056 bp, Zea mays
  Clone ID: MRT4577_125939C.1
aaaaaatctaggtatagtttttttaatcgggcaacaccaattattgtcgataatagttccttgaaaaccggtgcctttttctagcggggaggaggcaggcggtagcggaatctggcaccggccatcacgtcccctcccgccgcttcctcctccctgccctacctttccccagatccgaatccattaaaccagcggatcttgcatcggggcgcgtccacggcatccgggcaagcgagtggtggagccagcagccatgagatggtatgcatcggtagcctcctgagggcgctggtgctgcgtgcggcgtcgtctgcgggcaggcgccgggggcccaggattctgtgtggccgcgcgacggatgtgcgcgtgacgccacggcacggacacggctggcgcgggttccgggcggtcacgggaaggatgatgctggactcctctgagtctgcctcttccgccgccgccgccgccgcggaggcgggagctggggcggtggcaggccaggcgcagccgcagcgccgcgcggtgggggccgtgccccaggcgcacgatggtggctacgccagcggcggatgggagagagaagatggtaaactgagttgtggatactcaagttttagagggaagagagctacaatggaggatttctatgatgtaaaactaactgaaattgatggacaagctattagcctgttcggtgtttttgacggtcatggtggatcacgtgctgctgagtatttgagggagcacttgtttgagaaccttctcaagcaccctgatttcttgacggatacaaagcttgctataagcgaaacatatcagaaaaccgatacagatttcttggaatcggaagcaagtgctttcagggatgatggttcaacagcttcaactgcaattttggtgggtgaccgtctgtatgttgcaaatgttggtgattctcgtgctgttatttcaaaagctggcaaagctatggcactttcagaagatcacaaacctaacaggattgatgagcgaaagagaatagaaaatgctggtggtattgtcatttgggctggtacttggagggtaggtggtgtattggcgatgtctcgtgcatttggcaatcgtttactgaagccatatgtggtggcggaacctgaaattcaggaagaacagttcagtgatgagctggaatgcctggttctcgctagtgacgggctttgggatgttgtggaaaatgaggaagccgtttcccttggcaaatcagaggacacgccagagtctgcagctcggaaattgacagagatcgcttattctcgtggcagcgctgacaatatcacgtgtatcgtggttcaatttcaccatgacaaaaccggatgagccatgtggcggccaatttcagttgtaccctgcttcaggctattattatcctgcaagccgggtggtggggcttctctcagatttatcgctcttgtagcaacttccaagaactcgtccattgattcttttgttgtcttgtaggaaacatttgttccaacaggtgtaatagatattttcaatgggttaatttctaataaaactatgtttacaattactgtttagtggaaattggttatcctcttgcctttgatactagatgataagatgatttgcaaccagtatgcaatggccgttaccgtgtatccctattctcgaagggagcaatcggaaaagcaaactggagtttagctccccaggctgtgttcggctggtatggattcaatcctcaagtgtaattagatatggattgaatggatccctgttgacatttttccccgtaatgtatgtgcgtgtggtttcataggcttcaagtaatgtaacctgtcggcacttgcatgtcgtggtgcggaacggggcatgtgaaccggttagaatcctgcatttgtgtgcagttttgcattgtgttttgtgttgcctgcagtataagggactaattggcctgaacgctgaaacatgcaaatgccccttgtgctttttgttacttactacagatgtgccacattttactattccataccccccattagaactaaaaagatat

SEQ ID NO: 28428 - DNA, 320 bp, Zea mays
  Clone ID: MRT4577_12593C.1
gatgcacaagtcctgcaggatgtcgcatgataccatcgtcgtcgtgagcctgaaccgggggaatgcccttgggctgggggcatgccgatgcggttcaacggcgacaccgaaccaagcggatataccaccgagcaagaccgctaggaggaactgccatgctgtcgacggatgctcatacgctctgcaagagctggcagaactgatagctgtcgacgctgactggactaacgatgaatgcatatgtgagttccgagcttaccaccacacagagaacttgatttgtgacatctatcacatcacaagcaacaacgtcgacatgc

SEQ ID NO: 28429 - DNA, 661 bp, Zea mays
  unsure (1)..(661): unsure at all n locations
  Clone ID: MRT4577_125940C.1
ggcatctcggggccaagcgccgccaaagncagctacgaagaagaagggatcgcgacggcaacgactcagcaggttagccccgtcgaaggcagcggcggagaagaatgtggaccatccacgctcattatttcctttgtgtttctgtttgatttatttttaaaatttctttatcagtttggttagcatccacttgcatccgctcatagtttgattcatgttcgttggatgggcctcaaaattaccagttgcttcgactacactctctgaatttcgcaaatcaagataaaacccgccacaaaggaatagatagcacacanaaaaaatcacagtattatttagtcatattggacacgaataagttaaatttcttaaattttagatccacatttttttattttggtctagactctcaaaaaatcctagaaatgtccctctgcctctcgcgcgtgaattctcctctgccgaagggaagacactcgaagtttctgcaattttttggacgaccgagaggtgctgccgtttatgagtatctttccagtggaaaagcagcatgccacaacaggatggtcagagtttggacattgcatgaagcacttgctggacaattgagaagnaatcataccttcttgcggggctcttaatgtatgaagtacgccatgct

SEQ ID NO: 28430 - DNA, 241 bp, Zea mays
  Clone ID: MRT4577_125941C.1
acaagacagcagggggaagaagaggcaagttggtagactattgtctgatccgcaccgttggctgcgtcacattctctacgcctcgtgctccttcccttctaccgttcggctgcgtacccgcgtctccccagatccgctgccccgccctctcgacgcggcaattcctcgaacgccccgcgcgagccacgccctcgccgcccatgggctcgctcccggcgccggcctcggcggaattcgcccc

SEQ ID NO: 28431 - DNA, 683 bp, Zea mays
  Clone ID: MRT4577_125942C.1
ggtaaactgagttgtggatactcaagttttagagggaagagagctacaatggaggatttctatgatgtaaaactaactgaaattgatggacaagctattagcctgttcggtgtttttgacggtcatggtggatcacgtgctgctgagtatttgagggagcacttgtttgagaaccttctcaagcaccctgatttcttgacggatacaaagcttgctataagtatttcttctcttcagctgtactgtagacttcctgttgccattattgttggtgctacaacctgtttatctgctaaacttgaatttaaaacaggcgaaacatatcagaaaaccgatacagatttcttggaatcggaagcaagtgctttcagagatgatggttcaacagcttcaactgcaattttggtgggtgaccgtctgtatgttgcaaatgttggtgattctcgtgctgttatttcaaaagctggcaaaggtattgcatactggaagtaggtatcttaagtagtgtatttgtgtttcatttccatgtcacatttgtcagttgatgtatggtctctggtctgttgaatctaaatcacaaagcaaaatcttggcatcgctctgtttctcataccaatatataatccataaacctttgttgtagttaatacagaaccatccatgacagtttggtttcgtaggtt

SEQ ID NO: 28432 - DNA, 1728 bp, Zea mays
  unsure (1)..(1728): unsure at all n locations
  Clone ID: MRT4577_125943C.1
ccggccggggaaaaaagtaagatatnttctgcgaggcaaggaatccctcccccgcttctactctttcggttcgccggttcgccgtctcgcacacccacttcctacaccgccaccgagcactcgctcagtttcatacccatcctcgaagtcgcctctgtctagttcctgctcttccaccaccgcctgtgatgtatccccgaggcccggatgggggacgagatgcctcgtctcgccctatgcttgccactcccgccggcaacgacacgcgcgaggaggatgagatcaccaccgcggaggctcatgtggagaaagacgccgcgcggatggacgctgccctcctcatgcggactacgcccaagatggacgagtttcacaccgggggcgatctggactcaactggaagtggaagcggcatctcggggccaagcgcctccaaaagacagctacaaagaaggggatcgtggcggcaacgagtcagcaggtccagcatccatgcttatccttttcctttgtgtttctatttgatctgtttttttgcccgcgccagcaacagagaagaatgtggtcgtggctgtaatgggtcagcaggtacaccatccacgctcatcatttcctttgtgtttctgtttgatctatttttttaaaatttctttatcagtttgattagcatccacttgcatccgctcatagtttgattcgtgttcgttggatgggcctcaaaattaccagttgcttcgactacactctctgaatttcgcagatcaagataaaacccgacacaaaggaatgaatagcacacaaaaaatcacagtattatttagtcatattggacacgaataagttaaatttcttaaattttagatccacatttttgtattttggtctagactatcaaaaaatcctagaaatgtccctctgcctctcgcgcgtgaattctcctctgccgaagggaagacactcgaaggtgagctactgaccttcaactgcttttctggattctctttgcaatatgctttgttggggctagatctgaaatcaatgtttttaataagctagcacaaataggaattgttgcatgtgttgccgacagaaccatctcactcccttttttagtttctgcaattttttggacgaccgagaggtgctgccgtttatgagtatctttccaggtaacagaatatcttatatttactcatctatttactctttgaaataattgctcttgaatgatggacaattcttgcttttaatagttctatcaatttcacattgtttttacctaaggacttatgtctactatctcatagtggaaaagcagcatgccacaacaggatggtcagagtttggacattgcatgaagcacttgctggacaattgagaagaactcataccttcttgcaggtgttcctaacctatggggtgaaccatgctattcattcaagatggcataattatatttttgtacaataacttactttttgcgttaaaattattaaaattctcaatttactgaaattgttgtcatatagaaattattctcactgcgatttatttaaacccacctagaantgttgctacaaattacctgtatttacttttagcattaaaaaacctactaaatgtcgtgttaaaaaattattttgttaaaccttctgtgaatacaacacctgcactcattacggatgatgagttcttatatattgcatttcaattttaaaaccggaatgc

SEQ ID NO: 28433 - DNA, 719 bp, Zea mays
  unsure (1)..(719): unsure at all n locations
  Clone ID: MRT4577_125944C.1
ccggccggggcgctctcgcgccccccttctgggtgctttgtcgcagttgcggctgtggccgccacattgctccttcctctcgggtatctgccctcgtgttgtcgtgtctccccgctccgctgtggtcgtgctctcacggcccctgtcgggcgctccgtcgccgccgcggctgcgtccgccacaggggaccactgaggcgctgaccaccagcactaccacagagggcgcgcgggcgtgccggaggccggacccactgtcttggcgtgcggcgtcagtgcgacgtggtcgtggtgggtgctcgcgtatgtgtcagtggccgccgatgttgacacgctgtggtggttccgctcgtgcttcgcttgtagtgggacgattctgtgtctgcatgaagggtggatatggctggagcagagaggcctgcaatgggcaacacacgttgtattggcacaatgaatgttgattcagttatttaaaattcagatctcatagtttgataaggtagtttcttgcttggagcaatacaggcatggacgtcattagattgnggtggtgagctatatgatgatcttttagggagtcagcggncttgcaatccccctctgcaccataagaaanttcgtgtgctacagatttagtactgatgaatccctctatgcagttccaaacaactgcacaaatcttaagagagaggtangaaacacagtggtcgttgttgctgc

SEQ ID NO: 28434 - DNA, 1938 bp, Zea mays
  Clone ID: MRT4577_125945C.1
ctgttctggaagctccaagcgttggcgaaaaaagtatgattgttctgcgaggaaaggaatctctcccccgcttctactctttcggttcgccggtccgccgtctcgcacacccacttcctacaccgccaccgagcgctcgctcagttgcatacccatcctcgaagtcgcctctgtctagttcgtgctctgccacggacaactgagaagtactcacgcgtcctggatggagggctggcgtactcgtgacggccggtccaacccttcttgtcgggatcttaatgtatgaagtacaccatgctacgctgtggagtcaagttcagtgggattcgtcgcaaatataaggagggtcgttgtacaactgagacaaggtcaggcccttcttgctagcgctcttaatataagcctgtactacacgttcatccacgtcgagctcgtcggctcccaacgcaaccccttcttatctcacgagatcagtggtgaggacgacactggggatagagacctagggttctccaagtgggcctagaaactccatggcaacgtctcaggaaaaatgggcgcattgaagtcttgaaggactttcaggaatactaattttgagaattcgtgaaaataaaaatagggttggctttatcaaactgcacaaaaaaatcagcagcacttctctttatcatgcaaggaaaatcaaacttatgagcatcttcctatttcgtcagcagctgagtcgatttcgatctcacaagttgcttcgactacactctctgaatttcgcagatcaagataaaacccgacacaaaggaatgaatagcacacaaaaaatcacagtattatttagtcatattggacacgaataagttaaatttcttaaattttagatccacatttttgtattttggtctagactatcaaaaaaatcctagaaatgtccctctgcctctcgcgcgtgaattctcctctgccgaagggaagacactcaaaggcgagctactgatcttcaactgcttttctggattctctttgcaatatgctttgttggggctagatctgaaatcaatgtttttaataatctagcacaaataggaaatgttgcatgtgttgccgacagaaccatctcactctctctttagtttctgcaattttttggacgaccgagaggtgctgccgtttatgagtaactttccagtgggaaaacagtatgccacaacatcatggtcagagtttggacattgcatgaagcacttgctggacaattgagaagaactcatgcctacttgcaggcatcatctcaaccatacaatgggattcattgaaatatcaggagggttgttgtacacgtgagtggaggtcgaacccttcttgtagggctcttaatgtatgaagtacgccatgctagctattgaatcaagttcaatgggattcgttaaaatataaggagggttgttgtacaagtgagacaaggtcagcccttcttgcagggctcttaatataagcctgtactacacgttcatccacgtcgagctcgtcggctcccaacgcaaccccttcttctctcacgagatcagtggtgaggacgacactggggatagagacctagggttctccaagtgggcctagaaactccatggcaacgtctcaggtttcatgcagttctctaaatttattttgctcgattgtaagggaactgtgtcctctataagctcgcgctcgtgctgtaccgggagtaccccttcttcctgcaagtctggttcaattaaaaaattttgttctgtcgtgttgtaaagtacttggcgagctatgatatgtcattaccttagtgagaagactgcttctaatatattagtaatttttagctgtgcagatcatgtcatcatataaatgttgcaaacattataaaatagaggatccatttgaactcttgaaaaaaaaaaaaaagcaaaa

SEQ ID NO: 28435 - DNA, 446 bp, Zea mays
  Clone ID: MRT4577_125946C.1
ggagcacatgagctagcttgccagccagccagcagcctgcttgctctccgcgcccgtccttcttcctcgcctccgttccattccgtcccgccctccaccgccgccgtcgcattcagggatggagatgaagaagatcgcctgcgccgtcctcgtcgccgcctcggcggccaccgtggcgctcgccgcggaggctccggctccagcccccacctacggctactccgccgacgcgcccgccgtcagcgccgccctcggggccgccgtcgtcttcttcttcgcctactacattcagtgagccggccggtgcgcccggaggccgtggaagatactaaggggagagtgagtgacatggctgcgcgcattccgacgcgtgggcttgttttttgattctactccccttattggctctttttgtttgttccctctttctccttaatttaacgaat

SEQ ID NO: 28436 - DNA, 323 bp, Zea mays
  Clone ID: MRT4577_125947C.1
gggaaaccaaaaaacgggggcacattttaaaatacccaattttaatatatccaatcgggaaggggggaacattcggaaacattttattaaggcaaaccggcgatgcctttttttttactagcaatttatgggaacgaagcccacacacatcctttttttggggacggaacaggccccaggggatggccgggtaattaattttggaaattaaaacctcacccgagggggggggcctccgcgacggggtccaaaaaaatgcggacccggtggggggggaaatccatggtaaacggggtgccgacgggcaacaaaaaaatgtgggg

SEQ ID NO: 28437 - DNA, 803 bp, Zea mays
  Clone ID: MRT4577_125948C.1
ccgggcgctatagcagccatggcatcatcgagtgctgctctcgccgtcctgatgctcagctgggcggcggctctcgcggccgcgtcgtcgccggtgacgttcgaagccggctacatgccgctgttcggcggcggcaacctagtaccgtcgcccggcggccgctccgtccgcctcaaacttgaccgccacaccggctccgggttcgtgtcccgatcggcttaccaccatggattcttcagcgcttccatcaagctgcccgaccatcacaccgccggtgtcgtcgtcgccttctacctgtcgaacgcggacgtgttccctggcaaccacgacgaggtggacttcgagctgctgggcaaccggcggggccacgagtggcgcgtccagaccaacatctacggcaacggcagcacctcccgcgggcgcgaggagcggtacctcctccccttcgaccccacccttcggtcgcacgcctacgccgtggcctggacccccacggccatcctcttctacgtggatgggacgcccatccgcgaggtggtccgcgtgccggccatgggcggcgacttcccgtccaagcccatgtccgtgtacgccaccatctgggacggctccgcctgggccaccgagggcgggcggtacaaggtcgactacgccttcgcgccctttgccgccgacttctcgtcgctcgtcctgaccggctgccccgtcgccggcgggggcgacgacctcgcggccgccgagtgccaggtggccacgatgacggcggactgcgccgtcatgacccccgccaagcgcgccgccat

SEQ ID NO: 28438 - DNA, 421 bp, Zea mays
  Clone ID: MRT4577_125949C.1
gggggccgcaggggggtcttaaacacaacaaccggttttgaccttaaaaaaagctggcggggggggggggggggccccccgggggggggggggggggcccacttccccaaaagaggaagggggaagggcacaaacggccgcccacatgggggggggtcaattcccccaaaaattaacaacgaaggggggtcggggggccgatttgggcagaaacggggacggggttttttttttttcagggttttcctcccctcccttctttttttctggggggttttttacttgatgttgggggggaggggtttgccgccccactctttgggggccttcagcgtgggggccaaaagctttccctgggtggggccgcaaaacaccttttgggactccttgggcggggggtttggggccttttggcgggggg

SEQ ID NO: 28439 - DNA, 295 bp, Zea mays
  Clone ID: MRT4577_12594C.1
ccaaggtgctcggtccttccgacgaagctaaggccgcgttgacgtgaggcactcacttcatccggcgactagcaccgtgccggcagtccacaacatggcttctgtctctgagcttgcctgcatctactccgccctcatcctgcacgacgacgaggtgacggtcacggaggataagatcaatgctctcattaaagcagctggtgtcaatgttgaacctttctggcctggcttgtttgcaaaggctcctggcaatgtcaacattgggaagctcatctgcaatgtaggggctggtggg

SEQ ID NO: 28440 - DNA, 162 bp, Zea mays
  Clone ID: MRT4577_125950C.1
ctgcggaggcataaggactactctatgagagcacttgtctaatgaaagcgcaaaacctgctggtctcgacaaaaccattaccctaactgatgactgccagaaggcagaaatgtaagcgaacaccattgcggtgaacattttaaaggagcgaaggctaatagg

SEQ ID NO: 28441 - DNA, 192 bp, Zea mays
  Clone ID: MRT4577_125951C.1
atcacgcgtaggacgaagctggctctagaggtgcgcacctatagacctgcggctggatggctgctgtcatatcctacaaggcgcttgaatttctctctcacgtcaacaaagtgaattgcagcgtttcaatcagacaaggccacgtgcggctggaagctgtctgctgcatcgagcgaaagatggactaacagg

SEQ ID NO: 28442 - DNA, 423 bp, Zea mays
  Clone ID: MRT4577_125952C.1
aggcccatcagcagagatcctagcgccacctcagaccacggtgtccccacaggcaggacgccaggagattggcaaccgcagctactggatcgtgtctctgcccgtgcagtactaccgcacgccaccgctgacctcgctatgatcgcgcctgcaggatggcatatgacgccactccttcaacaccccgctgtaccggatcaacggaccggacctacgagtaagaaccctggacttccttctcgcactcagagatgacctcgtcaagtcaaacgtgctcagcgagggcggcctacacaagatccggaggcacataccataccccaagcgcgccagcagcgccgacagcgtggccctcaccgagcgtggcgctaccggatgcacctaactgaccaaggttgtgtggaatgagggcaaggaccccac

SEQ ID NO: 28443 - DNA, 672 bp, Zea mays
  Clone ID: MRT4577_125953C.1
atctcaccatactccagaacataatatccgccttcccgtccttttcctttcataaaccccatggcgtgacgcattagctcgccccctcgttcgccgcctctcatgctcctaccgcagctctccctcacgtttactgtccacaacggaggccttcaacaaaataggaggacttctaacgcacagagctctgagtgaaaggtatcactggtggctcttctcctgcagtgctccaagctgcacgtgtcctgcctagcaagctatttattgcagatcttcgcactccatcgtatatgacgcgacactaagagaagcatttatcagctctgaagagcatactgaatctagtgtgatcacagacagtaagactgggatctcaacattctatgcatttgatgaactactccgacagcgatgctgccaaggaagctatttctgctacggacggcaacgaaactgaaggacgtgatgtacctatcatcatgactaaagataaacctgctgtcaaccgagctgactgtggctatgaatgcggcgactatgtgagagatggctacataggtgtagcatgctacttaatagattcatataccgtggtcacacacagctatgatgcttgagtgagggaatatcccattatctgctctacaacaagatatttgaaatacgccttta

SEQ ID NO: 28444 - DNA, 527 bp, Zea mays
  unsure (1)..(527): unsure at all n locations
  Clone ID: MRT4577_125954C.1
aattcggcacgaggtaatcgtgtcccttcccttccttggctgcaggatccaagcaacacggaaggagggaggtgagcaccatggtaagatccatcccgaccctctgcatcccttgccaccgatctaccgcaacccgactcgcttccccgtgtctgattttgcaagtcggcgctgttcaacttcaactccttcctttctcgtggtgttgctggtgatctgcacctgctcctacatcaagatgcagttcccggcactcctcaacgaccgcaccgggtaattttctttcttccgccgctaccctaccaaatcacaaagaatctgggaatttccatcttgtgcgctctgttacgcccagttgtagtaattgttttcgttatcgtggcaaaatattgaagtgtcaacatcagcgtgaaggatataaccgtctggttgtagtgagttgtgtttaacgccgtcaggcgcccatccatgagctgattcagagatattntctgtctgaacttatgattcagagatagttaaaacct

SEQ ID NO: 28445 - DNA, 277 bp, Zea mays
  Clone ID: MRT4577_125955C.1
agagaattatctttgggccattgggtgccataatgggcaacagggtgctttgtttcttaaacactaaaaaaaaaattcattttttcgcaactgaatgtaatataacaccctcagatgccgcgaaaaaacaagaaaaaaaatgctgggggcaataattccaaaaataagaattattcttggcttgtaacaatgttaggcgcctccatgggatccccagctgaatttactttcttgcctttcttattctttccaccaccctttttttttgattttgccc

SEQ ID NO: 28446 - DNA, 279 bp, Zea mays
  Clone ID: MRT4577_125956C.1
ggatccaacaaatgagcattcatgaaatgggagagcgcttggagctaacaataagcgttgggtggcacgctaacgtcctcacggttccacgaaaaaaggattctacgagatagcgaaagcggccccgcacaacataattaaacggacgggtatcccacaacatggcagggatggccttcctaaataaagaaaatcttgttcattgcctgactaatggctgatggcggatttaactctagggggctcagatggcccaggcaggcccagaatacaaggaaa

SEQ ID NO: 28447 - DNA, 431 bp, Zea mays
  Clone ID: MRT4577_125957C.1
gggggggaagggcccgggttccgccccttgggttttgaaaaaggaattggacaaaaaagccctccccttttttcccccccaaaaagggaaacaaaaatggctttaaaaaaaaaatttaaacccccccccggaaaaaaaaaggggcgggcaaatggccaaaaaaaaaaaagggttacccactcgggaaaaccgggaaggaaaaccattccgggggaacttaaaaaaacaaaccccccagaaaggccttacggccttgcaaaaaaagggaccaaggttttactgggcccaaatttaattttcccccccccaccctaaaggggggttttaaaaaacccacactttaaggggcgacaaatataaaatcctataaaaaaccctggaaaattgaaagcccggggccactgggaaaaaaagcataaaggcccaccccc

SEQ ID NO: 28448 - DNA, 320 bp, Zea mays
  Clone ID: MRT4577_125958C.1
caaaacacacgaatagccaaaatggtcaaggctgtcgctgtcctccgtggagactccaacatcaagggttccgtcacctttgagcaggccgacgagaactcccctaccaccatctcatggaacatcaccggccatgacgccaacgctgagcgtggcatgcacgtccaccagttcggtgacaacaccaacggctgcacatctgccggtcctcacttcaaccccttcggaaagacccacggtgccccctcgcgacgagaacgtcacgtcggtgacttgggtaacttcaagaccgatgctcagggcaatgctgtcggctccgt

SEQ ID NO: 28449 - DNA, 375 bp, Zea mays
  Clone ID: MRT4577_125959C.1
cggacgcgtgggcaccgttgcgcgggtagccgttgggagagattccagagaggggaagtgcgccgccgccatgggcgactggctgccggcgtcggtagatcctcggcgactggttggagcccctgccaagccctcggggagaggcgtctgtggtcttcggtgttgagaaagccgaccggagctgcacaattgctcgacggagtaccaacaccgtcgttgattcctgtgctgccgtgggcagcgtcgtctgcgccttgaccattgatcggcagtgaggtcacgaggatctaaaaaatcaccctggtacctggagtctcaagtgccagggaggttctcgggttgattttgctgcgatggcggtcagacgggagattc

SEQ ID NO: 28450 - DNA, 1162 bp, Zea mays
  Clone ID: MRT4577_12595C.1
gagctactagtcggcggccgcagcagtgaagatggaggcggagcaggcggcgatggcgagcgcggctgcgccgcagctggggtcggcgcaccagcaccagcaccagcaccagcagatgcagccgcggcggcagtaccgcggcgtgcgcatgcgcaagtggggcaagtgggtggcggagatccgggagccgcacaagcgcacgcgcatctggctggggtcctacgccacggccgtggcggcggcgcgcgcctacgacacggccgtgttctacctgcgcggccggtcggcgcggctcaactttcccgacgagatcccctcgttcgggctggcggatggcgtggacgtgggggagcacgcgcgcgacccggccgccgccgccgccggcggcggcggcggctgcacgctgtccgcggcgtccatacggaagaaggccatcgaggtggggtcccgcgtggacgcgctccagaccggcatggtggtcccgccgccgcaccaccgcgagcgccataggcaccacaaccacctgccgcagctgcgggtgcacgcggaggagcagcaggaggaagaggagcagaagccgcagcggcctgcgtggagcgggcgcgtcaagaacccggatctgaaccgtgcgccgagccccgagagctccgacgccgagtgacaagcgagcgagagctgagcagcagccaccgcaaggcgaggttcaacgacgacgtccgttatcggttattcccaatcccacgacgcagcatgccgttgtcgtctccgtccgaccgtccccacgtacgtacgtacgtacgtacacgacgatccagctgaccctgccgcctgcctatcctatccgtcctcgacgacgaccggatggtcggcgggcgggagggagggcggtgcggcgagggttttgggtacgttgtggataagcacgagggcagcagcagcaggggcggcgtgcgcgggcaggcaggcgaagacggagggaggcggccacaagcggcggtctttccaaacgtcaaaaaggacagctgtaacagcgataagaaaaaacaagtcatcatcaccctcgtctcactactagttctactactgttcccgagagtagtagtaacgattagcactccactagcagtatgattattcgaatcggccttgcttgacagcgatt

SEQ ID NO: 28451 - DNA, 721 bp, Zea mays
  Clone ID: MRT4577_125960C.1
ccccattctgttcctgcccgatcccctccttcccaccttcttcctcctgcacaacctcctcccacctcccctccaccttccactgccggggacgccagggggtcgtgcctccgatgccagagccttgccgccgcccgcaatctcttctgccctgccaacccccgccccggagcgacacgcgcgtggctccctcgtgcctggcgaccttccctcgccagcgccgccctcacccattccactttctttccccgccggcgccgccctccccaaatccaccttcttccctcgccggtgccgccctcccacgatccatcttcttccccttcccaggtatcaccgaacttcccctcgcctcgatctgcagcgacacggacgaccggcagtagggcacgccgccctcccccaatccaccagcagtcccaccccatctccatctccaccggcagccgcaccccatccccaccggatcgagccctcttatgcagttcatgtcgccatggatcgagatcgagtcctgctccaactgcggctgtctggtcgtgcggtggttgggactgccggtgacgaacacctagatccaccactgcctagccccctccaagctccctcctcccctacatcacaagaggggcgcgacgttccctctacatcctgtgggatactcctatttctctgctcgccatgggagacgaggaaaatggggaatccacaccctcttcag

SEQ ID NO: 28452 - DNA, 1803 bp, Zea mays
  Clone ID: MRT4577_125961C.1
gcgcatgcatccagtgctggccagccggtgagcactgccgctcgccgcatcaggtagtagggcgctagctagccatggctcgcgtcgccgccatggtggtggtgatggtgctcctccagcagttggcctcctcgtactcgtacaccgtcgcggcccacgccgatgctgctggcgtgcttggccgcaaggcgggcgtcgtcgtcgacgagactccggtggagaaatcgccggctgggccggggaggtacgcagtcatcttcgacgccggcagtacggggagtcgggtgtacatcttccggttcggcaggcagatggacctcctccgcatcggcgacgagatcgaattttttgccaagttgaagccaggtctgagctcgtatgctgggcgaccccaggaggccgcaaagtccattctgcctcttctcgagaaggccaagagcattgtcccctcatggcttatgaaaagaacccctgttaagcttggagcgactgctggattacgccttatcggaaaccaacaagcagacgaaatcctcgatgcggtcagagacctggtccacaagaagagcaaattccagtacaagcccaactggatcaatgttcttgaggggtctcaggaagcatcctacctatgggtcgctctgaattacttgctggataaactgggaggggagtattcccagacggtaggcgtgattgatttgggtggcgggtcggtgcaaatggcgtacgctgtctccgcaaacgctgctgcgagagctcccgcggtgcctgacggcgaggatccctacattaccaaggagtattttaaagggaaacagtacaatgtatacgttcacagctacttgcggtatggttcctttgcatcgcgagcggagattctgaagtccaagaacggaccattcagctcctgcatgctgcgcggatttagtggtaaatatacctacaacggacagcagttcgatgcgactgctagaccagaaggagcattgtatgacaaatgcaggggagagattgccaaggcgatgaatctcaaggcaccgtgcaaggcaaagaactgcaccttcggtggtgtgtggaatgggggaggtggagctggccaaaacgacatctacgtcgcgtcaggtttctactaccttgcctcacatgttggattcatagatagcaaagctccgagcgctaaggccgctcctgccgcattcagggtcgcggctaagaaggcctgcaaattcgatgtcaacagagcaaaagtggcctacccagatgtttctgacagtgatgtgccctacttgtgtatggatcttacttacacgtacacattgctagttgacggcttcggtctgcagccaatgaaaaagattacatttgtatccaaggtgaagcatggcgaatactacatcgaagccacatggcctttgggtacggctattgaggccgtgtcaccgacaaagcagatcggaaactaatgggctgctgctcgcactgaactgaactctggatttagcgcatgttatcatggtttcagttagcgctcctgacctataatatttgactctcaaataatttctgtactgctgctcggcagcgtgcatgcaaactgagcattttcgagtcagcctctgcgtgtgtgcgggctaattcaactatgaaattcattcgaatttctttccactttcactttggtatcttccgtgcttaccggaatatgtaaacgtttgatgctttgctttaattctgtgacgtgtctcacacaaagctacatattcagccacgtcactctttagtctaaaaaaaaaaaagaaa

SEQ ID NO: 28453 - DNA, 431 bp, Zea mays
  Clone ID: MRT4577_125962C.1
ggaagagcattttctgctggaggtgatgtttctgcttttgtctgatgtatacataaaggtgtttacgtctttacctagtatgtgcaggatctaacattgaaagctggtttcttacatattttgcgtcgtcatctgttacctgacttttagtacatatgctatatgtaagcatatgctagctctgctatgtgtttgattcttaaatcagtcagctagaaatatggtgctgatttcttctgaaatgaatatttgttgaattacacaattgcaagttatacctaaacctcaggtgagcttcatcccttcattgtggttaattgtaattattcacttctgtgctccttgccccttaaggataaataatttaactgtaggtttctcttcttacttgaatttgtcatgggtttaggtgcctgtgtttctttacattg

SEQ ID NO: 28454 - DNA, 467 bp, Zea mays
  unsure (1)..(467): unsure at all n locations
  Clone ID: MRT4577_125963C.1
cgggctcgatagtaattcaaccaagtacgagaggaccgttgattcacacaattggattatcgtgtgtgaatcgacaatgatatctccttaattttaagtacctgtgttgtgtgcggggnnnnnnnnnnnnnaaaaaaaaaaaaaaaaaaaaaaaaaaccctaagaagctctccgtgcgacggcgggggggctccctgctctcgatctcgacggggggttccctcctcctctcaccgcggcggcgagctccctctgcgtggggccggggnccgtctcctccagggggacggtagccttctcgacgcgggcagggggggaatccccagccccctgctcaacggcctgctgggacggacacaggaggagtgctgctcgggggtcttgaacactgtcagggccatgtctccctggcctgcttgcttgtcctcggnaagtgacactagctaccctatagaaaggctacctgt

SEQ ID NO: 28455 - DNA, 166 bp, Zea mays
  unsure (1)..(166): unsure at all n locations
  Clone ID: MRT4577_125964C.1
agcgcaacaaacgcgagcagaaaaccacaangcgcaccagcgccaagggccanganaccacagncccgccgaccagcgacnncgaagtgctggggggggcaancagngcaagccaacaggcnacaacaagcgcnngcggcgagcgncnaacaacaaccaacgaacc

SEQ ID NO: 28456 - DNA, 842 bp, Zea mays
  unsure (1)..(842): unsure at all n locations
  Clone ID: MRT4577_125965C.1
gnatccaaaaaaaaaaaaaaaaaaaaaaaaaaaagcccccaaccaagaaaaaagagcaaagggtgagccaagggccgctgcctccgcccaccaaccgccgacgccccctcgggccgcgcttcgccgccgcagctcccctacttcatcggcctccggagcatcctgccgctctctccaccccgtctcactccctgcggactgattgggtctccttccttccagttggacatggcatcagctgttaccatgacttcagttagtgctcaggccgctttggtttcaaggccaaggagccatggcatcacaagctatggtggcttaaaggcatcgtcgtcatcagttaactttgaattgggatcctcattcctcggcaagaccgcacctcttcgggcatctgtcaccacaagggttgtgccaaaggcaaagtctgtggctcagatactacctgaggcatcttacaaagtggcagtgcttggtgctgctgggggcatcgggcagccattgggcctgttaatcaagatgtctcctctggtctcagaactgcgcctgtatgatattgcgaatgtcaagggagtcgctgctgatctcagccactgcaacacaccttctcaggtcatggactttactggccctgctgagttagccaactgcttganaggtgtgggatgttgttgtcatccctgctggggtcccaagaaagccaggcatgactcgtgatgacctgttcaacatcaatgcgggcatcgtcaagtcgcttattgaggctgtcgcagacaattgccctgatgcctttatccatattatcagcaacccagtcaactccacagtgccgattgctgctg

SEQ ID NO: 28457 - DNA, 189 bp, Zea mays
  unsure (1)..(189): unsure at all n locations
  Clone ID: MRT4577_125966C.1
aantnnattggggggggggggnnagngnncaattgggggaacaaaacccaaccttgtcaagtgtttttgtgcttttccggggttgttgtcacccccgattttaaggaaaaaagccgggggcttttaatacttgccccaggatgccaacttttttaataccaatgggtttggggaaaaaggtcccattac

SEQ ID NO: 28458 - DNA, 368 bp, Zea mays
  Clone ID: MRT4577_125967C.1
tcttcatacttgcatccacaaatatcctcactacaagaattgcagcgggttgtttcatacttgcattgtttattgttctttttgttgcagaaaatgtaagttcagtatttttatttatttattttgcaacttgtgacttcatttgtatttttccactcgtgcatactgtaatcatgatcatttaggtaagacttgtttgaattgtgcagtggtttcttcgctggctctgccttggtatgcatcaacatgacttagtctccatttaagaccttactctgcagcatgccagtacgtcacttacgatgttgttgtccaagattcattgtgttcattgctgttgtttgggtcatacaagaatttacatcttt

SEQ ID NO: 28459 - DNA, 427 bp, Zea mays
  Clone ID: MRT4577_125968C.1
aaataatatttttttttaattaaaatgggtttatagatttttttttatactaacatgctttgtgtggtagacgtttttgaccactaaaagctgtgggcttacttattgagacggaaccaacaggaggaaacgtgggaagaaaaaaaggagagagacgagaaatattcaaaacaataactgggctgggggggggaacagaataaccaaacgacagcgccgaaattgttaaaaaaaaaaaaaaacaactgcaggaacaaggggaccccaaaagcccaccaaacaaaaaaagcactccccccttcttcgcgggggggcgcgcaaacaccccccaacaaaaaaaaaagggagggggggggtccttaaaaaaaggaggaggagcactccccccgagctggcggacaaaagcaggggaaaacccctcggggcg

SEQ ID NO: 28460 - DNA, 460 bp, Zea mays
  Clone ID: MRT4577_125969C.1
ggccgcttttttttttttttttttttttttttttttttttttttttttttttttttttttttttttttttttttttttttttttttttttttttttaaaaaaaggggtcgggggggttttttttttaaaaacacattccccccccctaaataaaagcatacacccggtcccttaccctagggccccctggcaactttaaagggcggttcctttaaaagcccataaccccaggggctttttactcctactactacttttttttgggtcccagttcaaaatttttaaagaaaaaacgggcccccttttaaaaaaaaaatatgggcctggggggcttttggttgccttcaaccccagtttaaaacatttttaaaaccttcttatttgggggccaattttggggtttcttttggttgccccaaaccccattattacaaagttttttttttaactggggcataaa

SEQ ID NO: 28461 - DNA, 427 bp, Zea mays
  unsure (1)..(427): unsure at all n locations
  Clone ID: MRT4577_12596C.1
aataaaacccttatttttaaggctgagacagtttgtgaagtttttacagtagcctgacacaaaaggagactggaaactagtatgcttattgatgcagcagctggctacatacatactactgtcacaggacgccatggaggtatagtgcagtaggtatggttttagttcaattcgacacaaaatgnccacgcagaccacgcatgagcgcatacacgggctgagcagacttagacacagaggctccactggatgacaggtcatcctggagcgtgcgagcgtagccctagcagatcggtgactcctgtaaggggtagcagagaagcgaaatccagcccacccttggggaataaagcaaccggtgaaggctctccaccatgctctccacaaatgcccaggttgaaggtaggcccatctttgcgcccacgca

SEQ ID NO: 28462 - DNA, 318 bp, Zea mays
  unsure (1)..(318): unsure at all n locations
  Clone ID: MRT4577_125970C.1
gggaannccggggcgagcacgcgtccggaaagcaggaataggtataagaatctctaagacaactgacgaagaactgtgttgtgttaccaatatttttgccgagcttttaccaagaacccccaccaaatgttgaacttatgaaggtgccttcaactcgtgccaagtcactaaagctgactctgttgaagagctgcaatgacacccctcacacaccataccgatgaaacggcttgctgctcaatgtgctgtctgttgcacctccacaactttattaactccaaatacattggttttaaggcacaatgcctttctaaaact

SEQ ID NO: 28463 - DNA, 405 bp, Zea mays
  Clone ID: MRT4577_125971C.1
tgtttttttttttttttttttttttttttttttttttttttttttttttttttttttttttttttttttttttttttttttttttttttttttttttttttttttttttaaaaaaaaattttgccctgcccgcatttagggggggggggggggtggtacaacggggcccttccccattgggtcccgggggaaaaaattagcttttttaaacgactggggttttcccgaaaaaaaggggctggggcggggggggtttttaaaaagggaccaaaccatttgggggggggaaattctcgaaaaggtggattgccggttttggttaaaaattttaaaacccggccttcccctaaaaccttttaaagaggccaaagggacccaagggccaatggtggcggggggggtttc

SEQ ID NO: 28464 - DNA, 460 bp, Zea mays
  Clone ID: MRT4577_125972C.1
atcaagggttccccttcccttttttttcaaaagttcggtgcccgaatgggcaaattaatttaaacctctggtttcagttcccgaagggcgtccgtgctttagggctaccggggaccaatagcttggcagcccattgcctttttctggggccagctcctagcagtcgattcgttcttcacccgatcagttttgtacaagtgagcaatttttgggaccaacggatcgtcagggtttgggtccccccgaagggaccaaattgggagggggaccttaaaaactggcagggcagggccccattgctccttcaagatatcaaaacaaatgcccccgttgctggtgattttcgggtgggaaaccttcgtcttgaatgcaaccctcgggggtttgaatgggtagccccggggaaagggaatattgcccaaaaaaccccccccgcgtgtgggctttctgatggccccat

SEQ ID NO: 28465 - DNA, 382 bp, Zea mays
  Clone ID: MRT4577_125973C.1
agaccttcacccaccgaccggcgcccgccatgctattgctgcaccactggcgcggattggtggagatcgccgatggggcggtgaaggatgacccagctcgagcatgggcctggaccgtggcgcgctgtacgcgcgggagcaccacgagctggacgagacgcagtaaagctggctgctaggcgccgcgtaggccgacaagaacgacaagtacgtggacctcgggtgtgacgacaacaagcgcaagctcctgctggcgaaccttgtggagcgatgcaaccgatatcatactgatgaagctgaccatgatgatcgccaaggccatactcgcagcaagcatgcccgccgccgtcagatcagttcacagaggcgcatgcacagagag

SEQ ID NO: 28466 - DNA, 1401 bp, Zea mays
  Clone ID: MRT4577_125974C.1
atgggcaactcactggggtgctcggcttccggcgagcggctcgtctcggcggcgcgcgacggggacgccatcgaggcgcggatgctgctggagctcagccccgcgctcgcgcgctactccaccttcggcggcctcaacactccgctacacttcgccgccgccaagggccatctcgacattgtcacgatgctgctggagaaaggcgctgacgttaacgcgcgcaactactgcggccaggttactagggcagattacttgagtggtcgaacagcactgcattttgctgcacatgatggatttgttcggtgtattaggcttttagttgcagactttgtcccgagtgtggccttggaggatattgcttcttctgtggtggatggtggtgattgccagacaaacagtgggagcagtcctaattcatcgtcggggcagaagtttaatgaatcggcccgtgtgaggtacatcaacaaacctgcagatggtggtgttacagcacttcacatggcagcattgaacggagctggcagtacaccgttgcattatgcagcaggtggggggaaacaagaatgctgtgagctactaatatcaaaaggcgctagcaggttgacactcaattgcaatgggtggcttcccgttgatgttgctagaatatttggacggcgctctttggagccattactttctccaaattcacactcgaatgtccctgtatttcaactgtccagttatcttgccttgccactcatgagtatacttaatatagccagagaatttgggttgcagcataccacaccctcgattgatgataatgatctatgttcagtttgtctagaaaggtcttgttctgttactgctgaaggttgcagtcatgaattctgcatcaaatgtgctctctacctctgctcaaccagcaacatccgtgtcgagttcacaggcccacctgggtccatcccgtgccctctttgtcggaacggcataatgtctttcaccaagttaccaagcacaccaacagaagggcttaaatcaggttcagcgctcacattctgcaacccatgcatactgaacgcccggtccatggactcgccagccactttctccagagctgaaatcagacggaaccgtgtggcagctgtctcttcggagctggtctgtccaatcacctgcagcccattcccgtcgtccgccctcccaacctgcaggtgcagcgacgacgatccatgcggcgatacagacgtgcaggatggtcccgagttccagtctccccggccctcgcacagcgcaagcatggagctggacaagaggggggagggggatctagaccgggccagttgctcaggcatgttctggagccgaagaagctgtcacagggagcagcagtgtgatgcggagatcaacgcttga

SEQ ID NO: 28467 - DNA, 354 bp, Zea mays
  Clone ID: MRT4577_125975C.1
gcctctaccaaagcgtttaacaacatgccagattgctccatagttggtacaacaataccgtgccacatgtaacaatacatgccatggcaacacatcatgcacgtcagcaactagcctcgctacagcctagtagagcatagagataccccaacgtctactaacaagagcagctgcttgcatgcaacccacttgctctcacgaacgtagctgcataccagcaacagcaacagctacaacagtgtctgccaacgctcaatggactagccattgagaaccctgccgactacgtgcaacaacaacaactgctttcatgtaaccccctcgctgtgggcaatgcacctacatacctgcaac

SEQ ID NO: 28468 - DNA, 2286 bp, Zea mays
  Clone ID: MRT4577_125976C.1
cattgggacctcgagccggcgggccttttcctccccgtcgtgtcgcttcctccctcttcctccggagctgcgaaattttgagacccagccgggaaagcggaggcggagactacccaccccaccaccagccccccggaattcgcgcaaatcacagaagctccctagccgccggcgagcactcgtgcgctcccctggaagcggcggaggcggcggcggagcccgcctctctgccggcgccggcgatgggcaactcactggggtgctcggcttccggcgagcggctcgtctcggcggcgcgcgacggggacgccatcgaggcgcggatgctgctggagctcagccccgcgctcgcgcgctactccaccttcggcggcctcaacactccgctacacttcgccgccgccaagggccatctcgacattgtcacgatgctgctggagaaaggcgctgacgttaacgcccgcaactactgcggccagactgcgctgatgcatgcttgtcggcatgggcactgggaggtggtgcagatgcttcttctatttagatgcaatgttactagggcagattacttgagtggtcgaacagcactgcattttgctgcacatgatgggtttgttcggtgtattaggcttttagttgcagactttgtcccgagtgtggccttggaggatattgcttcttctgtggtggatggtggtgattgccagacaaacaatgggagcagtcctaattcatcgtcggggcagaagtttaatgaatcggcccgtgtgaggtacatcaacaaacctgcagatggtggtgttacagcacttcacatggcagcattgaacggtcacttagattgcatgcagttgttgattgacttgggcgctaatgtctcagctgtctcattcccctatggcactactgcaaatttgataggagctggcagtacaccgttgcattatgcagcaggtggggggaaacaagaatgctgtgaggtaagtcaatgtcataaagaatcatcacctttttgacaagaatcctgcttcagttgtacctatcagagaaatttatttattttggtatgtgatgatgctgttcttgcagctactaatatcaaaaggctctagcaggttgacactcaattgcaatgggtggcttcccgttgatgttgctagaatatttggacggcgctctttggagccattactttctccaaattcacactcgaatgtccctgtatttcaaccatccagttatcttgccttgccactcatgagtatacttaatatagccagagaatttgggttgcagcataccacaccctcaattgatgataatgatctatgttcagtttgtctagaaaggtcttgttctgttgctgctgaaggttgcagtcatgaattctgcatcaaatgtgctctctacctctgctcaaccagcaacatccgtgtcgagttcacaggcccacctgggtccatcccgtgccctctttgtcggaacggcataatgtctttcaccaagttaccaagcacaccaacagaagggcttaaatcaggttcagcgctcacattctgcaacccatgcatactgaacacccggtccatggactcgccagccactttctccaaagccgaaatcagacggaaccgtgtggcagctgtctcttcggagctggtctgtccaatcacctgcagcccattcccgtcgtccgccctcccaacctgcaggtgcagcgacgacgatccatgcggcgatacagacgtgcaggatggtcccgagttccagtctccccggccctcgcacagcgcaagcatggagctggacaagaggggggagggggatctagaccgggccagctgctcaggcatgttctggagccgaagaagctgccacagggagcagcagtgtgatgcggagatcaacgcttgattctttatctgtggttctgaattacgtttggattcgtagcagctccaacgcgggagatgagcagcggttgttttttccgccccagctatgttccttcctcctatctacagccaatgttttcttgattggtgaaatgctgctgcgtcctttgcagccgtagagtgtgtgttgtaacagttttgttactatggttcatgtgtacctgtgaatctagatagccttcgaagttgctagccagttacggttctttgtagctctatgtaaattgcagaactggatggaattactttctgtccctgatgataaatatttatatacaacgagtgaagtaccctctaaggccatctccagcggagctggatgtgagcttgt

SEQ ID NO: 28469 - DNA, 182 bp, Zea mays
  Clone ID: MRT4577_125977C.1
tacctcgaggccggccgggatgatatattcctcctctggggcctggacgtggcgtcgctgatgcttgccgcgacccaggggctccacgagatcggcgacgtcgatgacggtctcgcgccgtgttcgcgcgggtcgcgagtgcgaccatgcgcctgactgtgcttaccaagaagttcgtggcg

SEQ ID NO: 28470 - DNA, 2273 bp, Zea mays
  Clone ID: MRT4577_125978C.1
ccggccgggccgggattacaaaaaagctaataaaggccttccatttccactccccgtcgtgtcccttcctccctcttcctccggagctgcgaaattttgagacccagccgggaaagcggaggcggagactacccaccccaccaccagccccctggaattcgcgcaaatcacagaagctccctagccgccggcgagcactcgcgggcgcgcgcgcccccggcggcggcggcggagccctcctctctgccggcgccggcgatgggcaactcgctggggtgctcggcctccggcgagcggctcgtctcggcggcgcgcgacggggacgccatcgaggcgcggatgctgctggagctcagccccgcgctcgcgcgctactccaccttcggcggcctcaacactccgctacacttcgccgccgccaagggccatctcgacattgtcacgatgctgctggagaaaggcgctgacgttaacgcccgcaactactgcggccagactgcgctgatgcatgcttgtcggcatgggcactgggaggtggtgcagatgcttcttctatttagatgcaatgttactagggcagattacttgagtggtcgaacagcactgcattttgctgcacatgatggatttgttcggtgtattagacttttagttgcagactttgtcccgagtgtggccttggaggatattgcttcttctgtggtggatggtggtgattgccagacaaacagtgggagcagtcctaattcatcgtcggggcagaagtttaatgaatcggcccgtgtgaggtacatcaacaaacctgcagatggtggtgttacagcacttcacatggcagcattgaacggtcacttagattgcatgcagttgttgattgacttgggcgctaatgtctcagctgtctcattcccctatggcactactgcaaatttgataggagctggcagtacaccgttgcattatgcagcaggtggggggaaacaagaatgctgtgagctactaatatcaaaaggcgctagcaggttgacactcaattgcaatgggtggcttcccgttgatgttgctagaatatttggacggcgctctttggagccattactttctccaaattcacactcgaatgtccctgtatttcaaccgtccagttatcttgccttgccactcatgagtatacttaatatagccagagaatttgggttgcagcataccacaccctcgattgatgataatgatctatgttcagtttgtctagaaaggtcttgttctgttgctgctgaaggttgcagtcatgaattctgcatcaaatgtgctctctacctctgctcaaccagcaacatccgtgtcgagttcacaggcccacctgggtccatcccgtgccctctttgtcggaacggcataatgtctttcaccaagttaccaagcacaccaacagaagggcttaaatcaggttcagcgctcacattctgcaacccatgcatactgaacacccggtccatggactcgccagccactttctccaaagccgaaatcagacggaaccgtgtggcagctgtctcttcggagctggtctgtccaatcacctgcagcccattcccgtcgtccgccctcccaacctgcaggtgcagcgacgacgatccatgcggcgatacagacgtgcaggatggtcccgagttccagtctccccggccctcgcacagcgcaagcatggagctggacaagaggggggagggggatctagaccgggccagctgctcaggcatgttctggagccgaagaagctgccacagggagcagcagtgtgatgcggagatcaacgcttgattctttatctgtggttctgaattacgttgggattcgtagcagctccaacgcgggagatgagcagcggttgttttttccgccccagctatgttccttcctcctatctacagccaatgttttcttgattggtgaaatgctgctgcgtcctttgcagccgtagagtgtgtgttgtaacagttttgttactatggttcatgtgtacctgtgaatctagatagccttcgaagttgctagccagttacggttctttgtagctgtatgtaaattgcagatctggatggaattactttctgtccctgatgataaatatttatatacaacgagtgaagtaccctctaaggccatctccagcggagctggatgtgagcttgtaaaatattgctttgaattgtagactctgtttatagactagtttaaaataagaaatgagatattgagtatgatttagagct

SEQ ID NO: 28471 - DNA, 293 bp, Zea mays
  Clone ID: MRT4577_125979C.1
cggctgatgaattgtgaaaattcctcagaaggaaattatgctggtcatcacaggaacatctcaacgttcgagtaaactggaggactgtggctattcctgaaccttctttgagacaggatccctcagaatctcacacttataacttcctaccttgtacttgaatgctttgccatattcaggacagagactctcacagagttcagaaaacagctggacttaccagtagaatcacatgagaggacctattttctctggtagtggttgattactacattattttcttagtggctggt

SEQ ID NO: 28472 - DNA, 218 bp, Zea mays
  Clone ID: MRT4577_12597C.1
gccacaaggccctctcacgctcatgcccccggactcttctccccgcgtcgccgctcgccggagctccgcgtctccgcccgcgccacaccctaatcctcaatggctgccgcaaggggcattaaccagctcctgaatataactctcttcaagcagtctgctgggtcgtcgccgctttgttcatttctgggatagcatgaagaatcctctgctggactgag

SEQ ID NO: 28473 - DNA, 252 bp, Zea mays
  Clone ID: MRT4577_125980C.1
cagttttgagacttgttagaactgagcaaaccatgttaagatgctgctgtgtgtcattccttaaaaaaaaaaaaaaaaaaaaaaaaaaaaaaaaaaaaaaaaaaaaaaaataataaataaatggggggcacgctataggaggtcctatttatcgaacgagcaagcgcaacgtaaatatttcttctattgggacccctatttaaaatacacggcccgtttttataaaacgacgacattgagaaacccctggtg

SEQ ID NO: 28474 - DNA, 494 bp, Zea mays
  Clone ID: MRT4577_125981C.1
gccggccgttttccttgatctctctcgcgtcgggcacttagtcgcacaagtagtgaactcaaacgggatctcctgctctgcctccctcgtcttcctctgcccgtgcgcgtttcagagcacgtacggagagggcgagcagcagcttgcggccgggcaccatcatggaggacgtcgcgccgggtgcggagccttgggaggggtacgtggactggaggaaccggccggcgaccaggtcccggcacggcggcatggccgccgcctccttcgtcctcgtggtggaggtgctggagaacctggcgttcctggcgaacgccagcaacctggtgacctacctgatgggttttatgcactactccccgccgcagtcggccacggtggtcaccaccttcatgggcacggacttactgatcgcgctcctcggcggcttcctctccgacgacttcttctccacctacaccatctacatcgcgagcgccttcctcgagatcatggag

SEQ ID NO: 28475 - DNA, 195 bp, Zea mays
  Clone ID: MRT4577_125982C.1
atctttggcattcaaacactctatcattcctatcacactagcaacaaccgggccgcaaattttaccaatatattatccctccacaccctcatcaccctgtttctgaacacatcaaatgcctatcattattacacaatgctcacttgcatcctacctacaatattccacaaactctcccatcaattactttcatca

SEQ ID NO: 28476 - DNA, 371 bp, Zea mays
  Clone ID: MRT4577_125983C.1
gttgcttaaactacaaaatatacatgcgggggtgaatcctgaattgtgggtaatgtccataatctatatgctgaaattctcaattttcgaataatccagtcaggtatggatacccatgggtatttagtacccgctcggatatgcgtatgccaggcttttttgtacccaaggtccgtttcgcgcattgctgctgctctattttcatggactacagttctagggagttaattcccactggggaattccccattgacatatatagtacgctgcccccataacaggaaacaagccaatcatggatctcatatccattgcactgttcactgtctggtgcacccacacacagaaggcatcacacgcctttcaaatgg

SEQ ID NO: 28477 - DNA, 267 bp, Zea mays
  Clone ID: MRT4577_125984C.1
gttttggagggtgtggtgcgtaagtgccaagccgcttccttgatcttagagggccaaaatgtttacgaaacaaaaagagtacgagtgtgcttcagagtgcgatgtgcagcgagggctcagccatccaaatgcgaccggttggggggggggggggggcggtgctgactgagtcgacctgtgttcgagagctggggcgcgtttggaaatgtaccctcttgcccaccgttcagagggtttgaggacctcgggtttccctttgcgtccttg

SEQ ID NO: 28478 - DNA, 267 bp, Zea mays
  Clone ID: MRT4577_125985C.1
tcggaattctacccctttttttttttagacgctccctgcctgttttgaattaatacctctgggttgccttctgctatttacttcttgcactgctgttcctgtaggaggtaataaataatcctaaaacatcgtggtcctcctgttccttgtgcatgactgttggcaggatccccaataaatattgacggtaattagctggtaaataatataaattggaatagttatattggttcctggtcaacaaaattccttctgtcttgtcaccag

SEQ ID NO: 28479 - DNA, 373 bp, Zea mays
  Clone ID: MRT4577_125986C.1
gggttaattacaaggccactgacttgtttttcacctgtttaggaaaattatgggggcctaggtacaggatccacatgatttgaaacgtgaagcctgaatgataaacgacacttacctgtttaaaaaccaagacccggttttagattcaaatgaactacttaaacaacatggctttaacacactccacaaaacgttagctagggcccggtatacgtttttttgggcttcacgaaaaactttttatggccgaaccggcttgtttgttcgttcccttcaccaatgttacggaagttcggtatgcctggcctggcaagcgacaccaggtgctggacctttagcatcccttcccttccgatctaagaccttggtcctg

SEQ ID NO: 28480 - DNA, 268 bp, Zea mays
  unsure (1)..(268): unsure at all n locations
  Clone ID: MRT4577_125987C.1
agtacaatgatagctgttttacaacgtcactttcgcgtacttcgcgggggggggggggaataatattttttactctttntgcgccttttcctcggggggcttttgggcgttgctgcatcctttccgtgtcncttgccgtcgttcttgaggcccgctttttctctttttttcgtttctttgtgtgctttttgggccggnttttccgcgcgnggtgtggaggggagtctgtgtttttgcgctctttttggtgctgggtcgttccgctttt

SEQ ID NO: 28481 - DNA, 768 bp, Zea mays
  unsure (1)..(768): unsure at all n locations
  Clone ID: MRT4577_125988C.1
cctcgagccggccggganaacacaaacgaaactttttctcgacacaccgcatacacacagccagccagccacaccacaaaatgtctgcttcaccgcccccagaggaacgcgaaaaggccgacgccgaagcccgcgcaaaagagcaggccgagcaggccgctttgccgtacaagtgggaccagaccatcaaggaccttgacatcaccatcaccattgacgccaagtacaaaggcaaggacctcgacatcaacattggccgcaactccatcaaggccggtatcaagggcgagacacccatcctgcacggtgacttcccccaccccgtccgcgtcgacgactccacctggacactagcctcgaccggctccgcaaaagaaatctcaatccatctcgacaaagtcaaccagctcgaatggtggccccatattgtcaccactgcccccaagatcgacacctccaagattcagcctgagaacagcaagctgggcgacctcgacggagaaacgcggggcatggtcgagaagatgatgtacgaccagaggcaaaaggaacagggcaagcccaccagcgatgagcagaaaaaggccaacatcttgaagaagtttcaggagcangcatcccgagatggacttttcaaatgccaanaatcggctgaggggatacacaacgatgggcactccagcccccgtgacgaggaaangcgctcatggacgntgataaagaatgagccggcggaggaacgacaggnccatatcgggtcgnacgcgt

SEQ ID NO: 28482 - DNA, 153 bp, Zea mays
  Clone ID: MRT4577_125989C.1
aaaaaaaaataagataaaaaaaaatacatatatgaaagaagagaaaactcaatctgggagggacaagtagatcgaaggttggctgtgacgatgacgtgttttagtgcgctggatctgattcttgagccctgcatgagcgtgaccatcgtgtag

SEQ ID NO: 28483 - DNA, 195 bp, Zea mays
  Clone ID: MRT4577_12598C.1
gaacacctggaagacaagatttgcatcgatgagagagctatcaaactcaacagcctatatagtgaatggtctataacctgaatgtctgacatctacggtatacactttactaaaggtcttatacgattaggcgctttattgctaaaataatattgctgactatttagacatactgccccgagctgctatcacagc

SEQ ID NO: 28484 - DNA, 246 bp, Zea mays
  Clone ID: MRT4577_125990C.1
gatctgtggagccgagtatgacaacaacaagttcaagacgacggttgtgaatgataatggcctcagccctatctgggctccaacacaggagaaggtgacatttgaaatttatgacccaaacctggcatttctgcgctttgtggtttatgaagaagatatgttcagcgatcccaactttcttgctcatgccacttaccccattaaagcagtcaaatcaggattcaggtccgttcctctgaagaatgg

SEQ ID NO: 28485 - DNA, 694 bp, Zea mays
  unsure (1)..(694): unsure at all n locations
  Clone ID: MRT4577_125991C.1
aaatatcgattgacagatcgctcctcgtagcctacttccgccgtctcctgggatcttgtccaccctataactttccgccccgattccccatgccaaatgtccacaccttgaatcgtctacctcgcggctggccctgatgcgatcgcttgatcctctacgtatacttcaacacagcaacacacaggaagggtatccatgggccgaccacaccaaggatctgcgtggatccaatacctcatctgccgcagatatcacaacaatcttcacctcgaatcacactcgcccgctctctcctccgtatcgcacacaacaaaaggccccatggtcttctgcggttcaataagcctgtgaaggcccagacacaagtggatggtgggacgatgtcactatctccctactgagagatgctgctgctccagaacataggaacctctacgaaactaaagctccatgagaatccatgaaagaacctacaaggcgctcgcattgaattcactgctgtttgaatatgtgtgctagcgcctaaagatgtctccttctccatgtgcaagctctgaagcatcagatcacagtggcagaatagagacacatgctcccttgggtaattgcacaatactacaaccctatctatgacttgaacggctgtgactgtgtcgagagtacctgcaggagattgattttccttcntattcta

SEQ ID NO: 28486 - DNA, 265 bp, Zea mays
  Clone ID: MRT4577_125992C.1
ggggggaaatgcaaattttctttttttctgggaaaaaaattttggggttttttttggcaaaagttaaggtacccccaaaactttttaagttaattgccatggacaaaaagcgttaaataaaggggggggaaaaaaaactaagatttgcttacgggaaccaggaagattttgaaatttgggatttacaaacaggattgccccacccttttaaaaaatattttgcctaggggggggctttttttcaggtggcaatggtgctttttta

SEQ ID NO: 28487 - DNA, 934 bp, Zea mays
  Clone ID: MRT4577_125993C.1
cggacgcgtgggatcccctttgcaagtatagtttttttgctaaacaaaaccaaacctaaagcctagtctggggggctataaaacactatgggcagggacaacttgatcgaaagcggctctggcggcggcaagttcgttgccaaggactacacggaccctcccccggcgccgttaatcgacgcggcggagctggggtcctggtcgctgtaccgcgccgtgatcgccgagttcatcgccacgctgctgttcctgtacatcacggtggccaccgtgatcgggtacaagcaccagacggacgcgtcggcgtcgggcgccaactcggcgtgcggcggcttgggcctgctgggcatcgcctgggccttcggcggcatgatcttcgtcctcgtctactgcaccgccggcatctcggggggccacatcaaccccgccgtcaccttcggcctcttcctggcgcgcaaggtctccctggtgcgcgcgctgctctacatcgtggcgcagtgcctcggcgccatctgcggcgtcggcctcgtcaaggcgttccagagcgcctacttcgacaggtacggcggcggcgccaactcgctcgcctccggctactcccgcggcaccggcctcggcgccgagatcatcggcaccttcgtgctcgtctacaccgtcttctccgccaccgaccccaagcgcaacgcccgcgactcccacgtcccggtgagcacccgaccaacgccaccgccttctcctttttttttgttttgtttttgtctcgaccctcggtctgctgctacctgctagtaagtagctgtttgttgggagtagtagtattttatttttaaactagcttaaagttcgcttgtcttaatcagttggcatcagtcgtaaggtgagtcccaggcgagcttaattagagctcaagttatgctagctaacatgctcaaat

SEQ ID NO: 28488 - DNA, 278 bp, Zea mays
  unsure (1)..(278): unsure at all n locations
  Clone ID: MRT4577_125994C.1
attgaggttcccataatatggcttgagtgggtaaatactacatacagagagacgtacgcaatggcaagagactcagacagcgccaagactgctctgctgagcaacgacgatctcgaaagatcagattccttcgagcacatcgcctactcgtgcctctgatttaacttcgctgtctggttcaaccgtttattatgtcncctcggtccctaggagctatagtgccacggatctagacgcacaagcggatactgatagcttacctgaatatgccgaatatg

SEQ ID NO: 28489 - DNA, 281 bp, Zea mays
  Clone ID: MRT4577_125995C.1
ggagaaaaacgagactccctctcgccaacttctctgctgcacagtcacaagcccagtggggtcccaatacgagccctagtcgtcgtccactacccgactgtcccccgtgcgaagacagacagccagccagccatatcatcggcctggaccggggagcccagagggatggaccccgagaagctccgctacaagctccaaaattttgtggggcatgatgcggaaggtatgtgcctgtctattggccaaaagtctaggcgtgtgtttattaccgggggcaatga

SEQ ID NO: 28490 - DNA, 628 bp, Zea mays
  unsure (1)..(628): unsure at all n locations
  Clone ID: MRT4577_125996C.1
aattcggcacgaggatcgtccggacccaccgtatccccagtccgccggcggccgtcgattcattatcccggccgcccgggctgcccgtaagtcaagcggcggcggcggcggcggctaaggtatagccaaggctggagcgaggccggtgcggccgaccatccctgtgtgtgcaccctgcagaaccaacctcacccccgatcaaggttcttggatggcgggcgtgtgcgggagcccgttctgctccagggaagcttcagctccagctccagcgtcatgtggacgatgggacgaactactcaactcctccacctgcgcgaacaacatcctggcgaccggcgccgctgcgctgctcgccgtcgtcctcgcgctgcagctgctcgtcagggtcgcaaggaacggactacgacacgcgcccgtcgtcgcgctcagctcgcctctgcagcgggccgtcgtggcggtcaacgcctgcctgggcctggcctacctgggcctcgcggcgtggatgctggggacggacctgacccagcgcgcctncgtctacccgccacaccggtggctggtgagcctggcccaggggctctgcctggtcctcgccggcttcgccttcagcgtcagggcgcagctgctc

SEQ ID NO: 28491 - DNA, 635 bp, Zea mays
  Clone ID: MRT4577_125997C.1
cattgggtacctcgaggccggcctcgactctgccccagcgagcgcaggacaccgtgccgacctccactgaccctggcacaggagacggcgacggaccggatatgcacgggagcaggcgacgtcgcggaagctaccgcccacgacgttgcagccgtcactgagcttacgcggcactcatgcacttgaacgatcgtacgtgtgcgtgctcctcatcgccaccagcttctataaggcccgcatgtccgtctgccgtgtcttccgttattatcttcatcgcagggagcccaactgcccgaacaagcacatgcggtacgacagacgtcgaggatcgtgatatgacaatacgcctccgtgcgcgaaaggacatagatagagagacaaagatatagagatagatggaccacggcattccgccgaggctcttaacaaacccgccatgcgattgtctatccacacggccgcatgacaatgatgatgtataatcagctggcatacagggcagaacatccacaggcgtctgccttgactaatcatcactcattacagaatgctactgttgaatctgaagcatctggcgtacaacaaacacaaacgattaatcaacatcctgcatgacatgcacgacaatacaaata

SEQ ID NO: 28492 - DNA, 353 bp, Zea mays
  unsure (1)..(353): unsure at all n locations
  Clone ID: MRT4577_125998C.1
ctgggattcctcaccgcacgaacaccatcccccacctcccccctcctcgatcttcaacaaccgccgagacctgtccaccaccaccgccacacgccgcgaatggagctcctcggcctggtgcccgcggaggccatagcgctccgcctctactccctccccgcagcagccgcggccgccggctcgctctacgcctggctcgtcgccgcactcgccgccgccatcggcctctggcgcatnccgncgccgtcagcgtttccaacatcaacaagcgtgacgcaggcgtcagcgccctcgtcgacgataaccaggagccactggtgcctcttctgccgtctcggggggctgccattact

SEQ ID NO: 28493 - DNA, 592 bp, Zea mays
  Clone ID: MRT4577_125999C.1
gccggccgggctcggatacatctatcccacaccaaccgcacctcatccccgctgacccctccgtgtctctcatctcctctgcgacgggtctccccatacgggctgatggctaccctacgttttctccgagactgatcctcatcacctcatgtctgctgaactgccgcaggagacccttattgacctctcgaagctactacagcgtcatatactgtatagctctccgatatttacagctagagacaagtggagacccagagagctctatgcctgtacttcctaccatgtgaatcacttagagatattgcatttgctaacactcatttcctctcatctgaatacttaaactaccagtcgaatgatatgctaggactccattttcctttgagacttgactgccttagatatcactatggatcttatgcgccctacgaaatctttctgaaacttgaccaacatctcgtttagacctgccactcttgcaacactcccttccaaatagtcgtctagatgctgcatgtgccctgctctctgactgggtatgcatcctcctctactcttcaaagctttctctcagccacctgcgccatct

SEQ ID NO: 28494 - DNA, 288 bp, Zea mays
  Clone ID: MRT4577_12599C.1
tcccagtgttaccgggtcaagtggaccagcggcatggtggagctgttcgtgtggggcgtgtgctacatcgacgaggacgtataccccaaatacgggaccagctgtgggaggaggaagagcccaacgctcaagaggatggtcacggtcttgctgaactcccaggccaccaccgacaggggttttgtgtggatggcgcattatatcaagttcatgttcagcgggtttatcaaacaggccatttcggttggcccgagacttccaaggggccgttactcgcccaagggcccc

SEQ ID NO: 28495 - DNA, 381 bp, Zea mays
  unsure (1)..(381): unsure at all n locations
  Clone ID: MRT4577_1259C.1
acgagaggaggcancaaggaaaaagaaagaancaaancnnaaaaaaaaagangnacanggcncgcnncacncancaacgaccacnaaancgaccaacacacagcacaaccagaaacgaccaaaggcaaccacnngacgggggcacangcacanganaacggnacangagaaagangnnacagacagcaaagaaccacgagngccagaaaagcccaagcaagncncaacngcggancaccanncgancggggccgaacancnccagcngccgccanccacanaananngnggangaaggcacngnccanggcagcnncncnncacaaangacanggannangngnnagcnngnnggcaaaaggcacgaacagcagcaacaaa

SEQ ID NO: 28496 - DNA, 365 bp, Zea mays
  Clone ID: MRT4577_125C.1
ctgtctcttgggctgtcgcctataaattaatccttcatcaattgggacatctgacagggcttcaagtctcttacatgaatgtagcatataacacaaattttaacaaactgacctgaagtggactgctagtggcaatgacatttatccaaagaaatatagtgcggaagacgctgagattttataaaccgactctaaatattactagcgaaccaaggatgaaaggctaattgatccacaaggtcattactacccatgtagttgtagataagatttaaataccacagaaaagtttccactgaaattctgtggggaaactacgagagtaaaagagatttacgtgccaagacctatggaagacaaatatt

SEQ ID NO: 28497 - DNA, 702 bp, Zea mays
  Clone ID: MRT4577_126000C.1
ccggccgggggcctcgtagatccttccctagccagccttaaccgcctccatgagctcgcgcgcgaagtttggatccggcgccctcggcgctccctggataaatagatgtcagccctgtttcttccccttttgcgcacccatctgccaacgtccaggaacctcgatcaaaggaaaccctgagagctagtcaatcggagggagaagagagggactccgcgacgccaccaggggtgaactcatggctgcgtgcccgctcggggaaactgagggggtcaggaagtgtcatcggggtccgctggtcacgtctgcggtcaaacggcggttggagaagcgcgatgtcactaggaattcctcgatggagaccctctccgttgcaacgtcgcgggcagccttgcgcaacctaccgcgcttggtaaatttctcaccattagctccgccttgatctttgcatgatgaattgctagatggtcaaggcgcagtggtgatggctcgggtgggtgtcgccgcaggtaatggccgccgccacggaccggggcgccaccgcgagcaccgtggtgtccggtgatagcgatgggggtcaggcgtcgtctgatcgttgatcaacgggtgggattaaaaagtgcgtatccattcgcctgtatgactaccaaccgtcgattctgtatcaggtggctgtggatagatcttggtcacttaacaatc

SEQ ID NO: 28498 - DNA, 332 bp, Zea mays
  Clone ID: MRT4577_126001C.1
aaagcaggctgatacctgtccgctatttccgcgatgcaaattttactttgcccatgagctgattaaaatgggacgggcccaacctgtgcaggtgggagaagacaacaagccagatgtcttctgggaggccctgtgctttaaggctgtctaccgcacatccccacggttgaaggacaagaatatggatgcccatccttcttgcctcttttcctgcttcaacaagattggacgtatttgtgatcaaatatgtttctggtgagcttatgcatgaagacctgtctaccgattgatttcatgcttttgtacacattgatccattttcttttttttgt

SEQ ID NO: 28499 - DNA, 332 bp, Zea mays
  Clone ID: MRT4577_126002C.1
aggccggccgggagtgatcctttccccatcactgtccagtgcgcgcgtcaagcattgcttatctagacgacatggtctccctcgccggcgtgtccgtgaagcacgtgacatcctgggcctcgtcgggagctgcagctcccgaaggaactggtcctgggaaggcctccgagccgatccctgaggatgacccgtgggtggtggtgattgacacatgaatatcctcaatatcattaatcagagctccaagtacaaacagtttacgaacggagcgtatgaccctaccaacaccctgaacacccccatatcggagtctgcacagatcttttttcaca

SEQ ID NO: 28500 - DNA, 416 bp, Zea mays
  Clone ID: MRT4577_126003C.1
atctaggtctaccaacgcgttttttttttaacccacaacaaccaaccgtacaatggaggggtatctacgtagtaacgttgtaacatcctttaaaatcatatttatgaagttgtcaaatcttagtatgtttaacccaataaaccatcacctaaatactgcaatcatcaggtaccggaccaatctttcccttgatggagagaatggtcgggagtactaacttcagaaagtggcgaccaaattatacaagaatggcagttcaactattatggttcaaattgaaaatgaaatcggtttttctggagatgaaccggaaactaccttcatcacccctgttcaaactggccagggagattttcttgggaaacgaacattatctctttatacaatcagaaggggggcccctcgggtaatttaaa

SEQ ID NO: 28501 - DNA, 333 bp, Zea mays
  Clone ID: MRT4577_126004C.1
acggggacggaagcaaggaaccacaagagcggcacgcccacaaaaatatttttacaacaccaaaaaagaagaagagagggggaaaaggaaaaaagaacaggagaaaacaagcatatcaaaaacaacgcacactcaaaacaaacaacaaaaagagacaaaccgaaacacaaaaaagaaaacatacccaaaaaaagctaaaaaacataccgcagaaacaaaaaagcaggactgcaaaccacgccagcaagaccacacaggcaacacaaagacagctagcgacgaagaacaacgaccaccaaaaaacaccaaagaacaacgcaaggccggagggag

SEQ ID NO: 28502 - DNA, 347 bp, Zea mays
  unsure (1)..(347): unsure at all n locations
  Clone ID: MRT4577_126005C.1
aaatnnttttntttttttgtataaaaaaaaaattttttttgtggtttttttggggggtttccggggggtttacccattttccgttggggaaacaaaaaacgatttattaattaaggggggtcaaaccccggttacccatttaaaaaatcttccccaaacaaacagggggcccctccagggggggacctgtaggggggggtcatttttttccaaaacccccattggggggggaaacccacgggccttaaggagcccctaaaaaatcccctggctttttcaaaagcgcccctccaaacttttttttagggggaaaacttaaaaaaggacattcttttaaatttctccct

SEQ ID NO: 28503 - DNA, 546 bp, Zea mays
  Clone ID: MRT4577_126006C.1
ctctcaggcttgacattatcgatccctcgtttccgaggtacaagaatgcagatatcgttatcttcaatactggccactggtggacgcatgacaaaacttctctagggaaagattactaccaggagggcaaccgcgtatacagtgagctggatgttcatgacgcctttcggagagctctcaacacctgggctaagtgggttgattccaatgtgaaccccaagaaaaccactgtgtttttcagaggctactctgcatcccatttcagtgggggtcaatggaattcgggcggcagttgtgacagggaaacagagccaataacggatgaccagtacctcacgccatacccaacaaagatgagcattttggaggaggtgctccgggggatgaaaactcccgttgtgtacctgaacataacaaggatgactgactacaggaaggaggcccacccttcagtctaccgcaagcagaagttgaccgaagaggagaggaaatcgcctgagctataccaggactgcagccactggtgccttcctggagtaccggact

SEQ ID NO: 28504 - DNA, 1649 bp, Zea mays
  unsure (1)..(1649): unsure at all n locations
  Clone ID: MRT4577_126007C.1
cccactcgtccgcccactcgtccgatttggctcgactgaagaagcgataattttgttttgatcgcttctctattgcaagatcgcttctctattgcaagatttagatggctactatcctttgcaattgatcaagaatggtgagctattctaaggaagcttctgaacaatatacctgctgtcctagagtgtcacagatggcaaagatttgcgcttagagaaggaggaagaacggtcggtgctagagtcatctccaaagttcttagctgatcagtttccactttcttctctgtagtctggttgcaactgttgatggttagcacattctttatcttcaattattggaagaaacatttttgcgccaattacatgaaagtggttgcagttttaagggtctgttcaatccctctccaagatattgtaggtgtatgaaatcttctaagcaaactgttaaatacattgcacccgatcagaagggatgctctataatgcagcctggtaaacctccctcctgggcccagctgtcctctgctttcagtgtgaaactactgatttgggtgttgctgattttcatcatgattttttcagtttgtctcatcatttatcatccgcactcagatctagccttggccgggagacaccgcgacagaggctggacgtgctcttcccgtcctcatgccccatgccgctgcgcgctcttcccttcacctctcactacacggcggctgcggggcaggggtgaaagaggcgaggcttctccagcttctcgaggccggagaccgtttgctcaagggtgtcgttcttgacggcctcctccgacagcgtggacgcgtggttctcaaccatggccttggtcacggcaggaagcagagcctggtgccagagaagctcccagtgccccatgtgttggcagcatatcagcatgaaagatcctatgagccaagagctactagaggctgttgaacaagagaggaacatccgatctaatccttcacgtaatactgctgttttccaccatccaatgctgggtgattttgaggttaagaaactccatcaagaaaagcagttaggaatgatggtggacaaaggcctggtagcaactaggacagggttgagtcagtaccacctgtctcactggcctagaatgtttgaggtgatcaggatgctggaaggagacatgctcacagagagatgggaggtgtcgcagaacgtggacatgccagagttcgtctcatcggagctcctacttcaaaagtacatggattttgcagcggacgaatgctcgcttggtgtagaagccatggagctctctggactaaggtgaccatctgatcgatcgaatcggccatcacacaggtcgcataggtgtcttgccatatcaagcctatattattgttgtattacattggacacatagggaagggaaaaaatccggtgaattatagggtgtgatctgtctgcctatacttgtggtggcattcatttgtgcaaatgattttgatatattgatgtagagaatacatatgttgtttatttctatgtaatcgttgcacactataattttatcaaacaacttttgtattgttgcaaggggcgacnnnnntctaatggattgtagtgtgtgatttnnnnnnnnnnnnnnnnncgtgccg

SEQ ID NO: 28505 - DNA, 439 bp, Zea mays
  Clone ID: MRT4577_126008C.1
cccacgcgtccgcccacgcgtccggttatatacattgcacccgatcagaagggatgctgtataatgcagcctgggtgtgatctccgtacatcgtgctccagccgcactcagatctagccttggccgggagacaccgcgacagaggctggacgtgctcttcccgtcctcatgcccccacgccactgcgcgctcttcccttcacctctcactacacgacggttgcggggcaggggtgaaagaggcgaggcttctccagcttctcgaggccggagaccgtttgctcaagggtgtcgttcttgacggccttcttcgacagcgtggacgcgtggttctcagcctatattattattgtattacattggacacattaggaaaggaaaaaattccgtgaattgtagggtgtgatctgtctgcctatacttgtggtggcattcatttg

SEQ ID NO: 28506 - DNA, 591 bp, Zea mays
  Clone ID: MRT4577_126009C.1
ttcggtctcgtgggtgtgcttgcgaaagaatgctgcaggaaaatcgactgcatttgttgttcttgggcacacaatgaaagatgggaaggcatattttcccccacatgacagtatctatacatattgcagttgaaatggaaatagcttctctattgcaagacaagtttagatggctactatcctttgcaattgatcaagaatggtgagctattctaaggaagcttctgaacaatatacctgttgtcctggagtgtcacagatggcaaagatttgcgcttagagaaggaggaagaacggtcggtgctagagtcatctccaaagttcttagctgatcagtttccactttcttctctgtagtctggttgcaactgttgatggtgtatgaaatcttctaagcaaactgttaaatacattgcacccgatcagaagggatgctctataatgcagcctgggtgtgatcttcgtacatcgtgctccagccgcactcagatctagccttggccgggagacaccgcgacagaagctggacgtgctctttccgtcctcatgccccatgccggtgcgcgccttttcctttacctcttactacac

SEQ ID NO: 28507 - DNA, 426 bp, Zea mays
  Clone ID: MRT4577_12600C.1
aaaaggagttgggtgccttattcagacattaaataccgaacatgccccaccttggggtggccaagacgaaacacaagggcccaagatgggttttcctacacaaggcacaattactggacacaaggaaacaacatgggggtccattcaacataaaaccctaaaaccttacagacttatcccttcaggggacacaggaagcatgcctggatgggttgggcacccttacctttgggctttttttgggtgccaggcttcggttcaacaacttgacctttttacttagggccggggagacccccatttgatcggtggcggaccccagaagcttttggagaaactctttcaacttctgggtcttttttggcagcggttttttgtcgcttggctttggatcattaagaactggggaagcagaaaaaaccttgt

SEQ ID NO: 28508 - DNA, 922 bp, Zea mays
  unsure (1)..(922): unsure at all n locations
  Clone ID: MRT4577_126010C.1
attcggctcgagctgagaagtgataattttgttttgatcgcttctctattgcaagatttagatggctactatcctttgcaattgatcaagaatggtgagctattctaaggaagcttctgaacaatatacctgctgtcctagagtgtcacagatggcaaagatttgcgcttagagaaggaggaagaacggtcggtgctagagtcatctccaaagttcttagctgatcagtttctactttcttctctgtagtctggttgcaactgttgatggttagcacattctttatcttcaattattggaagaaacatttttgcgccaattacatgaaagtggttgcagttttaagggtctgttcaatccctctccaagatattgtaggtgtatgaaatctcttaagcaaactgttaaatacattgcacccgatcaggtatataagcaaagactgtattctctcattactagacaaaaaaaatgaaaggaataacatatttttgtatgatgcaaagggatgctctataatgcagcctggtaaacctccctcctgggcccagctgtcctctgctttcagtgtgaaactactgatttgggtgttgctgattttcatcatgattttttcagtttgtctcatcatttatcatgtaatttgctaaacctttgggcacaatgttcatcatttatcatgcatatgctattttctattgtattggtttagggtgtgatctccgtacatcgtgctccagccgcactcagatctagccttggccgggagacaccgcgacagaggctggacgtgctcttcccgtcctcatgccccatgccgctgcgcgctcttcccttcacctctcactacacggnggctgcggggcaggggtgaaagaggcgaggcttctccagcttctctaggccggagaccgtttgctca

SEQ ID NO: 28509 - DNA, 373 bp, Zea mays
  unsure (1)..(373): unsure at all n locations
  Clone ID: MRT4577_126011C.1
ctgctacaccgtgaaccnnaataggggctccggcgaacctggaagtctctcggaactggnaaacacnncataatcttcgactccggcaccacgctgacgttcctggcggagccggcctatacgctggcctatgcggggctcctgtcacaaacgacgaacctcaccagggtcccgggcacggatgggtacgaggtctgcttccagacgtccagcggcgccatcttcccatccatggtgctgcacttcgacggcggcgacatggcactcaagacggagaactacttcggagcggtgaacgacagcgtcagctgctggctcgtgcagaagtcgcccagcgaaatgtccattgttggcaacatcatgcagatggact

SEQ ID NO: 28510 - DNA, 303 bp, Zea mays
  Clone ID: MRT4577_126012C.1
aaggggttgtttttggtttactattaaaaattattccacacaaggaaagggaaattatggatcgggccccgggcagtcaacttaagcagaggggggttttcccttggtttttgggcggaaacaattacaggggattttgccaaccttcccctgggggcccctgagctggttcattttgattatggaaggcctaaactggtcgaaaaaccaccacgggttgtcgggaaaacccttgaacagccaaattgagagggggtggtttaccagccctttgttcaaccgcaaaatcacccccttgttttt

SEQ ID NO: 28511 - DNA, 407 bp, Zea mays
  Clone ID: MRT4577_126013C.1
ctcacagcgtaggcccacgcgtccgggccacgcgtcacggcttacagcaagtttacttgtctacgacgtctcactcgctgtgtggtggcgccatccgtcactggtagcactatatccaggcagaacgatgggctctggtgagcgatcctgtggctacgctaccgtcattctctgcttatacggtctagtcttgatctcaatgattatgggctacgtagttgaatgctgcttataaactgctttgagcctactgggcagtggtatttaatgaggtgcgggtgatgcatatgaataacgaattatatggctaatatgtatcggggggctgctctgataaaaaaaatagattgggggccacttgtagaggactcaagcttatgttcgccttgctgcgacgagataactgt

SEQ ID NO: 28512 - DNA, 475 bp, Zea mays
  unsure (1)..(475): unsure at all n locations
  Clone ID: MRT4577_126014C.1
ggcnacgtacgcagcagccaggccactcaggtggcaacaagtctaggcaggctgctcacagctcaccgctcctgctcatgagaccctgtgctatactttcctgcccgtaagcggcaccgttcaagatggtgagactcgtagctcactcacagacgcgattgcggcttatatctgatgcaaagacgaacatcaagatcaatctacaagagactcgacatgtggaagacgcgaacctatcaaaggcatgatcccagatatgattaaagtcatcggataatagatagaggtggacttgtccatatagtaacgcacagctctacgggcacatacattcaccttaaacggtattcacttgaacattgaggaggcagttcactacactaatctgacaggtagcttaaaataccacaagccgcacatcaccatcatatacttatgtgccatcaatatttgtaccacaatgcaaggactatat

SEQ ID NO: 28513 - DNA, 222 bp, Zea mays
  unsure (1)..(222): unsure at all n locations
  Clone ID: MRT4577_126015C.1
cggtccgcactcccggtcgaccccgcgtccttccagcgtccgcccacgcgtccgcttcttttgaatgcaaactgtgacctcnngatatgtggttttgggcttgctcgctcctcctctgttcctggttttttgtctgnctgtgttgtctcttgntggtcttgtgctccngggcttttgttgctctcctccgcctntactgctgtcttgggggggggggctgtg

SEQ ID NO: 28514 - DNA, 324 bp, Zea mays
  Clone ID: MRT4577_126016C.1
aaaaaaaattctattccatatggaaacaatccaaacaacaacaaataagggacagaacgggtttataaaaccatacttgggaaccaaacgcttcctaaataatgtttaaggggcttttgaaacaaaagggccggattggaaacttttggaaacgtcacttgggtaaaaaatgtttcaaaaaaaaaagtttttcgttttcatccggggaaaaattggccaaaatttgttaaaaaagatttgggtggccccaaggtaaggccaaaacgggattaaaacccttttttttcctaggggggccaaaaaaaaaacaaaagttttaccatt

SEQ ID NO: 28515 - DNA, 517 bp, Zea mays
  Clone ID: MRT4577_126017C.1
ggccgctttttttttttttttttttttttttttttttttttttttttttgttcctccttggggggtcctatttggccctatagtgggcctaattacgcgcgcttaatgaccgccgttttacaaaaacctgactggtaacccactgaaataacctagcttaaacccctcttatcacaacccggggggggggggtggaggcccacccaaaaggcccttaccaaccgcccttcaaaccaattgcccaacgtaaatggaaactggaaatagtaagcaaaaatattgggtaaaaattcgcgaaaaaattttgttaatttacccaattgtccgaaccagtaggccgccctcgtaaaaaaacctaataaaccaaaataatataccgagataggccagagggtagcaccagtccggtacaagagaccactattaaaaaacgaaaacggcaacgacccaggaataagaacggtgtaccactacgataaccaactacctaaccaatctttttaaaaaagtttttccg

SEQ ID NO: 28516 - DNA, 682 bp, Zea mays
  unsure (1)..(682): unsure at all n locations
  Clone ID: MRT4577_126018C.1
gttccctttctccccccacgccgccgccagattccggtgatccccgcggttccccaccacctagctctcctccccgaggtcacctctgcccgctcaccatctccactgaccggtttctctcctcgcccaggagagccacacccaggcactggtggtggtgcgccgcgtggaggccccagcggcgttgagctgctgttgctgcgggcacagcgacgtcgacgtggtcaggatggtcgcagcccttcaagattctcaatggcggcatctcggcgctgatggcggagtcgacggcgagcatcggcgggtacatggcatcggggtaccggagggtggctggcgtgcagctctacatcaaccacctcaagcccgcctgcctcgacgaccgcatcgaggccaaggcgaaccccatccggtacctcaaccccgacgcgtacttggaaaaggaccagctactggacgcggtgcattggatccggcagggggtggggcttgcctgcgacctgctctggggcaccgcccccctcgtcggcgccttctgatccgccctggcagtccctccctccctccatcctcaaatccccaaccttcttctttcccttgagacataggcatcgattcaggctcattgttanctgaatttgtaagctcatctcacactganattggggacctcttttccctc

SEQ ID NO: 28517 - DNA, 405 bp, Zea mays
  Clone ID: MRT4577_126019C.1
aatcaaaaaaagggcttgatacgaccatgttctccctccaaattccctattgtcaaccgcgcctcagagttcgagggaccctgtcgcgccgcggaaagggcgagaaggggctgggaaagggcggctcgaagcgtcgccgccaggccctccgcgacgacatccagggggttacgaagggggcgatccggaggctgccgagaacggatggcgagaaacgcatctaggggctcatctacgaggagaccggcgagttgagcaagatcttactcgagaacgttgttcgcgaccctgtcagctacggtgagcacgctcgtcgtaagaccgccacacgccatgtatttcgtctaggcgctcaagcggcagggccgcaccgtctacggatttggcggctgaggggacaggggt

SEQ ID NO: 28518 - DNA, 429 bp, Zea mays
  Clone ID: MRT4577_12601C.1
agttccgcaaccttagccgctgacagcgaattaggcaaccacgtaactggcacaacacaacaccatgggtgtcttcgccgtgaccaaggtgtccgagggtcccgtccggccatccgccgcgacgccgtcggagacgctgccactcgcgtgggttgaccggtacccgacgcaccgcggcctggtcgagtccgtgcacgtgtaccgcgacgccatgaccgggacgggggacgccggcgcagaagagaagaagaggaagcccccggcggccgtcgtgcgcggcgcgctcgcggacgcgctggtgcactactaccctttcgcgggccgaatcgtggaaggcgaggacacgtgccgccccgccgtgctgtgctccgccgagggcgtctacttcgtcgaggccaccgcgaactgcacgctcgccgacgtcaactt

SEQ ID NO: 28519 - DNA, 619 bp, Zea mays
  Clone ID: MRT4577_126020C.1
aggtactatgttattaatgctttgaaatctggaagacaagacaaagtaattgaattctttggtgagtatggcaattatctgatgcaaaagcgtggagattggctggcatggtttgctattccatatattaagaacccaagcttggatccacagttccgtctatatttctccaaagagtggctggacactttggttctttcatttaggaattttttgagtgggatattcaatgatactcggaccccagctcttatgagaattagtagtgagaaagaataccatcaaatccctcaagaaatgacataaaacaactgaataataaattggcagagctacaagcatccttagaggagaaggaagatgaaatctctctgttgaggaggaactataatagtggtggttatggaaacaagaatgtagttggtactagtacagctggttcccctcatgaagagatgtcagaaaactatgaagaatcctcggcctcgagtagcatgatacagggttttgattctcggtcctcaagttcagtgaaatcttatacagaggtggaaaattccatgaatcttctgagatcaaccatacagaggatcaggaggttttggtgactgaggaagag

SEQ ID NO: 28520 - DNA, 278 bp, Zea mays
  Clone ID: MRT4577_126021C.1
cccacgcgtccgaggagatccatgcacatgttttaaggtgtggtattgaatatgaaggttatttgcccaatgcccttatcgacttgtatgtaaaatgtggccagacaggctatgcttgggcacagttctgtgcacatggtgcaaaggatgttgtgtcgtggaatatcatgattgcaggttttgttgctcatggtcatggggataccgctttatcgttcttcaatcaaatggtgaaaataggagaatgcccagatgaagttacatttgttgctctgcta

SEQ ID NO: 28521 - DNA, 542 bp, Zea mays
  Clone ID: MRT4577_126022C.1
aggaccaaaattctcaaacaacttgaatggcaaacagaacgggtcctataatgtacaatcaaaaaaacacacaacaggcatggcgagccaggccatgcctagctgtgtacgtacacacggcgcgtgcatgtgcatccctggtgaaaagcatcaaacaaacaatcgactacggcgggcacactacgctaaaggaggcggagggcttctcgacccccttcctggcgcccttgaaccaccggttggcgccgggctgccccttgcatatgtaaagcttgccggcagagacggcggcggtgattagctggtgcttgccgccctcggcgccgaaccgtcgtcctggtcagcacggtgatgctaaagtactgcttgcccaccaccacgggggaggagctctccaacacgttggcggtggccacggggtgcgtatcgaacccgccctcggagacgaatttgccggcgcaggcctgcttgccgagcaggtagaaaacctgcgagaggaactccttaggggaagccgtactcggcccggggaaatccggacc

SEQ ID NO: 28522 - DNA, 432 bp, Zea mays
  Clone ID: MRT4577_126023C.1
ttcgggggcgcgcacgcgtccgcagataatacatcgtcatagactctaccgcaggtgtagctttggtcatcatttgggagcagggggaataactccttgagagggactcgcaacaacagcactgactgtatcaagaggctaattgcacgttaccagctgtattggcccagatgtgctgcgccatgtacatacaacagctcaagtgggtatcactaccgacatatacatgggtaattatgaaaagatggtgtattcatgaagaggtagcctagggcgaaatcgattcacggagttgacgggatactgaacatgagggagaggttgatctagcgcttctaggacgcgtgcccactcatctcttacttcgattatgacgaagaagaggtagttgtagccgcggcaggcatcggtgggtatgcaactctttacact

SEQ ID NO: 28523 - DNA, 501 bp, Zea mays
  Clone ID: MRT4577_126024C.1
ctaacacagccggggtgtttgcctgtttttagtgaaaaaaaaaacatggttgcgtcctttatttggaagaaggctcaaagaggcaagaacctcgctttggcatttgctgctatcccccctaaaaaggggtcttgcctaaaaaggcccccaaaacacccggggccaggggttacaagtgcatacaggtccactgatattgtccaccccttacggggacatgggttttttcccccccccggattttggccaagccgggtttttgaatgcggggggggaccccctcatggggatggtttgggggaccctcaaggcctggcgagggcctgctttggggggaccgttcatccatgctcgctggatgcttttgtacatgagaaaactttctataggggcgcttctcggcctcctgcggaacatagggggggttttcctcttacgggggctggctgcgctcccggtttagggggtgctggccagcttacctgtccctggactgtggtt

SEQ ID NO: 28524 - DNA, 191 bp, Zea mays
  unsure (1)..(191): unsure at all n locations
  Clone ID: MRT4577_126025C.1
aaacaaaccctgtaggtggtttttagggggggagggttcctttaaaattctattcacctttccantcaaaaaacaaataactacagtgggcccacaaaccgcgtactatcccttcaaaactccggggtataaaaccttagaaaggtcccggtgccacaaaacgcgaatactaaattcctggggaggtgggt

SEQ ID NO: 28525 - DNA, 203 bp, Zea mays
  Clone ID: MRT4577_126026C.1
cccgggcaaaactgtctcactgaccattggctatggcaaagcaggcgcgccgggtgtttgctggcctatctttgactttcgtctagcactcctcgcgctgtcgccgtgcctgtcgccgcgcataatgcgggggccagccaaacgtagcggcaattgtttggcttccgcgggacgatcgctaggcgtggggtcacgggtgccag

SEQ ID NO: 28526 - DNA, 353 bp, Zea mays
  Clone ID: MRT4577_126027C.1
actcatatcaatataacttgccagtgtccgctgattgcaggaacacgcgcaagcatgcgaagtacgctcatgaaggccgctcattaaactcaccataagtcggggccgcttaatattaacatcttacacctgtcctggccacagaaaacgctatcggatatcttctggccttgaaaaaacacagcctgcaatggggggggcgtacacaactgatttgctctagtgggcctatttgtctggttactcccgcttgaggagatcatgcatgcttttataataagagctaccggcctcatactagctcgtattagaacttatgagccttattgttaccatgcattttgccaaaggta

SEQ ID NO: 28527 - DNA, 2020 bp, Zea mays
  Clone ID: MRT4577_126028C.1
cctcgaggccggccgggactcgctttccgcccgccgcgccatgagcgccgccgcctgcctgttcgctgccgccgtctccctatcattcccgtcggcctccgcaccctcttccgcaagacgccgccgcctccggagccccaccaccctcctccgctgctccccgactcgccgccgtgggccggtccggcggacactcgacgagcggctgctcgaggccgcgccggcggagaccgaagacgtccaaaccgctgttgatgtagaggatggaggagggatcgctgagggcgatgaagtgggaacagaggagatggaggagctggagcagcgaccgccgacgagggctttcgtgaagagcaggcggcagcggcaggaagaggaggaagccgcggcggggcaagaccggttcaagctcatcaatggcaaagagatatttcaagagaaggcttatctggttggtgttgagtgcaaacggacaggagggaacctgttcggcatagaggagtcccttaaggagctggagcagttggctgatacggcgggccttctggtagtcggctcaacctatcagaagctttctaccccaaatccaaggacttacattggttcaggaaaggtttctgaaatcaggactgcaatccaagcacttgatgttgagactgtaattttagacgatgagttatcccctggacaactacgtaacttggaaaagtcatttggtgggagtgtccgagtctgtgatcgaactgctcttattcttgatatttttaatcaaagggcagcaacacatgaagcttctttacaggttactttggcacagatggaatatcaacttcctaggttgacgaaaatgtggagtcacctggaacggcaggctggaggtcaagttaagggtatgggtgagaagcaaattgaagttgacaagcgcatcttgagaactcaaataagtgccttgaggaaagaattggaatctgtacggaaacaccgaaagttgtaccgcaaccgtcgccaatcagttcctattcctgttgtttctctggtaggatatacaaatgctggaaaaagtacactcctgaaccgcttaactggagctgatgtgcttgcagaggataagttatttgccacattagatccaactactagaagggttttgatgaagaatgggactgagttccttctaactgataccgtcggattcattcagaaattacccactatgctggtagcagcatttagagcaacactagaagagatatcggaatcatcagttatagttcatcttgtggacattagccatcctttagctcaacaacagatagatgctgttgaaagagtactgaaggagttggatgtcgagtcaatccccaaattagtcgtgtggaataagattgacaatacggatgaaccattgagtgtaaaagaggaggctcagaaacaaggaataatctgcatatcagcgatgaatggtgatggtttggaagatttatctaatgcagttcaagcaaagttgaaagactcgatggttcctatagaagcttttgtcccatatgacaaaggagatctcctgaatgacatacataaggttggaatggttgaaaaaatggagtacaaggaaagtgggacatttgtaaaagctcatgtgcctctacctctggcaaggcttctcacacctctacggcagcaggtggcagccactgtgtgatgtgcatgtccccgatcccttgatgccattggcactcacaaaattaccacatcttgtagattcacaaaaggaatagctttgctgtagaaaacttaatcatagattatcttcattgtgtttctacggttctaccagagtaccgtatcaacaggtgcacaggactagatagctgtatgtacgcacaacagaaatgtaaatgttctcagcagaatttaagccccgtttggtttgggtagtcacttttagtccctaaaaatataaacatggtgactaaaatagggtaactaaatttaagttctttggtcatcttaccacagaact

SEQ ID NO: 28528 - DNA, 197 bp, Zea mays
  Clone ID: MRT4577_126029C.1
atcgggatgggggtttttaacaaggccatcacagtttcaaggcacatgcgctggatgataaaaataagttaacagatggtacaagcatcgtgccagcggagattttatactgggtcaagaacacagggccctatttcggctcataagagaaacgcttcataccacatggtggggggtgggcccataagggaaatttt

SEQ ID NO: 28529 - DNA, 610 bp, Zea mays
  Clone ID: MRT4577_12602C.1
tcgagcggccgcccgggcaggtaaaaaaaaaaaaaaaaaaaaaaaaaaaaaaaaaaaaataaaaaaaaaaaaaaaaaataaaaaaaaaaaaaatattaatacaataaaaacaaagaactcttttcctcttgggccccagcttcctcccaccttattggcgtaatttcttggcaggatttccttcaacacttggggggaggaggtgccacaatttcttcttataggggcccatttctcccttttagagtgggcgttttaaattcaactggccgacttttaaaaccctggggtttggaaaaaacattggctttcccaaatttaatccttttgcaaactttccccttttcgaaaagggccgaaataataaaaattcccaaccctttccccttctcaaaaggtagtgaaccctcattggaaaagggcctccccctttacgggccttttaattccgcggggtgtggcggttacactaagcgggaccctatcactggccagttccttttcccccccttcttttctttcctgccttgcctttttcccccgttaagctgtttttcccgggcaacctttaaggtgggggttcctttttgggtgccacttaaacccttaa

SEQ ID NO: 28530 - DNA, 627 bp, Zea mays
  Clone ID: MRT4577_126030C.1
atcacgccgttacttccctccctacccatgtccccctctaccgttatcgccctcggcagctcgacgccgcagtgcgtgccagctccccctcttcctcggtcatccatgtctacccagatcagcaataacaagaagtgcggcagcggcggcgcgctctacctcgagctgattgagatgctgacgcgaaagctcgcctaggatcgctactccagcgcgtacgggcgtgttccaccgatgcgtacgtacataatcagccgctcaacgctcacgcagaacttgctccatgagacagttcgctggatcatgtagctcacgtctgtgttgcataaaaggttcgacttccccgaaaacggtgtcgagctctactcctataatgtactcgaccgagtacactgcgacatcgcgcaggctgagatcctccgctacaagctcctctcagggcttgccgaacagatgggctgctatggagtgcttcgctttggtatgaatagagtagtgctgggactgagaggtcattgctgaggctaaagatcatcttatctcacagccaagaccatatagttgctagatgtctaactgatgtcgtctgggacatgaatgcatgcaatgatcgacttctcttcgaga

SEQ ID NO: 28531 - DNA, 366 bp, Zea mays
  Clone ID: MRT4577_126031C.1
ctttatgacaattgttccaagaattaataagtattccagtgagcgtctcaaaaatggaatcaagagatgagatggtaactagctgaaacccaagagcgattttgcgacgccctgctgtgagccgaccctagcagtcaaggcttcgtaaataagatttatctatcagatgggcttctgctactttcaagtagtgctgctgctttcgagtggtgctgctgctttcaagttgaagtgagttgctgttgacttccacaacaagctgccacttttagtggaagtgagtacaaaacaggctgttgctgcatctcgggcaaaagcaaagttgtttattctgctttcaaacagcagtgctggtgccaaaagaat

SEQ ID NO: 28532 - DNA, 514 bp, Zea mays
  Clone ID: MRT4577_126032C.1
gggaccactacattttatttttcttcccttacacaacattttttctgtttttagggacaatgcgaacaaatcacatggcatacgcgtcctgcaaaacggacaaatgggcaaccacacaagacccccgtacattggggtcgagcaacccaaaccacattcatactgcgctccaacaaatggcaagagcaactttggccatgtcgagctagcccaaggtagtatgaaggggggagcccgcccctgttactgtgacataaccctctcatttgcaccctgaaattggaggaaaagttcgtacaccttctgtaaccaacaacaggctttcttaacatactttccgaaccgtacccagggaatcctctaatttctaacccttgttctgcaaataaggaacgggctgttctttccccaaaattgtatccttaatctggttaacctcattgaaaaagtcctcgcacatctgaataggggaatccaactgatgctttccatcattaataagaccatgactgga

SEQ ID NO: 28533 - DNA, 221 bp, Zea mays
  unsure (1)..(221): unsure at all n locations
  Clone ID: MRT4577_126033C.1
cnttgcctggtcaatgattcatagttaagccctaactcagaatgacctgtgcaatgaagcaaaagcatcatcagctcaaaatcgcagtcaaattacacggtacctctcaggctaatcagccctccggttttgctcattgatgttcacaacagcgaaaaacatagacccgcgactcacattaaagccatctgtgatacaccatctaagcaccctgtcttcaa

SEQ ID NO: 28534 - DNA, 470 bp, Zea mays
  Clone ID: MRT4577_126034C.1
caaattgacttgttttctttctaaggacagcttcccctggacaaaaaaaaaccagagccccccccaggggagcggaaggaatgtccaggacagagcagggttggggcgggccacccccaagggaggccacccaaaaaaaagggagcccgcccccaacacgccccaaccaggcattacccaaaaaaaagcacccccaaaacctcctaaaaaggaggcaaataaccgcaacgcgtgggggggaacccccaggcggacaaaaaaaagaaataaacgcaaacggaacaagccagaggggtacccttataagcaaaaaagaaggcctacaccggtaaaaccacggccataaaaacccaggccagacccccccggggcaccacccggggcacgtaaaacccgggagcggccccccctgccggacggggggaaaccctttgtaagccaagagaccccaactcccggggggtttcaac

SEQ ID NO: 28535 - DNA, 269 bp, Zea mays
  Clone ID: MRT4577_126035C.1
atggaactaactcttcttcaaaagtgatcactcatcatcctatcattatcattagtatctcaaaaccatgctgttatctctacatgtgcacacgctcaattcctcctcaattcatcttttaaaatattacgctaaatacatgccactcacattgtattatctgtatgttcacactctcacatccactacagtgtctttgtcttgacaccaacaacttcttctacaaacctttcaagtccatatatgactataaaaactaatatctctct

SEQ ID NO: 28536 - DNA, 425 bp, Zea mays
  Clone ID: MRT4577_126036C.1
atcgcactgagtcgtcgtgtcttgggagcacgtgatttctcgctatggttaagtcgccgcctcggtgccgctcttctccctgggccgcgtcgcacatgatctagtttctggtaagttgttacccgctccattcgccttgcactgagcaacgtgtagcatctgtttgaatttttatatagggcgccggagcatgtagaagggggtccgtccatgggcgccgtcgtgccctgttgggcggggtgggagaagcgttggtggccgttgatcccagaccgactgtggcaatcatatctcgcatacccttttgcttggatgagtattgaccgttcgatctagatgtgcgtacgagattagaaaaccgcgtaccgctttttagataaaatccgagccgtagattgtagatctgagggctaggtcgagtcgta

SEQ ID NO: 28537 - DNA, 269 bp, Zea mays
  Clone ID: MRT4577_126037C.1
gcgaggtggaggagaacatggcggcgtggctggttgccaagaacaccctcaagatcatgcccttaaagctcccgtccgtgggtccattatgattgccgtgtgcgcatgaaggctttgacgtttctagtgatcatgtcgtctttctgatcttggtatcttttggtataggtcttgttgaaggtgatttttttttattctctgtttttaatattgttatttttcgttcttcatttattaggctaagttctacctcatttttgttttttttt

SEQ ID NO: 28538 - DNA, 643 bp, Zea mays
  unsure (1)..(643): unsure at all n locations
  Clone ID: MRT4577_126038C.1
gaaacaaaagtcaaataaatttcacccatgttgcttgttttcatgagaaactcaaaaacataccacaaaagaaaacagagtaaaatataccaaaacattacaaggactgtagccgataagagagagagatactctggatttcactcggctctagactgaccagctcgagaagagaggatgataccaacaatgagaccgtacagggcaagtgcttcagcaaagatgagaatcagaatcattcccacaaacaacttaggttgttgtgcattcgctctaacaccggcatcgccgacaattccaatagccataccggcggagagaccagcgagaccacaagcaagaccggaagagagatgagcatagccatcgaatagatagtaagacttggccttagggttgattccggtactgatgataacagcaatgatcaaaccataaatacctaaaactccagccataacaacaggaacaatcgatttcatcacaangctctggtctcatcacacccatcgacgctacaccaaccccgctcttcgctgtcccgtacgctgctcccatacaggagaaaacgagagcggcggcagcgccaaggaatccgaagaagggagcagtttcatcgcccgctgaaagttgaagccatggc

SEQ ID NO: 28539 - DNA, 689 bp, Zea mays
  Clone ID: MRT4577_126039C.1
ttggagaaatcagcctgcgaccatgtgaaaatttggctcaagtcgaagctactttaagtattgcagatacaaaagacccttcggccgaagccagcttagtgggcgaaaaattctttactgacatctgggagaatggcggccgaaagatggcacacgagataataaaaaagagtgaaaaagattctcatgatgcaaaagaagtgatgaaggcagctgaaaaaactgtggaactagaaaggaggatagctgagctgcttccttcccagggccctgagccaacggccgacccagaagcaaagagagaggaagaaattactaaaatgaccgaagctattttagatgaagctgtttctcgactgttgaacgaagctgcggaagcagttttggaagaatagttattattgtaaaacatttggaatgtaatatttgctgaacaaagtgtgtaatatttttataactttgaatgtaatatataagttgcttgtaacttaattctttacgatgcatgaaacattacatacataccgtttttgagtcttcggcggtcgaacgccggggtgccaccgtaatggtttctccgtttgattttcacccagttgtatggatcactaaatgccttacttccggaattcagcttgcctcctgattcatcttatgatgtgctgacagagatgctcagggacggcatg

SEQ ID NO: 28540 - DNA, 748 bp, Zea mays
  unsure (1)..(748): unsure at all n locations
  Clone ID: MRT4577_12603C.1
ctcgccggcggggcgggcgggaccacactcagcttcttctcacttgagttgagagacacagttaagtttgtgatattgtggctagagcaagcgcgatggcgagcaaggtgcctgctgcactgctctcatgtgctttcttgctcctactaggagccgcatgccaagcagcagctggtcactacagtcctccgagtcctgcttcgtgcgggctcaaggtggggtactacgaccacaagtgtccgcctgccgaggccatcgtcaagagcgtcgtcagagccgccgtccggcggaaccccggcatcggcgccggcctcatccgcatgctcttccacgactgcttcgtcgagggctgcgacgcctccgtgctgctggacccgacgccggccaacccgcagccggagaagctcggcccgcccaacaaccccagcctccggggcttcgaggtcatcgacgccgccaaggccgcggtggagcgggcgtgcccgggcgtcgtctcgtgcgcggacatcgtcgccttcgccgcccgcgacgcctcctccttcctcggcggccgccgggtcgacttcgacatgcccgccggncgcctcgacggncgcgcctccaacgcctcccgcacgcttgacttcctcccgccgccgacctccagcctccccgagctcgtccagagcttcgccgccaagggcctctccgccgaggacatggtcgcgctctcgggcgcgcacacgtcgggcggtcccactgctcggcc

SEQ ID NO: 28541 - DNA, 204 bp, Zea mays
  Clone ID: MRT4577_126040C.1
taacaacacatctgtattctcgtaatattataactacgtatgaacctaaaaacgttgactataccaaatcgaaaatgacatgctgagattcgactaaagcaatgtacataatttcaaataaaacaataaatctacaacattgtatcaatatataaatctgatattccacgtaacaaactacataaacattatcattatgtttgt

SEQ ID NO: 28542 - DNA, 366 bp, Zea mays
  Clone ID: MRT4577_126041C.1
tgaacatgtaccggaacatggacatgctctatgaacgtcctgaccaaggccgcgcccggggacagccccaacaccggtggcatccacattggcgtctaattcggcatcacaatcaccaacaccatcattggcatcggtgacgactgcatctacatctgcctctgcacctgcaaggtgaacatcaccgtcatgacctgcggccttagctacggcattagcatcggcatcctaatgcggtacatggaccagaacgacgtcacggacatcaacgtcaacgattgcactcttgataagactatgttcaacatgatgtgtcacgctgctcaactccttgatcaactacgccattagcctggtctgtactgt

SEQ ID NO: 28543 - DNA, 251 bp, Zea mays
  Clone ID: MRT4577_126042C.1
aaaaatggcagcgagcagcaatgaagaactgaagaacaaggcgttgagccagatcgatcactatctggcgaacggagcatggactgcaccagttgatgaccgcggtgtggaattcaagacctgccctcacggctcgcacgagatcaacgtgtttctcggaaccaagacgatcgccacctcgatcgagcgcctgctggcggagttctgggacaacgtgaacgagagcggggtgaaggccttcgaccccgact

SEQ ID NO: 28544 - DNA, 1479 bp, Zea mays
  Clone ID: MRT4577_126043C.1
aaaatgcaactatttttatttcattacaagatgacatcacaagatgacagatgacgcactattcttgatggggtaggtacgtgatagtacaggctacctacctcccaacaactcacgtgtgtgagaactgttttggttgacactgcaaccagccacacgacaacgacgtcacaactccccatcagtgggaaggtagggtaggggagtaggggacacaaacttgtggaaatcaggaaccccacgacgcaatcaagacgccacggttgctttgacgctggaaataaactcctccatgctccggtagctggtgccaccctctgcaactgccttggccgcttcctcggcggtcctcgtcgtccttgccctgaccgcttcgtcggacatgacctcttttactttcttcgcgatctccaccccggtcaccagccagtcctccccgtcccagctccttggcgatggggatgacgtgggaggtcagggtcacgtctgtaatgacggccgagacgcgtggggcggcgccggcaataagcgggcccaggaggtgcgctgagcggcgcagggcctcccaccggagaacgaacgggtcgcggtcgttgcttgggagcttggacgcgtcgaacggcaggaggtggaggtcgacgcggcggacacgggggagggcagcgaagaggctggtgaagtagtcctcgaaggcggcagaaacggtaggaaggacagtcaccacagagatgtcgacacggcaggaaggacactcaccgcagcgctgtctacgctctgcccagcgagacccgcgatgaagcggaagaatgggatgaggtggcccatgccagcgcttgggatgaacacgacatgcgggcggagcgtcgacatctctgtggtgactgtccttcctaccgtttctgccgccgaggaggactacttcaccagcctcttcgctgccctcccccgtgtccgccgcgtcgacctccacctcctgccgttcgacgcgtccaagctcccaagcaacgaccgcgacccgttcgttctccggtgggaggccctgcgccgctcagcgcacctcctgggcccgcttattgccggcgccgccccacgcgtctcggccgtcattacagacgtgaccctgacctcccacgtcatccccatcgcactggagctgggacggggaggactggctggtgaccggggtggagatcgcgaagaaagtaaaagaggtcatgtccgacgaagcggtcagggcaaggacgacgaggaccgccgaggaagcggccaaggcagttgcagagggtggcaccagctaccggagcatggaggagtttatttccagcgtcaaagcaaccgtggcgtcttgattgcgtcgtggggctcctgatttccacaagtttgtgtcccctactcccctaccctaccttccactgatggggagtccggagttgtgacgtcgttgtcgtgtggctggttgcagtgtcaaccaaacagttc

SEQ ID NO: 28545 - DNA, 5130 bp, Zea mays
  Clone ID: MRT4577_126044C.1
ggggaccctcgaggccggccgggccgggactcgggtccatagttcaaaacgaaaccaagcaagctttcggtcatggccccgccggcaacgaatagcccgggagaggtcgacagcggcggccgcccgcatgtcatgttcatcccaagcgctggcatgggccacctcatcccattcttccgcttcatcgcggctctcgctgggcagagcgtcgacatctctgtggtgactgtccttcctaccgtttctgccgccgaggaggactacttcaccagcctcttcgctgccctcccccgtgtccgccgcgtcgacctccacctcctgccgttcgacgcgtccaagctcccaagcaacgaccgcgacccgttcgttctccggtgggaggccctgcgccgctcagcgcacctcctgggcccgcttattgccggcgccgccccacgcgtctcggccgtcattacagacgtgaccctgacctcccacgtcatccccatcgccaaggagctcggcgtccagtgccacgtcctcttcccctccaacgccaccatgctctcgctccttgcttacacccctttacacctcgacaagaaggccgagcaggggagtgacatcggggacgtcgacatccccggtgtgtgtcgcataccgcaatcttgtctcccgcaggcgctgcttcacctcgacaaactcttcaccaagcagttcatcgacaacggccgcgagatcatcaacgctgacggctttctggtgaacacgttcgacgccttggagccggtggcgctcgctgccctgagagatggcaaggtcgtcccggggttccccaccggtgtacgccattgggcccactcatgtcgcagcacaacagaacgaaaccaagcaagctttcggtcatggccccgccggcaacgaatagcccgggagaggtcgacagcggcggccgcccgcatgtcatgttcatcccaagcgctggcatgggccacctcatcccattcttccgcttcatcgcggctctcgctgggcagagcgtcgacatctctgtggtgactgtccttcctaccgtttctgccgccgaggaggactacttcaccagcctcttcgctgccctcccccgtgtccgccgcgtcgacctccacctcctgccgttcgacgcgtccaagctcccaagcaacgaccgcgacccgttcgttctccggtgggaggccctgcgccgctcagcgcacctcctgggcccgcttattgccggcgccgccccacgcgtctcggccgtcattacagacgtgaccctgacctcccacgtcatccccatcgccaaggagctcggcgtccagtgccacgtcctcttcccctccagcgccaccatgctctcgctccttgcttacacccctgtacacatcgacaagaaggccgagcaggggagtgacatcggcgacgtcgacatccccggtgtgtgtcgcataccgcagtcttgtctcccgcaggtgctgcttcacctcgacaaactcttcaccaagcagttcatcgccaacggccgcgagatcatcaacgctgacggctttctggtgaacacgttcgacgccttggagccggtggcgctcgctgccctgagagatggcaaggtcgtcccggggttcccaccggtgtacgccattggcccactcatgtcgcagcaaaactcagttgacgaaggtgggaaggaagaaggatcgggctcccccgttgcctggcttgacgagcagccagcgcggtctgtggtgtacgtcgcgttcggcaaccgctgcgccgtgagccatgaccagatcagggagatcgccgccgggctcgaggcgagcaactgtcggttcctttgggtgctcaaaaccacaacggtggatagggacgacagcgccgtgctgacggaattgctcggcgaggagttcctggagcgagtgcagggtcgcggcctcgtgaccaaggcgtgggtggaccaggaggccctgctgaagcacccggccatggggctgtttctaagccacagcgggtggaactcggtgaccgaggcggctgccgccagcgtgccgctgctggcgtggccccgcggcggcgaccaccgcgtgaacgccatggtaacggtgagcggtggggttgggatgtggatggagcactggagctgggacggggaggactggctggtgaccggggtggagatcgcgaagaaagtaaaagaggtcatgtccgacgaagcggtcagggcaaggacgacgaggaccgccgaggaagcggccaaggcagttgcagagggtggcaccagctaccggagcatggaggagtttatttccagcgtcaaagcaaccgtggcgtcttgattgcgtcgtggggttcctgatttccacaagtttgtgtcccctactcccctaccctaccttcccactgatggggagttgtgacgtcgttgtcgtgtggctggttgcagtgtcaaccaaaacagttctcacacacgtgagttgttgggaggtaggtagcctgtactatcacgtacctaccccatcaagaatagtgcgtcatctgtcatcttgtgatgtcatcttgtaatgaaataaaaatagttgcattttaaaaaaaaaaaaaaaaaaaaaaaaaaaaaaaaaaaaagaaaaaaaaaaaaaaaaaaaaaaaaaccttcactgtggggttccaattacgagtagctgtaatccatgggtccgacctggcttccgcccgttatttggtcactaggtggaattttgatcccacttgttatcccgctagcagtccgagatgtctccgggggtctaatgtgcgggccgggtcgggaattgggcacgaggttcaaaacgaaaccaagcaagctttcggtcatggccccgccggcaacgaatagcccgggagaggtcgacagcggcggccgcccgcatgtcatgttcatcccaagcgctggcatgggccacctcatcccattcttccgcttcatcgcggctctcgctgggcagagcgtcgacatctctgtggtgactgtccttcctaccgtttctgccgccgaggaggactacttcaccagcctcttcgctgccctcccccgtgtccgccgcgtcgacctccacctcctgccgttcgacgcgtccaagctcccaagcaacgaccgcgacccgttcgttctccggtgggaggccctgcgccgctcagcgcacctcctgggcccgcttattgccggcgccgccccacgcgtctcggccgtcattacagacgtgaccctgacctcccacgtcatccccatcgccaaggagctcggcgtccagtgccacgtcctcttcccctccagcgccaccatgctctcgctccttgcttacacccctgtacacatcgacaagaaggccgagcaggggagtgacatcggcgacgtcgacatccccggtgtgtgtcgcataccgcagtcttgtctcccgcaggtgctgcttcacctcgacaaactcttcaccaagcagttcatcgccaacggccgcgagatcatcaacgctgacggctttctggtgaacacgttcgacgccttggagccggtggcgctcgctgccctgagagatggcaaggtcgtcccggggttcccaccggtgtacgccattggcccactcatgtcgcagcaacactcagttgacgaaggtgggaaggaagaaggatcgggctcccccgttgcctggcttgacgagcagccagcgcggtctgtggtgtacgtcgcgttcggcaaccgctgcgccgtgagccatgaccagatcagggagatcgccgccgggctggaggcgagcaactgtcggttcctttgggtgctcaagaccacaacggtggatagggacgacagcgccgtgctgacggaattgctcggcgaggggttcctggagcgagtgcagggtcgcggcctcgtgaccaaggcgtgggtggaccaggaggccctgctgaagcacccggccatggggctgtttctaagccacagcgggtggaactcggtgaccgaggcggctgccgccagcgtgccgctgctggcgtggccccgcggcggcgaccaccgcgtgaacgccaaggtagcggtgagcggtggggttggggtgtggatggagcactggagctgggacggggaggactggttggtgaccggggaggagatcgcgaagaaagtaaaagaggtcatgtccgacgaagcggtcagggcaaggacgacgaggaccgccgaggaagcggccaaggcagttgcagagggtggcaccagctaccggagcatggaggagtttatttccagcgtcaaagcaaccgtggcgtcttgattgcgtcgtggggctcctgatttccacaagtttgtgtcccctactcccctaccctaccttccactgatggggagtccggagttgtgacgtcgttgtcgtgtggctggttgcagtgtcaaccaaaacagttctcacacacgtgagttgttgggaggtaggtagcatgtactatcacgtacctaccccatcaagaatagtgcgtcatctgtcatcttgtgatgtcatcttgtaatgaaataaaaacagttgcatttttaaaaaaaaaacaaaaggcccctagggcccctgacctcccacgtcatccccatcgacaaggagatcgatgtccagtgacacgtccgtcttcccctcacaacgccaccatgctctcgctccttgcttacacccctttacacctcgacaagaaggaccatgatgagagtgacatcctggacgtacacgtccccggagtgtgtcacataccgcaatcttgactcccgcaggagctgcttcacctcaacaaactcttcaccaagcaggtcatctacgatgaccgcaagatcatcaacgctgacggctttctggcgaacacgatctacgccttgtagccggaggtgctcgctgcactgagagatgaactaggactgcccgtccatcccaccgtggtagctcattgtgccactcatagtctagctacactcaactgaccaaagtgacaaggaagaatgatcgagactcccccgctgcctgacttgaccaacatccagcgcgttcttgcgcaggactgtctcgtacggtaagctctgcgccgcgagacatgaccaaatcagggatatcaccgccgctgtcg

SEQ ID NO: 28546 - DNA, 513 bp, Zea mays
  unsure (1)..(513): unsure at all n locations
  Clone ID: MRT4577_126045C.1
gctttgaattcggctcgagatttcaccttaaagattatataatcttgattataatctgaattatataatctagattataatttatcgtatgcaactgtttggtagtgtagattatacaagtatataagggtggtatggatcgtgatctaaatatttctttacaatttgttgtatataagggtggtatggatcgtgatctaaatatttctttacaatttgttaggtctctatatttattttattttaaaaataaatataaataaagccttatcttaattcgatttgatccatgcttatcattcctacgagtacatattattgttctataagaaagtacgctacaaagaaaatggtattattctagcaaataatgcattggcaatttgatcatgaatgttattcatccacgagaagctacaacagaggcatgcacatgtatgtntcttgtgaacattttatcgagcagctagagcacacccgaactatggtaggcagcattacgccgtgactact

SEQ ID NO: 28547 - DNA, 679 bp, Zea mays
  Clone ID: MRT4577_126046C.1
agggcgattgggttcctcgaggccggccgggcagtccaagccctacctgcccgtccccctcccaccacccaatcgcgctcgcacggaggcggcgccggcgcggacggggagattccattcacctcccatccatttctcacgagaagcgaaggcgaaggcggaggcggaggagcggaggtaggagatctcgagcaagccggaggcggaggagatggagacgttcgacccgtggccggtctttttccgccgggagtggaagcgcaactggcccttcctcacgggtttcgccatcaccggattcatcatcacgaagatgacgtccaacttcaccgaggaggacctcaagaactccaagttcgtccaggaacacaagaagaagcactgacgaaccaggtgaaggagttgtcagaaacgcatgtttggccagccagttctgttatgcttttgaatgaaaaatttagacccctctttctcgtttccttaatcgaaatgcttgaactctatgttccatttgtaatgtaataagaggcaaatgaattgaaccaacagcaatcaacttctgattgaaaaaaaaaaaaaagtcaggtgtggcctgaaaaaaaaaaaaaaaaaaaaatggaagtacaagaagagtcgagatgacaacataaaagtagaatgaaacaagagtccgtcggcc

SEQ ID NO: 28548 - DNA, 538 bp, Zea mays
  unsure (1)..(538): unsure at all n locations
  Clone ID: MRT4577_126047C.1
acgctgattgatttctatagttggagtgatcacacagttaacatttgcacttgaactgcttattgaaatgcttacgagaatgagccagcaggatggagtcatgggaacatcggcggtaagagtgcggctgagtgncacccgatgtttgcaaaccatatgtgggcgacgatagtatgagatcgtttcgaggaccacttcaattcaagaggaggaggatgataagtacatcatttgtatacatacaataaatggaccgataccacaatcgctggcacgacagctgaatttacaggtacgttctatcttaaacaattgtgttttaaagcttacgcttggggtcatggctgttatgatgattatgaactttggataataccattaagaacttgtgaaaagcctacgtgttgtaggatgagcacttgggctccacattacgaatgagatcaagtacgattacgctgtgatttctgtcagttccagaccgtctgactaaatggaccccaaagctccgtctccgattgcaactgactgtatggtt

SEQ ID NO: 28549 - DNA, 711 bp, Zea mays
  Clone ID: MRT4577_126048C.1
gagattacattcacctcccatccatttctcaccagaagcgaaggcgaaggcggaggcggaggagcggaggtaggagatctcgagcaagccggaggcggagtagatgaagacgttcgacccgtggccggtctttttccgccgggagtggaagcgcaactggcccttcctcacgggtttcgccatcaccggattcatcatcacgaagatgacgtccaacttcaccgaggaggacctcaagaactccaagttcgtccaggaacacaagaagaagcactgacgaaccaggtgaaggagaaacgcatgtttggccagccagttctgttatgcttttgaatgaaaaatttagacccctctttctcgtttccttaatcgaaatgcttgaactctatgttccatttgtaatgtaataagaggcaaatgaattgaaccaacagcaatcaacttctgatggaaaaaaaaaaaaaaaaaaaggcccctagggccaaaaaaaaaacctgccttaaccattcctcccaacaccacctcgcctgcgatcttcgtagcctccgtcgcgtcgagcatcgatcatgtcggcctactgcggaaagtacaaggatgagctcatcaagaatgctgcctacattggcacccccggcaagggtatccttgctgctgatgagtccactggcaccattggcaagcgcctttccagcatcaatgtcgagaacgttg

SEQ ID NO: 28550 - DNA, 628 bp, Zea mays
  Clone ID: MRT4577_126049C.1
ctcacaccacgctccatgggttggtcttaggaagcaaatcgagggggacctggcggccgggctggctgctctcagtgtctttactggctgctctatcgccggagtgggcggccccttgcgctatcggctacggcgaccgacaccaagagcatccacacagtcactaccatatcacgcccacacctggtgcaggagactcccggcggtggtaccaacagatgatatgctgttgcccacactgacgaacggacccaacccgaacggccccaggcactaacactcgtaccaccttgttaggccaaaccttatcaagacatatggtggcaaagctccaaaaggatggatgtataatatatattttcattatctattagctgcaactataactgaaattttatacgtccatagtgctcacatacagcacgcactcattcactagatatgatgaccactatacactcctatcaacgttaaaatcactaaactgacagaagctgttaactacgataccgccgatctatatgacctaatagcactcgaacatacgctaccgacacaccattgatagcaccatattacgagtaatgtcgctatacgatgtgcggagtacctggctttcatggctgct

SEQ ID NO: 28551 - DNA, 130 bp, Zea mays
  Clone ID: MRT4577_12604C.1
taaacgcataggttctaacaagttgttttgtttatgttttcttaaaagggcggccggtctagatgatccaagctttcgcacgcgtgcttgcgacgttataactgtattatattggcccgcaaatttattt

SEQ ID NO: 28552 - DNA, 716 bp, Zea mays
  unsure (1)..(716): unsure at all n locations
  Clone ID: MRT4577_126050C.1
gggtacctcgaggccggccggggtccccctcccccacccaatcgcgctcgcacggaggcggcgccggcgcggacggacagattccattcacctcccatccatttctcaccagaagcgaaggcggaggcggaggagcggaggtaggagatctcgagcaaggcggaggcggaggagatgaagacgttcgacccgtggccggtcttcttccgccgggagtggaagcgcaactggcccttcctcacgggtttcgccatcaccggattcatcatcacgaagatgacggccaacttcaccgaggaggacctcaagaactccaagttcgtccaggaacacaagaagaagcactgacgaaccaggtgaaggagttgtcagaaacgcatgtttggccagccagttctgttatgcttttgaatgaaaaatttagacccctctttctcgtttccttaatcgaaatgcttgaactctatgttccatttgtaatgtaataagaggcaaatgaattgaaccaacagcaatcaacttctgattgaaaaaaaaaaaaaaaaaagaggcctaaagccggctcctgcaaaaaaaacccgctggctggcttagcgcgtaggctgtgactgactgactgactgcgagaccacagcaccggaggacgcccgcgcgcgcgaaccgcagcgcagaggcaggggaatcgtnntncacngtttggccgnnatgaagctccc

SEQ ID NO: 28553 - DNA, 446 bp, Zea mays
  Clone ID: MRT4577_126051C.1
gtggggggttttttttctttttccgttgaaaaaaaacccaaactattttttgaagaggcttaaaatccccctttcaacaggcttggtacaaaaataaattataaaccttttatttttcatgaccccctaaaccctttaacaaaggttaaaattcaacccccttttgaatttttttcccaaacataaaaaccacccccttttaaaataaacggggcccccattacatcccaaccaaaccccaaacctttcaaaatgcaccccagggacaacaaaaagggaaccattcaccccccctaaaacaattttctctttcccccttattgttcaaaccccaaaatcccttttatttttgggaaggacccccatttcccccctacaaaattattggaatcaaaatttggggccccccccctctaaaaaaaaagttaaacccacccccccccccc

SEQ ID NO: 28554 - DNA, 2744 bp, Zea mays
  Clone ID: MRT4577_126052C.1
ttcttccgccgggagtggaagcgcactggcccttcctacgggtttcgccatcaccggattcatcatcacgaagatgacggccaacttcaccgaggaggatctcaagaactctaagttcgtccaggaacacaagaagaagcactgacgaaccaggtgaaggagttgtcagaaacgcatgtttggccagccagttctgttatgcttttgaatgaaaaatttagacccttctttctcgtttccttaatcgaaatgcttgcactctatgttccatttgtaatgtaataaaaggcaaatggatgcccatccccactcccaccacaaaaaagcgctcgcacggaggcggcgccggcgcggacggacatattccattcacctcccatccatttctcaccagaagcgaaggcggaggcggaggagcggaggtaggagatctcgagcaagccggaggcagaggagatgaagacgttcgacccgtggccggtcttcttccgccgggagtggaagcgcaactggcccttcctcacgggtttcgccatcaccggattcatcatcacgaagatgacggccaacttcaccgaggaggatctcaagaactctaagttcgtccaggaacacaagaagaagcactgacgaaccaggtgaaggagttgtcagaaacgcatgtttggccagccagttctgttatgcttttgaatgaaaaatttagacccttctttctcgtttccttaatcgaaatgcttgcactctatgttccatttgtaatgtaataagaggcaaatggattgaaccaacaacaatcaacttctgattgaaaaatatcgatgtgtggcctgaatgttgtgggatcgcatctaatcctgtcgatttggtgaagtgaagattctgccatattactgcagctatttaaaaaaaaaaaaaaaaaggagatattctatatcgctaacaagaaaaaagtttagccatttattttagcagcacagacaaatcacgtttgctttcagcaaaaatgtatggaagtttattggtttgctgattaaacgtaaaaactaccagacaagtatgatatggaagaaaggctagacaacagaacagaaataggtactttcttgccagatttggatgcacacacacaagttaatgtatctattggtggaggaaagtttgtaagaggaagaggaatgggtaaagaaacggaggtcaatgaatatgaactacaaagggctgccaacataaaagaaaatttgaagaggatgagatttcttaatctccattttgagaatgtgcaaaacaaaatagagtatgcacattcagctttggtgcctacccccttcacagacagcaatgcgaccatcaaccttgattggaggttacggccaagttcggtatattacagctatactgtcatgctacagctatataggtatattactgctagacagacaaggacattagcagcttcaactaatggacctactttgcgttcaaggactgaaagggatattgttgatgaagaatctgaaaatagttacgaagaatctgaaaattccatcaatgatgaagagcaacctattgggcatcaaaatataaggaaaggaaggggcccaaccttgaagaagaacatatattcaagtagtggtgggcctaaaatctgcattacccttaatgaatatggacaaccagttggtaggaacagcaaagagtttggtaatttcataggaactttggtgaggaaaaatatccctatttcttgtgaggattggagactagttgattctaaaaagaagtttgagttatggacaaaagtgaaggaatactatgaagtggatgaatctggtatagattatgttataacatctgcagcaaaaaagtggagagagtttaaggctgacctaaagaacaaatattttgatgaaacattgagttttgaagagcttattgctaaaagggatgaaagggtgaaagaatctgattgggagtggttgataacttattggatgtctccagaagccgaggccgagcaacaaggacgccctgcgagaagagatgaaatatatgttagaacacacacgcataagaacaaagaaggggatattgtgcctctacctggagcagaaatattcattaataaatttgaagaagctgttgctgagaacccagaactgaaggacagaagtattgaagatggtgatttatatgcacatgtttttggagagaaagaaccaagaggtcgtattcgtggtttaggcttaggaccaactccacaagatgtaggcacccctggaactcaaatgaaaatatcaataaagcttcaaatggcattgcaagctcgcagtcagtctgagcaagagaactcaagggtgcatcgttcagatgaggtagcacatgattacaatggtaataaccattcacaaaatatggttgaagatgacttccaacttactaggcgagttgcaagcactatgggtcgtctaaggaatcgtgaagatgttaatactattgaagagcaaagtcacaggcgagacattgcaacaatggttggtaaagaagtgatattatattctatgatgagatcagaagttcctgttgcaatagcaaatattatctcaaccgacccaaccattaaggtgggagatgttcctcttggaagggagttcacacagatgggtcgtaacaaaaaatcaacgctgacccaaggttctacaacagcaggaaaaggtgctggaagcacaaatgatcggagttga

SEQ ID NO: 28555 - DNA, 354 bp, Zea mays
  Clone ID: MRT4577_126053C.1
aattcgcggccgcgtcgacgccctcgcttgcttcctgcaacaacggcagggaagtgaagaaggagggaggtgcttggtggtgccttgttggctcgctggattcttgcggatggaggaggaggaggccgcggcggcttttatagggggagtgaggagcgagcgagcgagagggagaggccaccctggttttgatcacatatttcacacattcacacgcactgagatagtgagatgtgaagagaagagagactagggcgccgtgtacaacctcatttcataagagttcttgtctctaagaggttaattaaaaaaatacaaaatcgtgaagaaaaaaaaaaaaaaaaaaaaaaaaaa

SEQ ID NO: 28556 - DNA, 412 bp, Zea mays
  Clone ID: MRT4577_126054C.1
aaaatctcaataaattttttgtttttttttgggaaacaattttgggtttgggggcccctttgggggggtgggttggtttttaatttaaaaggggggccctccaacgttgggttgttgcaggggagggtttataaaaaagaactggttgtttggcaacatttgttgttgtttttgcaggaaggtagccaccattgggttagccactgccaatggattaagtaactgttggcgctgttgggggtccccaacaaattttgacacacccgggtggttgaatggaaacaactgttgaaaggaggcaaaagggtttgccacaattgggtgagtaagagcgggtacattttgtggcaacaactgtggtggggggtccgtgggggcttggccaaccgggggggggctaaataaaagtagt

SEQ ID NO: 28557 - DNA, 375 bp, Zea mays
  Clone ID: MRT4577_126055C.1
gggtacctcgaggccggccgcgacttacctggacggggtcgacgggctatcaagaaggcccgtggcctaggtcaatggtccatattgcacttggtgggtgcgttggcttactatctcccccaagtgggagagtggacgtcataatttgtggtagagggggtacgcgtttgcgcggcccctaccaatttatgtaattttcaaaggttttttgctgtttcttagccctctttcaatcttaagagataaactttagtagcagcttttttagctatttgttagagctaatagtggtgtgataaaatttaggggagtgcccgtgtgttgcaacgaaaacatataatagttaagtacaaaaaaaaaaaaaaaaaagcggcc

SEQ ID NO: 28558 - DNA, 328 bp, Zea mays
  Clone ID: MRT4577_126056C.1
ccccagttcactgtctgtccacacgaggaagtgtacatcggacggctacaagaatctgtacatttctctcttttggtgggttggttgatccatcattcgctccctaccgggcggaaaacacgcacgcgacgcgaagaagggaagcaaaaacctgtgatgtcatgtcacgcacaaggaaacggcacgaaaaaaaacaggcagccccctcacgaaccgggctgcggcggcttcaccggccgcgacgcgctgctctcgccggtgccggcgccggcggcaaggcccatctcgatgtccccgcccgcgtcgtcgtcgtcatcctcctcctccc

SEQ ID NO: 28559 - DNA, 105 bp, Zea mays
  Clone ID: MRT4577_126057C.1
ctctgtctctcactgctgtcttctcaggcacctacaacagacgacaatccataaatgatcatgagatggctgctccatctatgattacaggaacgaatgagtacc

SEQ ID NO: 28560 - DNA, 299 bp, Zea mays
  Clone ID: MRT4577_126058C.1
gttcccacgcgcccgttatacacggaaacaacaaaggcggcgctgggggatttgaggggcactgccggattttcccgctgtcagcgcggacggcgcctccacgttctacttctccgaccccaaccacggatccgcccgcgtcgttttccagacgaattttggcgataatggacgtcgtggcttcaatactcataaggtggcaccctaagactgtcaaaacacaagttacaaactggagcggattggatgctacctcacaaattacttcttccggggtgacaagggttcccatcggcaca

SEQ ID NO: 28561 - DNA, 269 bp, Zea mays
  Clone ID: MRT4577_126059C.1
ggggaacggagagaatctcccaagatgggggcagactgagccaacaattactgaaagtttcctgcgaagttacttacaacccggtgccttttttgaaaacatttttaatctgatcatgggtgtcaagggaaagtaacatgacttgaccgttttgcctcaaaggccccaatgatacctacttgaatttcatttttttaattttttccggaatttttttgaaaaaaaaagatttgccacaaacatttcatgatttggggcttcttataatg

SEQ ID NO: 28562 - DNA, 587 bp, Zea mays
  Clone ID: MRT4577_12605C.1
ccgcgcacgcgtactcggacgcgtgggctcctctacagcccgcacctagttttctctcccgactccgatatgacggggcgggcctttaaggccgtaatccgtggcaaacatcgaaccaggtatggtgctagcttgcgtaagcaaatcaagaagatggaggtatttcatcactccaagtatttttgtgagttctgtgggaagtttgctgtgaacaggaaagtggttgggatttgtggatgcaaggactgtgggaaggtcaaggcctgtggtgcttacaccatgaacactgttagtgcggtcactgtcatgagcaccatccgtcccttgagggagcatactgaagcatgatcggtcgtttgtaagcatactgtggtccactatattggctgtgtagcctgtacagttctccagcatttttgggttatgctctaagatctttaaaggttgggtgcttaatattctacttgtttaccgttgtaaattcacaagttatatctgatcctattactattctgatgacctcaacattgcttctgggtttcaccctttggttggaaaaaaaaaaaaaaagggcggtctctttttta

SEQ ID NO: 28563 - DNA, 336 bp, Zea mays
  Clone ID: MRT4577_126060C.1
acgcacgcgtggagctcaccaactagccgaatctttagactttatgagctgcagaggagatgggggacgagcactagcatccacgtacgccgactacggagagcgatgattcgccccatgacactgttgctcgtctccgcctgctgcgcgctggcggagccggctgacgaggtcgatactgacggtattgtccagaacgggaacttcgacgatggcccgaccaagtctgcgctggtgaacagcacccaggtgtccgacgcgcacgccatgcatgagtgtgacgacgtccgacttcatggagtacatcgagtacgagcccaaagcgtgcgacatgct

SEQ ID NO: 28564 - DNA, 521 bp, Zea mays
  unsure (1)..(521): unsure at all n locations
  Clone ID: MRT4577_126061C.1
acaagcttttttttnttttttttttttttttttttttattttttttttttttttttttttttttttttttttttttttttttttttttttttttttttttttttttttttttttttttttttttttttttttttttttgggggggggggggggttttttttttttttctttgttgctcctgcttggggtgcgttttttcctccttctccctttgggcagccttcccccctccccctagcccccaaaaggtttttccttcacccaacgggctgttgctgaaccctgccgctttttttcatttaccccttttacctttttccccttttcggtttgcccccttttaccagcaacaccttcttccttttaaccaaaaggcccttcttaaccccgccgtttttttttatttgccccttctactgcctttggcccagaacgacttttccggggggggcctcttgttctccaagacacagaggcggggttttcccatcaacatggggggtggaggcaacacccttttc

SEQ ID NO: 28565 - DNA, 434 bp, Zea mays
  Clone ID: MRT4577_126062C.1
cattcttcttttttttttttttatcttttttttggcgtaaactagttccgaaagatcacccccccccctacaaaggctcccaacacaatggcccacatttcccccccgaaaaatttctctccgggccccccgaagggaaaaaaccaaacccccgccctcttttttttaacccaaaacggggcccttcgggggacccccgctgtcggggacccttgacccggcccttttcctctggccaaccccaacgcccccccccccgggggatttgccccgcccgaccccccccccgtagaactccccccggtttccaaaaaaattaacacccccaccaactgtcctgtggctttgggccccccctcggggaaaaagttctttgcaccaaccactccaccttctttaaccccggggggggacccttttgcccgtttatgccc

SEQ ID NO: 28566 - DNA, 340 bp, Zea mays
  Clone ID: MRT4577_126063C.1
actactgaggcgaaatctgttgaaatgcaccatgaggctctgcacgcggacaatgctggtgacactgtcggactgaatattaagaatgttgctgtgaacgatctgaagcgtggctctgtcgcctccaactacaaggcggaccatgtcaaggatgctgttagcttcacgtactagggcatcatcatgaaccaccctggtcagattggcagcgggtatgccccagtgctgtactgccacacctctcacattgctgtcaactttggagggctcattaccaagcttgatcggcgatgtcaccaacagcttgagaagcagcccgaattcctcaagaatcgggatg

SEQ ID NO: 28567 - DNA, 590 bp, Zea mays
  Clone ID: MRT4577_126064C.1
gtccatccaaccctgcatccgcctgcccatgcgcagcccatgccacaactcgctgcaccagctacaagccaaccgcagcaatcttcctttccgtctgctgcgacttcctcaagtgccttttcaacttttagcactccggcttctgctccatcctcatctagtctgtttgcaactccaacaactccagctccatcagccaacctttttggtgcatctgggtcggctcagttgaccacaccatttgggacagcctccactccaacattggcatcaacacctgctcctggatttgggactagcactacatctttgggtggaacatctctattttctacaccatttggaggtggggctacagcttcaggttccagctttggtggtgcatcgaaaggaaggtcgaagccccggggacgacggtagatgtaaatgtggatgctattgattctcttgactgttacttcgtccattttatgcagaaattgtaactaatccccgcccccctcaaaaaaaaactagtggagttttaggtgacttattgcatgcttactactctaacctttttgtactagttgtcataaagttttaatccc

SEQ ID NO: 28568 - DNA, 390 bp, Zea mays
  unsure (1)..(390): unsure at all n locations
  Clone ID: MRT4577_126065C.1
gcgtgcgctcacatctccggggggggggggcgccacctctagagggtcgtggtggtgagcgtcagtctttttgtggccgctttgctttgctcgcatgggggatcatgtcgcgggggatgtcgcggagctcttttttctttttttttcgaggcagcgcntcttgtgttcggggggctggaccaaacannagcgctccttggaattcttgaggggggggggaggcaccccgagggccgggggaagaacctcgagatcccctgcgcttgcaaccgcggcctcaattgtgctcgcactgaatgtgtgccacgcttgtgcaatccgataggggatacaatctgcgaactctcccttgttgttctgcacgcctggttacactgccccaacccaggg

SEQ ID NO: 28569 - DNA, 363 bp, Zea mays
  unsure (1)..(363): unsure at all n locations
  Clone ID: MRT4577_126066C.1
ggccgaccgacgcgtcctgtcaacattgcttattatgctgangcttactttctccttatttgaacccatcgaacggctggtctcatcagactcattccgtgaatctcactccctcacccaacgctccatattccacactcgccttgctccccatgcatcaaccgcttgtgctcctccttctcttcttcatcagctctgccaaatatgccgtctcctcccgcgcctacgcctgtgcgtctacctacattctctatctgaacccctcgctcaagccgttcccctacaccactcacctgcactggcaccacgcgcaccttgactccctctcccttgaccccgtgcgccaccttctctactcttaca

SEQ ID NO: 28570 - DNA, 354 bp, Zea mays
  Clone ID: MRT4577_126067C.1
tttgaggcagcggggcgcagcatcccctaaaaataggagctaacggatggagctcgttgtggcacggcaacgcgactacggaacaaataggagagcctcggtccgacctccaatatgagcacaaggttctcataaatccgagcatgagaggacgacctttttctttcaacggtttaggctctctcaatggggaaattcatgatctgcgcaagacatccttgatatgagtgtggcatgtcattctccaaactgcatgacatacaagacttcagaggagtccggtgccagagcgaaagaggcactggatagagaaccccaacacgtaaccccagagcaaagacacaacctttcatg

SEQ ID NO: 28571 - DNA, 365 bp, Zea mays
  Clone ID: MRT4577_126068C.1
ctgcccgtgccgagccactcgatcagaaggaccggagctagcggagaccgatcggaggccgtcagctataggcaagcaagcgaatgacgctgcccttgtttgccccagcctgaaggcggtgaccgcggacgacgcgggaactggggaatctacatgcgacaagtgggatctgagcgcgtgcgctcccacgttgtttgaaccggccatcactctggggggctatgcgtcgcttctcacgcataactctggcctgatcaagtactagcgctgccacacggaccgggcctacatgaacggtcgcctcaggcatggcttctatctcgcctgcgggcgtacgcacatgaagtgctgttggacctaaaggc

SEQ ID NO: 28572 - DNA, 182 bp, Zea mays
  Clone ID: MRT4577_126069C.1
tttattcgtccggaacacgctgagcgtatacatgggccacatagactacccgccgggcggtcagaacccatcacacacgcacgagatcgccacgaataacatctacaacctcatggggaacgctcgaggatcgatacataaccaccgcgaacgcgctcttcaccaagaccgcgatcaatggc

SEQ ID NO: 28573 - DNA, 165 bp, Zea mays
  Clone ID: MRT4577_12606C.1
aatggatcctttgatgcactggttctcaatccgtaatgtcgtttttgccctaaacctgtctagaccttggatggaaacgccgaaacaactaaaaagagggcggtcttcctctgcgctgacactgaaagcttcatcaggatcatacaatgacaaattttcgacgac

SEQ ID NO: 28574 - DNA, 299 bp, Zea mays
  Clone ID: MRT4577_126070C.1
ccgcccacgcgtccggttcagagcatgtgtgttcactttattggagtatcgttggtgacatgtagtttgtggactctgtgttgtaatataagttaattgcctacctcttcctattagtttaagcttttgggttgaattggttgttgcatacaacttaatatgatacatgagccaaatgtcatgagttcgaaccctggttagcacaattaaaattaaataatggttgcttgctcctattccacatctgagactaatagaggctcggcgtgagggagagtattgtcttataagagaaattg

SEQ ID NO: 28575 - DNA, 411 bp, Zea mays
  Clone ID: MRT4577_126071C.1
ggtcgaccttagcgttcgttgtcctactagcaccggcacccttcttcgacctcccctgctctgaatgtcaggcgcccattgtctgaaacaaggttcaagctcgaggacttaaggctgggggttttggtcctgaacggggactcacacctatgcctatcatgcctgaggactgtctatcctagcaaccgcctcagatcgcgaccttgatctcctaagagcagctttcctgatgatggctatgtgctagttctctgtgccgtcaggcacggcagaggcctccagaatgaagacacgtttgagtctgccaaaactatcgcgagcctcacggatggcaggatgttggacatgggagaggatgaccaagcgaatacgaacgcgctgtgtgttcgcacccgcgagagcgagcacctg

SEQ ID NO: 28576 - DNA, 240 bp, Zea mays
  Clone ID: MRT4577_126072C.1
gaggctcggccgggggccttctgccttataaaaccgatcgcccagggccctttcatgttcaatctagacggccgttgctctatgtctctatattcagtccccgcgtgaccccgtgccgcgcgggtccgtaggtggtcgcgcccaccctcgccctgcctcctcgcggctagtgaaggcgtgccccacacgcagctccccgggctgttacagtgtggaaccccgtcacagtcagcactgtca

SEQ ID NO: 28577 - DNA, 304 bp, Zea mays
  Clone ID: MRT4577_126073C.1
acacacactctgtcgccttcgccgactcctcttctagcatcatctcgcacccttaaccctacgcatcgtgtcacatctcagccgtcacgggggatttgatgctcattcaccaacaacttatagtactcagcgcaagctaccattattacaacaattcatgacagccagcatctcaagcacatactgacaactcaacctctattagcgctgcaaatggcacttgtcacactaacacttaccttagaacttttccacgccaacgaatttcatcacttaccccttatcaatcttatatcgcgccctt

SEQ ID NO: 28578 - DNA, 613 bp, Zea mays
  Clone ID: MRT4577_126074C.1
attgggtacctcgaggccggccgggatccgatcttcagccggcgcctcccacgtctccagacagacactccgactcactccccgctccccgccctgccctggacaatggccgcctacctgcggacctcggaggcctgcgtaggcttccggcgatttcgcctgcgtgcgcacctgttctcctccgcctctccgatcgcaatgaacgcgcgtccccttactacgcaggagcttccactccatgagcacgagctacgctgtacagtaagagacggacctgtggaccactgcacccgtctccgtcatcaggtgctggcaacgatgatgactccggaaccctcatcggcgatgacctagcagaaggcaagaatatcaggtgatcagacgcgaacccgagaacactcgctcctgattggtcgagccgttgaggagattgaggcgttgaaaatggctctcataggcgcagcagaaaaagagatctcggggagagttccgcgacaggagcgtgcctggcagataaaggggagagcttaatagggatgtcgacaagaagatggtgacgggtccagaaatgcgcgaaatcggagagtatgttgccagagatcaagcttcaccc

SEQ ID NO: 28579 - DNA, 783 bp, Zea mays
  Clone ID: MRT4577_126075C.1
aaaaaaaaaaaaaaactgaactcaaaccaccggcatcagtcactcctcttcactcctaaccagcgagtaacactccaaacagccaatggcgttctccaagcccctggcggctctcctcctcgccgtggcgctggcagcgactgccatgtccgccgccggtcaggatccccaaaactgcaagccgagccgcaaggtgacggtgcagaacctgtgcggcaaggacctttacctcggcatcgagccgctggccaacagcaagctcctctacagccctggctacctgctccgccacggcacccacgtgtcgtacgacgtgtgctcgtggacggggcgcgtgaaggtgcaggacgccgtggtgacggagttccacatcgggtacgacggcggggcgtggtaccaggtgagcaccgaccagtcgcacatgcccatccgtgtctccatcaccccccacggccaccccctgaaagaccactgccccaccgccggctgcaacagcggtggccactgcttcgagcactccgtccccggcggcaagtgccacggcgtcgacgagatcaagatcgtcttctacaacccctagatccagctgctgggtgtgtttaataagtttgcagctcggtgatcttagtcgtattgcagctgctagtcagtgaatcatctgctccaacgagctattgtcgtgtcgtgtcgtgtcgatttactgttcaattagtagttgcggtggtgaatgtgtgactagagatgtttcatagccgtgcaatgaactgcatgtcgtcagctctg

SEQ ID NO: 28580 - DNA, 356 bp, Zea mays
  Clone ID: MRT4577_126076C.1
caaagatggtgagctagaggttgttgggatggtgaagtttgcttaccaaggtccattcacattgtctggcattaaactatgccccgccactgatggcattgcccaatttaatgaagttggccataccttctccagtgggagttacctgtgcatttaataggtgctgctgcgcagaagcaggccgattgctgttgactgtcaggaggatgcaggtgacaattgagctgtggctggtagcatggcctagtaaaaatgtggtctgttggagcatgcaacaaggtttatgtaaacttgttttcttatagaaaccagtaaaagttgctttgtcaaaaaaaaaaaaaaaaaaagggcgggcc

SEQ ID NO: 28581 - DNA, 450 bp, Zea mays
  Clone ID: MRT4577_126077C.1
ctgttcccccattccgttgtgccaccaccgggggcgtcggagtgtgtcggcgccgattccactggtatggcagcaccggccgggggagcggtcatagtgtaggagacgatggccaacccgaccgagtcggacgactacatgatccaaaacggtcggggctacgtgaggccttactacttcgagttcatactctcatgtgaagaacagatggactggaaagaccatatgatgacctcttcactgatgagtgcaaagggcgttcccgcagactactatgttcatgcattgaagtacgggaggcttcacgttgatggggatatggttcacacagactatattgagaaatgatcacataagataagccacttgttgcataggcacgagccacctgtcttggcggatgatattgcaacacttaggaacgaaggagctctacgtactatttgcaaa

SEQ ID NO: 28582 - DNA, 333 bp, Zea mays
  Clone ID: MRT4577_126078C.1
cttcgctctgaactatatcgggctacaactaatatggcgaggaagcgcaaggccggcgactcctccaagggtatcgacggcgcccactctctgccaccaccgctggctatggatcaacagtacgcgtgtgcatgggcatctgaccgacggaactagcatggccgcggcggctgaagcggcggcggcgcagcatcagcggcggagaaggaagcggttcgtgggtgtgcagaagcagccgtcggggcggtgggtggcggagataaaggacaccatccacaagatccgcgcgtggataagcacctttgacacggtcgaagaagccggccgcgccta

SEQ ID NO: 28583 - DNA, 854 bp, Zea mays
  Clone ID: MRT4577_126079C.1
caatgattcacagagatgggagataatttgcaagttgtctatcggcattgtgaaaggactggaccaccttcacacagcatcgcagaaaccaatcattcatggcaatctgaaaacaaataacattatgcttgacgctgatttccagcccaggatatcagacttcggcctctaccttctgctgaaccctgctgctgcgcaggagatgcttgagacatctgcaatgcagggttataaggctccagagctgatcaagattagggatggcaccagggagagtgatatctacagtttgggagtgattatgctcgagatgcttgctcagaaggaggccgcaaatgatgaatcgccaaatgcgcgtgacatccatttgccggtctctttcagagatctggttctcgagaggaagatatctgaagctttcagttccgagcttatcatacagagcaagaattctgggaaggagggcaatctgaatgcctactttgaattggcaacggcttgctgtaatccatcatcgtcattgagaccagatacaaagaaaatactaaaaaggcttgaagacatagcaagataacaatagatgcgcgcggcggtgaggctccagtctgtttagaaattagaaagtgtggtgtgttatagcagcggccagcaggatagctttgacgtcccttgtattgtttgttacttcctgcatacagcagatattgtgttgggggcatttggaaaatgatcctaacataagctaggagccccaagcatgtatagaaaagtatatttcccacgtaccaacataggaactcatccgagaacataatgtgtgtgctttcagcgtggaattttcataaaatttcctt

SEQ ID NO: 28584 - DNA, 304 bp, Zea mays
  Clone ID: MRT4577_12607C.1
acacaacgtcttcagatccagatacatcgcgaacgtcaggctggtccacaggctcagtgtacgcgggttcaccttatcacgggagacgtaacgatatggcgacgtcgatccggcttgcgctgatcgagatgaaccgcgccaccaactgcggaactgcgtatacgacgacgacagctgctgagctcgtgcgctcacagagcaattaccatgtgcgatcacgttacctcaagcagtctgcgtgtacgacgcacaactgggaccgcgctgtgtccagcttgtgagaagctcactgggaagacgatca

SEQ ID NO: 28585 - DNA, 382 bp, Zea mays
  unsure (1)..(382): unsure at all n locations
  Clone ID: MRT4577_126080C.1
cccggtgtcgnacccacgctgtccggcaactatatgtgcgcctgcagcggnattaggtggtagtcactttattgactgccaaagagtgacatgatggtgtgttgggccttagcttattactttgagtgttgccatgtggccccggttccctttatgttaccttgcgggaaggctgaaggtctggcttacagcgttttatggaacttcctggcagggccacttgttcgatcatgccacgcactcttctcgcacncgtgcagnatcaatgttctgctcgcagnaatttctgcttcattctattctgcctcttgcgctacatgaatagaatccgtgctcagtaggtatgttcttgctttcaggaatctcttgtaatcacgccttt

SEQ ID NO: 28586 - DNA, 258 bp, Zea mays
  Clone ID: MRT4577_126081C.1
tagaaatcataaagaatggcactaaagtctggataaagcagaagtacagaacgacacgtaataacataaaatgcgagtgcctaatctatagtcttgtattttacttcatgatattaggaggtggtactaaaactaaatactgttggtttgtttttgtactgtaactcagaattagaaccaaattgctgatctcatgctcgagagcagaagctagagctagctaaaacagaatgcataccttacgcgactcaatggtag

SEQ ID NO: 28587 - DNA, 556 bp, Zea mays
  Clone ID: MRT4577_126082C.1
gccaactggcacgagccgcgccgcaacgtcacgctggcgtacgagggcgccatggccgcgtcctacctggtcggcaccgcgttctacctcgcccgggtgcccgagcgctggcgccccggcgccttcgacctcgccggccacagccaccagatcttccacgcgctcgtcatcgccggcgcgctcgcgcactacggcgccgccatcgtgttcctcagggctcgcgacgagatggggtgcccggccagttaggtgctcagacagtacgggcgcgccggccggatgcttgcccgcgacgacattatatttgcgggcggtgtccgtccagtgatcgatacgatatgatgattgggaaagaagaaactaaaccatatttttttttgtttacaccttttccttacagcagcagcagcaagtgtgcgagattcatcgttaatgacagagagttgattggcgtcagtcacagattccttgtcaatttgtacatagacgaagctcatcgagtaatgattgattaatacattctttcgatcggtttaaaatgcaaaaaaaaaaaaaa

SEQ ID NO: 28588 - DNA, 243 bp, Zea mays
  Clone ID: MRT4577_126083C.1
tctagatcgcgagcagccgccctttttttttttttttttttttatttgtaaacatagcattttattaacaaaatgtttacacccttcttacaacaaaacagtgatttagcatgttatactctataaaagtgtattatagaatattcaagctaaaacaatattatttaaaagtatggcaaatcaactttcatttgcaaactatctactatgagcataggcatgaaaaaaaaaaaagggcggccg

SEQ ID NO: 28589 - DNA, 460 bp, Zea mays
  Clone ID: MRT4577_126084C.1
tttttattatttttttatttttttttatttttttttttggggttttttttatcttttctttcgtttattttaacatatacctattaatggggcacggaaaaggcccctcataatggggcaaaaaaacacagggggcaaaacataaataactcgggcaaccaagcaacagggcaaaaaaaaacacccaacccaaaggaggtagcgagggggaacccccggccctggaaaaattatctctggggggaaaagggggccctccaaaaaaaaaaaatattttgttgggggggcaaaattaaccgtccaaacccccgccggaatgggaaaaaaagggggtcttgcacccaaaaagggggttataaatatatttctaaacacaaactcgggggatggtattgttccaccacgaaaaaaagcccttggggggtctttggcaggccctaaaaaaaaagagggggggggg

SEQ ID NO: 28590 - DNA, 455 bp, Zea mays
  Clone ID: MRT4577_126085C.1
agatcgggctcgcaggtatgacctacatgtggccattttttgttaatcttttaaactgaagcaaaggttttcccgtgagattttttcccctggttgtgtcgcggttaggcgtaatggatgcctcttttgcttctcgcatgtgcttgtttttccccgcgtgtagcaacctttgcttagcattcataaaaaaatgtcgtcgtccccatatttggatagatatatggatctaattaaatatcttgtgcctatcataatgttcacgttgctagcagatttaaaagggggtagtggggaaacaccattttccgttggtcaagcaattaactcgcctgagttagtgtgagccattgcttgctttactgccacacggggggtcttgttgcagttatgcagctgtctgatttgtataccttttcttgtccggagattaagtcggtctgtccggtgcattccca

SEQ ID NO: 28591 - DNA, 281 bp, Zea mays
  Clone ID: MRT4577_126086C.1
acgcggacgctgggctgttccgaatctttataacaaaatctgtacccctgaatgctgttgatgcctgaaatgctttcttgccatgtaaatggtaatagagtgtacattgtgacttggctccttttgtatccattatgaaacatcagtgaaagggcacgagagactggatgtggattctggctgagctgtttgtgaataatacatattgtgaatacagagaagatagggctgccaaagacaatctacatcatttgacttgatataggcaaagagcctttctt

SEQ ID NO: 28592 - DNA, 436 bp, Zea mays
  Clone ID: MRT4577_126087C.1
aaaaaaaaaaaaaaaaaaaaaaaaaaaaaaaaaaaaaaaaaaaaaaaaattaaaaaaagggggaaaataaaacgggcggtgtataggtttccattctttctttccctttcattcatcttattatcttttctatattgtcccctcaaactcaatttattgtccttcgtttccctccatccactttgggtaacctcttatattccccactttattcaccttgctttccttccccctttttccagttggcgttcttccccattagcccccctccgatcgcccttcctacctgtttctcatctggaattttctttgtaacgttcctttttatgtctcttttagcgcctctccttttgtggttacccccacctccgccgatttcctttccttctcttttttcccctctcttttccctttttcccttcttttctttcttttt

SEQ ID NO: 28593 - DNA, 422 bp, Zea mays
  Clone ID: MRT4577_126088C.1
ggatgggcagcttgagacctgttgctacacacttgtctgaacttctgggtgcagaacaccttatggccaatgattggattggttaggaagtcgagaacttggctgacaataaaccagaaggcggtgtactgctcctagcgaatgtaagatattacacggagaccgagaagaacaaacctgactacgctaacaaggtcgtatatgctgctgacctttatgggaaggatgcttgtgggacggctcagatagataatgcttcaaccgaaagagacaccaagtgtttcaagcctgcggctgctgctttcattatgaataaggaacttgactacctggcatgagctgatgccaacccaacgataccattggccgacattgttgatagcctccagggactaactaacattggtgttgtcgaatccttg

SEQ ID NO: 28594 - DNA, 370 bp, Zea mays
  Clone ID: MRT4577_126089C.1
cgcgcgggtcgttgctgcacgctatagtgagtcgctatctagcgccgacgagatgccgtggggcgcgtcgttgccgtaccaggtcggcccgccggccacgcccagcagcaccagttcggcgccctgccccgcttgcgcggctggcgcggccagcatcgccgccacgcccagcgccgcggcggcgcgacccagccagcggcgcaggccgccgactgccgaacggcgcgccggcaagcctgcatgcgccacgttcacgaagcgcttgccggcctcagacatggttcgtctgcggcagcacggtcaaggccaccagggccagcacgcgggcgcccatcaggatacagcgccggcgcgaaggccacgccggtgg

SEQ ID NO: 28595 - DNA, 759 bp, Zea mays
  Clone ID: MRT4577_12608C.1
taaaatgaagggactaaacattagtctctagaaaccaaacacaccctaaagcacacaccagagcttcaacctttcggccaactgtgaattcatatatgccatctgttctccatttcttgtgagatatacgcggcactatatttgcagtaaatgcatgtcgaaacattaggtttcagcttttatatgacactagtccttagcaatgtttacttgctaccatctggattctgatacctttgccatttaaattttgtaaatgtgcaaaagatacgcatggtcatatagcgaagtggatatcgcgttagattccgaatctaaaggtcgtgggttcatatcccactatgatcaatacgtatctgtttgtttttatttttattattgtttctgtttttggtctgggctgaaagtgacattttggcatcatctgtccagtcttgcactcttgcttttgcttgtgaaaaagatggtcccactcccgttaggcttgctgccttcagtgagaattgtcacggagtgcagaaccgttgcagcgctgacgttttatgggcctgctgttgtatctaaatacaggcttgcatgatattagagactattagttcatagcttgtattctttttgacaattgtaacatgctgcctgcttgtaactggtgtacttggtgttcgtttcatcaaatgttgatactcgttaaaaaaaaaaaaaaaaagaaagaatgtaggttaatgcgaggtagtggcggtggttgtgtgtggggtgttt

SEQ ID NO: 28596 - DNA, 3170 bp, Zea mays
  Clone ID: MRT4577_126090C.1
cattgggtacctcgccttccgaacggccgcagggcacaccccgccgcctcaaaacctcaggcacaagcttgcttcttttcctcccccattaatctcccccctcttgttcttcctcttccccatcagtctcgccgccattcccctgtcctgctgctgctactgctggttagtggttccccaaacccaagccttcgattcgcccgcccccgcgctctcgagccagccttccgcgccgtcgtggttgctttacgcgcagctatccatggatgaggtccctgccaccgccgccgtcctcgacttccgacccggctcttctgtaccacgcgtctccgccgtcccgcgccgtgccgtgcagtgccccccggacaccggcggtgcagaggcggcgacgggaggtcgtccaggtatcgggaacactgccgccgtttccgcggagttgacggggtcaagttcggccggtcccgatatccaggctgaggattgcgatacatctggaggccttgccggcggtgacgctggagacgtgggggttttgtgcttagagaacgctgccgagcccgaatcggtggaaccaggtgtttcggacgtgaggttgggagctccagtggaggaacgccatggcaggacgctggatagtacgggattgggctctggtaaagctggtgagaccaatgagatttcactggttgaggtgtcccaatcaggtgccacttcaagcctagatgccactgcgtcgattggtggtggctactccctcgtggaggggtctctgccagaggcgagtggtgcccgcagatgtaaacctgaggtccatgaagtaccaacagggacccctgcaactgtgggattcccgattgaggacggtggctatggatttggaattgggcctaatgacgatgtggacggtagaaacgaccctgccggaggggaatgggaaccgcctactgatggcaatgatgccgaggacgtcacagatatgggtggaatcttgtgtgacgaaagagtggagaggatggagacgaattcggtagaacgtgaggcctcgaatggttccaccgtttcttctgaggaaggagtggacaggatggggacgagcttggacgactctgaggcttccgatggctcaaccacacaagattctgatacagacgtcgagaccgagtcaagtgtttctagtatagaggagcaagaagcaggatacggagcccacatccctcaaccggatccagcagtctgcaaggtgtccaaagaaaacaacacggcaggagtgaagatctctgataggatgacttcagtgtctgaatcaacacttgtgctggcttcaggtgcatcaatgttaccgcatcctgcgaaggtacggacaggtggtgaagatgcatattttatagcttgtgatggctggtttggtgtagcagatggagttggtcagtggtcatttgaagggatcaatgccggactttatgccagagaactaatggatggctgcaaaaagatcgtggaagagacccaaggagctccggggatgagaaccgaggaagttcttgccaaggctgcagatgaagcacggtcccctggttcttccactgttttagttgctcactttgatggcaaggtccttcacgcatcaaacatcggagattctggattcctcgtgattaggaatggagaggtccataagaaatcaaacccaatgacttacggtttcaatttcccgttgcagattgagaagggtgacgaccctctaaaacttgtacagaaatacgccatctgtctacaagaaggcgacgtcgttgtaacagcgtcagacggtcttttcgacaacgtctacgaggaagaagtggcaggcatcgtctcgaaatcattagaagctgatctgaagcccacggaaatcgccgatttactggttgcccgagcgaaggaggtggggcggtgtgggtttggaaggagcccgttctcggactccgctctcgcggctgggtacctgggctactccggcggcaagctggatgatgtaacggttgttgtatcgattgttcggaaatctgaagtttaataaactagaaacgaactcgcaaagttgagcgcacttcttttttttttcttttcttttttctcttcttgcaacagctgcactcgctggcaaaatgcccgtgagcatttcgcacgtccctggcctacgcgcccaggcgcattgcgaaacgtgtattgtgtacacttgatacatactataaggttgtataagtaaataaaaaaaaacaaaaacgctcacaagatacatatctcggtacatgatttgtggtcagactggggtaaggtacgggcggagcgcatgaactcgggtgagtgagcccagctcacaagatccggtacaccaacagagtcgcggcagcgaggaaggtgaaggcccgtggtggtgccgagaggccggcagcggcggaacgcgctggggagggcgctggagcgccgctggtctggctccgggttgctgccggtgatcccgaaggggttgacggcgacggcgtcggcgactgcccgaagtctggggccccggacgagggagccggaacaggagacgcgctgggcacaccaggaacagaaacgtggcacttgctgacgggcggcgtcttgaccttgcacgcggcgggcagctgcagggccctggtcatgttgagcgagaggccgaagtcctggccgccctggaagagctggcagaggcaggccacctccccgcgcaccacgtccctgagccccgagcagcaggacgggtcgggcgccgccgccgtgctcccctcctgcacgtagcccaggcaccccgccagccccagcagcgcgtccgtgcagtccgccgacggccccggcgccggcgccggcgttggcgttggcgtggaggcttccacgcgcgtggtggctagtagcgctgcgactgcgagcgccaggaccagcaggcgcgagcgcgacggacggttcgccatggccgtcgtccgagccgctgcgcgctgtcgcggtggtgggttcagacgttcagcggcagctatcggcgcgaccagagtaccagaccactggtgtgtctggttctcagcgcgtgcgtgctgtgctacttgtagatgatgcactagcagctagtagcaggcggccggggtcgcggaatgtggcgcggcaatcccggccgg

SEQ ID NO: 28597 - DNA, 1520 bp, Zea mays
  Clone ID: MRT4577_126091C.1
agtcctccggtcctcccctccccctccgacctcacggtttcgcagccgcaggcaaagatgaagaaggcgtctgcggcgtcgcgctacgcggcctacgactccccgtccccgtctccttcgccgcgccgtgcggcgccttccgcggccgccgcgaccccgggaggagcgcacggcagcagccgcgcattggtggtcgcggggagatctggccgcgatctactgggcgccaagccgcagccgcaagcccacggcaacctgggctccgtactacggcggctcatctccatggacaagaagccgcccaagaaccagctcccggtccctcctgccgccgccagcgcagcgaagaacaacggtggcgggaacacgcgtccgcccacgcgtccgctattccagaaagcctcgtccacagcggcggcggcgccaaggaagacgaaggccctgacagaagtcaagaacagcggcaacaacgccaacacgcggacgctcgccatggtgctgcgcaccgagcgggagctcctggcgcagaccaaggcgcaggaggacgagatcgccgcgcttcgcctgcagctcgagaacaaggacagggaggtggagcgtctcaaggacctgtgcctgcggcagcgagaggagatcaggacgctcaaagacgccgtcctgttcccggacgcggagccggagcccgaccgccgcctccgggacgagatttccacgctcaccgatcagatccagtgcctcgcgcaggagctcactcaggttaaggctgagaagcactctacaagatcgtgctttgacgaggatggatactgctcttcccctcggacgccggggtttaacgaggagaccgctttctctctggagtgcagcattggggaagcagagacgccgaactatggtagcccagatgaaatgttcagcaaggatcttaatccttgtctgaccccatgcattgccaagagcaaatctgacgtatccgcacaattccagtcttcctcccagttcacaaaggaatctagcagttcttatcgcagcagcggcaaggcaagggcagaccgctcttacagttcttttggcaggccaatgtcaaagagctatgatcatcacaaacctgcctcaggaaccagcaacaagcgacgagtatacaaatccaaccaagacaaaatcaaccagaacctgttttgagctcactatcatcgtgaacttgccaccgaaggcagcctccagcttctgctatgtgaaatatttagaagaatgtggacttttatggtctatggataccggtttgagaccgtgagaaataacaatgctcatggtctatcagtgaatgcaatctttggtttgtgttttttttttgttgttctagcttgcccagctgtttggaataccagtttggctctgccatgtcatggttagatgaatgtgcagaatcttttttattttcaaaactggttacgaagatatttggatcacggcctatgtcttattagctgcatatggagcatatggcaatgtgatatagc

SEQ ID NO: 28598 - DNA, 562 bp, Zea mays
  Clone ID: MRT4577_126092C.1
gactactcatgtatcgtatgtctcacgaaatactacatccgttctcgaaaaaaaaaaaaaaaaaaaaaaaaaaaaaaaaaaaaaaaatgggggtatgaaggccatagtcccccattaatctcccccctcttgttcttcctcttccccatcagtctcgccgccattcccctgtcctgctgctgctactgctggttagtggttcctcaaacccaagccttcgattcgcccgcccgcgctctcgagccagccttccgcgccgtcgtggttgctttacgcgcagctatccatggatgaggtccctgccaccgccgccgtcctcgacttccgacccggctcttctgtaccacgcgtctccgccgtcccgcgccgtgccgtgcagtgccccccggacaccggcggtgcagaggcggcgacgggaggtcgtccaggtatcgggaacactgccgccgtttccgcggagttgacggggtcaagttcggccggtcccgatatccaggctgaggattgcgatacatctggaggccttgccggcggtgacgctggagacgtgggggttttgggc

SEQ ID NO: 28599 - DNA, 1677 bp, Zea mays
  Clone ID: MRT4577_126093C.1
cattgggtacctaggggccgggccgggacatccctcaaccggtatgtgtttcgtgccaactgctgtaggaagtaggatccagcagtctgcaaggtgtccaaagaaaacaacacggcaggagtgaagatctctgataggatgacttcagtgtccgaatcaacacttgtgctggcttcaggtgcatcaatgttaccgcatccttcgaaggtacggacaggtggtgaagatgcatattttatagcttgtgatggctggtttggtgtagcagatggagttggtcagtggtcatttgaagggatcaatgccggactttatgccagagaactaatggatggctgcaaaaagatcgtggaagagacccaaggagctccagggatgagaaccgaggaagttcttgccaaggctgcagatgaagcacggtcccctggttcttccactgttttagttgctcactttgatggaaaggttcttcacgcatcaaacatcggagattctggattcctcgtgattaggaatggagaggtccataagaaatcaaacccaatgacttacggtttcaatttcccgttgcagattgagaagggcgacgaccctctaaaacttgtacagaaatacgccatctgtctacaagaaggcgacgtcgttgtaacagcgtcagacggtcttttcgacaacgtctacgaggaagaagtagcaggcatcgtctccaaatcattagaagctgatctgaagcccacggaaatcgccgatttactggttgcccgagcgaaggaggtggggcggtgtggttttggaaagagcccgttctcggactcggctctcgcggctgggtacctgggctactccggcggcaagctggatgatgtaacggttgttgtatcgattgttcggaaatctgaagtttaataaactagaaacgaactctcaaagttgagcgcacttcttatttttttcttcttctttttctcttcttgcaacagctgcactcgctggcaaaatgcccgtgagcatttcgcacgtccctggcctacgcgcccaggcgcattgcgaaacgtgtattgtgtacacttgatacatactataaggttgtataagtatatttgaacacggccctcagtaagctgcgagcccttcaaatgaacatcgtgatgtacttactcagcggcagcgaaatccatgaacagccgcaggttcaaaagcagtgctactaaaacgaaacggaaacgctcacaagatacatatctcggtacatgatttgtggtcagactgggggtaaggtggtacgggcggagcgcatgaactcgggtgagtgagcccagctcacaagatccggtacaccaacagagtcgcggcagcgaggaaggtgaaggcccgtggtggtgccgagaggccggcagcggcggaacgcgctggggagggcgctggagcgccgctggtctggctccgggttgctgccggtgatcccgaaggggttgacggcgacggcgtcggcgactgcccgaagtctggggccccggacgagggagccggaacaggagacgcgctgggcacaccaggaacagaaacgtggcacttgctgacgggcggcgtcttgaccttgcacgcggcgggcagctgcagggccctggtcatgttgagcgagaggccgaagtcctggccgccctggaagagctggca

SEQ ID NO: 28600 - DNA, 310 bp, Zea mays
  Clone ID: MRT4577_126094C.1
gacacgacgcctgacatttagcgagtctcttgacgcaagtcgagcttccttcttgacacgtcaacagttgctgcctttgtacaagcagcttgctgctaaccccgcaaccgtcttacaactacaacaatgcttgcactctgctcaacttgctttgacaaacccatccgtctcataccaacaacacatcattggtggtgccctattttatatcgaatattagctgtaattcactattaaagctttcaggatgatgtatgcggccaaccagaaatacaaagctacattctcagattctaacgtgatattggtc

SEQ ID NO: 28601 - DNA, 558 bp, Zea mays
  Clone ID: MRT4577_126095C.1
gaggctcatccctccctcccggggtggccttcttcccagccgccagccacccctctgctctctcctccatccgcgccgcatcaccgtgtcgcccctggatccgcgccgccggtcctcctcagccacgacaccgaacgtcgccgacgctctcctctcccgctcccccgcgccgctcgattccggcagggaggagtccgccggcgacgcgagcccgaacgcggacagcaaccaaagcgccgagcacagcctgccggacagcctgttcgcgtcgccgaccaagttcgcggccttggctcgcgaccctttcgcgcccatcgacccggagatggctgcctcgctcggtccaaacgccgtcggttccttcgctggcatcagcagcggcgaacgcctgccgccaacgcgcaggtcgctgtcgccggcctcgggcggcgcttgggcccctgccgactgacggcccgcagccctcgccctccctgcgtccggcgccccacgcctgtggtggccgctggcagaagcacaagcccacccctccctcccagatccgtcgaccagtgacgc

SEQ ID NO: 28602 - DNA, 299 bp, Zea mays
  unsure (1)..(299): unsure at all n locations
  Clone ID: MRT4577_126096C.1
tcgcgtacgcgtgggggcccctctnnanccggggcgggtttaattagaaattggtgtgcgtcaaagtaaaaggacagtatgttgagggtcactattatctcaatgatgttctcaagtccaatgtacaatgtttaaaagataaggaaacgtcatgtcatgattaggcctttatccaaggtgatcataaagatctagacggtcatgcagagtcatggttacattggcgagttagagtacttggatgaccacatagctgagaagattgttgttgtgatgctgaatggaagactgaataaatg

SEQ ID NO: 28603 - DNA, 173 bp, Zea mays
  Clone ID: MRT4577_126097C.1
aaataaatagggtttttttttatttaagggggaatccaaaaataagggcgagcatggatcgcactctggatccgggggaccccacttcagatacataaagaaccgtgtgttgtttaacggtaaaaaaaagcacccacagtgtgctttcacgttgaacagcgcccctggatagg

SEQ ID NO: 28604 - DNA, 376 bp, Zea mays
  Clone ID: MRT4577_126098C.1
agaagctcaactgctgaactcactgatccactatgactatggcaaacgcaggcgcgcggattgtatcaccggccggagctgctactctcgcactatcacttctctgcgctgacgacggtccggacgacgctcagaactactgctgccaaccaaacgtatgctgaaacaagtttggctactgcacgacgaccgacaagtactgcaactacatagagccagtacaggcccgtgcaaggtagttcgtcaagagcaagcaaatacctgccgaggagcgaacgtggctagcgtagacacagcatccttattaaacagtatcaagagccatgccggtagcgtatactagggcaagcacttatacaatctgaacgcgttcctg

SEQ ID NO: 28605 - DNA, 279 bp, Zea mays
  Clone ID: MRT4577_126099C.1
aaaaaaaaaaaaaaaattaaaaaaaaaatttttaaaaaaaaaaaaaaaataaaaaaaataaggacccgtttacaaagggtaatggtaaaaactaatttataaaatctaaaatttatgtttgcaaaaaagtactaaaaaaaaacaaaataaataaaaacaaaatcttagaacttaaaaatgactcactatctaaaggttcaaagtttaatctcacatcatttacaatgaaaacctcttttatctggagacctaaattaaaatcattgtccttcattttaa

SEQ ID NO: 28606 - DNA, 494 bp, Zea mays
  Clone ID: MRT4577_12609C.1
agcatgacccaaatataaggagtatggcccagtaataacagccatttcagcgatttcccttctacactttttcaggccctcacaacatgcctagcatgtagcaactgcaggagaccatgctcgcatacacagccatatgatgccttaatcagatccttaaggctttgtaacgtgcttccgtatgagaccagactttcattgggcatggggtgagccccatgggcctttactcttccaagatggttgcccatgccatttaaaactaattatgcctcttcacagaaatacttctcaaagaactactaacaggtcttgaaatgctagaaatacctccacctcatgaacatgcttacatatactaacaccattctcttgatgcatattttgcacattatcctgccttgacatggccctcccactggtaggataatccatactgatcaataatctgggcgaaatccctgttgaaggatcaccaattagcaaaggcacaa

SEQ ID NO: 28607 - DNA, 492 bp, Zea mays
  unsure (1)..(492): unsure at all n locations
  Clone ID: MRT4577_1260C.1
aaacatttccaggccgcccgcgccggnaaccgaccacttcgccggcagcgagccggagactacgcggagcccctatccccgcgccggcgtgggcggagggaggagaaggagcagcagcagcagcagaaggataaaggggggctttgggagcctctgagaagaagattctagaagctacctgaggcgaggcgagcgcgccgcggcacgagtgatctcggtggaataagtcgcgcggggccggcgccgtgggggatgcgcctctggatgccgacacgctccgggatttgaatggtagccagatctcgagggggaggggagcttctcgaagcggggtaaggcgcgcggtctggttggccggcggttagggtttggcgggagcgggatggtggggagctcggtggagggaggagcagacggagatgggggctgctgcggncgtcgggacacctcgcccgggaccatcgtgtgggtgcggcggaggaacgggtcctg

SEQ ID NO: 28608 - DNA, 315 bp, Zea mays
  unsure (1)..(315): unsure at all n locations
  Clone ID: MRT4577_126101C.1
ctggccgggagcgtttaacagtaatcagagtagtctctctgtgcctgcgacgacgactangggggggaccgggggggcgccgccgccgccgccgccgtgatactacaggggcgagggcttcatggggagtcttaacgggggacgaacaccaaccaggggacttcgggggggtcttcaccttaccgagggggacgagcgcgaactcgaaccttttttcccccggagagagagagccccctccctgccccantctgcgctctacggtgggggggcctccgggcacggggcccggggctcccgggtgtctccgggcca

SEQ ID NO: 28609 - DNA, 305 bp, Zea mays
  Clone ID: MRT4577_126102C.1
acgctaagcaggcagacgatatagccgctgcagtcatgagtaaggagcaatctgagtgggtcaaggatgccatctgcgatatagatggggatgccaaggctacgaataggaagttcaatgagactgcggaacttcaaattgtgctgaagaattatgatccacagaaggaccagcgtttgagtggctctggtcagttgccccatatccctcgtcccaagatgaaggtgcgcatgcttggtgatgcccaacatgttgaggacgccgacaacatgggacttgactacatggatgttcaggctgtcgag

SEQ ID NO: 28610 - DNA, 587 bp, Zea mays
  Clone ID: MRT4577_126103C.1
atacctacgaagcgacactgcacgtgtacgaacctacaactgctctctacttccctcgcgtcctctctatccagagctgctcctgctcggctcctccccatcgtgcacttcggaggcattcgggaaccctagcgacgaatctccgtggcagcgccgcctgtggccaatctcctagcggagctgcaggaccacctcaagctcgcgcgttactacgcgctctagggcctctacgacacctccagcatcttcttcgacgaggccctcgcccatatcaccaaggatctgactactctgtgcgatgctctgattcgcacgcactgcatgaactgcaagagagcgatctctgaatgagtgtgaattgggaaacagctgcaggctccactactgtcccttacatacgctcctgagactgggcggtcatcatcacctcctattcgggctaataaatcatatgttctccacccgctggatgatgatccaacatctgcacctgcacccttagatgatcccgatgtgtgggctccacctagtgatacaccaacccgaagaccgacgagaggtccctctagtgctcggaagctctccca

SEQ ID NO: 28611 - DNA, 527 bp, Zea mays
  Clone ID: MRT4577_126104C.1
cgaaagtactcgttaatatctccggcatcgtcacggcggcagccgggatcccccccggtacgagttggtcgagccgtcacgtggggccgctctggcactgccccatggcccccatcaaacactcgccccaacctcaaacagtgaacggcgccacctctccgccgccgtcagatcggagctcgacggcggagccccgcttttcagccgccatggcggcgccaccgcgccgctcgctccttgtcctcctcgcggggatcctagttttcggctccctcaccaccctcgccacagccatctacgaggaccaagtcggtctcgcggactggcaccagaagtacattggcaaagtaaagcaagcagtttaccacagccaaaagagtggaaggaggcgtgttgttctcttgacagaggaaaatgtgatctcatctcttgatctacgttctggagatatcttctggcgacgtgtccttgacaagaacgaccccttggatcagcttagtctttcacttgggaaatgtgttctaacc

SEQ ID NO: 28612 - DNA, 358 bp, Zea mays
  Clone ID: MRT4577_126105C.1
aaaaaggcaaggcctgttacaacatttttgggccaccaatacccatgggggaaaatggacaaaagggcccccctttttgtccttttaaataggggcctgatgataaataaaaaccaaaaaaaaacttttcaggggcccaaagcacttttttctgccccaccccaaagcacatttttctcccccacaggggggacatttttcaccgagctgatcctgctgggggtttcaacatcccattaaaagcaaattctttgctgtaaggtgaccaacctttcccatttttaaatccttttccccggtacactatgggaagatcatgggacccctttaccggaaattggggaaaccccttatcatt

SEQ ID NO: 28613 - DNA, 539 bp, Zea mays
  unsure (1)..(539): unsure at all n locations
  Clone ID: MRT4577_126106C.1
acctgacggacataacctatcagttgtcattgtcttggttgagtatttaaagctattataatctgcaggcatatttcatgcaagttgatggcacattaaacaaattgacaacgttgagagagtacatcgatgacacggaagattacatcaatatccaggtaatgttgcgccatatagatgcatactgccttttatttttcgaccattcagtttctaaatacattttggtttttcttctttcgcaatgcagcttgataaccaccgtaatcagttgattcaggtataatttacaataatctggatctcatcttgtccctgctagagatgtagaaatttcagaactacagattgattttagtcactttcagtagttgatgtgtaatcacttggtgctgaatgtgcattccatatgatatcacccaagcagagtcctgagtaatacttgttgcaattttgcactcttaaggataacatatnttttcgtttggtccctgcagctagagttattcttgagttctggtaccgtctgtctgtcgctg

SEQ ID NO: 28614 - DNA, 376 bp, Zea mays
  Clone ID: MRT4577_126107C.1
gcttgtagtcgctcacaaaaaaaaaaaaattaataaaaaaaaaaaaaaaaaaaacaaaaaatataaaaaatataaaaataaaatacaattacatacaaaaaataaaagggtcctttattataaaaggggccggccttttttggggttccatgtttacttccgcttcttttctacgccttgctttttctattgtgccgcccaattttattcaattgcccgtcttttaacaccctgttgactggtaaatccttttcttttcccaacttattccttttgccgagcttccttttttcgagaggtgccgttttttcctatgctcccaaccctttcgctttttcaataatttgcgcagccttcttgtcaattgggacccccc

SEQ ID NO: 28615 - DNA, 229 bp, Zea mays
  Clone ID: MRT4577_126108C.1
tgtggactggtacccaggggtcgggtggttttggattcactaccatccttcaagtgaggaggctggtggggacctgccctatgcgcagagcgctgtgtgcatgatctgcaactccaccaatgttgcggtggtgttctaccacatctaccacaagttcgacctcatgttcgccaagcgtgccttggtgcactggtttgtccgtgagggcatagaggagggcgagttcttt

SEQ ID NO: 28616 - DNA, 216 bp, Zea mays
  Clone ID: MRT4577_126109C.1
gccagacgagcgcggattttcagacttaccacccctgctgcaagcaaagatggcggcggcatgggcagagctggcgggggagctcgtctcatcacaacaggcgaatgccgtgcccagcacggtgccggccacactatgagggcccaacaacccacatggctagcggatgctacagatcagcagaaactaccgcgaattttaccaaccaaagaactt

SEQ ID NO: 28617 - DNA, 443 bp, Zea mays
  Clone ID: MRT4577_12610C.1
gactaaactgtcaacaactagactgctatacatgcctggtcattttaatggggccgggagagctggatcctggggcgaggaaaacgtacacgctacatgcacaccgacgaggacgagacacatagccaatgagttcccagggttctggactgcgaatcatgttgacattccacaacgcgtcgacattgtggagtgtcccttacaacgtccggcagcggcactaccccagggagctgcgatacatcagcgttatctagacggcgcggtcgctgcgtgaggagtacaacatgcccgataacgcccttcgctgcggtaaggatgtggggctgacgctgccgtcattactacgcccgcttgcgctaaagacgaccaaggcgccgttttcaccttgtgttctgaccatccaattgaactaatccatttctgtgcttttcggctaagtt

SEQ ID NO: 28618 - DNA, 567 bp, Zea mays
  Clone ID: MRT4577_126110C.1
aaaaaaaaaaaaataaaaaaaaaaaaaaaaccaacacacaacacatcagcagcaacaacaacagcagcagcaaacaccttcttcaacctctcagcatcctcaccaccttctctcaaccagcagcaccaaagcaacccatcaagcagctagccatggtgctcctccccagcgatcgcctggacagcctcttctccccgcggtgcgtgtgggtgaacgggcccatcatcatcggcgccgggccctcggggctcgccgtgggcgccagcctgcgggagcagggcgtgccgtacatcatcctggagcgcgaggactgcatcgcctcgctctggcagaagcgcacctacgaccgcctcaagctccacctccccaagcagttctgccagcgtgccccgcatgcccttccccgccgactaccccgagtaccccacccgccgccagttcatcgactacctcgagaactacgccgccgccttcgacgtcaagcccgagttcggcagcaccgtgcagtccgcccgctacgacgagacctccggcctctggcgcgtgcactcctcctccgccgcctcc

SEQ ID NO: 28619 - DNA, 239 bp, Zea mays
  Clone ID: MRT4577_126111C.1
caggcaccagttaagtgacgtggtattgggattagcttcacagattaacgatatgggccatgggacaattgagaagtgagatagtctagtgtatggaaagaaggtagataagtatagttttctcagtctgaggagcatattatgagggcatttaagtctccgtattgcctagaagatgggtgttggtcaagtatgatgatatattgtgcctggatcatgattaaccgtctctgagagtt

SEQ ID NO: 28620 - DNA, 440 bp, Zea mays
  Clone ID: MRT4577_126112C.1
gctagcatgcctgcacgcctactctagagtgatcccctcggtgaattccaattccacattttcaagaaataaggaagcaaaaatcggcatatatgaatgggaatgatccgttttcttattaggcctatcctgaagccaaaggaaatgagatcggaattcctctgggaattccaattccacattttcaagatatacggaggcaaatatgtccatatatgaatcggaattatctgttatcttattatgtctatcctgaagccaaaggaaatgatatcggaattcctcgtggaattccaattccacattctcaagaaataacgacgcaaaaatgttcatatatgaattggaattatatgctatcttattaggcctatcctgaagccaatggaaatgagatcggaactcctcgagcgtaccgagctctaattccctatagtgac

SEQ ID NO: 28621 - DNA, 2470 bp, Zea mays
  Clone ID: MRT4577_126113C.1
aaaaaatatgcaattaggtgatacccaggccatctgtgaatatttgcaaaggatgaaaggcgagaatccttctttcttttatgctattcaagtagatgaagatgatatgtttacaaatgtgttttgggctgatgctaaatcaataatggattataactactttggtgatgtagtgtgtgttgacacaagatattgcacaagtgactatgggagacctctactattatttactggtgttaaccatcacaatcagctgataatatttggttcagcgttgatttatgatgactcagcacaatcctttagatggttgtttgagaccttcaaatctgctatgagtggaaaacaaccaaaaacagttttgactgaccagtctgctgcacttagcgatgcagtttcttcttggcctggaaccatccaccgcttctcactactgcatttgtatctgaatgctactaagataagcagggataccttacaaggcttggagacttttgcatcagattttagtaggtggctgtatgaatatgaggaggacaacttctattcaagctgggaaatcctttcagagaaatacaatataaaggataatgagtggttctgtaaattgtatgaggatagagaaagatgggctttgccttatgggcgtgacacattctgtgctgatattgcaaccacactaagaagggataacacaaatacaatcctcacagatctaattaaaccagaaatagatcttcagaacttcttcaacaattatgataagtttttggaggagaaacgcctagctgaacaacaagctgactaccttggggctcaaataacgcaaagggtagcaccactgcatctgctttggcaagctgccaatttatatactccaacactttttgagatgttcagaatggaatatgaacagatctcaaagtgtgtggtctatagttgtggtgagattggaccaatatctgagtaccaggtcactgtcaaagacaggcctcagggtcaatttgttagatttgattcaacagaatgtatggttgtttgtagttgtaagaagtttgaattcatgggtcttctttgttgccatgtattgaaaattcttgatctcagaaatattaaagaacttccacgacactatatcctgaaaagatggagaaaagacgctcaaagtgaatctccagagaactatggttttgctgccatagatgaagatcctaagttttcattgtcaaaacggtacaacgcattataccggaatttgtataaaattgcagcaaaagcttcagaaagcgttgaagcttatgcattcctggagaaccaatatgaacagcttgttgaacaagtggaagtacttctgcaagcaaagttgcatgataaatcttccttaagtaccatcctgaaaggcaatcagccaaatatgcttaatagtgaggtcaacagcagtgaacatcgcagagcaactggtaagaaaattaaaaatgtagaggtgcgccgtcagcaacaaagtcttgatccaaacaaaaagaagaagggtagacaagttctgctggaacctgagattgaaattccactcagggttgaacctcccacggtatcaaatgatatccaaaatcatttaagaacaacaaatcagtttcttgcaccaagccatatgatgcaggcaccttatgttgcacagcagtttggtcttggttctttacaaggattcccaggcatgtcaccatttgggcagattcaagaaccaacacctcttcagcagccccatttacaaccaccatcgtttcatagtggtcctcaaattacacaggctccacctccagacattcaatcactacagtttcttagcagcaatcctcagcttggccaccagaccacggatcaaggccagtacaccattccagtctgggatttcctgtgacatacagtatcctcctgtttggttgctagcagcttggtgcctgactcgcccagcatcagttgaaactaacgattcttacttcctcacgcatctccacgcatgcaagtcaacgagggtaaaaaagcctagcttgcacctgcgcgcacatgcgtccactatatttttacttccccaagcacgtgcctgggcgcggtcaacgcatgcacggggccaggcgcgggagcagagccaaccaatcatgcagtatgtgatgtatggcgaagtagcaatgtagttgtaaattatgtaatgacactgcccctccccgaagggttaatgtcaatgaaatcctttagcatggtgcattggattagattttggaactgaatgcaattctaatgcacacgttaaagccaaccgggaatggggactgtttgttccaggcaaggtggcatggttgggcacagttatcatacaatacaatatgggcctgtttgtttccctttattttgaggaaattagaattcttactattggaatagactattttttagaatggtaaaaaaaaaaaaaaaa

SEQ ID NO: 28622 - DNA, 388 bp, Zea mays
  Clone ID: MRT4577_126114C.1
ctttttatttttatcctttcttttttcttttttttttgggggcctttttaatttttttttcggttttttccccccgggggaaacaaagggggatgggaaacccccggggggggggataccccataatccacccgggaacaaaactcccccagaattatggcccttttttacccccggaattacaccctacacgaccaaaataattttttagggggaaaggaggcccctacaattggactagaaaatatatcgcacaacacgaactggggaccacgaaattgcctttttgaacacaaaccggtccaaaaagggccccctgaaacgggggcctttaaagaggcctctccttagccaccaaaaagaatcaaatggatggctctgggtgggg

SEQ ID NO: 28623 - DNA, 665 bp, Zea mays
  Clone ID: MRT4577_126115C.1
cccacgcgtccgcggacgcgtggggtacggtatacgcagagagagagaccgacagtaatcgcactcgtacgtgacgacgacgacgacggtgatataattaaacggatggctccgacgacgacgacgaccgtgccgccgccagcgagctcgaggccggcgccactagcggcggccgggcacgtgcggtcggcgagcgtgccgtgccacacgcacccgctgctggcgcacgtggacgaccagctgctggcgctgcggtcgtggacgtccaggccggggcccaagtacccgctgtccctggcgcacgtccgcgcgctcctctgcgtgctggacgagctgctgctgcgcctcccgccggcgcacgcgcacgccgccgacagcctgctcgacggcttcctcgtcctggccgacgccttcggcacgttcctggccacgctggtcgcgctgcggcaacacgcggccgagctccgcgccgccgtgcgcaggcgcgacgacgccgccaggctggcctcggccgcgcgcgcgcagaggcgggccgggcgggagctccacctgctcgcggccaccgtcgcgcgcggggccgctaggtgcgcgtgcgcgagccctgcctccgcgtccacgcccggtgtcgccagggccgtcgccgaggccgtcaacggcaccgcggc

SEQ ID NO: 28624 - DNA, 419 bp, Zea mays
  Clone ID: MRT4577_126116C.1
aggggtgagggcaccgcggaccccccggaaaaataccgggcgacgagcgcacagtactttggccgcccttcttttttttttttgtttttgggggcttttttagtacctgtttagccctttttccacccccctagtttcgtttgccacacccaaagcctatctcgataccggcggggggccaaatctccacacaaaaatttgcccggaaaaaaggggttcgcagcggattaaaagagaaaaaacctaattgtgatcaaaacctcctccggcttgaacaaacccttttaaaccaaccaggccctaaaaatcaaaccttccagaaaacagaacctagccggccaccttattgccggctatttcccaaacccacaggacccattcctgggaaaccgaaccgaggggccggcgcatacaaagcc

SEQ ID NO: 28625 - DNA, 1914 bp, Zea mays
  Clone ID: MRT4577_126117C.1
atgtcgggagatcacgccaagaaggagatggaaaccggcgacaagcccactacaagccaagggagcacttcatcggaagagtcccgcaccaaaaggaaggagaagaagaagagctcctccaacaaagggaaggagaagaaaccttcttctcatcacaaagagaagaaggagaaatcttcctctcacaagccgcatcagagtggggacaagcataagaggatgaggaaagtggtctactacgagaccgacacttcatcaacatcgacctccggctccgatgcgccctccgtaacttctaaacgccaagagcgggatgaggattatgatgaggacgaagtggcccaaatcgagcacttcaactctcaagctacaaccatactccttgcctctctaagcaaggaggagtacaacaaggtgcaagggttgaagaatgcaaaggagatttgggacctactcaagaccgcgcacgagggtgatgaactcaccaagatcaccaagcgggaaacgatcgagggggagctcggtcgcttccgtcttcgccaaggggaggagccacaagatatgtacaaccggcttaaaaccttggtgaaccaagtgcgcaacctcgggagcaagaaatgggatgaccacgaggtggttaaggttattttgagatcacttattttccttaaccccactcaagttcaattaattcgtggtaatcctagatatactcaaatgacccccgaggaagttatcgggaattttgtgagctttgaatgtatgatcaagggctccaagaagatcaacgagcttgatgaaccctccacgtccgaaacacaaccggtggcatttaaggcaacggaggagaagaaggaggagtctacaccaagtagacaaccaattgacgcctccaagctcgacaatgaggagatggctttaatcatcaaaagctttcgccaaatcctcaagcaacggaaggggaaggattacaaatcccgttccaagaaggtgtgctacaaatgtggtaagcccggtcactttatcgctaaatgtccattatcaagtgacagtgacagggataacgacaagaagggaaagaggaaagaaaagaagaggtaccacaagagaaggggcggcgatgcccacgtatgccgcgagtgggactccgacgagagctccaccgactcctcctccgacgaggacgccgccaacatcgccgtcaccaagggactcctcttccccaacgtcggccacaagtgcctcatggcaaaggacggcaaaaggaagaaggaaaaatctcaaacccaagaaaccttaaagggattcttgagacgagctcaaaatgagttcggcttaaggatcaagaaaataagaagcgacaacgggacggagttcaagaattctcaaattgaaggcttccttgaggaggagggcatcaagcatgagttctcttctccctacacgccacaacaaaatggtgtagtggagaggaagaatcgaactctattagacatggcaagaaccatgcttgatgaatacaagacttcggatcggttttgggcggaggcggtcaacaccgcttgctacgccatcaaccggttgtatctacaccgaatcctcaagaagacatcatatgaactcctaaccggaaccaaatgggtcttccgcaacaagcaagatgagcatggtgtggtgacaaggaacaaagctcgacttgtggccaagggatactcccaagttgaaggatttcaagtgaagcaactccaagaaggcaccttcatcagccaaacaaagtacactcaagacattctaaacaagtttgggatgaaggatgccaagcccatcaagacacccatgggaactaatgggcatctcgacctcgacacgggagatttcaagccgaccctaaggaagctcaccttacggccgtaa

SEQ ID NO: 28626 - DNA, 469 bp, Zea mays
  Clone ID: MRT4577_126118C.1
aagactctatagataactcgtattaagccatgttcgccgctctccgccaacctcttgcccgtgcctctgctgcaaagcctcttgctcgcgccttctctgcctacagccctgtccaaaatgctgtagcccccacaaagtcacctaaactcgagtacttgctgactgagacccgcggacgcgtcggtctcgtcaccctccaccgtcccaaggccttgaacgcgctctgcaacggtctctttgtggagttgaaccaggtcttgaaggagctcgatgacaacaaggagattggcgccattgtcatcactggaagcgagcgcgccttcgctgctggtgctgacatcaaggagatgaacgacatgaactttatcgagaactatgccgaagatttcctcgggcactggactcagatcatcaagattcgcaagcctatcatcgctgccgttaatggattcgctctcggcggtggatg

SEQ ID NO: 28627 - DNA, 302 bp, Zea mays
  Clone ID: MRT4577_126119C.1
accaatacacccgacgatcgacaggcacaagcggaaaagaaacacggcaactagaaaaaacaaaagcaggcgcacaagacggtcaacaacagacaccaacacaaaattacaaatggcacacgggaacaaaagccaggacgcagccagccacaagagaccacacacggaggacatgagcagacaaaccaacacaatcctatacgcagcactgttacggagcgacccccagagtcacaacagcaccacaaagaacacttaaaacaagcggccaaaagaccgtaccacgccatgaccaacaagag

SEQ ID NO: 28628 - DNA, 1551 bp, Zea mays
  Clone ID: MRT4577_12611C.1
ccgaattcggcacgaggcccgtctccatcctcgctcgccgccatggaaggttcgaaggggagtggaggtggtggggccggtgccgggtccgaaaagccaagcgccgagtcgaaccctagtctgaatctgccgccacctaccgcagcggatgtcgaagccacggatgacggtggcgccacggccgcggctgcggctgcggccgaggcggccaggcggcccttcacggccctcagccaagaggaagctgacctcgccctcgcccgcgtcctgcaggagcaggagcgggcgtacatgttgctccggatgaacgggggcggtggcgagggcagcgactacgggagctctgatgaagggagctacgaatatgacgaagagggagaggaggactacgaagaggaactggagcaccacctccgcgtccaccaccacgagcacccctcgggcgatggtgagggagagggcgggggagggcgagggcgccgaggggagcgactacgacgaagagttcgaggaggacgaagaaggggagccggaggtagatcccgcggagtttgaggacgatgaggcttatgcgcgtgcgctgcaggatgctgaggagcgtgaggtcgccgcacggcttatggctctcgctggtctcagcgattggcgaacagtggaggtggagcatgaggaggatcatgcgaatgatccacaggaggcatggcaagaggttgatccagatgaatactcttatgaggagctagtcgcattgggtgaagtagttggcacagaaaacagaggtctctctgctgatacacttggttctttaccttcagtaacatacaagctgcaacatgttcaggatggcaacacagagcaatgcgtaatttgccgtgtggaattggaggagggtgaatctttgattgcactcccctgcaagcacttataccatcctgaatgcataaaccagtggctgcaaataaataaggtatgccctatgtgcagcgcagaagtatcaacctcgggtaacaaggagccatgactgctcctccgatggctatcttgggaacttggtgggaataactagcggcatcactgcagcatctgtattgttgaaacaaaagcagaaaaaacggtctacatacatgcaaggagatcaggatataatcctcttgtcagtctaaagttctgcccttggttccctgctaactggattgattggccttgccgcttattatctcagttccctatgaacgccttatggctgttgtatgatccataaattatgctaattatattatattgttagtcatcatcctattaaaaaaaaaaaaaaaaaaaaaaaaaaaaaaaaaaaaaaaaaaaagaaaaaaaaaaaaaaaaaaaaaaaaaaaaaaaaaaagggcaagcaaactaaaaaaatcaaaaattaggggggccccgttttaaagaacccaactttttttacccgcgttgcgactggaaaaacctttttttggggccacctaaattaatttggcgggcccccttttttaacccattggattgataaaacaaaggctttccccaatt

SEQ ID NO: 28629 - DNA, 696 bp, Zea mays
  Clone ID: MRT4577_126120C.1
atgaagaaggtggtctactacgagaccgactcttcctcgccctctacatctggatccgacaccgcgtccgtcacttctaagcgccaagagcgcaagaagtatagtaagatccccctatgctatccttgcattcctaagcatactccattactttccgtcccactaggcaaaccaccaacatttgacggtgaatattattctaggtggagtgatatgatgagatatcacctaacctcactccacaaaagcatatgggatgttgttgagtttggtgtacaggtaccatccgtagtgaaccaagtgcgcaacctcgggagcaaaaaatgggatgaccatgaaatggtcaaggttattcttagatcactcgtttttcttaaccctacacaagtacaattaatacgtggtgatcctagatacacactaatgtctcccgaggaagtaatagaaaaatttgtgagttttgaattgatgatcaaaggctcaaagaaaatcatcgagcaagatggcccctccacgcccgaatcacaaccggtcgcattcaaggcgacggaggagaagaaggatgagtctacatcaagtagactccccatcaacgcctccaagctcgacaacgaggaaatggcactcatcatcagtggcagtcgattcatcttgactaccatcgacctctatatcctcatcggtatcctcatatga

SEQ ID NO: 28630 - DNA, 243 bp, Zea mays
  Clone ID: MRT4577_126121C.1
acgcttcaacctccattaacaaacgcgtaataaaacataatatcaactcccacaaaattcataggagagtttaaaaatatagccacggttgtgcattgtttccaaagctaatctacagacatagcaccatatgcagcatttagcgtccaactcgacctaacaagcatatttatcttcaagacactcaaacaaacgaccctgcatccaccaatcttatcgacctcatatcatatctcattatta

SEQ ID NO: 28631 - DNA, 401 bp, Zea mays
  Clone ID: MRT4577_126122C.1
gagccggccgggctagcttgcaccgcataggttcacatacaggcgtcttcttactcggctatctccgcgactcaaagattcttcgatttcctaccgctgtcgctgcagctccaccccattcctccccacaccatgaggcagagctctctcgatacacatcggccaagccggcatccagaacggaaacgcgtgctgggagctttactgcctcagagcatgttattctggatgatggtcagatgaccggcgacaagaccatcgccggcggcgacgatgctttcaacaccttctcatcgacattggtgctgggaagtacgtcccccgcgctgtttttgttgaccttgaaccaactgtcatccatgaggtgaggactgccacctaccgccagctcttccaccctg

SEQ ID NO: 28632 - DNA, 4083 bp, Zea mays
  Clone ID: MRT4577_126123C.1
ctaggtgaagatatcggctaattgttctttggtgctaacataagcgatctcgagatcccccctttgttggtgatcccttagaaagtgataccgaatgtctatgtgcttagtgcggctgtgttcaacgggattatccgccatgcgggttgcactctcattatcacataggagagggactttgctcaatttgtagccatagtccctgagggtttgcctcatccaaagtaattgcgcacaacaatgtcccacggcaatatactcggcttcggtggtagaaaaagctactgagttttgtttctttgaagcccaagacatcagggatcttcctagaagctgacaagtccctgatgtgctcttcctatcaattttacaccctgcccaatcagcatctgaatatcctattaaatcaaaggtggatcccttggggtaccaaagtccaaacttaggagtataaactaaatatctcatgattgttttcacggccctaaggtgaacttccttaggatcggcttggaaccttgcacacatgcatacagaaagcataatatccggtcgagatgcacataaatagagtaaagatcctatcatcgaccagtataccttttgatctacggatttaccccccgtgtcgaggtcgagatgcccatttgttcccatgggtgtcttgatgggcttggcatccttcattccaaacttggtaagtatgtcttgaatgtacttggtttggctgatgaaggtgccttcctggagttgcttgacttgaaatattagaaaatacttcaactcccccatcatagacatctcaaatttctgaatcatgatcctactaaactcttcacaagtagatttgttagtagacccaaatatgatatcatcaacataaatttggcatacaaacaaatcttttgcaatagttttagttaagagtgtaggatcgactttaccgactttgaagccattagtgataaggaaatctcttaggcattcataccatgctcttggggcttgcttaagcccataaagcgcctttgagagtttatacacatggttagggtactcactatcttcaaagccgggaggttgctcaacatagacctcttccttgattggtccattgaggaaggcacttttcacatccatttgataaagcttaaagccatggtaagtagcatagggaagtaatattcgaattgactcaagcctagctacgggtgcataggtttcaccaaagtccaaaccttcgacttgtgaatatcctttggcaaccagtcgggctttgttccttgtcaccacaccatgctcatcttgcttgttgtggaatacccacttggttctcctcttgaggtggctcatattcttgatcttcattttcattgccttgagcccgatcctcatcttgagttggtggggatgcttgattggaagatgatggttgatcttgtgtatgagtgggtcttcggattccttaggacacacatccccaatggacatgttccttagcaagacgcacggagcctcttcatcatgtagctcatcaagatcaacttgctccacttgggagccattagtctcatcaaacacaatgtcacaagaaacctcaactaatccagtggatttgttgaagactctatatgcccttgtgtttgagtcataaccaagtaaaaagctttctacagccttaggagcaaatttggattttttacctcttttaacaagaataaaacatttgctaccaaagactctaaaatatgaaacattgggctttttaccggtgaggagttcatatgatgtcttcttgagaattcggtgaaggtagaaccggttgatggagtagcacgcggtgttaatcgcctcagcccaaaaccggtccggagtcttgtactcatcaagcatggtcctcgccatgttcagtagagttctattcttcctctccactacaccattttgttgaggtgtgtagggagaagagaactcatgcttgatgccctcctcctcaagaaagccttcaatttgagagttcttgaactccatccagttgtcgcttcttatctttttgattctcaatctgaactcattttgagctcgtttcaagaacccctttaaagtctcttgggtttgggatttttccctgtctttctcaaaataaacatttgttagtcccaaaatgtgctctccctttaaaagcttgtgaagattcttcatcccaacatgggctagttggcggtgccagagccaacccatattagtcttagcaattaagcaagtatcgagttcagctctattaaaatcaactaagtatagctgaccctctaatactcccttaaatgctactgaatcatcgcttcttctaaagacagtaacaccttgatttccatccccaaatgtgatagctctttggggatcttcatttttctcgtaggaggagaacatccttttctcccctgtcatgtggtttgtgcatccgctatcaataatccaacttgagcccccggatgcataaaccttgggtacccaaacacaagtcttggagcccttgtgtttgcccccaacatatttggcaactactttgcctgatttgttagtgagcacataagaagcatcaaaagtcttaaatgaaacattaggctcatttgatgcagtaggagttttctttttaggcattttaacatgagtaggatgcctagagctcgaagcctcattcttatacataaaagcatgatgggaaacagaatgatatttcttagcatgaattctcctaatcttgtgctcaagataaccagtaggatataaaatgtaaccctcgttatcttgagccatgggagccttgcccttaacatgcttcttattttccttaataaggaattcatcttgactatccaagagttcatccttctcatgaatagcacctattaattcattcaatttttctttttgatgcatgttaaggttgacaaaaaaggtaagtaaattatcctcatcttcactagagctaccttcatcactagatgttgtatatttagtggaggctctagattttaccttcttctttttgccgtcctttgccatgaagcacttgtggccgacgttggggaagaggagtcctttgttgacggcgatgttggtggcatcctcgtcggaggaggactcggtggagctcatgtcagagtcccattcccgacacacatgggcatcaccgcccttcttcttgtagtatttcttctctttcttcctccccttcttgtcgttgtccctgtcactatcactagacatagggcatttagcgataaaatgactggccttaccacacttgtagcacacccttttggagtggggtttgtagtccttccccctcctttgcttgaggatttgacggaagctcttgatgatgagcaccatctcctcattgtcgagcttggaggcgtcgatggggagcctacttgatgtagactcttctttcttctcctctgtcgccttgaatgcgatgggttgcacctcaggtgtggaggtgccgccttgctccaagttgactatttgtttggagccacgtattaattgaacttgagtaggattacgaaaaacgagtgatcttagaataaccttgaccatttcatggtcatcccatttggtactcccgaggttgcgcacttggttgaccatcgtcttgagccggttgtacatggtttgcggctcttctcctttgttgaggaagaaacgactgagctccccctcaatcgtcttgcgcttggtgatcttggtcacctcatccccttcgtgcgtggtttttagtacgtcccaaatctctttggaactttttagcctttgcaccttattatactccttaaacttcttgtgctcatggcgcttagaagtgatggacggagcatcggagctggaggtggagggcgacaaagagttggtctcatagtagaccactttcttcattttcttcttcttgtcgccactccagtgtgacttgacgcgaggaggagattcctcccttcttttggcgccggactcccttgatggagccttcccgtggcttgtgcccgtttcaatctccctcttggtggatcctcccgacat

SEQ ID NO: 28633 - DNA, 3744 bp, Zea mays
  Clone ID: MRT4577_126124C.1
atgtcgggagatcacgccaagaaggagatggagaccggcgaaaagcccactacaagccacggaagcacttcatcggaagagtcccgcaccaagaggaaggagaagaagaaggactcctccaaagggaaggagaagaaatcttcttcacaccacaaagagaagatggagaaatcctattcccacaagccgcatcggagtggggacaagaaaaagaggatgaggaaggtggtctactacgagaccgattcttcatcggcatccacctccggctccgacgcggcgtccgtcacttctaagcgccaagagcgtaagaagtatagcaaaccaccaacttttgatggtgaagattacgctaggtggagtgatttaatgcgatttcatctaacctcgctccacaaaagtatatgggatgttgttgagtttggcgcacaggctaaagattttgatgtttgctatgttactatttctaaccttagaagtgaaaacgacatattacatgccaaggttgtagaattaaaatcttgcaaaccccctacatctatcgttgagcatgtatctatttgtactagatgtagagatgttgatattaatgctattcatgatcacatgtctttaattaaacaacaaaataatcatatagcaaaattagatgctaaaattgccgagcataacttagagaatgaaaaatttaaatttgctcgtagtatgctttataatgggagacgccctggcattaaggatgacattggcttccaacagggaggcaatgtcaaacttagtgcccctcctaagaaattgtccaactttgttaagggcaaggctcccatgcctcaggataacgagggttacattctataccctgccggttatcccgaggacaaaattaggagaattcattctaggaagtctcactctggccctaaccatgcttttatgtataagggtgagacatctagctctaggcaaccaacccgtgctaagttgcctaagaagaagactcctagtgcatcaaatgaacatagtttttcatttaaaacttttgatgcatcttatgttttaactaacaaatccggcaaggtttatgcatccgggggctcaagttggatactcgacagcgggtgcacaaaccatatgacaggggagaagaagatgttctcctcctacgagaaaaaccaggatccccaacgagctatcacattcggggatggaaatcaaggtttggtcaaaggtgtcactgtctttagaagaagtgatgattcaatagcatttaagggtgtgctagagggtcagctatacttggtagattttgatagagctgaactcgacacatgcttaattgctaagactaacatgggctggctctggcatcgccgactagcacatgttgggatgaagaatcttcataagcttctaaagggagagcacattttaggattaaccaatgttcattttgagaaagacagggaaaaatctcaaacccaagaaaccttaaagggattcttgagacgagctcaaaacgagttcgacttaaggatcaagaaaattagaagcgacaacgggacggacttcaagaactctcaaatcgaaggcttccttgaggaggagggcatcaagcatgagttctcttctccctacacgccacaacaaaatggtgtagtggagaggaagaatcgaactctattggacatggcaaggaccatgcttgatgagtacaagacttcggatcgattttgggccgaggcggtcaacaccgcctgctacgccatcaaccggttatatctacaccgaatcctcaagaagacatcttatgaactcctaaccagtaaaaagcccaatatttcatattttagagtctttggtagcaaatgttttattcttattaaaagaggtagaaaatctaaatttgctcctaagactgtagaaggctttttactaggatatgattcaaacacaaggacatatagagtctttaacaagtccactggacaagttgaagtttcttgtgacgttgtgtttgatgagactaacaactctcaagtagagcaagttgatcttgatgagataggtaatgaagaggctccatgcatcgcgctaaggaacatgtccattggggatgtgtgccctaaggaatccgaagagcctccaaatgcacaagatcaaccatcctcctccacgcaagcatctccaccaactcaaaatgaggatgaagctcaaattgatggagtagaagatcaagcaaatgagccacctcaaaatgccgacaatgatcaagggggagatgcaaatgatcaagacaaggaggatgaagaacaaaggccgccacacccaagagtccaccaagcaatccaacgagatcaccccgtcgacaccatcctcagcgacattcataagggggtaactactagatctcgcgttgcacatttttgtgagcattactcttttgtttcctctattgagccacgcagggtagaggaagcactccacgattcggattgggtggtggcgatgcaagaggacctcaacaatttcactaggaatgaggtatggcatttagttccacgtcctaatcaaaatgttgtaggaaccaaatgggtcttccgcaacaagcaagatgagcatggtgtggtgacaaggaacaaagctcgacttgtggccaagggatactctcaagtcgaaggtttggatttcggtgaaacctatgcacccgtagctaggcttgagtcaattcgtgtattattggcctatgctactcaccatggctttaagctttatcaaatggacgtgaaaagtgccttcctcaatggaccaatcaaggaagaggtctatgttgagcaacctcccgactttgaagatagtgagtaccctaaccatgtctataaactctctaaggcgctttatgggctcaagcaagctccaagagcatggtatgaatgccttagagatttccttatcactaatggcttcaaagtcggaaaggccgatcctactttatttactaaaactcttgaaaatgacttgttcgtatgccaaatttatgttgatgatattatatttgggtctactaacgagtctacatgtgaagaatttagtaggatcatgacacaaaagttcgagatgtctatgatgggggaattgaagtacttcttgggatttcaagtgaagcaactccatgagggcaccttcattagccaaacgaagtatactcaagacattctaaacaagtttgggatgaaggatgccaagcccatcaaaacacccatgggaactaatgggcatctcgacctcgacacgggagggtgtaaaatcaataggaagagcacatcggggacttgccagttcttgggaagatccttggtatcttgggcttcaaagaagcaaaattcggttgctctttccaccgccgaagccgagtacattgccgcaggccattgttgcgcgcaattgctttggatgaggcaaaccctgcgggactacggttacaaattaaccaaagtccctttgctatgtgataatgagagtgcaatcaagatggcggataatcccgtcgagcatagccgcactaaacacatagccattcggtatcattttcttagggatcaccaacaaaagggagatatcgagatttcttacattaatactaaagatcaattagccgatatctttaccaagcctcttgatgaacaaacttttaacaaacttaggcatgagctaaatattcttgattctaggaacttcttttgctag

SEQ ID NO: 28634 - DNA, 4092 bp, Zea mays
  Clone ID: MRT4577_126125C.1
cggacgcgtgggatggcatgtacttagggcgctagctctcctccgctagacacgtagcactctgctacaccccccattgtacacctggatcctctccttacgcctataaaaggaaggatcagggccctcttagagagggttggccgcgcggggacggggacgagacaggcgctcgcttgaagccgctcgctccctctcccgcgtggacgcttgtaaccccctactgcaagcgcacccgacctgggcgcgggacgaacacgaaggccgcgggatttccacctctctcacgcctgtctccgaccacctcacttccccccttcgcgctcggcctcgcgtcgacccatctgggctagggcacgcggcgacattcactcgtcggcttagggaccccccggtctcgaaacaccgacaccagtggacttgttaaagactctatatgcccttgtgtttgaatcataaccaagtaaaaagccttctacaaccttaggagcaaatttagattttctacctcttttaacaagaataaagcatttgctaccaaagacactaaaatatgaaacattgggctttttaccggttaggagttcatacgatgtcttcttaaggattcggtgtagatataaccggtttatggcgtggcaagcagtgttgaccgcctcggcccaaaaccgatccgaagtcttgtactcatcaagcatggtccttgccatgtccaatagagttctattcttcctctccactacaccattttgttgaggtgtgtagggagaagagaactcatgcttgatgccctcctcctcaagaaatcctttaatttgtgagttcttgaactccattccattgtcgcttctaatctttttgattctcaatccaaactcattttgagcccgtctcaagaatctctttaaggtctctagggtttgagatttttcctacaaaaagaatttggtgaaggtagagccggttgatggagtagcaagcagtgttgattgcttcctcccaaaaccggtctggtgtcttatactcatcaagcatggttcttgccatgtccagtagagttctattcttcctctccactacaccattttgttgaggtgtgtagggagaggagaactcatgcttgatgccctcctcctcaagaaagccttcaatttgtgagttcttgaactccgtccaattatcgcttctaatctttttgattctcaatccgaactcattttgagcccgtctcaagaatccctttagggtctcttgggtttgtgatttttgttgcaaaaagaatacccaagtgaagcgagaataatcatccacaattacaagacaatacttactcccgccgatgcttatgtaagcaatcgagccgaataaatccatgtggagtagctcaagtggcctgtcggtcgtcgtgatgttcttgtgtggatgatgggagccaactttctttcctgcttgacatgcgctacaaaccctgtctttctcaaattgaacatttgttagtcccaaaatgtgttctccttttagaagcttgtgaagattctgcatcccaacatgggctagtcggcgatgccagagccaacccatattagtcttagcaattaagcaagtatcgagttcagctctattaaaataaactaagtatagctgaccctctaatactcccttaaatgctactgaatcattacttcttctaaagaaagtaacaccttgatttccatccccgaatgtgatagttcttttgggatcttcgtttatctcgtaggaggagaacatctttttctcccctgtcatgtggtttgtgcatccgctatcaattatccaacttgagcccccggatgcgtaaaccttgggtacccaaacacaagtctttgaccccttgtgtttgcccccggcatatttggcaactactttgtctgatttgtttattaaaacataggaagcatcaaaagtcttaaatgaaatgttatgatcatttgatgcagtagaagatttctttttaggcattttaacatgggtagaatgactagagctagatgtctcattcttgtacataaaagcatgatgggaaacagaatgagacttcctagcatgaattctcctaatcttgtgctcaggataaccaacaggatataaaatgtatccctcgttatcctgagccatgggagccttgccctttacaaagttagacaatattttgggggcattaagtttgacatttcttccctgttggaaaccaatgccatccttaataccagggtgtctcccattatagagcatgcttctagcaaatttaaatttttcgttttcaattttatgctcattaattttactagttagttgtgctatatgatcattttgttgtttaattaaagctaggcgatcatgaatagcatcaacattaatgtctctacatctagtacaaatagtaacatgatcaacattagatgtagatggtttgcaagcatttaattcttctatcttagcatgtaatatggcattctcatttctaagacaggaaatagaatcattgcaaccatttaaatctttagtctcagttttaaggttctcaaccttagcaaataaattggcgttctcagttctaaggttggaaatagtgtcatggcaaatgctaagctccttagtcaaatttttatttttctctacttcctgagcataagcattctttaccttaacatgctttttattttccttaatgaggaattcctcttggctatccaagagttcatccttctcatgaatagcacctatcaattcattcaatttttctttctgttgcatgttaaggttggcaaaaagggcaagcaaattatcctcatcttcactagagctaccctcatcacttttccttttgccgtccttttccatgaggcacttgtggccgacgttggggaagagaagacctttgttgacggcgatgtttgtggcatcctcgtcggaggaggagtcggtggagctctcgtcggagtcccattccctacacacgtgggcatcgccgcccttcttcttgtagtacttcttcttttccttcctctttcccctcttgtcatcacccctgtcactatcactagacatcagacaatttgcaataaaatgactgggcttaccacacttgtagcacacccttttggagcggagcttgtagtccttccccttcctttgcttgaggatttgacgaaagctcttgatgatgagtgtcatctcctcattgtcgagcttggagacgtcgatgggaattctacttggcgtagattccttcttttcttcctccgctgccttgaatgtgacgggttgcacctcgggtgtggaggtgccgccttgctccaagttgacaatatgtttggagcctttgatcatcaactcaaagctcacaaactttcctattacttcttcgggagacattagcttgtatctaggatcaccacgtattagttgaacttgagtaggattatgaaatacgagtgatctaagaataaccttgaccatttcatggtcatcccatttggtgctcccgaggttgcgcacttggttgaccaaggtcatgagccggttgtacattgattgtggctcctcttcttggttgaggatgaatcgactgagctccccctcgatcgtctcccgtttggtgatcttggtcacctcatctccttcgtgcgtcgtcttgaggacatcccaaatttctttggctgtctttaacccttgcaccttattatactcctctcgacacaaggaggcgaggagtatagttgtggcttgggagttaaagtgccgaatttggtcggcctcatccgaatcgtagtccttgtcccttacctttggtactatacttcttacgctcatggcgcttagaagtgacggacgatgattcgaagccggaggtggagggtgacgaagagtcggtctcgtagtagaccactttttcatcttcttcttcttgtcacctctccgttgtgacttgatggaggaagcagattcctccttatgcttgtggtcagactccctcgaatgggttctccctgagcttgcggacttgtcgccgccggtcacgatctccctcttggcgtgatctcccgacat

SEQ ID NO: 28635 - DNA, 3651 bp, Zea mays
  Clone ID: MRT4577_126126C.1
atgtcgggagatcacgccaagagggagatcgaaaccggcgacaagcccgcaagccttgggaaggctccatcaagggagtccggcaacaaagccaaggagggatcccctccctccatcaagttgcatcggagtggcgacaagaaaaagaagatgaagaaggtggtctactacgagaccgactcatcgtcaccctccacatcaagctccgaggcatccatcgcttctaagcgccatgagcgcaagaagtatagtaagatgccactttgctatccccgtatttctaagcgcactcctctactttccgttcccttaggcaaaccaccatattttgatggtgaggattattgtatgtggagtgataaaatgaggcatcacctaacctcactccacgcaagcatttgggacattgttgagtttggagcgcaggagtataataaggtgcaagagttaaagagtgccaaagagatttgggacgttctcaagacagcgcacgaaggggacgaggtgaccaagatcaccaagcatgaaacgattgagggagaactcggtcgattcgtccttaacaagggagaggagccacaagcaatgtacaaccggctcaagaccttggtgaaccaagtgcgcaacctcgggagcacaaaatgggatgaccatgaaatggtcaaggttattctacgatcccttgtatttcgtaatcccactcaagttcaattaatacgtggggatcctagatacatgctaatgtctctcgaggagcaacggaggggggaggactacaagccccgctctaagagggtgtgctacaaatgtggtaagcccggtcattttattgctaaatgtacaaattcaagtgatagtgataggggcgacgataagaagggaaataagagggaaaagaagaggtattacaagaagaagggcggtgatgcccatgtgtgtcgggaatgggactccgacgagagctctaccgactcctcctccgatgaggatgacaccaacatcgtcgtcaataagggactcctcttctccaacgtcggccacaagtgtttcatggctaaggacgacaaaaagaaggaagtagaaaagtgtgaaaacttgactaaggaacttaacatttgcaatgattcaattataagtcttagaaatgaaaatgctagtctaaatgctaagattgatgaattaaatgtttgcaatgatacaatttctagtcttagaactgaaaatgataatttaatttctaagattaaagaattgagtgtttgcaaagattctatttcctgtcttagaaatgataatgccatattacatgctaagatagaagaattaaatgtttgcaaaccctctacatctactgtcgagcatgtttccatttgcactagatgtagagatattaatgttgaggctattgatgatcaccttgccataattaaacaacaaaatgatcacatagctaaattaactgctaaaattaatgaacatgaacttgaaaatgaaaagtttaaatttgctagaagcatgctctataatgggagacgccatggtattaaagatggcattggtttccaacagggaagcaatgttaagcttaatgcccctaaaagattgtctaattttgttaagggaaaagctcccatggttcaagataatgagggctatattttatatcctgctaattatcctgagcacaagattaggagaattcatgctaggaaacctcataatgtttctcatcatgcttttatgtataaaaatgaggcttctagctctaggcattctactcgtgttaaaatgcctaaaaagaaaactcctgctgtatcaaatgagtctaacatttcatttaaaacttttgatgcatcatatgtgtttactaacaaatcagacaaagtagttgccaaatatgttgggggcaaacacaagggttcaaagacttgtgtttgggtacccaaggaaaaaccacaaacccaagagaccttaaagggattcttaagacgagctcaaaatgagttcggattaaggatcaaaaagataagaagcgataatgggacagagttcaagaactcacaaattgaaggctttcttgaggaggagggcatcaagcatgagttctcttctccctacacaccacaacaaaatggtgtagtggagaggaagaatagaactctattggacatggcaagaaccatgcttgatgagtacaagactctggaccggttttgggcggaagcaatcaacactgcttgctactccatcaaccggctctaccttcaccaaatcctcaagaagacatcatatgaactcctcaccggtagaaaatctaaatttgctcctaaggctgtagaaggctttttactcggttatgactcaaacacaagggcatatagagtcttcaacaaatccactagactagttgaggtttcttatgacattgtgtttgatgagactaatggctcccaagtggagcaaagcccatacaagcacaagatcaaccgtcatcttccaatcaagcatctccaccaactcaagatgaggaataggctcaagataataaggatgaagatcaagaagatgagccacctcaagaggaggacaatgatcaagggggagatgaggaaaatgaagacaaggaagatgatcaagaaatttagggtcaaagaccgccacacccaagagtccaccaagcaattcaatgagatcaccccgtcaactgcatccttggtgacattcataaggggggtagaggatgcactaagagactcggattgggtactggctatgcaagaggagctcaacaacttcacaaggaatgaggtatggtattcagttccacgtctcaatccaaatgttgtaggtaccaagtgggtattccgcaacaagcaagacgagcatggtgtggtgacaagaaacaaagcccaacttgtagccaaagctaggcttgagttaattcgtatattacttgcctatgctacttaccatggctttaagctctatcaaatggacgtgaaaagtgccttcctcaatggacctatcaaggaagaggtctatattgagcaacctcctcgctttgaatatggtgagtaccctaaccatgtgtataaactctcaaaggcgctttatggactcaagcaagccccaagaggatggtatgaatgcctgcgagatttccttatcactaatggcttcaaagtcggtaaagccgatcctattctctttactaaaattgttgcaaaagatttatttaaaatcgagatgtctatgatgggggagttgaagtatttcctaggatttcaaatcaagcaactccaagagggcaccttcatctgccaaacaaagtacattcaagacatacttaagaagtttgggatgaaggatggcaaacccatcaagacacccatgggaaccaatgggcatctcgacctcgacacgggaggtaagcccgtagatcaaaaggtataccggtcgatgataggatctttactctatttatgtgcatctcaaccggatattatgctttctgtatgcatgtgtgcaaggttccaagccaatcctaaggaagttcaccttagggccgtgaagagaatcatgagatacttagtttacactcctaagtttgggctttggtaccccaagggatccacctttgatttaatatga

SEQ ID NO: 28636 - DNA, 814 bp, Zea mays
  Clone ID: MRT4577_126127C.1
accttcttcacagtcagaacaagagcgtgagatttcaagtatgtcgccaaccatggaggagccccttgttgacaagactggagggccaaaggagagcttggtggtgactgaggtcaagaagcagctgtacctggccgggcctctcatcgccggatgcctgctgcagaacgtcgtgcagatgatctcggtcatgttcgtcggccatctcggtgagctcgctctctcgagtgcctccatcgccacctcctttgccggtgtcaccggcttcagcttgttggtatatatgttatgtccattcatctcctgcatatttttgatcctcctgaatggacaactaacatcaacctgaatattctttctcgtatctgttcatgatcatcttattaggctggcatggcgagcagcttggacacactgtgcgggcaagccttcggggcaaagcagtactacctgctcggcatctacaagcagagggccatccttgtgctcactctggtgagcgttgtggttgcggtggtctgggcctacaccgggcagatcctcctgctcttcggccaggacccggagatcgccatgggggcggggagctacatccgatggatgattccggcattgttcgtctatgggccgctgcagtgccacgtccggttcctccagacgcagaacatcgtcctcccggtgatggcgagctcgggcatcacggcgctcagccacgtgctcgtgtgctggttgctggtgtacaagaatgggctgggcaacaagggcgctgccctggccaacgccatctcgtacctggccaatgtgtcaatcctgg

SEQ ID NO: 28637 - DNA, 290 bp, Zea mays
  Clone ID: MRT4577_126128C.1
gagaaattttagagagctttcaaactctttattctcatgttccacatggtctaattttaacattgataatatgccttcacactggattgtattaggcatgtgatttttgagattttattttgtgatgtattgtcttctgcagtattaaagggaaagaggtattaatgtgcattaccctatcttgtttttgaagccagggtagttgtatgattttgttaccagcagtgcgaacctgaatgtgacctggttaccttggaaatgcaggaacttatatgaatgtatataaaata

SEQ ID NO: 28638 - DNA, 4506 bp, Zea mays
  Clone ID: MRT4577_126129C.1
atgactcgctcccatccatcaattgacagtgagatggttggggtaggatttgatggcagcaaaagcgccctctgcagggttaccttgctcatactatacatgaatttgcaacgccatgtacttgttgatggcaagatgtcatttccatccctaagtcaaatgagaactacaagctgcttccgtcttcacccaatcagtgatgaggatgccaagtcgttaggactattaatagatgttgctctgtctatctatctatttacatcgctggaaattcccatgccctttcatattcaagctctgcaagtagtgaaagtggtctactacgagaccgactcttcgtcatcctccacctccggctcggaatcgacatccgtcacttctaagcgccatgagcgcaagaagtatagtaagatgccccttcgctacccacgtatttcaaaacacactccattactttctgtctcattaggaaaaccacctatgtttgatggtgaagattattctatatggagtgataaaatgaggcatcacctaacctcactccacaaaagcatatgggatattgttgagtatggagcgcaggtaccaaagaagggggacaaggattacaattcggaggaggtcgaacaaatccaacacttcaactcccaagccactactatactcctcgcctctctaagtcgagaggagtataataaggtgcaagggttgaagagtgcaaaggagatttgggacgtgctcaagaccacgcatgaaggagacgaggtgaccaagatcaccaagagggaaacgatcgagggggagctcggtcgattcatgcttcaccaaggggaggaaccacaagcgatgtacaaccggctcaaggccttggtgaaccaagtgcgcaacctcgggagcaccaaatgggatgaccatgagatggtcaaggttattcttagatcactcgtttttcttaaccctacacaagttcaattaattcgcggtgatccaaggtataaactaatgtcccccgaggaagttataggaaaatttgtgagctttgaattgatgatcaaaggctccaagaaaatcatcgagcaaggcaccacctccacacccgaggtgcaacccgtcgcattcaatgcgacggaggagaagaaggaagagtatacatcaagtaggctccccatcgacgcctccaagctcgacaacgaggagatggcgctcatcatcaagagctttcgccaaatcctcaaacaaaggaggggaaggactacaagccccgctccaagaaagtttgctacaagtgtgaagggaaagagaagagaaaagaagatgtactacaagaaaaagggcggcgacgcccatgtttgctgggagtgggactccgacgagagctccaccaactcctcctccgacgaggacgccgcaaacatcgccgtcaccaaaggccttctcttccccaacgtcggccacaggtgcctcatggcaaaagacggcaagaagaaggtaaaatcaagatcctctactaaatacgcaacttctagtgatgagaataattctagtgatgatgaggacaacttgcttactctttttgccaatcttaacatgcaacaaaaggaaaaattaaatgaattaattagtgccatccatgagaaggatgaactcttggatagccaagaggacttccttattaaggaaaacaaaaagcatgttaaagttaaaaatgcttatgctctagaggttgagaaatcaaatgtttgtgatgattcaattgttaatcttataaatgataattctagtttaattgctaagattgataaattgaatgcatccctttctagccttaagattgaaaatgaaaaattaatcactaaggctaaagatttaaatgtttgcaatacttctatttccaatcttagagatgagaatgctattttacatgctaagattgttgaattaaatacttgcaaacactctacatctactattgagcatgttactatttgtaatagatgtagagacattaatgttgatgctattcatgatcacctagctttaattaaacaacaaaatgatcacatagctcaacttagtgctaaaattaatgagcgtgacttagaaaatgaaaattttaaatttgctagaagcatactctatagtgggagacgccctgcattaaggatggcattggcttccaaaagagggacaatgtcaagcttaatgcccctcctaaaagattgtccaattttgttaagggcaaggctcccatacctcaggataacgagggttatattttgtatcccgctgattatcctaaggataagattaggagaattcatgcaaagaagactcattctactcaccatgcttttatttataagaatgaggcttctagctctaggcattctacacatgttaaaatgcctaaaaggaaaagtcctattgcatcaaatgaacctaatatttcatttaagattttttgatgcatcatatgtgctcactaacaaattaggcaaagtagttgtcaaatatattaggggcaaacacaaggggtcaaagacttgtgtttgggtacccaaggtttatgcatccgggggctcaagttggatcatcgacagcgggtgcacaaaccacatgactggggagaaaaagatgttctcctcctatgagaaaaaccaagatccccaacgagctatcatattcggggatggaaatcaaggtgttactgtctttagaagaagtgatgattcaatagcctttaagggagtgttagagggtcagctatacttagttgattttaatagagctgaactcgacacttgcttaattgctaagactaacatgggttggctctggcaccgccgactagcccacgttggaatgaaaaatcttcacaagcttctaaagggagaacacattttgggactaaccaatgttcattttgagaaagacaggatttgtagcgcatgccaagcagggaagcaagttggtgttcatcatccacacaagaacatcatgacgactgacaggccactggagctactccacatggatttattcggcctgatagcatacataagcatcggcgggagtaagtactgtctagttattgtggatgattattctcgcttcacttgggtattcttttcacaggaaaaatctcaaacccaagagactttaaagggattcttgagacgagctcaaaatgagttcggcttgaggatcaagaaaataagaagcgacaacgggacggagttcaagaattcacaaatcgaaggctttcttgaggaggagggcatcaagcatgggttctcttctccctacatgccacaacaaaatggtgtagtggagaggaagaatagaactctattggacatggcaaggaccatgcttgatgaatacaagacttcggatcggttttgggccgaggcggtcaacaccgcttgctacgcatcgaccggttatatcttcaccgaatcctcaagaagacatcatatgaactcctcaccggtaaaaagcccaatgtttcatattttagagtctttggtagcaaatgctttattcttgttaaaagaggtagaaaatctaaatttgctcctaaggctgttgtcggcgtttcgagacaggggggtccccaagccgacgagtgagtgtgctgcgtgccccagcccagatgggtcgagcgcgtgggcgagcgcgaaggggggagaggcgaggcggctggagccgagcgtgagagaggtggaagtcccgcggccttcgtgttcgtcccgcgcccaggtcagcccgagccaaggggtcggtcgaggcggaagtcgttcggccgaggccagggcggagtccgagccctggggtcgggcgaggcggagtttcgtcgtcttccgggtcttagcccgagtccgagccctggggtcgggcggagcggagtttgccgtcttccgggtcttagcccgagtccgagccctggggtcgggcggagcggagttcgccgtcttccgggtcttagcccgagtccgagccctggggtcgggcggagcggagttcgccgtcttccgggtcctagcccgagtccgagccctggggtcgggcggagcggagttcgccgtcttccgggtcttagcccgagtccgagccctggggtcgggcggagcggagttcgccgtcttccgggtcttagcccgagtccgagccctggggtcgcggagcggagttcgccgtcttccgggtcttagcccgagtccgagccctggggtcgggcggagcggagttcgccgtcttccgggtcctagcccgagtccgagccctggggtcgggcggagcggagttcgccgtcttccgggtcttagcccgagtccgagccctggggtcgggcggagcggagttcgccgtcttccgggtcttagcccgagtccgagccctggggtcgggcggagcggagttcgccgtcttccgggtcttagcccgagtccgagccctggggtcgggcggggtggagttcgccgtggcgcctttggcaaggcctga

SEQ ID NO: 28639 - DNA, 363 bp, Zea mays
  unsure (1)..(363): unsure at all n locations
  Clone ID: MRT4577_12612C.1
atatggcgtatatgctctgtcatggagtggctggtgtgatcttaatcaagcgtatcctanagaagtttccctcatgcgcatcttttggggaggcgcttttggtgtcaggtggtcttgttctctactttggtgatatgttggcacatacactttcaaagatggagttctccatgtcatcaaaagcattcattcacacacctcaaactagaagcgatatgaccgcaattattcagagttctcttaaagtttggtattgctggacaaaggagagaaagcaacaaacacaaacacctgaggaacataagcgaataagaattgattctgccatattctatatctcgttggcggtggtgttaatatttt

SEQ ID NO: 28640 - DNA, 2226 bp, Zea mays
  Clone ID: MRT4577_126130C.1
atgtcggtcagtgagtactgtgacaagttcatccagctgtcaagatatgctcctgctgaggtggcagatgatgaaaggaagcaggagcacttcacagaaggactcaatgggccactacagtatgcattggttgcccatacatttccaccatttcagaggcttcttgataaggctcttgctattgaacacaagcgtattcaactaggagacttgaagaggaaggctatctcacaggggcagggtagcagcagtgttcgtcctcgctatgttccgccacagggtacacctactcgtccaggaggaggaccatgcctagctcagtacgctccacaggggtctccacggacacctcccactcgtcaggctactcccactggcaccccgacgagtcagattgggaactatgctaatgcttgtctggtggggaattctggcacatcagctcagaacaagcaacagactcctggcaagggatactctatagccagggttaatcaagtcagcgcagatgctactcctgatagtgctgacatcgcacttggtatgttttatattaatgcaattcctgcaaccatattatttgattctggtgctacacattcttttatgtctgctcgttatgccaacacaaatgagataccactgcaaaatatgagaaaaccaatgatagtaattacacctaaagggcctgttgaggcaaatcacatgacacataggttgacattaactattatgggaagagaattctgggctaccactgtaatattagaggcaagcagtatagatctgatccttggtatgtcatggttaagaaaggcaaagtccagtatactatgtggtaggggtactgtagaactcaacagctctaaaggagaaagatttcaagttaaaattgcagtaactacctcttccagacgtgcgatgttctttatagctgaggagtttgttggaaacaacatccgtgtgccatacatgatgtccgtagaagaattaaaagaacttaagaagcagttaacggagttacaggaggcagggtacattcgtctgagttcctcaccttggggagcgccggtactgtttgtacagaaaaaggatggttcacaacagatgtgtgtggactatagatcacttaatgatgttactgtgaagaacaagtatctgttaccccgcattgaggatttatttgatcagatgagaggtgcaaggagtgagagtgatcatgaggaacatctgagattggtgctacagaagctacgagataatcaactctacgccaagtatagcaaatgcgagttttggattgacgaggtgtcattcctcgggcatatcatttctaatggtgggatatcagtggatcctgctaaagtcaaggagataatggcatggagcatacccactatagttacggagattcgaagtttcttgggacttgcaggatactatcggggatttattgagggattctctaagattgctaagcctatgacctcacttctagagaagggaagagagttcaagtgggacgagaagtgccaagatagctttgatcaagaagagctacccgatgagattgttgaggatttcaggagactcaacctgggaatagttgcacttactgaaagagtcaccatcgaattggaacctaccttggagcaagaaattcgtaagggtgatgctaaaattcaagagattaaggatctgattactgaaggtagaggtccagaattcacggaggatgagcaaggcacagtatggttcaaggatgagatatgtgttccggaaattgatagcattcgtgagactatattgaaggaagcccatgattttgattactctatccaccctggtagcactaagatgtatcaggatttgaagcagaagtactggtggtatgggctaaaaagagatgttgcggcacatgtggctaagtgtgatgtgtgtcaaagagtcaaggccgaacatcaaagaccagctggactattacacccgcttaagatacccgagtggaaatgggaagaaataggcatggatttctttgttggactaccccacactcctgcagggtatgactctatttgggtgattgtggatagattgataaaagtggctcatttcataccgatgaggactaattacacgggagccaagctagcagaattgtatatgactcggatagtttgcttgcatggggtgcctaagaagatcgtgtctgaccgaggatcatag

SEQ ID NO: 28641 - DNA, 319 bp, Zea mays
  unsure (1)..(319): unsure at all n locations
  Clone ID: MRT4577_126131C.1
aaaaaattatactactctcttctgtccagtccagccgcggacaccaaggcacaggcgcaggcaggcggacagggtaggcaagaggcgagctcggcgaaggcgcggagaggggagacagccagccgctgcattgcgctacattgggcaggagggctcgccgccgggggaggctcggatcttgcgtctctggccgtggctgccgcgtgcttgcttcgtttggtggcgctgcgcccattggcgggcggcctcggtccagcgcggcgtgatctggcgcgcgccgtcgactccactcgcgtggngaggcctgcatcttgacgct

SEQ ID NO: 28642 - DNA, 3942 bp, Zea mays
  Clone ID: MRT4577_126132C.1
atggagaccggcgacaagcccactacaagctacgggaaggcttcatcggaagagtcccgcaacatggggaaggggaaagagaagaaatcctcttcccacacgtcgcatcggagtggcgacaagaaaaagaagatgaggaaggtaccatctgtaggggatgaggattatgatgaggacgaagtggcccaaatccaaaacttcaactcccaagcctcaactatactcctcgcctctctaagtcgagaggagtataataaggtgcaagggttgaaaaatgctaaggagatttgggacacactaaagaccgcgcacgaaggagacgaggtgaccaaaatcaccaagcgggaaacgatcgagggggagctcggtcgcttccgattcgccaaggggaggagccacaagacattgcgcaacctcgggagcaaaaaatgggatgaccacgaaatggttaaggttattttaagatcacttgttttccttaaccctactcaagttcaattaattcgtggcaatcctagatatacactaatgactcccgaggaagtaatcgggatttttgtgagctttgaattgatgatcaaaggctcaaagaagatcaacgagcttgacggcccctccacgtccgaagcacaaccggtcgcattcaaggcaacggaagaaaagaaggaggaatctactccaagtcgaacacccatcgacgcctccaagctcgacaacgaggaaatggcgctcgtcatcaagagcttctgccaaatcctcaagcaaaggagggggaaggattacaagccccgctccaagaaaggcgacgacaagaaggggagaagaaatgagaagaagaggtactacaagaagaagggcggcgatacccatgtttgccgggagtgggactccgacgagagttccaccgactcctcctccgacgaggatgccgcaaacatcgtcgtcaccaagggtctcctcttccccaacgtcggccacaatgatgataatgctgatgaggaggataatttgcgtaccttttttgccaacctaaacatgcaacaaaaagaaaagttaaatgaactaattagtgccatccatgagaaggatgacctcttggacacccaagaggacttcctaatcaaggaaaacaaaaagcatgttaaggttaaaaatgcttatgctctagaagtaaaaaaatgtgaaaaattatctagtgagctaagcacttgccatgagactattgacaaccttagaaatgaaaatgctaatttgttagctaaggttgagtcaaatgtttgtgatgtttcaattccaaatcttaaaaatgataatgttgatttgcttgctaagattgaagaattgaacatttctcttgctagccttaggaatgaaaatgaaaaattgcttgctaaggctaaagaattaaatgtttgcaatgcttccatttccgaccttagaagtaaaaatgatatattgcatgctaaggttgtagaattaaaatcttgcaaaccctctacatctaccgttgaacatacttctatttgcactagatgtagagatgttgatattgatgctattcatgatcatatggtattaattaagcaacaaaatgatcatatagcacaattagatgctaaaattgccgagcatgaacttgaaaatgaaaaatttaaatttgctcgtagtatgctttatagtgggagacgccctggcattaaggatgtcattggcttccaacagggaggcaatgtcaaacttaatgcccctcctaagaaattgtccaactttgttaagagcaaggctcccatgcctcaggataacgagggttacattttataccctaccggttatcccgagagcaaaattaggagaattcattctaggaagtctcactctggccctaatcatgctttcatgtataagggtgagacatctagttctaggcaaccaacccgtgctaagttgcctaagaagaaaactcctagtgcatcaaatgaacatagcatttcatttaaaacttttgatgcatcttatgtgttaactaacaaatccggcaaagtagttgccatgtatgttgggggcaagcacaaggggtcaaagacttgtgtttgggtacccaaagttcttgtgtctaatgccaaaggacccaaaaccatttgggtttatgcatccgggggctcaagttggatcatcgatagcgggtgcacaaaccacatgacaggggagaagaagatgttctcctcctacgagaaaaaccaagatccccaacgagctatcacattcggggatggaaatcaaggtgtgactgtctttagaagaagtaatgattcaatagcatttaagggagtgttagagggtcagctatacttggaaaaatctcatacccaagaaaccttgaagggattcttgagacgggctcaaaatgagttcggcttaaggatcaagaaaataagaagcgacaacgggacggagttcaagaactcacaaattgaaggcttccttgaggaggagggcatcaagcatgagttctcttctccctacacgccacaacaaaatggtgtagtggagaggaagaatagaactctattggacatggcaagaaccatgcttgatgagtacaagacttcggatcggttttgggccgaggcagtcaacaccgcctgctacgccatcaaccggttgtatctacaccaaatcctcaagaagacatcatacaaactcctaaccggtaaaaagcccaacatttcatattttagagtctttagtagcaaatgctttattcttgtcaaaagaggtagaaaatctaaatttgctcctaagactgtagaaggctttttactaggatgtgattcaaacacaagggcatatagagtctttaacaagtcctctggacaagttgaagtttcttgtgacgttgtgtttgatgagactaacggctctcaagtagagcaagttgatcttgatgagataggtaatgaagaggctccatgcatcgcactaaggaacatgtccattgaggatgtgtgtcctaaagaatccgaagagcctccaagtgcacaagatcaaccatcctcctccacgcaagcatctccaccaactcaaaatgaggatgaggctcaagttgatgaaggagaagatcaacaagatgagacacctcaagatgatggcaataatcaagggggagatgcaaaggatcaagaaaaggaggatgaagaaccaagaccgccacacccaagagtccaccaagcaatccaacgagatcaccccgtcgacaccatcctcggcgacattcataagggggtaaccactagatctcgtgttgcacatttttgtgagcattactcttttgtttcctctattgagccacacagggtagaggaagcacttcaagattcggattgggtggtggcaatgcaagaggagctcaacaacttcactaggaatgagcctgagtcagcttggggtagggtaatgatggcacctactgttgacgcggtcggtccgtgccatgggttgggcgatgtggaggctcctccgaggtcgaggtcgagtctgtcttccgaggccgaggtcgagtccgagcccctgggtcgggcgaggcggggaccgtcggctgaggccagggctgagtccgagccctggggtcgggcgaagcggagttcgtcgtcttccggggctgagcccgagtccgagccctggggtcgggcgaagcggagttcgtcgtcttccggggctgagcctgagtccgagccctggggtcgggcggagcggagttcgtcgtcttctggggctgagcccgagtctgagccctggggtcgggcggagcggagttcatcgtcttccggggctgagcccgagtccgagccctggggttgggcggagcggagttcgtcgtcttccggggttgagcccgagtccgagccctgggtcgggcgaagcggagtttcccatggcgcctag

SEQ ID NO: 28643 - DNA, 2066 bp, Zea mays
  Clone ID: MRT4577_126133C.1
cgccatcatcctgcacgccaccagcgaccgcacgcgacgcgacgcagccttgtccgggacaaatccagcgctccccaaagcagaaagaccgcgacccaaagcaagctcaagctccgctcctccagtctccatctccaccgcccgccaaccccgagatatacctcccttcctctcgaagcttcgtctgcagacgaagtcgccggctcttccctcggcgctggtgccggtgggttgccagtggcggtgggtgggtggccgggtggtggtgttgctgggatgcccgccgcgacggcgaccgcagcccgcctccgcgtgccgctgccaaaagccgcccaccactcgccctgctcgagccggcgccaccccgactgccgccgccgctgacgaggcgagcggccacacgcttggcgcgcgccatggacgccttgtcccgccctgctgtcgtcatcgacaacggcaccgggtacacgaagatggggttcgcggggaacgtggagccctgcttcatcacccccactgtcgtcgccgtcaacgattccttctccggctccgcccagccggcggcgaggggcacccccgccagggggaactggctcgctcagcacagcgccggcgtcatggctgacctcgacttctacatcggcgacgaagcgctggcccgatcccgcgccagcagctcgcatagtttgagctatcccatccgcaacggccaggtggagaattgggataccatggagaggttctggcaacagtgcatcttcaattacctccggtgcgacccagaagatcattattttcttctaactgagagccctctgactgcccctgagacccgggagtacaccggagagatcatgttcgagacgttcaatgtgcccggcctctatattgcagtccaacctgtccttgcgctggctgctgggtacactacaaccaagtgtgaaatgacaggtgttgtagttgatgtgggtgatggggctacccatattgttccggttgctgatggttatgtcattgggagcagtatcagatctattccaattacaggcaaggatgttacccagtttattcatcaacttctaaaggaaagaggtgagaacattccagcagaagaatcttttgatgtagcaagaaggattaaagaaatgtactgctatacttcttcggacattgtgaaggaattcaataaacatgacaaggagccatcaaagtacattaaacactggacgggcactaaaccgaagactggtgcaaaatacacatgtgacattggatatgagcgattcctagggcctgagatcttcttcaacccagagatatataacaacgacttcaccactcctttgcaagttgttattgacaagtgcatccaatcatctccaatcgacacaaggagggctctttataagaatattgtcctgtctggaggctcgactatgttcaaagatttccacaggaggttacagcgggacctaaagaagatagtggatgcacgggtccgtgcatctaatagccggcttattagtggggatgctaaggcccagcctatagaagtgaacgtggtcagtcatccgatccagagatatgcggtatggtttggtggctctgtgcttgcttcaaccgccgaattctacgaggcttgccacacaaaggcagagtacgaggagtacggtgccagcatctgccgaacgaatcctgtcttcaaagggatgtactgactcagagcggttccctgtggctgacgtcgtggatgatatccactcaaagcttaaatggggagaagtgacagtggtcgtggagacaggactgtcgagagggatcctgatcgtggggaagcatagccgtacgagctgtacaaaagagaagcgcaaatagataggtttatgtttcaccatacaatttagatgctggtaggcctgacaggatgggtttgccacccctgctgaattgggtggcattgtaatttgtagcgtcaacacttctggcggtgcgagattgctccttgtatacatgttgattcggcagcgaaaaaaaaaaaaaaaaaaacaaaaaaggacggccgcccg

SEQ ID NO: 28644 - DNA, 381 bp, Zea mays
  unsure (1)..(381): unsure at all n locations
  Clone ID: MRT4577_126134C.1
ccgccatgtgctggaattcttccttaagcagtggtaaggcgcggggaggggggtttttttttttttttttttttttttttgggataaccaattcaggatatataatgacagaaaaactctaggttcacagagtaaatcccaaccagcatagcacacctacggcttgaattaccaaatataaatacaagaaccaanccttgtggggtgcggggggaacantaaaacanaacttaaaatctaaacataacttcttnttttacctcttttttcactttcccaaaacaatacctttnataactnttcaccctattcnaaaaatcttaancccatatcatcatcnctttcttccttctcttccaccttctcttctttctttncctc

SEQ ID NO: 28645 - DNA, 1851 bp, Zea mays
  unsure (1)..(1851): unsure at all n locations
  Clone ID: MRT4577_126135C.1
cctcgaggcggcgggaaaattgtttgtgaaagaaacctgctttttccaataatgccatctattttttgtttcatattttttccactggtgaatgtttttctttaagggctactttaaatcccctctgggattcccgaggattgaggaaaaaattaagctaatttccccctcaattcctggaaatcccggaaagggtttaagtttccaaactagccctaagtattccgttccactccttcgagtttctagccatggagtttttttatagaagaaatggtccttccaaaaggacatttagtcataatccaccttagggcttttcgttttgctctcaatctatggattggggtggattgagtgggtttaaattctaaataagtcgaaatctttcataatttttttcaatctcattcaatccacatgggataagaataaccgaacatggccttactgttgctttttcaggaattcaataaacatgacaaggagccatcaaagtacattaaacactggacgggcactaaaccgaagactggtgcaaaatacacatgtgacattggatatgagcgattcctagggcctgaggtatttggttttactaaacagagcatacagatatttagtaacttatatttcaccattcgtgtcagacttgcagtaattggttgtagcttgtaggtagcaaatgacatgcagaactactcccttttgttaatctgagttcactttacttcacttgtacctgagttaagtacttaagttggcttcctagaatacctagtttgacacttttgagttcaaacctttatggttatgatgaatgtgactgcaatgctaacttttcttcaagtacattttttgctatacatgttaattttagcattatattttaattcaaccttcttatattagtgtcaaatctgcgcagatcttcttcaacccagagatgtataacaacgacttcaccactcctttgcaagtgttattgacaagtgcatccaatcatccccaattgacacaaggagggctctttataagaatattgtcttgtctggaggctcgactatgtttaaagatttccataggaggttacagcgggacctcaaaaagatagtggatgcacgggtccgtgcatctaatagtcggcttcttagtggagatgctaaggcccagcctattgaagtgaatgtggtcagtcatcctattcagagatatgcggtatggtttggtggatctgtgcttgcttcaactgccgaattctacgaggcttgccgcacaaaagcagagtatgaagagtacggtgcgagcatctgccgatcgaaccctgttttcaaagggatgtactgactcagcctatcatagtcctgttctcaagggtatatatgtatttaaaccgagatctgttccctgtggctgacgtcgtgaatggcgtccactcaagcgtaaatggggagatctgacagcggaaacggactgccaagagggatcctggagaatcctagccgtaggagctgtacaaaagtccggccgggatataggttcattttttatcatacaatttagatgctggtaggcctgacgggatgggtttgccacctctgctgaactgggtggcattgtaatttgtagcgtcaacattggtgcttgtatacatgtagggtggcgttggggggggggggggggggggnnnnccnncnnttgnnccnngnnnccnnncccccaaaccantcccccnccnngcctnnnngnnccnggagaaaataaggggganaaagggaaggnngggnncgcaaccaaannggccccccccggccaaaaaaaaaaaaaaaaaaaccgccccccgacccccac

SEQ ID NO: 28646 - DNA, 265 bp, Zea mays
  Clone ID: MRT4577_126136C.1
cccacgcgtccgtccacgcgtccgtccacgcgtccgcggacgcatggatggactcattttttctctcttgatactataaataaattttccgactactgcactgtacataaattataatacttgttttttgatgttgaacttgtgcagatttcaggtgttatgtatattgtaagacgatacctaatagtctattgcttttatgattacaactattactttgagtgatacaattactgtcaaatcttcttcatcttttgtcccttcc

SEQ ID NO: 28647 - DNA, 264 bp, Zea mays
  Clone ID: MRT4577_126137C.1
cgggcacacttctcttttcgttcatcctgtaccttgattaatggggatccgtatttgtccttttcctctctacacaataaaacgttcctcatgccaatatccttctctcttatttcccttacgaacaaacccaaaccccctcccgggggggggggggttataaaaatagttatatgctgcctgccatcggcacgccctgctggttccaccgccactactatccgtgtccctagagcgcaacgcctctggcaccaaatggctccc

SEQ ID NO: 28648 - DNA, 403 bp, Zea mays
  Clone ID: MRT4577_126138C.1
tattcggtttaaatgaagaagccaagccgacgaatcgacaagaaaaagaatcaaatttaagattaaattaatcgcgagctttggcaatttgaacaaattccggcttaagagaagctcctccgaccaaaaatccatcgatatccggcttacgagctagttcttgactgttggcaccggtcactgaaccgccgtaaatgatgcgaacactttcggcgacttgtggcgaaacattcttgctgaaccattctcgcaattgttgatgcacttcttgagcttgatccggagtagctgttttgccggttccgattgcccaaactggttcgtaagcaaccacaaccttcgaccaatcggtcacttgagcagcaatggcagccatttgacggaaaaacgacttcggtgggtt

SEQ ID NO: 28649 - DNA, 353 bp, Zea mays
  Clone ID: MRT4577_126139C.1
aaataactcaaaattaattggtggttaactaatattgtacatctggagaacacgggcattgccaacccttcaaaagcaggctacagtatgcaatggggccacaacttatgcttagtaggatttgatgtcgcatctacatagagaacctaccaggggctctggacagggtcagaagtcctcactaccgaagagatcactgtgtaaacccagatttccaagaccagagggttgactaggtaaatcgatacttcgatatagtctggtacacgacgggtacatgtgatgcgttacttcctatctcgagtcttgaccaggaggaggagcagtggcacgctaacccttgggtgcatgca

SEQ ID NO: 28650 - DNA, 221 bp, Zea mays
  Clone ID: MRT4577_12613C.1
atgggggggcaacaatttcaaagttaaaaaaccaatcgacgcaccaataacctctcggtaggccccaccgacaccaaaggaccaagaaacccttgccccttcaacaacacaacaaaaaacacgtgccaacttcctaaaccccaccaaaaaataggctctgacatgaaaattcctcaagaacacactctgtctctttataactaactgctcacaggcctaca

SEQ ID NO: 28651 - DNA, 485 bp, Zea mays
  Clone ID: MRT4577_126140C.1
aactttgtaaacgtgttttaaagtccctaaactggttgtatggtgcactacacatatctaaacttgtaaaatggtgcaccgcaggtccatttatggaccatactgaccattatgatgcaccacttaaaacaagtttaagggcctggaaatatgttttcaaagtgcgtagaccaaagtggccccaacaactttaggggctgctcatgcatttaactcgatattctttgtatagtcgtacacttgctaggtgaatatgctacgtagctggtttacatgtttgttcccacaaacctggtttcggagctggcttaaagccttgacggagctttgctgggttgaaattcgcctcagacaaattctttgttgtttccaggtattgctactattgcctacgcacacgttgttcggctacgacttcttacagatgcacacgttgtgacggggcggtggttgcaattcaaagactaggatcaagttagttttac

SEQ ID NO: 28652 - DNA, 348 bp, Zea mays
  Clone ID: MRT4577_126141C.1
ggatatcaactcccttccccccgggacacccactagctatagagcgcgcgcgcccctagggctcttttttttttttttttttgagcaatccgagaatgcttgccccctccctgatctccatctatattacaaatcacccagccccaccaccagctctcctaattaacgacatctccattagcaaagacatcgagcttgtcctcctctctctcccactcatcacaaaactagaccacgccccaccagatgatccatcctcccgctcataccgatcacagcttattagtccaagaacacgctccgcgcgatgaactcactcccaagatgctccaccttagcagcaccctc

SEQ ID NO: 28653 - DNA, 390 bp, Zea mays
  Clone ID: MRT4577_126142C.1
cccacgcgtacgcccacgcgtacgcccactcgtccggtggagtaaagttgtgacatgcatcgttaaaaaaaggaggaaaaaaaaatagaaaaaaaaaagaaaaaaatatgataaaaataaaaaataatataattaaaattaaaagacgcaatagaagatgaaagagcgaaaagataactgaaataatacagacagaaaatggctgtagcttttgaagatctgattgtagtggcggtggaagctaagaaggtgggagctgaaaggaatgcactaattgagagcttgtggtcttattacaataaatgtgtaggcggtgtagaataccagttgcatagtatcttgcgcaattttaataaaagacggattccattggatggtgataatggaaaa

SEQ ID NO: 28654 - DNA, 847 bp, Zea mays
  Clone ID: MRT4577_126143C.1
ctaccacagggtacgcccactccacgccgccgacgccgccgccgccgccgggcgccggctacgactacgggcagtccaaggagcttcgggaggcggcggagctcaggcggcggcacttccacgcgctcggggccgacctgagcctcgacaagccgctggccgacgccggggccgcggagaagcccctgcggcgtttcttcgacgagtggccgcgggagagaggcgacacgaggccgtcgtgggcgggggcggaggacgcgacgcagctctccatctccatccccgcggcttcgccctcctctgaccacgctgcctctgccgccgcgcgatgccacaacgatgggagtgatcggtgcatctcctagctgcaactgcaatgcaagcctgcaaccgcgtggattgttgttgattggtgtagtttcctagctgcaattcaagcctgcaacagcgagcagtgagcagcaaatgcgtggggagggcacgcagctcaggctgatgcgcaaaatccgaagcgagtcaagcagcaataggactctaggtctatgatttgatcttcctttgtagcagtacgttaccaaaatgttagctcgttgttgttcggtgtgacattttcgttcaggttgctcctattggctgctgcaactgcaacgctagctctgtggcttttgtgtgctttcagtctgcggtgcgagccttgtcagctcttttccggtgacccacgcctttgattcctttcaaaaattcaaaaaaaaaaaaaaaaaaaaaaaaaatttgtcacatccgtggatttttcctcgcgggactactcccgtcccgaaatataaacaaacgcacatggttttttttc

SEQ ID NO: 28655 - DNA, 205 bp, Zea mays
  Clone ID: MRT4577_126144C.1
gttggtgaggactttgtcttctggaccggaaagaacattaccgcatcacttaaggatggaccacaagaaggaattacctggaacccaccgactattacgagggccaaaaaaattttcgccagagggggaccaaccctcctcatttcaatgttaagagcacacaccagaccaactggctataactctggatagaaattgactccac

SEQ ID NO: 28656 - DNA, 296 bp, Zea mays
  unsure (1)..(296): unsure at all n locations
  Clone ID: MRT4577_126145C.1
ccatccagatngagctgccttgaaatcatgtgacgcgtaagaaaagnatactcgtgagagcttcaacactggcgacataccgnnnatctctcggggaaggtagnaggggctgctttgnattgggtgagctcctatatgttggtagnaaccnattatggatccaatgcgtgatcgctggtcgcacgagattaccctgtgttngnnctctcgnntggtggnnctgcaccaccattgnnagcgtggnagaagggctgggcnnnttcgcnnagcaaggggaatttcaaataccccagcga

SEQ ID NO: 28657 - DNA, 253 bp, Zea mays
  Clone ID: MRT4577_126146C.1
gacggggatgattttttgttttttggaattggggaaaagcaaacgacatttcgacgagtgcaaacaagcactggcgagaaaccagagagcgagaagaaaaaaccagctcttctcagcttgagggggggaaaaaaaaaaaccacctgatttgctgtggggggaacacgaacaaacatttattgtgagcgtacgaacatagaaacaaaaggcaggagggagccagcccagccacacaggaaaacaggggcagcca

SEQ ID NO: 28658 - DNA, 367 bp, Zea mays
  Clone ID: MRT4577_126147C.1
cctcgaggccggccggggcgccgtatctgcctctgcctctgcccccccagactaccccctggcctgcaggctcctgcaactgcaatgtcggcgctcgggacgctctccggcggagccgccggtgtctcaggcctactccgcctccgacatcggtttagtcccggtgtcgtagcacctgcacctgcggcggggtcggagctgccacgggcaactccctctacacagccgtcgagctcaacgagctcggacagaacgtcttgccctagacggtcaaagaggacgcggcaccgtcaccgcccaccacagaggagaccatcatagctgaccctgtgacgcaggtccacctcattttttttttccgcaccgc

SEQ ID NO: 28659 - DNA, 410 bp, Zea mays
  Clone ID: MRT4577_126148C.1
actctctcgaatgcgctcactcatttctcttcacacactctactcttacataaactcctagtacatttctaactctcctcccatacacaacatacaactcttatcacccatatactgcatctttctatcatctcatgaacaatgcaaaccctacttaactaacagcaaccctcttaaagtactatacttaactttcttcccaagaccatcatcatcaacttatacctattagtactatatgaaacacaacaatctcttacccaaactatccttacatcatcaacttctacatatctcactgcatttcatcacttatatccaattccataacaaacacactttcgctctgcacataatccacaaaatctacatctcatattattcatctaacatactatcatcatacacat

SEQ ID NO: 28660 - DNA, 672 bp, Zea mays
  Clone ID: MRT4577_126149C.1
gccatgacccaccgcctccttctcctgctcctgctgctccctttgctagcgccgcctgctgcgtctgcacgccagggcgcggggcaggatttgggacagtgccccgggctggagtacggcctgccgccgttcgccgccgctctccgggcaagctgccccgtctcgacggaggggtactcgccccccgaggaggtgcgtgtctccgagccctagctccggccgtatggttgtctagttggccgcaagattgattctctctcggggagagcgaagccgaatcgggcagttcggcgtacggttctggcggatctcacacttgcgcgcgcgttccggtgctcatgtcgagaaatccatgtgatgttcagacttgttgatcgatgctgtattgctgtttccatctcagaagattctccttttgtttacttcactgattagcgtggattctcccggggagccatgggcagataatttgttttcgaagtttttacgggatggttagaggcgtctgaattaagctgtgcattagtagatcagttttgattcattttttagttaggatcgctttctagatccccttcctttgttgttgacggaatttacatgttcttgtgtgtttttcaagtataaatatagtcaacgcaagaatatcaagaacagtacgatgcatgacct

SEQ ID NO: 28661 - DNA, 113 bp, Zea mays
  Clone ID: MRT4577_12614C.1
caaccagagaattctgtgacctgcttgatcccgcagctagccatgacgatcggcgtctgctacggcgtggtggccaacaacctcccgccggcctaacgaggtggtgcagctct

SEQ ID NO: 28662 - DNA, 1454 bp, Zea mays
  Clone ID: MRT4577_126150C.1
cgctcatccgctcctaatccgcgtcttccaggggtggcagcccctgcatgatccaaaatttgggttagaagtcatgaaaaaatggaaggacctgctgcagggggaccaaccatatgacttctcagatagtgccgcatcaatgacaccatatgtgcagcttgttagtgaagtcatcctaccggctgtgaggatatcaggaaccaattcgtgggaggctagggaaccggaaccaatgctccactttcttgagttatgggataataagaagttgctgccgcctgttttgcttcaatcattactagagcatgtgatcatgccaaagctctcagctgccgtggattcttgggatcctcgcagggaaagcataccgatccatgtctgggtgcatccatggctgccaatgctaagggaaaggatagagaccttgtgccattctattcgatacaagttgagcactgtcctccatgtatggcaagcacatgatgcttcagcatatgcagtgttgtctccgtggaaagacgtgtttgattcggcaagctgggaagacctgattgtgcggtatatcattcctaaactgagattggcgttgcaagactttcagatcaacccagcaaaccagaagctcgatcagttcaactgggtgatgttgtggacatctgcaatcccagtacagctcatggtccatatgttggaagtcgatttcttcagcaagtggcagcaggttctttaccactggttgtgctcaccaaatcctgatttcaatgagataatgaactggtataagggatggaagggccttttcccaccagagttacttgccaatgagcgcatacggatgcttctaactgctggtcttgacatgatgaaccaagctgctgaaggacttgaggtggtgcaacctggggctagggagaatgtgggctacttgagggcaacggagaagcgacaatttgatgcagcacagcaagcttaccatgctgtgccaggagcagccatggcggatttgagcttcaaggagtctatacaggcatatgcaatggaacaaggtttgctatttatgcctagagttggcaagttctataatggcatgccagtgtatgagttcggcacagttagtatttgcatagactctgtgaagcgactactctatgcacaacttcaagagggaatcgacagatggagtcctgtaactcttacacaattgatggacatgaaccgaattggaagaccacactagtagatcgctcctagcctttgacttgcatgatgtttttactttcttccctgttgtgtaaaacttttcagagatgtcaattcattagctcttttgaacaatatctccgttaaagaagaaaggggttagatctatatctaaatgtgctggataatgttgtatgtctcattgtgctgctggtatttacggtggtgctgtcaatatgacgtggctctttggt

SEQ ID NO: 28663 - DNA, 832 bp, Zea mays
  Clone ID: MRT4577_126151C.1
gaggcaacagacaagacaaatgttaattccggccgatagttcaattgtgcaaagcacgaagcagcaggaagctgctgagcttgaggagaagcagagcatcaagcggaggatccttgagtacaatgagagggaggaagaattgaatggagcatcccaaatggggaactggggccaaggagctaccagtaccagcagtatcagatcaggtggccggggcagctgggatggttcagcacggggaggtggtcgacaacggcaccacataacgggttctggtggtttctaccacagttatggcaggagaagataagttcgcctgtgtgagctatttcgccctgagccttttggcaggtagaaagcatcctagtctgacaaattgcctctagcaaatgagattagcgtttaacacagcttgatggacaattgcctctagcaccctagtctgaaaataagacaattctaccactggtcatgggagatagcaatgccttgagaaggagctgcaaatctgatggtcctaatggcttgagttgctacggtgtttggtaaagctggttgtgatggctgtacccggatacatgcgcatactgtttcgacgccatgtagggggtatctgatcaaagttcgctgtctgatgcctgttctaatttagtggagtattactggcaatgtggtacaagcatcttgtcttgaaaatcgaaaactgcacggtatgtgtgcgccattttttgtctgatgaggtgtgttccatgcgtgtatttcatatgtagctacaccaatcgcgtgtccaccgaacgatgctaacttgctatgccgatggagcatgctttct

SEQ ID NO: 28664 - DNA, 448 bp, Zea mays
  Clone ID: MRT4577_126152C.1
ggtcgcgtgggtcatccctggacctttccttcctggttcctccatcctttccatttttccgcacggtgagacctatcagagataacggtaataagtgggatacggtgtcaactgtttaaaatttcaatgctccaaaaaacacacaaaacaaaagaataaaaggtatagcctggaaagcctaaggtgccaaataactaacctaaatcacattaatcgcaatgccctcactgcacgcttgacacttcgaaaacctgactcaccaattaatttaacaactcgcccaacgaggcgggagaggcagagggcacctggggcgccattttttttattatttaaaccagcaacagcgggaagggcttaatctccttgacctcctagacttgatatatttgcaccaagcgggccaccctcagttggccaaccacccaaaaattgggggtgaaggggg

SEQ ID NO: 28665 - DNA, 1607 bp, Zea mays
  unsure (1)..(1607): unsure at all n locations
  Clone ID: MRT4577_126153C.1
atcgaggaatcgcgggcccgccgcggcaccaaggccccccgcattccgtcccgccgcggcgtcgctcccttgttctctcccgagccgtccgcgaaccaacccgtgctacctccgattccctcgtcgttctttctagaacctccgctccgcctaatcccttgaccgggtcaagcccgaacgagactagggaggttccagcgccgccggtgggggagatggcgctggagctgagcctggcctcggcttcgccgccggcgggcggcggcttggcgcagccgccgcccctcgccccacccgggaaggagcagcaagtggccggcgtggggattctactgcagatctccatgctcgtgctctcgttcgtcctcggccacgtcctgcgccgccaccgcttctactacctccccgaggccagcgcctcgcttctaattggcttagttgttggtggcctcgctaatatttcaaatacagagaccaacacaaggacgtggttcaacttccatgaagagttcttcttcttgttcttattacctccgataatattccagtcgggtttcagcttatctccgaaaccattctttgcaaactttggggctatcgtaacttttgcaattcttgggacattcattgcttctgttgtaacaggagttcttgtctatcttggtgggctgacatttctaatgtacaaacttccactggttgaatgccttatgtttggtgctcttatatctgcaactgatcctgtcacagtgctatcaatattccaggaactgggttctgatgttaacttgtatgctttggtgttttgggaatctgttttgaatgatgacatagcaatttctctttacagggcaatgtcaggttacatgcactatgagttatgaagcgggaacatttttaggaggaggattgagtttgaaactcaaacagtttcacaaaagcacaacatcattcactgcccttgacaagaactatctcactccattttttaccagtcagacagatgatgataacgatgacgacttcagtcagcaaccccaaaaccgaagactagctttttatgatcaatagcggaatttgatcctctacatatcaagctaaatacacggagcagaactgacgtgcatgactatgtctatgtgtgattgggtcgaacaaaatatagcaggagcatacttagttgagtagcatatggcagagcatatctgtataccgtaggacaaaaatcataagggttcgaatcagttgttcccatgggggatgaggatgatgatagccaggcagcatgtatatatttctaggcttccttaagaacttagtggggctccagatgaaaagcagtgtgttgttggaattttatagaccctacctcgtgttaggttaattttaataaacccgaccgtttgtccgctaagtcggctattattctcttgttgtaattgacgcgttgcaccagttgccccactggctggttgcaccagtgggaaattgacgcgtaccatatataatgttgacatggctgattaaaaaaaaaaaaaaaaaaaanaaaaaaannaaaanaaanaaaannnnaaaaaaaaaaaaaaaaaaaaaaagggcgccgctcg

SEQ ID NO: 28666 - DNA, 333 bp, Zea mays
  Clone ID: MRT4577_126154C.1
atgaccatgatcgaaggccccaacacagggagcttcgtcaagagggctcattcaacgaagatgaatgcagaattacaggctatcccatggccacaatcctacaagccacctcagctacccatgtacaatgggcattcggacccaaaacaattcttgatgagctatgaggcaacaatatcctcatatggaggcaacgcagctatcatggcaaagtccttcgtcatggtagtccgaaatgtggcccagagatggtactcttctcttcggccagggacaatcacgtcatggcagaagctcaaggacatgttggttactagttttcaaggcttttag

SEQ ID NO: 28667 - DNA, 2407 bp, Zea mays
  Clone ID: MRT4577_126155C.1
ccaagttccaacatgacaggcacgaaggcaagtcgagcagacagcaacatctagcacgaagcaccggccttgtacgcatcctcccttcgcatcgaggaatcgcgggcccaccgcggcaccaaggccccccgcattccgtcccgccgcggcgtcgctcccttgttctctcccgagccgtccgcgaaccaacccgtgctacctccgattcttcgcctcgtcgttctttctagaacctccgctccgcctaatcccgaacgagactagggaggttccagcgccgccggtgggggagatggcgctggagctgagcctggcctcggcttcgccgccggcgggcggcggcttggcgcagccgccgcccctcgccccacccgggaaggagcagcaagtggccggcgtggggattctactgcagatctccatgctcgtgctctcgttcgtcctcggccacgtcctgcgccgccaccgcttctactacctccccgaggccagcgcctcgcttctaattggcttagttgttggtggcctcgctaatatttcaaatacagagaccaacacaaggacgtggttcaacttccatgaagagttcttcttcttgttcttattacctccgataatattccagtcgggtttcagcttatctccgaaaccattctttgcaaactttggggctatcgtaacttttgcaattcttgggacattcattgcttctgttgtaacaggagttcttgtctatcttggtgggctgacatttctaatgtacaaacttccactggttgaatgccttatgtttggtgctcttatatctgcaactgatcctgtcacagtgctatcaatattccaggaactgggttctgatgttaacttgtatgctttggtgtttggagaatctgttttgaatgatgcgatggcaatttctctttacaggacaatgtcatcagtcagaagtcatgcagcaggcggcgagaacttttttatgatgattctccaatttctcgaaacctttgttggttcaatgtcatcaggtgtgggagttggatttatctctgctcttctattcaaatatgctggattggacgttgataatctgcagaacttggagtgctgcctttttgttctctttccttacttttcgtacatgttagcagaaggacttggcttgtcagggattgtttctatattattcacagggatggttatgaagcattacacatattccaatctttcagacaactcacagcgctttgtttctgccttttttcatttactatcatctttagctgaaacatttgtgttcatctatatgggtttcgatattgccatggaagagcatagctggtcacatgttggcttcatcttcttctcaattatattcatagttgttgcaagggctgcaaatgtcttttcttgtgcatacttggttaacatgtctcggccagaacatcgccgtatacctgtaaaacatcaaaaggcactttggttcagtggtcttagaggggccatggcttttgcacttgctctccaatctgtgcatgaacttcctgaaggacatggaaaaacgatattcaccaccaccactgccattgttgttttgacggtacttctcattggagggtcgacaggaactatgcttgaatctttggatgttgttggagatgaaaacacatcaagagaaaattacgaggacaacaatggttacatgcctccgagttatgaagaaggaacatcctctggaggaggattgagaatgaaactcaaacagtttcacaaaagcacaacatcattcactgcccttgacaagaactatctcactccattttttaccagtcagacagatgatgataacgatgacgacttcagtcagcaaccccaaaaccgaaggctagctttttatgatcaatagcggaatttgatactctacatatcaagctaaatacacggagcagaactgacgtgcatgactgtctatgtgtgatttggtcgaacaaaatatagcaggagcatacttagttgagtagcatatggcagagcatatctgtataccgtaggacaaaaatcataagggttcgaatcagttgttcccatgggggacgaggatgatgatagccaggcagcatgtatatatttctaggcttccttaagaacttagtggggctccagatgaaaagcagtgtgttgttggaattttatagaccctaccttgtgttaggttaaattttaataaacccgaccgtttgtccgctaagtcggctattatgctcttgttgtaattgacgcgttgcaccagttgccccactggctggttgcaccagtgggaaattgacgcgtaccatatataatgttgccatggctgattataaaaattctgcaaagcactgaaagcaaaaaaaaaaaaaaaaaagcggcc

SEQ ID NO: 28668 - DNA, 857 bp, Zea mays
  unsure (1)..(857): unsure at all n locations
  Clone ID: MRT4577_126156C.1
actttcattcagaggaaccacaccgacaccccatccactttatctcagttgagaggtttagaagcgcgcggtgaagcacaaagtgcagcaagagctgcgagaaggagcgagcagcaatggcgaggcacagcctccttgccgtgctcctcgtcgggctggtcgcggcctccggcttcagccaggcggccgccgctggccggggccttgctgagaagctccccgagccggagcccaagccgacgccgtacccagagcccaagccgcaacccaagccagagccaatgcctaagcctgaacccatgccaaagccagagcctaagcctctgcctaaacctgaacccatgccaaagccagagcctaagcctatgcccaaacccgaacccatgccaaagccagagcccaaaccggaaccgaagccggagccgatgccaaagcctgaacctaagcctgagcccaagccttacccgatgcccaaacccgagcctaagcctgagcccaagcccgagccgatgccaaaacccgaaccaaagcctgagcccaagcccgagcctatgccaaaacctgaaccaaagcccgagcccaaacccgagccgatgaagcccgagcctaagccaatgccgaaacctgaacctaagccagagcccaagccagagccgatgccaaaaccggaaccgaagccagagcccaagcccgagcctatgccaaaaccggaaccaaagccagagcccaaacccgagccgatgaagcccgagcctaagccgatgccaaaacccgaacctaagccagagcccaagacccgagccgatgccaaaacccagagccaagccagagncccagccccgagccgatgccaaaac

SEQ ID NO: 28669 - DNA, 265 bp, Zea mays
  Clone ID: MRT4577_126157C.1
ccagaaaccccggctcgatcccacgcgtgcgcgccggcaagcgcaagaaggccaccactagcggcatgtcccaagcgcccgcccttcgccctcttggtctttatttgggagtcaagggcgccgtatcaaccccaacacccttacatcaagagcattacttgatggtacccacctagcactctactctacctttatccctcaaaaacgttgagctagatgtgattgtttgactcttatgtgccatatcaccgtgatacgacggcat

SEQ ID NO: 28670 - DNA, 932 bp, Zea mays
  unsure (1)..(932): unsure at all n locations
  Clone ID: MRT4577_126158C.1
acgacttgcgttatacgagattttctctgannttctaatttatttttctttatctcatctttaattatctcgtactcaacaggagcaactgctgcccgttgcttcttgtatagttcataacgtacaataaatccatgtaaatatgctcttacagcactgctgccaatgtattgagtaaggttcagtcgctccatctcttctttagtcaagaacttgtactcatcaaacagcgttgtatctggtttctcttccatctcctcagttaagttatcaagatgtgaacaccactttggagcagggccgagcgcaggaatgaagtgggcaggtatctggctattgtccagggctaatagcactaaaccactattccggaagacacagacatcattgatagcaccaccatctggttcaatgctagtcatgttatttcctgtattaggatcccagattctcactatgtgcttatcagcagtgatcagtttaggttcagtagaattaagtgtctggtgccatttgatatttaatattgggctaccatacatgtgatccttaactctcagaggagaagacatgcgtaaatcatatattgatatctttcctgtactggtccccactgccataaagtatccttgatcttcatcaaattgcaaagacgtgacctcctgagaataatcttcagaactaacagctggaatattaattctgccaacagaagtttttttcctcatatcaaaacactcaactgcaccatcctcaccaccgcaagcaacaagcccatggatcttacttcgtgtaaccgcatttattgctggtgattcggaggaaagagaagcaaggaatcgtccctgctctaggtttatcctgtacagatctggtgatgaagcagcacatagcaagtcgcaggaccagcaatcgtaggccatgtcccccga

SEQ ID NO: 28671 - DNA, 392 bp, Zea mays
  Clone ID: MRT4577_126159C.1
ttcctttttttttttactgatgcacctttttaccttaaggctaacatgttgaagtatgacccaaatcattgtcgagaccttaaacacctttcgctctgcaacagtagacatacaggtccgtgctctatgtgtatgccagtggccataccacaggtatcgtgctcgaatcgggagatggtgtgagccacaccggccccatatacaagggatacgcccttcaccacgccatacttcgtgttgacccggcctgtcgggaccttaccaactacctgacgaagatcctgactgatcgcgcatactacttcaccaccactcgtgagcggaaaatcggtagtaacatgaaggagaagatcgcttacatggccttagactacgaccagttgatggatacc

SEQ ID NO: 28672 - DNA, 573 bp, Zea mays
  Clone ID: MRT4577_12615C.1
acgtggcgtatactttctggtaacgaccaatatggcgtatatgctctgtcatggagtggctgctgtgatcttaatcaagcatatcctagagaagtttccctcatgcgcatcttttggggaggcgcttttggtgtcaggtggtcttgttctctactttggtgatatgttggcacatacactttcaaagatggagttctccatgtcatcaaaagcattcattcacacacctcaaactagaagcgatatgaccgcaattattcaggggattttacttgtcctttttctacttccgttactatacaagagttctcttaaagtttggtattgctggacaaaggagagaaagcaacaaacacaaacacctgaggaacataagcgaataagaattgattctgccatattctatatctcgttggcggtggtgttaatatttttactgccatcatggacacaccttgtccaaggcctcaaagggcatccttttgtttggattgttaactatatgttcactgattcacatgagcgacttgttttatgtgcatactggatatgtgtaatatatgtatcagttag

SEQ ID NO: 28673 - DNA, 549 bp, Zea mays
  Clone ID: MRT4577_126160C.1
acgctagacaagtccgcgacacctatcaatgagacccgaaacgtgaatgaccccaggtggaaagctagagctccaatacacctagagagagaggagaagcagacaccatgtgccacgacacctgatgcgaatgattcatgggtatcgcacagtaggaacccgtgctgtacatagaggctacggttgtacaaggaccacatgtactgcttacacgaacttatggtggggacctttctgaattggctgttagggagagggcagtatatagaggcgggcatatagaggtgggagagcccaagatctggactctgaatcgctatgagctactactctatgtacaattatacccactatgttggttgaggagcaggagtatagtcaagactgtgctgaattgcaaattatcatagacatgactgatgcaagggggagcttctggctggaacctatcactgctatacgtgatactggcggttggaaaagatgttcgccttgagtcgagcactaaccatgcgagacatgcctgccgaagagttggagtttagagac

SEQ ID NO: 28674 - DNA, 148 bp, Zea mays
  Clone ID: MRT4577_126161C.1
tttataattttttaaacagatttgaacaacggaatttacattccgaaacacaccgccagcgacagacaaaggccggcaaggtcgctcccattttcacgccccaattaagcggccacaggtggccatcaaagctaaaaataaaataaaa

SEQ ID NO: 28675 - DNA, 359 bp, Zea mays
  unsure (1)..(359): unsure at all n locations
  Clone ID: MRT4577_126162C.1
cggctgctgttctgccagatggaagacagcatctgcatgcccttgcgacaaagcaaagcaccttctttttcttcatccaggccgctggccgccccccccccccccncccccaatttggccaaanctttaaatatctccactctccacttttcctgttctccaaaaatccaatnccattcttccntntcntcttttccaaatntaaagnntntcncgggggggggaggcttcaattactttctataagctgggagttntatcgatcatnataagttcgtcaccatgagattgccgaggccgtggggangaaagcccgcgangaaacatggtgatgtaccggagacgggggaaaccaacct

SEQ ID NO: 28676 - DNA, 603 bp, Zea mays
  Clone ID: MRT4577_126163C.1
gtcgttgccgagagcgcggaggagagagagtgtgagtgcatcgccgatcaaagacacccgctcgccttcggatcgtgaggcctcaaatagtccgggcgcggcgcggcatcctggtgcggcggccgaagcggcttggcggcgcggcgtctggagcctggtgcttccctcgcgtgcgggctcgggaatctacgcgtcgacctcgccttcgtctggttggtggtaagtgccgattcttcctctatagcgactggtggcgtgaaaggttttggctaggcgtgagctgggtgcttcttgggttgttcaccgtcacggcggcgagctcgccgttggctggcaggaccggtcacctgcgcgttgcggtggcgccaccttaaaagtgtagcgcgccgtggaccgagccctgtgctcgacgacggtagaaattggtagggaggatgagttcataacatcgtcaattgggcgaagagcgaaggaatttggagatggaggtcaggttggccggaatcgcagcgcgctggtggagtgccaccgcgggcctcttctccaccttccctggtcgtcggaggtggaagggtgtacgcgcgccgtcggaatgcgagcgtg

SEQ ID NO: 28677 - DNA, 700 bp, Zea mays
  Clone ID: MRT4577_126164C.1
aggactgccaacaaggccaaggctgcactgattgtcgtcctgactcgcggtggcaccacggccaaactggtcgccaagtaccgccccagggtccccatcctctccgttgtcgtacccgtgcttacgaccgactctttcgactggaccatcagctccgagggcccagctaggcacagcctgatctacagaggcctcattcccctcctcgccgagggctccgcgaaggctacggattcagagtcgacggaggtgatccttgaggccgcgttgaagtcggccgtgcagaagcagctctgcaagcctggtgatgccatcgtggctcttcatcgtattggcgtcgcctccgtcatcaagatctgcatcgtgaagtgatcaccacgacctggttctcactgctgggattccatgaaacagcttttctgcctcctttttactgcatttttttccggagacagatatttatgttgtaagcctgcgtctgttgtttgcagttgcggaatgttttttgttcacgtagttatttagctggtaaatggggagggagaggactccattgatgttagtggtaataagatttgtgtctatggagttgagttgaaagggttttttcatgctaagccccgagacactaggagatggagatcgaggttgagatgagataagcaataagtgaaaaaaatgttgatttgctttctttgtc

SEQ ID NO: 28678 - DNA, 374 bp, Zea mays
  Clone ID: MRT4577_126165C.1
ggtctggacctttgggctgatttatgtgcttggagcagtcccgccctaacccatttcttcccccccttaggtcccgtggtcgaaagtgagtacgtagtcaattgcttgcttctcggacctattgcgtaggtcggagtataatcctggtaagcctttgcgtgcgattgttggtgagatgactgtggcgatcgagggtgagtgatggcatcattcggatgcgtcggaggtgcgcttggttggtgtggctcgtcttactgatatggatcgtgtcgtggatcccgtgttgttgtctgatcatgcggaggttttggttcctggcggtagttaaggtagtgatgaattgatgtagttggtttggactcgtggtatcggga

SEQ ID NO: 28679 - DNA, 736 bp, Zea mays
  unsure (1)..(736): unsure at all n locations
  Clone ID: MRT4577_126166C.1
aggccaaggctgcactgattgtcgtcctgactcgcggtggcaccacggnccaaactggtcgccaagtaccgccccagggtccccatcctctccgttgtcgtacccgtgcttacgaccgactctttcgactggaccatcagctccgagggcccagctaggcacagcctgatctacagaggcctcattcccctcctcgccgagggctccgcgaaggctacggattcagagtcgacggaggtgatccttgaggccgcgttgaagtcggccgtgcagaagcagctctgcaagcctggtgatgccatcgtggctcttcatcgtatcggcgtcgcctccgtcatcaagatctgcatcgtgaagtgatcaccacgacctgactcctaagtcctggggcgtggttctcactgctgggattccatgaaacagcttttctgcctcctttttactgcaatttttttcccggagacatatatttatgttgtaagcctgcgtctgttgtttgcagttgcggaatgttttttttttgttcacgtagttatttagctggtaaatggggagggagaggactccattgatgttagtggtaataagatttgtgtctatggagttgagttgaaagggttttttcatgctaagccccgagacactaggagatggggaccgaggttgagatgagataagcaataagtgaaaaaaattgttgatttgaaaaaaaaaaaaaaaaaggcccctagggccc

SEQ ID NO: 28680 - DNA, 2757 bp, Zea mays
  unsure (1)..(2757): unsure at all n locations
  Clone ID: MRT4577_126167C.1
gccggccggtttccggagtgggcaccacgtgtccagcgactgacccctgcctggtgcatgcgccttccatctccggccggtctccgctcgtcgtcctcgcccagcccagagacgcccacggaatcgcaattccccactcccaccccccttctcctttctataaagggaaacttcgccaccaaatctcgaatcccatctcgctgctctccgccgctcgacgccgacgccgacgccaccgacacctctccctccccccattccccgtgccccggaccgcggagcagacagaggcgagatccggagcgccgcgcgatggcgaacatcgacatggcgaagatcctggcggacctggaccgcggcgccggcgacgcgcgcctgcccaagaccaagctcgtctgcacgctccgagcgttcccatcctccctgttcaggtacccgtgccaacgacggattctttcgactggaccatcagctccgagggcccagctaggcacagcctgatctatagaggcctcattcccctcctcgctgagggctccgcgaaggctacggattcagagtcaaccgaggtgatcctggaggctgcgctcaagtcggccgtgcagaagcaactttgcaagcctggtgatgccattgtggctctccatcgtatcggcgtcgcctccgtcatcatgatatgcatcgtgaagtgatcaccgtgacttgactcctaagtccccgggggggtgtgaagcctgggaatgtcatactctgcgcagatggtactatctctttggccgttctgtcttgcgatcctgatgctggaactgtgaggtgtaggtgtgagaacactgcaatgcttggtgagagaaagaactgcaatttgccaggaattgttgtggatcttcctacattgactgagaaagataaagaagatattttgggctggggtgttccaaatgacattgacatgattgctctatcctttgtccgtaaaggatcagatttggtgactgtcagacaggttcttgggcagcatgccaagcgcattaagttgatgtcaaaggttgaaaaccaagagggtgttgtaaactttgatgagatcttgagggagactgatgcttttatggttgctagaggtgatctgggaatggagattccagtcgagaagattttccttgcgcagaagatgatgatctacaagtgcaacattgctggcaaacctgttgttactgctacccagatgctcgagtcgatgatcaaatctcctcggccgacacgtgctgaggccactgacgttgcaaatgccgttcttgatggaactgactgtgtcatgctcagcggcgagagtgccgctggagcctaccccgaggtggctgtgaagatcatggctcgtatctgcatcgaggcagaatcttccctggaccacgaggcagttttcaaggccatgatcaggtccgcgcctcttccaatgagccctctggagtcccttgcatcatctgctgtgaggactgccaacaaggccaaggctgcactgattgtcgtcctgactcgcggtggcaccacggccaaactggtcgccaagtaccgccccagggtccccatcctctccgttgtcgtacccgtgctaacgacggattctttcgactggaccatcagctccgagggcccagctaggcacagcctgatctatagaggcctcattcccctcctcgctgagggctccgcgaaggctacggattcagagtcaaccgaggtgatcctggaggctgcgctcaagtcggccgtgcagaagcaactttgcaagcctggtgatgccattgtggctctccatcgtatcggcgtcgcctccgtcatcaagatctgcatcgtgaagtgatcaccgtgacttgactcctaagtcccaggggggtggttctcaccgctgggacctatgaaacaacttttctgcctcctttttaactgcatttttcggagacagataattactgtatgttgtaagcccgcttctgttgtttgcagctgcaagatgtctttttttttgtttacatagtttttgagctggtaaatgaggagggagaggactccattgatgttagtggtaataagatttgtatctacggagttcagttgaaagggttttttcatgctaagccccgagacactaggagatggagatcgaggttgagatgagataagcaataagtgaaaaaaatgttgatttgctttctttgtatgcacacgcttttgaggggtaagattagtctccattggagttggggtttttttatgcagccccgggtgcgccgacccgctcntcggctgctctactgccctcngacgatgtggcattcaggcttgcatggcctgcatgcttccggtgacaatgaccatctgaaggtaggtngatgatgcttttcaacacctttcttcagtgagactgggcgctgggaagcacgtcccccgtgactgtttttgttgaccttgagcccactgtcatcgatgaggtgaggactgtcagctaccgccagctcttccatcctgagcatgtcatcagtgccaaggatgatgcagccaacaacttcgctcgtgttcactacaccattgacaaggatattgttgacctgtgccttgaccgcatcacgaagcttgcacataattggacttgactccaggtgttcctcgtcttcaacgctgttggtgtaagtactgtgtcttggtgttggttgtctcctcctgggtgcgtctgtctggttgcttttgggtataattcctagt

SEQ ID NO: 28681 - DNA, 1391 bp, Zea mays
  Clone ID: MRT4577_126168C.1
aattcggcacgagggagagcctgcgcggctgcgccttgcatcgcatctccgtcgtcgtcctcgcccacggaatccgtccaattccccacgccgcccgtcgtccttttctataaaattcactccgccaccaaatctcgaatccccatcgcgctgcttttccaccgaccccgacgccgacgccgacgccaccgccgctccctccccagtccccactccccttcccgggccgcggagcagagatccggggcgccgcgcgatggcgaacatcgacatggcgaagatcctggcggacctggaccgcggcgccagcggcggcgacgcgcgggtgcccaagaccaagctcgtatgcacgctcggcccggcctcccgcaccgtgcccatgctcgagaagctgctccgcgccggcatgaacgtcgcgcgcttcaacttctcccacggcacccacgagtaccaccaggagacgctcgacaacctccgccaggccatgcacaacaccggcatcctctgcgccgtcatgctcgacaccaagggtcctgagatccgtacagggtttttgaaggatggtaaaccgattaagctaaccaagggtcaagaaatcactgtcaccactgattatgatatcaagggtgacgaaaatacgattgctatgagttacaagaaactgcctgttgacgtgaagcctggaaatgtcatactctgcgcagatggtactatctctctggccgttctatcttgtgatcctgatgctggaactgtgaggtgtagatgcgagaacactgcaatgcttggtgagagaaagaactgcaatctgccaggaattgttgtggatcttcctacattgactgagaaagataaagaagacattttggggctggggtgttccaaatgatattgacatgattgctctatcctttgtccgtaaaggatcagatttggtgactgtgagacaggttcttgggcagcatgccaagcgcattaagttgatgtcaaagttggttagcgaaatgcaattctgttaacttgacgctacatttccacctggttgagaaccaagagggtgttgtaaactttgatgagatcttgagggagactgatgcttttatggttgctagaggtgatctgggaatggagattccagtcgagaagattttccttgcgcagaagatgatgatctacaagtgcaacattgctggcaaacctgttgttactgctacccagatgctcgagtcgatgatcaaatctcctcggccgacacgtgctgaggccactgacgttgcaaatgccgttcttgatggaactgactgtgtcatgctcagcggagagagtgccgctggagcctaccccgaggtggctgtgaagatcatggctcgtatttgcatcgaggcagaatc

SEQ ID NO: 28682 - DNA, 482 bp, Zea mays
  Clone ID: MRT4577_126169C.1
gttctctcattcttttagatggtaataaaagcaagcctggattcaaagacacaataacttaactttttcgtgttctacgccaacacaagactggcgttccatacaacctttagggccgcgcacagaacacccactaatcgccggcgccctgccgatgacatttctacaacgtcctgccctcactcatacagacagcacttatataggccctagattaggggacgactatatgctgaccagggccaaaaaccatgtttcaacagacgccttagccatcccgggtatttggaccatgcgactgcatgcattccagattgggctctacggagcagcttcagactttttgcaaggcaaggtcttagctccatgactggtgaaacttctttccgatgctagtaaagcagattaatctatcttgatgccaaatcagtgaagaatggatcgaccaatgagcgctctgactctcatacttggcaataaac

SEQ ID NO: 28683 - DNA, 625 bp, Zea mays
  unsure (1)..(625): unsure at all n locations
  Clone ID: MRT4577_12616C.1
gaccctcgggctttccggggattgctcgctacccctccaaccagcggccagccccgtctctatcggatccgcgccccaccccctgcgaacccgtcagtggccgccgtcgccgggggaggacgaggagggcggcgcgatggacgacggcggaatccaggaggagccgccgtcgacgcggttcctgacgccgacgcgctcggggggcacacgctgggtggacggcagcgaggtcgactcgtccgagtccacgccgtcgtggtcgctcgaggacgaacgctcggcgggggccgtctcctccaacgggggcgccgtggcggcgtctcgggtgtcctccggcgcattccggcggcggttcgggaagcggccccgccgcgtcgactcgctcgacgtcgagtccatgaacgtgcgcggcgcgcacggncacagctccaaggaaatatcgatgttgagcaccctcgcaatggccttccaaacccttggtgtggtgtacggcgacatggggacatgccctctctatgtcttcagtgacgtgtttagtaaagtccccataaagtcagaggtcgagatacttggaagcattttcctggtcatgtacactatcgcatttaatccatttggttaaata

SEQ ID NO: 28684 - DNA, 2197 bp, Zea mays
  Clone ID: MRT4577_126170C.1
acgaggtaccccccggccgggccggggagcgactgacccctgcctggtgcatgcgccttcgatctccggccggtctccgctcgtcgtcctcgcccagcccagagacgcccacggaatcgcaattccccactcccaccccccttctcctttctataaagggaaacttcgccaccaaatctcgaatcccatctcgctgctctccgccgctcgacgccgacgccgacgccgccacctctccctcccccattccccgtgccccggaccgcggagcagacagaggcgagatccggagcgccgcgcgatggcgaacatcgacatggcgaagatcctggcggacctggaccgcggcgccggcgacgcgcggctgcccaagaccaagctcgtctgcacgctcggcccggcctcccgctccgtgcccatgctcgagaagctgctccgcgccggcatgaacgtcgcgcgcttcaacttctcccacggcacccaccagtaccaccaggagacgctcgacagcctccgccaggccatgcacaacaccggcatcctctgcgccgtcatgctcgacaccaagggtcctgagattcgtacagggtttttgaaggatggtaaaccaattaagctaaccaagggtcaagagatcactgttaccactgattatgatatcaagggtgacgaaaatatgatcgctatgagttacaagaaactgcctgttgacgtgaagcctggaaatgtcatactctgcgcagatggtactatctctctggccgttctgtcttgcgatcctgatgctggaactgtgcggtgtaggtgtgagaacactgcaatgcttggtgagagaaagaactgcaatttgccaggaattgttgtggatcttcctacattgactgagaaagataaagaagatattttgggctggggtgttccaaatgacattgacatgattgctctatcctttgtccgtaaaggatcagatttggtgactgtgagacaggttcttgggcagcatgccaagcgcattaagttgatgtcaaaggttgaaaaccaaagagggtgttgtaaactttgatgagatcttgagggagactgatgcttttatggttgctagaggtgatcttggaatggagattccagtcgagaagatattccttgcacagaaaatgatgatctacaagtgcaaccttgctgggaagcctgtggtcacagcgacacagatgctcgagtccatgatcaagtcccccaggccaacccgcgctgaggctactgatgttgcaaatgctgtgctcgatggaactgattgcgtcatgctcaccacgcgtcccgctgctggagcctaccccgaggtggctgtgaagatcatggctcgtatctgcatcgaggcagagtcttccctggaccacgaggcagttttcaaggccatgatcaggtccgcgcctcttccaatgagccctctggagtctcttgcatcatctgctgtgcgaactgccaacaaggccaaggccgcactgatcgtcgtcttgactcgcggtggcaccacggccaaactggtcgccaagtaccgccccagggttcccatcctctctgttgtggtacccgtgctaacgacggattctttcgactggaccatcagctccgagggcccagctaggcacagcctgatctatagaggcctcattcccctcctcgccgagggctccgcgaaggctacggattcagagtcaaccgaggtgatcctggaggctgcgctcaagtcggccgtgcagaagcaactttgcaagcctggtgatgccattgtggctctccatcgtatcggcgtcgcctccgtcatcaagatctgcatcgtgaagtgatcaccgtgacttgactcctaagtcccaggggggtggttctcaccgctgggacccatgaaacaacttttctgcctcctttttaactgcatttttcggagacagataattactgtatgttgtaagcccgcttctgttgtttgcagctgcaagatgtcttttttttttgtttacatagtttttgagctggtaaatgaggagggagaggactccattgatgttagtggtaataagatttgtatctacggagttcagttaaaaggcttttttacatgaaaatggtggaatgtcctgtatgtaggttcatgcccttgtttagtgtaaagatcatgtagataaatgtcgggtttctttat

SEQ ID NO: 28685 - DNA, 382 bp, Zea mays
  Clone ID: MRT4577_126171C.1
ctcccccctttttttttttttttggaaaaccccaacaaaacccctcttataaaaatcccccaatttttatataccccccccctttaaaattgttttacctcaaaaagccctaaaccctcccctaaattgagttccccctaacccaaaccccccaaaaaaaatttccccaaccggtcaaaaaattccccccccaaaccctaggcttaaatttcccggcccccaaaaatgtaattttcaacacccaccaaaatatccccccccccttttcccccccgaaaattcccaccctccccctgaaggaaacccccttttcccataatgaagcctataaaacccttgccaaaaaaattacaaaacctcttcccttttaaaaattttttcc

SEQ ID NO: 28686 - DNA, 292 bp, Zea mays
  Clone ID: MRT4577_126172C.1
ctcatactcaatggcccgcgaacaaacaccttggcggcattgtttttctccatatgcttcatggtgcccaggagggcgatgctatctactctattcaccgatggtttgtggaccacccagctcacctccctgggatgaaagggaaccaagtcttgccacccgatcccgacccgcaacggtgagacgatatttcaacccggagatcaaagagactaggggcgataactcatcctctactctgaaagagggccctaccggctcctgaacactctacaccaaggcacagctcaag

SEQ ID NO: 28687 - DNA, 426 bp, Zea mays
  unsure (1)..(426): unsure at all n locations
  Clone ID: MRT4577_126173C.1
gggccgacccacgcgtctactaacttacctgcagacctaactaaactgccaagaatttggccaaagcaagatctcacaatcccatataacagatcggagcccgcccatgtatgtgtagatagacagagatatagatatatggcggataaccaggagatgatccacccaccagcggctgctgccaccacgggcagcacgacgactcacggcgattggtggaccacggcggtgtcgtggtcgccggaccagcagctacctgctgggttcggcggctgggcgtcgtctgccgcggcaacagctggaggcaacaggtcgaggtccggcaacaacgcggctgcctcctcggagtcncccgggtccaagtccaaccactcgctcaccaccgaccaaggcgtggtctccgtgccgccgcacccgccgccagcg

SEQ ID NO: 28688 - DNA, 472 bp, Zea mays
  Clone ID: MRT4577_126174C.1
ggggcaacaactgggggcccacaaaaaaaaggaatataatcgtagcagggcccaggcccaaaaacaggggggtggtttgaaggaaaaaaaacccccggtaaaaattgggggggatgggttttgggataaccggccctgcctttccaacaattgaacttggggcattttaaccccgttccaaaggctgggatatcatcccccaatagcttgaaaaaccccaggggccggcttgcaagtagggcttcaacaagttggggatcccccaaaagttgctgccccattttttgggaaaaagaacaaaaaaaccaaagttgatcaggcggcttttgaaaaaaaccctaaaaggcctaaacatgtttcaacccaccattggggaaaaaccctctttcaggccttaatatgttcaactgttgtttgaaaaaaatctttaagcccaaccttggtctcagcaaacaactcaaatataacccca

SEQ ID NO: 28689 - DNA, 371 bp, Zea mays
  Clone ID: MRT4577_126175C.1
cgatggtgtactgacgctggtgcgggaagagaccctgggactggcgttcggcaatgatgatgaggaagtgatggagaggccacatgtccttcatcgcaaactcccgctggagggcgatgatcgtgcgctgtaggagatcggtggtggatgccgtgagcacaatgtcggcgacgtagaggaggtaaacgatgtccacgccccgccggtagataaagagagatgtgtccgacttggcctcgacgaaaccgatggaggccaaataggtggcgaagcggctgtaccaggcccgcggcgcctgcttgaggtcgtagagtgagtggttcagccggcagaccaggtccgggttggcggcgtcgatgaagccggtgggc

SEQ ID NO: 28690 - DNA, 385 bp, Zea mays
  Clone ID: MRT4577_126176C.1
taatttttttttagtttgtaagagggggatttaataaaatatttcaggggggggccgcgttttttttttatttcttaagcacaacccccaaaaaacccccctaatccgcttaactcacaaccatagcataaaaagggcacatagtttcccccccggggacaccccaccagggttttttttaataacagggggcccatcacaaattttaaaaaccccccaaaccattaacccaggcccggaccggacttttttccctcgcagttcttaacgaaaaaggccaaaaaaagccaacccagcatattaccatttggggcgggacttggaacagacgggaaagctgcccttcctagacaaagatatttcccccccgggaagccccccccct

SEQ ID NO: 28691 - DNA, 335 bp, Zea mays
  unsure (1)..(335): unsure at all n locations
  Clone ID: MRT4577_126177C.1
tttttaattttttttttttcttttgttccttatgtggggnanttttcccggttttcccccaaaaaccaaggggcaaaggctttggttttggctttgggggggaacaaaattggtttttttaatttatataaagggcccataaacggaggtttttgtttcccaggggacaaaattaaaacggtccggggtcttttgggttaaaaaaggggggggcatttggaataaaaaaactctttgggggtccggccatttttttgcccccccataagttccgaaaattttttaattggaaggggggccagtttggccaaatttttgcatccatccattaatgc

SEQ ID NO: 28692 - DNA, 283 bp, Zea mays
  Clone ID: MRT4577_126178C.1
caaaaggccaaaaggcttggcccaaaaaaaaatttcacccccttggggacaaggccggtcaaaaaaaaatcccccgggggtttttttaacaacgctgcccccacaggggggggcgggtttttttccggggggccggcttggaaaacaaaaaccaattttgggcccctttttttggactttaaaacccgaacaaaagcggggggtataccatttaaaaggcttaattaaaaccggagcaggggcggtttcttggaatacccgggggggaggacaacaaagggaa

SEQ ID NO: 28693 - DNA, 584 bp, Zea mays
  Clone ID: MRT4577_126179C.1
gccggccgggccgggccggcatggatgtggccctcctgcaagcacccaagaccatcgcatccctcttcctggactccgccgacccgtaccacgacttccgggcttccatgcaggagatggtggccgcgcacggcatgggcgactgggactggctcgagaggatgctggcgtggtacctcggcgccaacggcagggacacccaccccgccatcgtcaccgcgttcgtcgacctcgtcgtcaccatggccgcggcgtccgcctccgcctgcgcctgcagctcctccagccgcgtcacttctttcacgttcgccagcagtagcgagccggccgagagcagcagcgccggcggccatttctccttcggcctgaggtaaacggtaaaccaaagcaaaccagccggccggacgctattatctggctcgtctcagtagctccggcgtgtatcaccatgcctgttgtcgtaactcgtgtgccagcaaccgtacgtgtgtgtgcgtgtgttgtgagatttatagttgtacctgatccaggttgattatatattttgcttgttgcgacaaaaaaaaaaaaaaaaaaggccccta

SEQ ID NO: 28694 - DNA, 323 bp, Zea mays
  Clone ID: MRT4577_12617C.1
cggacgcgtgggggaaacaccgccgccgccgcgccttccattccagtactcgcggaggagaggaacaccagccagcgccatggtcacgtcgacgaccgccgccgccgtgctgtccccgccgtccgtggccgggcttcgcctggcgccgtctccccgggcgcgcgtggcgttccgcgcggcgccggcgcggcggtccgtggcggcgcgcgcggagcttaacccgtcgcttgtgatcaacctgagcaccggcctgtcggtttttcttggccggttcgtcttctttaactttcaacgggagaaccttgccaaaccaggtccccaac

SEQ ID NO: 28695 - DNA, 588 bp, Zea mays
  Clone ID: MRT4577_126180C.1
agaatagtatctgattacggggggactaaaacaaacatgatttaacgttatcacttactcattacgttacaaatatctgaaccaaacggtacaggtgcgtgacgcaggagttgggcgcgagcacaactagggatggagctcggccgacagacagcttgcatgcagggacgagaatccgagcaagcgccgacgactggtgatcatggcgcgcagggacgagctcagtgagttgcgcgttggggagttcgacgccgaactcacgcgcgacgcagggaggaatccgcgcgctggagaggaactcagcatcgagcgaagctgagacggcctgaggaacggcgacagggccacccggccaaccgtgcgaaggggaggacgagcatcacctaggcgcgcagcatccgcgagctggagcggacagcgatcaacaggcagatggggcaggaaagagaagtaggaggtgagcgccagggacgcacgcgtgtagcagatgaaaggagacatgagtatgtaattggagataagaacgagggagcgagctccacgccggcatccaggtgccctgcgcgcacgtagggaggagaccagcgc

SEQ ID NO: 28696 - DNA, 839 bp, Zea mays
  unsure (1)..(839): unsure at all n locations
  Clone ID: MRT4577_126181C.1
ggtacccccgggttcggccgggaaaaaaaaaaggtccatgatttgtactaatggcacatctcctatatatactacctactcgaggtgctagaagaagtatggaacattctatttagatgattcgccttttaattacaattttaatatttccccattataaacactttgtgatattctcagtagctcatcatctttctctctctctcaacattgtagattggcaatgatgcttctcaatttgtcggtccacttgtattgaacctgttgataaaggtatgtttctcattctatgacttcccccatcgttaacatgactattgaagtgcattgatgcgttaacatgactattgaagtgcattgatcctagaacatattgtgcgattatgcgtatcttagcgcacctttattatgttctttgcaccaatatactttgttttttccttttccggtctttgaaaaaggtgatccatcttggagcatttcatctatgctttcttgatctttgcagaagttggttgtttatcatatcacctttgttacataggctatgtacccgaacttaaagttagtacagctaagtagctaactacggccatagaaggaactattatcatgcatggtaattgtgagaattccatcaccgggtgttttattattttcatgtaatttcaggttatggacaactatggtaagggtagaccttcagtcatgaaaactaccgggctgttgcttgataaagatggctggaggggcttttatagaggttntagaccaagttttcttacatgtctgtttctcgtctaacaaataatataagatgtgagtctgatataaaacta

SEQ ID NO: 28697 - DNA, 658 bp, Zea mays
  Clone ID: MRT4577_126182C.1
gaaactggacttccagcaatagcagcaatgtcactagaacctttcatactggagaataactagaagtttatggggaatacaacccttaaggtttggctatgattctaaatcaaccatgcttactaaacaactcaatcatgcactcgtaatgctccattcgaggcgtaataccagaatctttattcatcgagaacaagtatctttgacctagattaacatatccttcacaaatacaagctagcaaggcatctggataacttacaagataagtttatgcgtgccacctatcatttgatactgcctgatcaagtctttggatcaagtatgtttagaaaaaggaatatgcacaggaaatcaagcaagaggatgcggacagtaacgatcgcgtaaaggagggcccgcttactaatacggagagggttccgcatgaaaaagacaatcctaaacttcttcgtttcgttggtttttctaaggtcttttaaattatcttttttttgaacatgaacggaagtagcgtaggacacccaatcctcggtcaaacctctacttcaatgaaccacgtcgcgttctttatctttctcactcgtcgtttcgttggaaaaacctacccgaaggctaacacctacggattttttaccaagaaatggtctccaccaga

SEQ ID NO: 28698 - DNA, 515 bp, Zea mays
  Clone ID: MRT4577_126183C.1
agatctgtgacgtcatgcgcacgcgcgcgtgcgcgggtcctctatagagggcgcgctctttgtttttttttttgacaaatgaccggccccctttaagtgacataatacccttacgggaaggaacgggctaacgagatcatgatgctgatgcaaaagattactagtacctaaatggttgagatatttggggatcagcttaaggatatgtggctaattgtactgggaacgtcctttggagtacaatcggaagggcgaacctagttacgccctgaaacaacactctggggcggtttcctattacgaggggctaggcctggctacgttttggcgcacgcgcgtggcgcaccctatcaatccgcttcacatcgagcttgggcagagcaacgctatactagggcgacgtatgttgcacactgagtaccacctgtgcattgttgacgtagcgtgcggggataccctggtgtgcatgttaacagcatggggtttcattgattggtaaagacgaccatctatct

SEQ ID NO: 28699 - DNA, 329 bp, Zea mays
  Clone ID: MRT4577_126184C.1
aattgtttagtgttttttttctttttgttaggggggaaataccttataaggctttcatttctttccactgggcattctatgtacagattaagggttgaaagccctgaacaaactagacaggcctgaaaatcctgagaacaaggaaaaatctgattagctttataccttccaagattgcaatcccggtaattacctccaccggctttttaatttcacggattcaccctggggcaaaccaccacagacaaggaatatgcaaggccaaaccctagccgattcaatattcgtgtctgggcttgcctagggacatgaataacaatccattgggt

SEQ ID NO: 28700 - DNA, 349 bp, Zea mays
  Clone ID: MRT4577_126185C.1
aacgtaggacgggggcctttcttgcaccgaacaaaaaaaacaagcacccataccagggggatgcacaatgcccattaaagaaaagggtgtgcataaatcctcctattcaccaagaaaaaacccaaaaacaaatcagatcctatgaccgaccaaaacaaaaaaaccctatgaaaaggttaaacagaacacgtttccccagaatcaagaacgcgcgccccggttaaatatccaaacattgcacccaatccgggggccaaaggtccggaaaccacccaattgaggttttaggaaacctattgaatcttgaaagacacgggactggcaacaaaaaagttccatccccccggag

SEQ ID NO: 28701 - DNA, 356 bp, Zea mays
  unsure (1)..(356): unsure at all n locations
  Clone ID: MRT4577_126186C.1
cgaaccccaaaccctagcttcgcccggggcaagtgcggcggcaagtcgtcagtggccaacacnccgcnatccaaacgcgagaagcggcttcagacgtcgcgccaggagatagcggagcccgactacgacatgaaggaggccgccaagctcgccgaccaggccgcagccttagctgctgccccgatcccagtccgcgggaacccaccctgccaagacgccacaccccaccacacagatggcgcaatcccacactaggccggggagacgccctacaccaagtacaacagcctctaggcccgcatcagacaactagaccaactttactagaagatcgaccccttccaaaacagcataaa

SEQ ID NO: 28702 - DNA, 284 bp, Zea mays
  Clone ID: MRT4577_126187C.1
ttctggcatgactgagccacttaggggatgtgaaccctggccgctagttgaaccagtaactgcttgcatgcaacctaatcgctgtggccaacgtagcgtgtatagcaccaacaacagctgttggggaggctattgcctgggctactgctactaagcatggtatgcactagcgaagagctactgacagacttgtgtagggcgctcgcgaggctgacaaggccatcgtgaagcccgcagcttatgtttgagcgcattgtgcggactgtgaccagcctaattacgtc

SEQ ID NO: 28703 - DNA, 460 bp, Zea mays
  Clone ID: MRT4577_126188C.1
aacaaaagggacctggcctttttacatattttaaaaaataaataatatccctgggagggggggggggggggggccaaaacttttaacttaaccggatacattaatcccctcgaaccccccccttaaaaataaaaaaaaagcggggggaaacggccctggtttgtcgaaccccccccccttgggcggaaggggcccccccgggtcgaaccccggcccccccgggggggggggaaacccccccttttccttccactcctcaaacggaaagggccgctcccccccctcaagggtgaaaaaccccgggtcccccctgtacataaaggggtccgggccgggccccaggggggggttgcaaaacccccaggccccgagaaacccggggggctcggcagcccaaaagtcggccgagttccggcgaaacccccccagggcccgggccctgggggccccgtaccccccc

SEQ ID NO: 28704 - DNA, 1003 bp, Zea mays
  Clone ID: MRT4577_126189C.1
tatctatcgagtggacgcgacgccaacagcgtcagcgcctcctcccgctctccggctcctgtcctgctcgcgctcgtcgcccccctgccgctcggctccccttggcccctccaatgccgccacccatggcactgctgccgctctcctccgcatccgcgtccgccgcgctgccgcccttccgctcctgcccgcccgctgcgatgctgcttcgcctcccctcccccgccccctcccatttcgcccgcccccgcgcggtctccactgggtacgcggcgtccttctacggcggctcggcgatgtccgcggccggcggcgcggacgaggaggaggaggtcggctacgagtcggggttcggcccggggctagggctgggcggcggcggcctcgggatgtcggccgcggaagccgcgctggcgctggaggagcgcgagatgccgccctgcccacccggcctccgccagtacgagaccatggtcgtgctccgccccgacatgtccgaggaggagcgcctcgccttcatccagcgctacgaggagctgctcgtcgccggcggcgccatgtacgtggaggtcttcaaccgcggtgtcatcccgctggcatacagcatcaggaagaggaacagccgcaccgggctgccgtccacctactacgacggcatctacctcctcatcacctacttcaccaagccggagtccatggacgccctgcagcttaagctcaacgccgacgacgacgtcatccgctccaccagcttcaaggtccgccagcggaaggccgtctagttagacgggttgcctcctccgccttcaggccctgaacactgttttgttcacataccatactacaagaaatctgctgtacaagaatccacctttgccatgattgttgagttttttttttttgaatatgtttcttgtcttgtggttctcgaaaatggacgtccggccatcgttcgccagagaaacaccgcgcctcctaaaaaaaaaaaaaaaaaaaaaaaaaa

SEQ ID NO: 28705 - DNA, 269 bp, Zea mays
  unsure (1)..(269): unsure at all n locations
  Clone ID: MRT4577_12618C.1
nntacntcactgaccaaactcccgcaccctcgagcgagaacagtcgcccgactctctgccctcgttcgctcgccgccgaccttcgtcccttcgctgccaccctccagatcccttcgcctccacccggcgccgccagcccccgacctcctccccggctcctggcgccgcccgccccccacatctcctcccccgatacggtggtcgccctgcccccaccttctccctcactcccggcgccgcccgacccccaacctccctggatcccggcc

SEQ ID NO: 28706 - DNA, 507 bp, Zea mays
  Clone ID: MRT4577_126190C.1
aagggcggggggggataacccccggggatttttctttttttaccttggggggggggggggccaaaccaaatttcaccccccccccccacgctttagggggggggacaaaaaaaggggacccgaaccaacccccggcccccaagtgggtcggggaaagaggggtttttcctcgttcacgggcccccccccgtggggcccccccctttgttccacaaccaaaccccgcttattacccttttttccttaaggagcccagggcctttatggccccccccccggggatttcctgggggtaaaaggcccctatggcacccccccccagagggcccccccaaaaaaaccagggggcgccccaggggttgccctttttttaaataacggggggccccaaacttctgggcgggttgattcccggccccgggaccggggagggggccacgtgcccccttaacaccggaaacccctgggggggggagcccaaacgggcccggggaaacccgggctttt

SEQ ID NO: 28707 - DNA, 404 bp, Zea mays
  Clone ID: MRT4577_126191C.1
atacatacaaggccggccgggatgacgcttttcctaccactagatacaagatagctgcacctccaacacaaggtaccaatcacaatgggacatccggtggcacattttggacacagcgcggattccgctgaaaccaagatctcttcaatatagccatactttcaaagtaggtacatgctcatcaaacgtgaggccgcactggttggtattatttgggatacttcaacagtcaggtgaaatgccttgcgcgttttgaaccatgtgtacaactgttattatctctagtgaaatatatttctgtcgccagatgccgttcacatgtgcccaaatgactaagaaatgaccatttgaaactgccaaggataacatcaaaggttccgcaatcacatggacctatcggaaaa

SEQ ID NO: 28708 - DNA, 295 bp, Zea mays
  Clone ID: MRT4577_126192C.1
gccatgtgatggttctgcaatccctacgtggtgcgccggacagctttttttttttttttttctgccaacttttttgacttctaagaattaaaagcccgccagatggtgtggcacctctggtttgcaaacagttggtggggggaatgtgagtgaaagggcacgttggcgcacggttggtgacgcacactgggttgggaaaagcctggctcaacactactgctaaggcatgtgtgtgtgtatagccgcagtcagctctgcggcgatggaaaatctggggagcacacttctcgctgaa

SEQ ID NO: 28709 - DNA, 352 bp, Zea mays
  Clone ID: MRT4577_126193C.1
aaaatctccaccagcgtacatcggtacatgcaaactcattcttatacagaaaaaacaattcatcactgagaatttttttaaaaaacacacacacacacacacacaaaaaaacgatcagctccttatcatcggcaacgatcacacgcacacacacaaccggttgatcctgctacattcttgtatgggggtggcttcatcaaattaagctacaaattagtatttattaataacgtttataccaacattacactggacttttcttttcattgtgtgtacagagaaatttaagcttggaacgttcacatgcgcgttggcatgcacgggccaaaaaccgggttttataattttgttt

SEQ ID NO: 28710 - DNA, 266 bp, Zea mays
  Clone ID: MRT4577_126194C.1
tttttttttttttttttttcaactgccaatattctgtttttttttttttttttttcaactgccaatattctgtcaaatagaaattctggcatggtcaactcgtcatttctattgtagggtaacataaaatatactccctccgtttctttttattagttgctggatagtgcaacataaaatatactccctccgtttctttttattagttgctggatagtgcaaagaatgaaaaggaccctaaataaaaaacttgagggatcacttgt

SEQ ID NO: 28711 - DNA, 330 bp, Zea mays
  Clone ID: MRT4577_126195C.1
actgatgagacgaccaacgaggaatagaacgcgggcagccgacaagagggccctcgcgagtatggcaacacgaaacaggaggaagcagcgcgacaaaaggtgctggacagcagggggtgcgcgaaagggaatacaggcagacttccagaatgggccaagatagcaggcaaacgcgtaactgcaagcccaagcgcatgcggtgcgggggctagcatgcataaggtggctcccatgagcgttggaagccaccggactctaagaagactgagcgcaatgggatcaacacaagcaagccgaataaccagggaatcacccatgccaagtctcaga

SEQ ID NO: 28712 - DNA, 478 bp, Zea mays
  Clone ID: MRT4577_126196C.1
ctagttctagatcgcgagcggccggccttttttttttttttttttttttttttttttttttttttttttttttttttttttttttttttttttttggaaacaatccccaaggggttatcatgaattaacacccaatggtcaaaaaattttccggggaatcacagaataggggggacatcaacaatcagttggttgccttaaactaccaacattagggggttttttacttatacaccggattaaccttgatggataggaatcttgctcgtcaggggagttaactttgcagggggatgatgcacttgcacatatccaaaatcaacaagttgtttagctaccacacaaggttaaaaatgcctaaactggtactggggggcaatgacttcaaagacttgttttttttgtgagccaatgctgataggatttttttcctggggcccattggaattcctaaagacttgatatctttttcattcat

SEQ ID NO: 28713 - DNA, 361 bp, Zea mays
  Clone ID: MRT4577_126198C.1
acggtgggaatttttttttgttttttaactatttttttctcattgtactttggggggcccacccatgcataaacaggtttttttaattaaaaaccccaactgaccgggtgaccttttttaaaaacaaggtccgccttcaattttcgaccccccaatttgtgtggggaaaatacaagaaaaaaaacctttttgtttcctttgtttatcaaagggataaaacttggacaaacggtgtgccaccctaacatggcgttgcttaaccactccaaaaatcccggtgacatacaatacacggttaaaaacacaggaacaggcaatttggtctgttcatggacctggaaaaacccttggggccattttt

SEQ ID NO: 28714 - DNA, 450 bp, Zea mays
  Clone ID: MRT4577_126199C.1
aaaaataaaaataaaaataaaaataataaataaataaataataaaatataataaaataataagagagaattttattataaaggagaaaaaatataaagagaattaacaataagagagttgccaatactaacaatacaaaaattatttaatataagtgtttacattaaaatttaaaatctactaggacattggttttaaaaacttaaatacttaaaaaaaacttgggggggggcttttttaaaggttttggataaattcttgttttgccagctttagtattttttataaagggcccaatctatatttcttatgaacagtttttaaaaactgaatgatttaataaaaacacgtctctgttacctatatattaaggttttgcggaaaatattttttattttcaaggtgaataattaaactagggtgttccctaccccccactcctaaaaattt

SEQ ID NO: 28715 - DNA, 229 bp, Zea mays
  Clone ID: MRT4577_12619C.1
caaaaaatagttggatcaaaaagacccataatctgctggagctggtagggggttctatatatacaggttcctgaattgccatcgagctcggaggtgtggcttgctaggtgattgagcttggctaacttactcaaacgagttgggaaaggagacttggccggttgggtggtctatacatagaacctaactcaattctagccgtttaagaaaatctgctgcaatatgtggc

SEQ ID NO: 28716 - DNA, 203 bp, Zea mays
  Clone ID: MRT4577_1261C.1
gacgattgaggcaatgattgcaacgcactctggggacgcatctgatcccactatacctaagtcactgctgtatggattatgttaccaatgtggcgaaccgtgataagttatatgctattgggtcgctggtggtgatggtcagcggtacactatcgatgaaaggatctaatcgacgcgaggcacatcgagactacgctgacact

SEQ ID NO: 28717 - DNA, 578 bp, Zea mays
  Clone ID: MRT4577_126200C.1
aattcggcacgaggggcaagtgcggtgccgcgcgccctgcgcatgtcccacgcgcaattcatcgagcaccttcgctgctccgcctcggtcgaccgcacccctcgcaccggcgaggctcttcacggctgggcgctcatgttcggcgcatgctcccacgcgcctgtctgcaactctctgatcaccttttactgttccctcccgcgggctctactcggcgcagcctacgtcgtttttgccgacatccccgccgccttgcgcgacgtcgcctcgtggaactgcctcctcaacccgctctcccgccaccaccccgtctccgcgctctcccatttccgctccatgatgtactcccccgaggccgttctcccctggccgcactacttcgctgccgcgttgactgccgtcgcccgtgtgccctctgcgttcgctggcgccgtcacgcacgcgctcgcttgcaatctgtcatccttctgcggctccaataatgtcttcgtctctaccgcccttctaaacatgtactgcaagctggcagctgtgtctgatgccaaaagagtgttcgttggaatgctacatcgcaatgc

SEQ ID NO: 28718 - DNA, 533 bp, Zea mays
  Clone ID: MRT4577_126201C.1
ccggccggaaatccttatctgacccgtgacagttttgctcccctcgccgccgccgccgtatctgcccgtcgtcgtttctttcacgtgctttggtccccgggaaacaaagccccgcctccctcgtacctgtacccgtcaaagaggggagaggagcagatgaaggcggggaggaagaacctgcggcgggcgtgcgacgaaggcgccgccgtcacgctcgccgagggcgagagcatcatgcaggtcctcacgctgcgtggctccaacgtcatcgaggtgattgacggcgagggcatcaagtccctggccttgttccctgccaagttccagaagagcttctggatcaagaacgggagttttgtggttgtggatgccagcggaagggatcaagctctggaatcagggagcaagattgcgtgtgttgtctcgcaagtcctctaccacgaacaagttcgggctctggagaagtccggcaattgctattttcaactcaactccgaatgaagtcttcagaagcgggaacacagccgcaaatt

SEQ ID NO: 28719 - DNA, 1026 bp, Zea mays
  Clone ID: MRT4577_126202C.1
cccacgcgtccgcccacgcgtccgcccacgcgtccgcggacgcgtgggcgagcccaacttgcacccgcaccaccaggctcacagccttacctgatccttgacaattctgctccctcgccgccgccgccgccgccgccgcccgcccgtcgtcgctgcgcttcggtacccgcgaagcaaggccccgcctcccgtgtacccgccgccgaagaagggagaggagcagatgaaagcggggaggaagaacctgcggcgggcgtgcgacgagggcgccgccgtcacgctcgccgagggagagagcatcatgcaggtcctcacgctgcgcggctccaacgtcatcgaggtgatggacggcgtgggcgtcaggtccctggccttgttccccgccaagttccagaagagcttctggatcaagaacgggagtttcgtggtcgtggatgccagcgggagggaccaggcgctggaatcggggagcaagatcgcgtgcgttgtttcgcgagtcctcttccacgaacaagttcgggccctgcagaagtctggtaactggccggccattttcaactcagctccgactccgaatgaagcttcagaggcgggagcagaagcacaggctgcccaggttgacgaggaaccagattccgatgaagaagacgacgatcttccaccacttgaggcgaacacgaacaggaataggccgtatgaattgtattctgattcagacagtggttctgacgcttgaaaagtaccaaggccatccatcctgtgcgttttgtctccaaggtattcgtgatgtgtgaatggaatggctggacctggatggctggattcatatgtgccatgtcatgtatgttagttagcatgctgttattctgcaatggaatctgtgttttctgatactagtcattaagctagatcaaggaagctgggtttgtttccactgagggtccgttcggttcttgggggactggccacccggaactattcctagccagattggttatctaatttatataaggtttgattagatgg

SEQ ID NO: 28720 - DNA, 839 bp, Zea mays
  Clone ID: MRT4577_126203C.1
cattgggtacctcgaggccggccgggtgttcgcccaatccttatctgacccgtgacagttttgctcccctcgccgccgccgccgtatctgcccgtcgtcgtttctttcacgtgctttggtccccgggaaacaaagccccgcctccctcgtacctgtacccgtcaaagaggggagaggagcagatgaaggcggggaggaagaacctgcggcgggcgtgcgacgaaggcgccgccgtcacgctcgccgagggcgagagcatcatgcaggtcctcacgctgcgtggctccaacgtcatcgaggtgattgacggcgagggcatcaagtccctggccttgttccctgccaagttccagaagagcttctggatcaagaacgcggaagggatcaagctctggaatcagggagcaagattgcgtgtgttgtctcgcaagtcctctaccacgaacaagttcgggctctggagaagtccggtaattggccagctattttcaactcaactccgaatgaagcttcagaagcgggaacacaagcgcaaattgctgccaagattgacgagttgccagattctgatgaagacgacaatcttccaccccagttgaagcaaacaccaacaggaatagaccatatgagctgtattatgactgagacagcggcggttctgattcttaaactagtttagatgccattcatgttgtaatgcgcgcgtgctgtgctttcttgttcattcacgttgatgttttttttcttctttgaagataaagattgtctgcgctgccaaagatatttgtgatatgaatggaatggctggacctggagctatatagatatatggtgctgct

SEQ ID NO: 28721 - DNA, 278 bp, Zea mays
  Clone ID: MRT4577_126204C.1
ggcaaaaaaaaatgcggcgagccgttttaaaaagaacccagtttacttgcgcgttcttgcacaaatattatctttcctaaaacgccccctaaactcaattcactcccctttgtttaacaacgccttcacggaaaaaaccctgtcttcaccaaatttaatcccttttccccacatcaccttttccccatctgtattaataataaaaacccccccaaatatcgcccttcccaacaattgcccacctttaataccaaatgggacccccccaccatgactac

SEQ ID NO: 28722 - DNA, 264 bp, Zea mays
  unsure (1)..(264): unsure at all n locations
  Clone ID: MRT4577_126205C.1
agcggaacgagacggcggcgncggaagcngagcaccgcngcaacgacggcggccacgccagggccacggacgaccacnccctccacaacgccnacagcaccaacggcgaggnccccgagggcgaggggagccncnancgggagacgcagaggncccgcggcnncggcnacgacacccccnccacggaggaggcgaagcggaacgccancgagggcangaacggcaaggagcnggacgggcgcaacaacaccgacaacgaggccc

SEQ ID NO: 28723 - DNA, 277 bp, Zea mays
  Clone ID: MRT4577_126206C.1
ttttgcgtttaaaatggttccaacaagaagcaggcgattctgatgttctatcagagaatctatgacatcacgacagtccaaagttctttctcaggccttttgatcccagtctctctgaatgaaggagaccctggtcttctgctcaagtatggctgaacttaagaataccttgctgcacttcaatagatcctcctattcatagagcacgtcatttcgggcacacttgttgtctgaggcacagacattgcccgcctaaccctagtaagggcttcttgac

SEQ ID NO: 28724 - DNA, 813 bp, Zea mays
  Clone ID: MRT4577_126207C.1
cctatagggcgattgggtttctcgaggccggccagactcaccttggccttcctgtcttcaagaacgtctcagaagccgtcaaggctactggcgctaccgctactggtctcttcgtccctcctcctctggccgctgccggtatcgaggaggccctcgaggccgagatccccctcgttgtctgtatcaccgagggtatcccccagcatgacatggttcgcatcaccgacatgctcaagactcaggacaagacccgtctcgtcggacccaactgccccggtatcatcgcccccgaacagtgcaagattggtatcatgcctggtttcatccacaagcgcggtcgcatcggtatcgtctcccgttccggtaccctgacctacgaggccgtcaaccagaccacccaggccggtctcggtcagtctctcgtcgtcggtattggcggtgaccccttctccggcaccaacttcatcgactgcctcaaggtcttcaccgaggaccccaacaccgacggtatcatcatgattggtgagattggtggttccgccgaggaggacgccgccgagttcctcaagcaagccaacaccgtcaacggtggcaagcccgtcgtcagcttcatcgctggtatctccgctccccctggacgacgaatgggtcacgccggtgccatcgtctccggtggtaagggtggtgccgacaccaagatcaggctcttgaggatgctggtgtcattgtcgagcgctcccccgctggtctgggcaagctctctacacgagttgtcccccgcgatctgctatattttataactatactacgtct

SEQ ID NO: 28725 - DNA, 290 bp, Zea mays
  Clone ID: MRT4577_126208C.1
aaagcggggaatttctaaaaacagagggagcaaaacactaacaaaaaagcatgacatgcgaagcacctgatccacaaacacagtctaactatagcaaaagcccaaactaaaaaagggcctaacaacacacatacaaatgccgctggaggcccaccaaccggaaggcttatgcgtccctacccgaactgatagtgctaaggcaaagggactgccccaaaaacagcaatgcatcaaaaaccggctagcggccaagcctcacacccattaactaaactgtacccaaaccacac

SEQ ID NO: 28726 - DNA, 387 bp, Zea mays
  Clone ID: MRT4577_126209C.1
agagactttcagaaattgccacgcttctcccatttctcaagatccgagcgggtcaacgagttctataagggcatagaactagtgcatctcgatagatatacgacagtctgccgatccaggcgatagacgaagctggaagctgcactgtctagaggatgacattatgggtgatgagcacatgctcggtgacaaaacactggtgaaaggtgaagaggctttaaacaccttcttggaagagaatggtgatgagataatcatgaaccgcgtcgataataacgacgttgacatggctgtcaacagctgagagacggatgtccccaaccgcgagctcatactgatagatcatgttatcaacggcccggtggaagcagccaacaactttatttg

SEQ ID NO: 28727 - DNA, 483 bp, Zea mays
  Clone ID: MRT4577_12620C.1
ggtgttttggtttttttttttttttttttttttttttttttttttttttttttttttttttttttttttttttttttttttttttttggaaccccccgcctatcacgggggccaaaaaaaaccccccacaaaagtcccaaccaaccgcggggggtggggggggggcaccccgccccaacgggcgataactctgggggggaacggggcccgccagcaacgggagcacactcaaaacggacaacaaaccggttagcccaccccctctattttggggccagggccccccttgccggggggggcgtccttgtccatgccgccagggccgcccatgttttcaccccccccctggtcccttttggggatgagggggttgcaggggctttccacctccttcattttgtcctcaaacccgccccccctggggggggggggggcgccccccccgctgagggccgcgccgggggcctcctccgcctttttttt

SEQ ID NO: 28728 - DNA, 576 bp, Zea mays
  Clone ID: MRT4577_126210C.1
gagtctgaagtctgagctcatgtttctgaattctgatcagaagcaggacagctggctcgtcattttgcttgcccatttctctgcctcgaccactcgcaccactgccgcaaataagaataacgtgatcgtcaaacatatacggaacgataagtagcaccccctttggtcaattacattacagtggctctataatctttctctgaagtctagtacagctgacatcttctgcattcccaaccaaaccgagccgaggtctctgcacgctggacaccagctaccggtaatcctccagcgccttacctgacaggggttccaaaaactcgcatctttccaggatctcgggcggcggcactcccctgacaaggttcgtgtccagcttcgtcctccgcttgttactatctcgaggggcctctggaggcacggggctctcgaggtacagcggagtgcggagatgctccggagatgacgtcttggcagaaaggtaggctcctagcactctgcaggcagaagtcgaaccactggtggatgagtgggagaagatgggcctctggttcggctaccgatttgggtcggtct

SEQ ID NO: 28729 - DNA, 312 bp, Zea mays
  Clone ID: MRT4577_126211C.1
aagacgcaccaagcttgctggatccagcggtcagacacattaccaggggacgaccgataacatatcacatttttactagcatggtggtggcgagtaaacaaacacaatggtcgtatgctccggaaaatcgcattcaactacttggctttgccacttaaagcatgctgcaggactaacaaacacgatgctagcttctatgactaggagcagaacgcacacctctaaaaaaaacaaggccgtaggtgcaatcttgctaacccaagccctgtttattctgtcacacttgaccaacacacaccttttaaggcaagc

SEQ ID NO: 28730 - DNA, 400 bp, Zea mays
  Clone ID: MRT4577_126212C.1
gtgctgtctttgacagaagttgtttccaatgtgctgtcgggttcaagtaaatttcttcacaatgctggccttttacctgcctccaagagaagcaatacaaggactatctcgacaaggatgcaagagcttgagactcaattggacactgagaggcaagaaaaaaatggatttcgagatcaaatggaaaccttaaaggcccagtcacaagcgtctaaggcaaccattgctaatcaatcgactgagattgcagatttgaagaagtccttatcagaaaataacagcctccttcgacaaatattaagcatcaatcgtggccagatgactcctccttaattatgcttgctagggtgttggtgtcaaccatcctgaagattgatctcacaaaactttagatctcgtt

SEQ ID NO: 28731 - DNA, 1727 bp, Zea mays
  Clone ID: MRT4577_126213C.1
tacctcgaggccggccggggatttgggccgagcgtgcctgccgcaactcgatttgtgccctctccttttgcaggcaacttttgtgcagccgcccccgcttttccccccgcgaaaacccagcagccgccgccgccgccgccgctgccgccgccgccgccacatccagtcctgccccggggccctgaacgctgaaccctagccatggcgtcctccatactctccgactgctcctcggcccgcctcctccctctccgccgctcgctcctcccgccgcgggcgccccgcctccgctcctgccccgctctagctacccccaggcgcctactcgtcgccgccaggccccagctgcttccgcgcccgcgccacatggactcggtccccgcagccaccgcctcttccgccgactcagcaaccgtctcagccgatgcgcctgccaaactgattgacgggaagctcgtggcgaagcaagtgagagaagaaatagctgtccaagtcaccaggatgaaggatgtgatcggcattgtgcccggcctggctgtcatccttgttgggtcgaggaaggattctcagacttacgtgcggaacaagaagaaggcgtgcgaagcggtcggtataaagtcgtacgaggtcaacttgcctgaggacagctccgaggaggaggttatcaagcacatagcgagtttcaacagtgacccgtccgtgcatggcatcttggttcagttgcccttaccaaggcatatgaacgatgagaacattctgaatgcggtcagtattgaaaaggatgttgatggctttcatccgctgaacatcggacggcttgcaatgcaaggccgagatccgttctttgtaccttgcaccccgaaaggatgcatggagttgctacaccgacacggagttgaaattaaagggaagagagctgttgtgatcggacgaagcaatattgttggaacgcctgctgcattgttgttgcaaaaagcaaatgcaactgtcagcattgttcattcacaaaccaagaaccctgagcaaataacgagacaggcagatatagtcatcgcagctgttggagtcgccaacttggtcagaggggattggataaagcctggagctactattattgatgttggcatcaatccagttgatgacccagagagcccccgcgggtacaggctcgtcggggacgtctgctacgaggaagcctccaaggtcgccggagccatcacgccggtcccaggcggcgtcgggccgatgacgatcgcgatgcttctgtcgaacacgctcgagtcggctagacggatccacggattcaagtagccgccgcacccaccgtccgtccagcagagagaagcgaaggcggcgttggccctgccagccaagccagactagtgcaggggtcgtaggaaaaataaataaataaataatttttgacgcagatgagatgggaaatcccagcttgacactttgttagggtattgtgcttgataaaaaatatggcaccaggtgaatctgaggtgccagtgatcttggatgaattctgccgcacgcatccgaccggatcagcagaaacttgtctccatgccatgatcagggtatcgatgttgcgccgaaccagggctgtgactggtgggtgccgttgtcgacgtgggataatgcctgatctgtccagttggatccccgatttcattaagaaaaaaaaaaaaaaaaaaaaaaaaaaaaaaaaaaaaaaacac

SEQ ID NO: 28732 - DNA, 550 bp, Zea mays
  Clone ID: MRT4577_126214C.1
ggggccccataaaccaacccccaggtgggcaaaaacttttttttaccttaaaaaaaagccccacccaagggaggggcttggtgggggtttcaaacaaaaaaaaacaaaaaaaagggggcctttaaccccgggggggaaggagtttcaaaaccaaaagattttttccgggataaaaaggccccccccccagccctacctatggacaaaaggacttggtccaattccgaggggtacggggggcccccccttacctcccacccaaagttaaactcggggtgaagggggccccggaaactagggggagttggaggaggggatttccacgggccccctggggcaattgctgctcaaaaaaacaaccctggggggggaacccccgggggggccctcgggggaaaccccaacaacccttatggccccggggaaaagcccccccaccccttttttgaagggcccaaaaacacgggaccggaccccccttttccgggggggttcctttaagggagccttaaccaggcgggggggtatcccagttctgggatttttgaaa

SEQ ID NO: 28733 - DNA, 412 bp, Zea mays
  unsure (1)..(412): unsure at all n locations
  Clone ID: MRT4577_126215C.1
cgcgaaaaacacacttcccagaccctctggtatacactagacaccnaccccaggtgcgcgtgccacgaagcactatttggctaccggctagctgtaccgacctggctctctctttgctgtccctccatgtcagtcctcgactacagccacgtggattcctcggcgataccacgcctctttaatctcaccaacaagggccccaacaccactccaatgtttaaatatgctgtcaaaatgtctacacatgaagaatcccattgccgtgaaatatgccattcgaatggtaacactcattgatctgacgaatccattaaagccagttcattattataatagcccataacgccatgatactatttccacaacgaccctttgttaaaagttacacaacacaaaacatgttttaataaaa

SEQ ID NO: 28734 - DNA, 560 bp, Zea mays
  unsure (1)..(560): unsure at all n locations
  Clone ID: MRT4577_126216C.1
tgttcnncaccaggggagacagagagagggcgtgnccncgcctcccaccgtggcctcgtgagtggcctcctccatcctccctccccatcgagttcccaaatcccagccaggggtgtgatctgtgtttgtagcagaggagacagtcctaaaaaagagtggggaagcgtcctcanataggggcgacgtgtctcaggggagaccacctgggttatgcgagaagcacatccatggattccactgggcctcagttaggtgggaggtgtagctcaatgtggagtangagaagtancaaacaggggctaaggggatccatcancctctcaagggagagtggggactccatactgagctcaatgaggcgttctcttcagtgcggggatcaattgctaggagacatcgataggtcanttctgggtcaactcatcgaaagtgggcgaggtctatcacccnaaggcgatgttnatgaggatacagtaagaatctctgaacatcataagggtgggcctgtgccanatgatgcaataaagcgaaccagtgagcattttgcgtcagcacctata

SEQ ID NO: 28735 - DNA, 120 bp, Zea mays
  Clone ID: MRT4577_126217C.1
gcactctttccatgatggaaagaaccacaatttccgtgtcccaacctgtgatcgtaacccggatcaagtgaacacaggttatcactactgtcttgaacaatccagtatggcataataggc

SEQ ID NO: 28736 - DNA, 449 bp, Zea mays
  Clone ID: MRT4577_126218C.1
cccggggtccagtacccacagtcctaggatcagtcgcacgctagttgtcaacagacgagaacgtcctacatggtctcgcacgcaatctgccgtaatcggtcgccgtggtaggcgcggagctgactactcacagcggtgcttacaacctctgatgaccgcatcacctgactgcaattgagctccggcataccaccctgactttaatactcccgatgtacgggttgatgcccctccgactcctaatgtagcggctttaggaacctcaagagtacctcaagaactgccatcgaaaggctcgctgcctacaacttgctgaacaacgaactctgtggcttcagaggccataaagactgcaacctctaaagcatccaatgctagatgctggcgtcagtatgcaatgacaccattagcacctcaacccactgttccagccataactaaaacctaaa

SEQ ID NO: 28737 - DNA, 400 bp, Zea mays
  unsure (1)..(400): unsure at all n locations
  Clone ID: MRT4577_126219C.1
accagaacaacgcccgaccgacacagcacactagacgccgcctgcacgcctgacaataatgtatcatcatngccgtaaggtgccaggtcatatagttatttctcgacacaaaagcacagctgctgggaccacgcaaaaacaaacagcccaaacaaaggcggcccagatgcaccaccacctgaccaggaataaaacaacaaacaactacagggctaactcaagaggaacaacggaaatgaccaatggtaaaaacccggcaacgagcgcagcaccgaaacagcacccaaataacacacaggcaatgacgccctagcccccactcaactaaactacacacaaccacaactaccccggaacaagaaggcaatgatgatacataattgctcaggcctcgggccga

SEQ ID NO: 28738 - DNA, 139 bp, Zea mays
  Clone ID: MRT4577_12621C.1
gggggagagacggaatagccccaaattaaacatggggaggagaaccttggcaggcccctaacactactactagaacaaatagaagggagacacttttaaactagaggaagggggccattcctcactacctctttttgcc

SEQ ID NO: 28739 - DNA, 272 bp, Zea mays
  Clone ID: MRT4577_126220C.1
cagacaatcagggggccagggggctttttcaaccaccaaaaggccccaccccaattgaaaggaactaaggaacaggggctcatttcgcagggccagccaacacactaactaataaaactcggcacaggaagctgagcaggaaaccaccaaaaaagtcgctccactacctaaaacaagatagtatctgcgctgatacacatactcgcctatgtattcgggctccgcccttatatcaagctgaccaccccgagctgactctaacacactggaat

SEQ ID NO: 28740 - DNA, 465 bp, Zea mays
  unsure (1)..(465): unsure at all n locations
  Clone ID: MRT4577_126221C.1
tcgaggccggacgggctgcncctaccctacccgaccgaggggcacaacggctacccacaaaggggccgtcgaaggcgacggagagcacagccaacctggaatctacagcaacacctctgcatacacactctggcaagccacctcatctccggggactttacaccgtggaaccagacaaggctgaggatcctcccacgccctcgcaatccaccgccatcacagcagatagcgagatagcgagaggcaacaaacagcaaaaacaaccctaaatagtcatggtgatgctcaaataacgcccccacgaacaaagcgacggctcctggaggagttcctcgagcaaaaggccggtcctttattaaatggccaccccccggaggttgtgatcaagaacggtgactgcacgagagcatatgctaaaaagatgacagaagggatccctcattttgactatgccccggctgacac

SEQ ID NO: 28741 - DNA, 401 bp, Zea mays
  Clone ID: MRT4577_126222C.1
cgacaaacagaattattcattttaagccacgtttttggcaatacgcaagactttgtaatgtttgatttggtccttgtatactgatgaccggatgggctgtgactgcgcagttttggttacagcatctcgtttagctgcaagagcgacagtttaacatctcggacctgtgtgttgtttttttcctccagcaaccagcatggtgtaatgattgttttttcatccgacatagcaatatgatggatggatgccctgactattgtaaatgactttgcaggaaggtatatcttgatcttgtgcactgccgcaggagaatgatacaagaacatgcctatgcttattgctgatgcagcaaagtctaaactacaaaggtctgaaggacatctggtctattgatatacatc

SEQ ID NO: 28742 - DNA, 214 bp, Zea mays
  Clone ID: MRT4577_126223C.1
tcgaagcgacaacgaccgacgcccgtcgacgggattatcgtggcccagacgcctatataatatcggatcgtggccaggaccaagggatatcacctgaaggagatggatacgtacgagcacatgcatatctgcctaataagctcagtgcacccggaaaacacgaccaacattactgcagatcgcggagactcacgggaatgaagcagtattatac

SEQ ID NO: 28743 - DNA, 505 bp, Zea mays
  unsure (1)..(505): unsure at all n locations
  Clone ID: MRT4577_126224C.1
tcctactctcatctctctctttcatgatagccttcaccctgtgaacctctccccatctccaaagaaaacattccaaagcaatctacccaatgctcccataaagattggccatgcaccagtagtgcgcaaatgttggcttgataactatttcctatctggactctacttgaaagagaaaacaatgcacactctagtctccatcccactgttatatcctaaacggtttaaacgctgtttaaatgctactcagtagctaaacgtttaggttgtttatgttgtttcatccgtttaatcctatataatccgtttttaatccgtttaaacgctcgtgtagtccgattaaacgctaaacagaggatgaccaattctttaccgtttagtgtttaggattacactgctctatccatcctcaaaactaccacttacnnnnnnnnnnnnnnnnnnnnnnnnnnnnnnnnnnnnnnnnnnnnnnnnnnnnnnnnnnnnnnnnnnnnnnnnnnnnnnn

SEQ ID NO: 28744 - DNA, 463 bp, Zea mays
  Clone ID: MRT4577_126225C.1
gccctccttcccggccttgccgccgtccttgtccttgcccttgacgtccatagccttgatgaaccggccggccttgcagcagagcttgttgcagaccgtgtcggcgtcgtacggcccggagatggtcacaacattgctcttactcgtcgaacgagatcgtcttgatgttcatcctctcttctcgtcgaacgagatcgtcttgatgataatctggtcttggatcttgcagaggacttttctgatcttcctgtagcatatctagcattcaagtcaaccttgaggacgatcgtggagatcttgtccgccatgggagtggcgctcgactgagtagcgggcccgtcaccctcctggtgacgctgccgctggtctcgagctccgggatggtggctgccgcgggagtgtgtgtacgcgtggggaaggaggaagggatgacagtctacggacgcgtgggcggacgcgtggg

SEQ ID NO: 28745 - DNA, 525 bp, Zea mays
  Clone ID: MRT4577_126226C.1
ggctaaagtatggatgcccgggggagggggtcccgtctttttaacgaaattcgtttttttgcaccaagcactcattactcttttcgtcctcctaaaaggaaaaaacggtttttgtaaagttactgggctgtttctcctccggactggacatgaacatccacatttttaaatccttgcccctttaatactctttgatgtactgaggaatctttgcagggtctatttgctttccaacaaaacctggtccaaatctgttgctcggaacaccgggctcattttgggctgtgaaaaaacttcggaagggcgtgtaaccattggccacaacatttaattcgtctacactgaagttgtatcttttttccagggccaagtataacacctttttaacaccgaccgacattaattttttcaccgtgttgaaaaacaaattgtgaaatcatcactgtaaataacatttgcagcaaacaggactgttgcttttttagcctcctcaacttcacttgcaaaccataaataccgacttgg

SEQ ID NO: 28746 - DNA, 163 bp, Zea mays
  Clone ID: MRT4577_126227C.1
tgggtgatatcgcggagtacgtcgatagcactggactggatggtcatatctggctctggtaccagaatgatcggcgtggagaatgatctgctgcggagtcctcgatatgggctatgtgcacagtgatgatcatccgtaggaatctcaatggggaatcgcattg

SEQ ID NO: 28747 - DNA, 424 bp, Zea mays
  Clone ID: MRT4577_126228C.1
ttttattttagcaatgctcaccaattgttccggcttaggaattcacacgagcgcgcgcgcctttatcacacaaaatcatggtccgaataaacatacggccccacgaaaaccaactggaaaaaaaccgctgtggctaacatatcgattcaccgatgtaaagatactgccacgacgaccacgaccgacactggtgcttgtggagtccgcatgcccgaccaaccaaccaaccaaccatatccaggttctttataaggcgcaaactggggtgcatcctccgcattcctgggggctagacaagctagtgctcttagtccccccgctagaaaggttctgcctgctgagcgacccttggagtgttgcttccgctggtatcggcagcaccgagagcaggcggcgttttcaccgatgttgctcgggccggatc

SEQ ID NO: 28748 - DNA, 298 bp, Zea mays
  Clone ID: MRT4577_126229C.1
tacaactaggctaacctcataagccttagccacagtcttaggcatctgggccataacttgagtttagatttcagacttcaagcccgtcacatacagtgtcacacaggtatccaactctgaattatgcacaggtcgttgcatacctgatatcatcaaaggcctgagaatatgcttacactccatgatgctgcctcatactaaggaacgaccccatggcgtgaggatatgctgctacaccaagctgctctctcactgcacgagtggtctgtcccctatcacgcgatcacctaatccatag

SEQ ID NO: 28749 - DNA, 300 bp, Zea mays
  Clone ID: MRT4577_12622C.1
gcccgacccacgcgtgcgggggcatatgtggacacagaaggggcagatgaccgttgttatgtgggtacaacaaatgaggggggggctagacaggatggagctaagaagcgatagacacgagacaggcgctgtattaaaggggctaataagatgatgacaaagaaggctgatctaaaatgcaaggtggtcgacaagacaaacgcatggaggacatgcaaacagattggagacgacattggaacagggcagcacagatgccatgaggttatacttgatgtaaagtatcatacatttgctgac

SEQ ID NO: 28750 - DNA, 542 bp, Zea mays
  Clone ID: MRT4577_126230C.1
ccggccgggttcccttcgctgcttaaccttagtcgccaaaacaccgacgtgctcatgggggaaaacgggccgctgccgtcgaacaagggaacggcgggcactcgggcacccgtggggcatcttggtgttgcgtcgtgtctcctagaagcctcggcgaccactgattccaccgttgatgtcactgcgccggtataatcgctcatcggagctgtgcgccgccacagatccgtcttggcgcgtgggcaagcatcgttccgcttggactccgacgagcaagccatagaggatacaggtgttcagcaggagctcattgaaggtgaagagcaggtggtccaagaggagccctataatgaggagtacgagttgatctaggtggcgtcttccagtcagcttgatggcaccaaggaataagatttagtttgttttattgttatcatttatttttgtaagacttccgctatgtaataatgatacttatgacatttatctctatacactgtcatatatgtgatgctaaaaaaaaaaaaaaaaaaggggcggcc

SEQ ID NO: 28751 - DNA, 368 bp, Zea mays
  Clone ID: MRT4577_126231C.1
gtaaactgaattagtttatatgcatcatatatatgtattaaagtctcgtatgcaccgaatatgttctctttcgggccaagtcacaatgtcacattgagcgcctatctacaggcttgttgagttgagcctgtactcttcacgacgtccattgagcaccgcaggttgcagttcggcgctcgcgattatttctagtagtgccggtaccagtcgccgaagttctagctccatggagtgatttgcttgacgctcctacggatgcttgcccagaggttagacgtggtcatgctggggaggctcccggttccgcctaaaccttcgtgatcctcaccgagcccctcggggagcccgtcgtcctccttcgagcagac

SEQ ID NO: 28752 - DNA, 228 bp, Zea mays
  Clone ID: MRT4577_126232C.1
acaagactggttttttgctcaagaacactcggattaatcattaagcaatttatctggtgcaacaccaaacgaggtgtgacgccccacacagaacatagcacatacatgtatgcacccttcacttaaacctgggtgagatggttgacaagaaacctaatcaactggtggcctgagcttagcttgcggttctttcaatgcgtagcgtgcatcaggacatgcaggtggagc

SEQ ID NO: 28753 - DNA, 412 bp, Zea mays
  Clone ID: MRT4577_126233C.1
attcggctcgaggctgggtgtcgttcttttcatgtctagatgcacttctggctgccgggtacagggcacgctcttcatcgacctaaacgtggcggccttgaacaatgaatgcgtatcatggtattcctaggctggcggcatcttcggcatccggcctgcgacgagtgtggtacatcggcacgcgtctatttgtattgtgattgactgttgatggcaaggtcgggtcttgggtcaactgctcacatacaaacagctagtatgggtccaaagactaaggggagaagactaacctttctgtctttcctgagcgggaagatggagaacctaaccctagctggcgcctctgcatgaacccttgacttcatctaccaagcagatacagggtgctacaggttgacagaatctacccact

SEQ ID NO: 28754 - DNA, 267 bp, Zea mays
  Clone ID: MRT4577_126234C.1
agttagaacacttgcagagattctcatctctctctctctcttgcgtcccgtcctagcggacaagcggagtggggctccctcgctctgtgtcactgcttgctgcatcgctgaaagcgtaggtgcggcggcggcacacgaacacttgcaaagttgcaaacccgtacgtggggggggggtgcggccccgatcgagcagtggtcgtcgtacgacggcgccctggatccagccgagagctgcgtgacgagcgacgaatgatgcgctcaggct

SEQ ID NO: 28755 - DNA, 2905 bp, Zea mays
  Clone ID: MRT4577_126235C.1
ctccctacttcccagccaccccatggctcgcttaacccccacgaagtccaaatcctccaggaagcccaagccctcctcctcctccgccatgggcgccggagcggagccggatgcgatgtccacgcggcggccgaagcgtggcaagtcggtgggcggcgtcagcaagaagtccaagtcgggcgggttcgagtcgatggggctctgcgaggaggtgtaccgcggggtgcgccacaaagggtaccgcgtgcccacgccgatccagcgcaagaccatgccgctcatcctcgcgggcgtcgacgtcgctgccatggcccgcacgggctccgggaagaccgccgcattcctggtgcccatgctgcagcgcctccgccgccgcgacccgagcgccggcgtccgcgcgctcatcctctcacctacccgcgacctcgcgatgcagacgctcaagttctccaaccagctcggcaagttcacagacctaagaaccagcataattgttggtggagatagcatggagagtcagtttgaggacctgtcagagtgtcctgatatcataattgccacgccaggcaggctcatgcaccatttgaatgatgtcaaggacatgactcttcgctcagtggaatatgttgtgtttgatgaagcagattccttgttcagcatggggttcgccaaacatttgcacgatattctgaagaagctaaatgatacacgacaaacattgctctttagtgccactttgcctagtgcccttgcagattttgcaaaagctggtctgcgtgatccgcacattgtgaggctcgacttggacaaaaagatcagtcctgatctcaggatggtgttcttcacactgcgccaagaagagaagcttgctgccttactgtatttggtcagggaacgcatcagctctgaggagcagacaatattttttgtttcaaccaagcatcatgtggagttcttgaatgttttgttcagagaagaaggtttagagccttccctatcctatggtgctatggatcaggaagctcgtatgattcatatttcaaaattcagggcaaggaagaccatgctacttattgtgacagatgttgctgcgaggggcttggatattccgttgctggataatgtagtgaactgggactttcctgcaaagcctaagttatttgttcatagagttggtcgagtggctagacaaggtagaagtggaacagcttatacatttgtcacttcagaggacatgccatatttactggacctacatcttttcctttcaaggcctcttagacctgctccaacagaggaggaactcctaaaagacatggacggtataactatgaaaatcgatgaagctattgcaaatggggaatcagtttatggacgatttcctcaaactgtccttgatcttgcctctgatggactaaaagaagttattactggatgtacggagttgatagcattagaaaagccatgtgctaatgctttccggttgtatctcaagactcgtcctatgccttcaaaagaatctatcaaaagggtaaaagatttgcctcgtgagggtcttaatccaattttcagggatgttctccggtcagatgaactttcagctcttgcattctccgaacgcctgaaatcatttcgaccaaagcagactattttagaggctgaaggtgaagctgctaaagcacgaaattcgaagggttctaatcaatggttagatgtgatgaagaagaaacgagaagttcatgaagggattataaatttagttcaccaaaagagttctgaggatccaaggccagaggttgaagaggttgttgacatttcaaattgggagaaaaaagaagtttgtggcaagaaacggaagttacagagctttagagatgaggactactacataagttcagtacctcaaaaccatcatttggaagctgggctgtcggtgagggacaatgaaggatttgttgaaaataggttggatgctgctgttcttgatttagttgatgatgaagcttctggtatgcaagcgcagaaaactcgatatcactggatgaagaacaaatttgtcaagttgaatgcaggggatcgtgtcactgctacaggaaagattaaaacggaaggtggtgcgaagataaaggcatcggcaacagggatatataagagatggcagcagaagacacataaatcaatcaacattggtgggaaatctggcaactttgcagacgagggcacatccagttcaggcgggtaccagagaggcaacaagaagcatttcacgggccatggccgcagatctataccaaatgccaacgtgccctctgaaataaggaatcacgagcaaatgcagaagggcaggcagcagaaggcaatggaaatcacgcggttgaagaacaaatctgcgaaggacggcaaattccagaacaagttccagaagagcaggcagcagcctgataggcacggtaaggggaggggtagtgggaaagggaccggaaaagggtttagcaaaggggctggtggaagaggagggaaaggtaagggcaagggcgggaggtgattgatgttttcgaagcagaatgatggtctaagattgatcgagcgttgatgatgttcagcagacaccacctttgcttctcgcagttttgtttatctgttgcagtggagagaccatagcgtctccttcctgtttgcaaccagactggtgtttaattatactcggctggataatctcagagcattaattttgtggaaacttttttttttgggggaggctttaaaaaaaaaaaaaaaaaaaaaaaaaaaaaaaaataatattcacctaatatgcttaaatacaacccctaaaatattgattctgtacaatcaaatgtggggctttttcatacttatgctgcacttcaccttggtgcataaaact

SEQ ID NO: 28756 - DNA, 813 bp, Zea mays
  unsure (1)..(813): unsure at all n locations
  Clone ID: MRT4577_126236C.1
cgggtgttcttctggaacttgttctggaatttcccgtccttggccgatttgttcttcaaccgcgtgatttccattgccttctgctgcctgctcttctgcatttgctcggggttccttatttcggagggcacgttggcatttggtatagatctgtggccatggccccgcgaaatgcttcttgttgcctctctgatacccgcctgcacagaggtcacagcgtccatcagactctgttctatatacgtctcatcgtactgtaccgaagttcagtgctattaaagtactcagatgaaacaaaccgtgctaatgtaaaaaaaaaaaaaaaaccaaggccgtgcacatggcaacaattaattcactcaactgagcaaaccttcagaaacatttaacgaactccttttttcagtaaacagataatatggtttcatgccaaaactatagagaatggagaatgattaaaaaaaagtaagctccaaagatgtatccggaccaaatttcaacttgccagagtatataaaaatataaaatcagagaaggcaatggttacaacataaaatcagaatttaatagagaattacctgaactgggtgtgcgctcttctgcaaagttgccagatttcccaccaatattgattgatttatgtgtcttctgctgccatgtcttatatatccctgtagccgatgcctttatctttgcaccaccttccgttttgatctanaagaagttaggaaagatttttcaaactagtgaagttcaattatttgatctttcactggcatatatgctgaacatactataactggataacagcat

SEQ ID NO: 28757 - DNA, 239 bp, Zea mays
  unsure (1)..(239): unsure at all n locations
  Clone ID: MRT4577_126237C.1
tgntggtctaagnatgatcgagcgttgatgatgttcagcagacaccacctttgcttctcgcagttttgtttatctgttgcagtggagagaccatagcgtctccttcctgtttgcaaccagactggtgtttaattatactcggctggataatctcagagcattaattttgtggaaccttttttttttgtttaacagaagtactgaggtacatgatgtctactggtgttcgtgtggtctcc

SEQ ID NO: 28758 - DNA, 768 bp, Zea mays
  Clone ID: MRT4577_126238C.1
gttctagatcgcgagcgccgccctttttttttttttttattgtaagactgtcataatatccaacaatgaacagagtaccatgtcgagattaataaccgtacagaaatattgactcaagtacaacttgacgagaaatcatgccataagcaataagcatagcagacaaccaatcttgcgatctgcacaattatacttcggcagtatcgactaaaatctcgataaaccacagtgaacagtttttctatgtgcactatcccctcttcaatctccagaaaacaaacctgtatactaaattcgtgtctcgaactctcgatggtggaatcactggctttcagatttaccggtttgttcggggccgttaccatttgatccagagctgccatcagccccttgagattcattatgctcggcattggtggatgtgctagtttcaatcttgggatccacctgctcacccttgttagacgtttctgtagctccatcacccttgttagatgtctcttctgaagaaccattcactccgctggaagaatccccttgggaattctctgcctcagctgagacactgctgttctcagagttctgttgtatggaatatgacgcttcagtggttgtacctgttcccatgcccttctcatcatcaccagatacagtctcagtattttcttctgcagaggcgctatcagatgagttaccgttgtcatcaccagatccagtcccagatgatgctgttgcctttcatcttccaatccagtttcaatgtcgacg

SEQ ID NO: 28759 - DNA, 464 bp, Zea mays
  Clone ID: MRT4577_126239C.1
cagcccatgggtgagggggtcactcacagagaagtttgatgatggccgactaatcccggggactccttaatgctgatgtcgaaaatcgtgatgtttgcaattgtagcctctgcagagaggaatactgatgagacttatatgacgatgagctattatcaacgaatcggggggtgatataacaccttgggtctggggccgagaacatggaaatcatataccacactagcgcatgcgcagcactcgtgactggtgtcacatattggggccttcgtgtgccatttttctaccgttacaaggttgggttacgctttgttcacttgatggatgcactccttacatggtggttctgtacttatagacagccttctgacaatctcgcctttctctgtgcccaatggatttctttgttttctggagctgcgcctatcgaaacattcagcggcggccttcatgcttggggaggc

SEQ ID NO: 28760 - DNA, 610 bp, Zea mays
  Clone ID: MRT4577_12623C.1
gactctacatgcactgggcttatttctgcatttccctcacgccgcgacgccttagcgccgccgctcaagatcggctcccgtgatccgcgcgcaacgcaagggtgcagcgacctggttcaagatgcatacccaccaccactaggtttccgcccttttgcttttcgtcgacttcggtgagggcacgtctgccttgctggctcgtcattccgacgacatctcactagcacggccgtgtcgcgacgatcgccgaggattctcttccgtcacccattgaagtacagatgccaaaagcgatctctttgtcatatgcgatactgtgtgcacgagagcagcttcatgtactgcgctagccgctactacctctccatctcatgacgatgcatgatctcgtctatgacatgcctgacgaagacggcttctgtaatgtgaagcaccgcgtgaacgacatagacggctatgccagtgactctggtaactacctccttgttgtcaaccacagtgatcttactgccaactcaggtgtgacaattgacactgcagacgcgattgctgatgacatgagcttcccatttatgaatgcgaatgccgctgacgccatcaacgagtgagc

SEQ ID NO: 28761 - DNA, 329 bp, Zea mays
  Clone ID: MRT4577_126240C.1
aaaggaaaagggctccaaggccactacaatttttattaagggggaaacatcccatccagaaaaaaaggggggcccctggttgtttttgataaaaacacaacctcgagaaatgtttcttttaaaccgccccaacgaaaactactaacagctcattaaactcttaaaaaagggccccccggttcaatggtggaaaaagaccttgacagggggggtaaaattaacttttgaagaaaaaggcttcaaccaaccccccctcctaaaaaaaaaaaaaatttttttttcccccccccggaagggaaaaaaaaaaaaaaatggcaagggaaaaaaca

SEQ ID NO: 28762 - DNA, 2211 bp, Zea mays
  Clone ID: MRT4577_126241C.1
ggcatttccggttcgattccacctgagcttggagggatcgagatgcttgtcacactcgacctcgcgggccttgctctcacaggagagattccagggtccctcagccagtgccgattcttgcttgaactgaatctgtccggcaacaaactgcaaggagctatcccagacacactcaacaacataacctacctcaaggtgcttgatcttcacaggaaccagcttgatgggggcattccagtcacacttgggcagctcacaaaccttgttcttctagacctctcggagaatcaactgactggggcaatacctacacagcttgggaacctctctaacctgacacatttcaacatgtccttcaataacctatctggcatgatccctcctgagtcagtcttgcagaaatttgattacactgcatacatgggcaacccgtttctatgtggctctccattgcccaataactgtgggactgggactgggtgaagcaccggaaacgattgcgtgtgcctgtcataatcgccattgttgctgcagccctgatacttgttggaatatgcattgtttgcgcgttaaacatcaaggcttatacgcgtaagggcacagatggggacgggaaggaagaggaagaggttcttgtgtctgagagcacccctccagctgcctctccaggctcgaatgcaatcatcgggaaactggtgcttttcagcaagagcttgccttcaaggtatgaagactgggaaactgggaccaaggcgctacttgataaagactgtctcatcggtggtgggtcgattggtacggtgtacaaggccacttttgagaacggcctgtccattgctgtgaagaaactggagacagtagggagggtgagaggccaggatgagttcgagcatcagatgagccagcttggtaacctcagccaccccaacctggtcgcttttcagggctactactggtcatcctcgatgcagttgcttctgtcagaattcatggccaacgggagcttgtacgaccacctccacggctaccgtcctcctcctcgcgctctctctgagagcagcagcagcagcagaggtggtggaggtgaactgttctgggaacggaggttcaacattgcgctcggagcagcccgtgcactcgcttaccttcaccatgattgctggccacagatcctgcacctcaacatcaagtcctccaacatcatgttagatgggagatacgaagctagactctctgactacgggttggggaagctgctgccgatactaggaagcattgagctgagcagaactcacaccgcaatcgggtacattgcgccggagctggcatctccgacactgggatatagcgacatgtgtcttgggaacagaggttcaacgtcgcacttggagcggcccgtgcacttgctaccctcaccatgattgccggccacagatcctgcacctcaacatcaagtcatccaacattatgttagatgggaaatacgaagctaagctatctgactatggattggggaagctgttgccgattctaggaagcattgaattgagtagaattcacaccgcaattgggtacattgctccggagctgtcatctccaactttgagatatagcgacaagagtgatgtatttagctttggggtggttttgcttgagaccgtgacagggcggaaaccggtggacagccctggggtagctacagctgtggttctgcgtgattatgtaagagaggtattggaggatggaactgcatcggactgctttgatcgaagcctgaggggaattgttgaagctgaattggttcaagtgctcaaattaggtctggtatgcacttccaatacaccatcaagccggcctagcatggcagaagtggtacagttcttggagtcggttagaattagttcttgatcttctgctgtcagaacatagtcgcagaataggatgttaacaggaaaagtgttttctgattttttttttcaacagatgaaggtcacattctttttttattgtttactgtggcgcagcttcatttgtaaattgtatttagatttattgctgaataagtgattgttttggtcaagttaccaaatccatgtctatggttttatccttttggttttcggtctatgtaaggccctttctaagttgaacctatgtaaaaaattgcaaatgcaagagcagttgctgggatttgaataccatttttttttt

SEQ ID NO: 28763 - DNA, 338 bp, Zea mays
  Clone ID: MRT4577_126242C.1
gttcactcttgtctcccttggtgatgggtgcctctccgttgcttggggccgtttatcgagggaccccgctgggggggggggggggggtagtcagcggcaccgttacattattgctacggggcggggctccctcagtggtagacaccgccggcaggtgcgctgctcgggcggggccctggctgctgcgcccgcaaagcgcgcatgggcggcaggggcggcccgacctgggcgcgcatcggggccggggggtcgcgccgggggcggtggctgagggggggagtgggggcctctccttggggggcggggggccggtgccggggcttccccggcgcggactg

SEQ ID NO: 28764 - DNA, 945 bp, Zea mays
  Clone ID: MRT4577_126243C.1
taaatccactgggagatcaccaattgctttgccatccatgaaaaagacaagaaatatgtcttctggtcctgagataaaccaacctgataagtctactggagataaacttattgagaataattgtgattcgggcaataagcgtgttttgagggaacggcagcatcagaatcaaacatatttgtcaagcaggtcttctaaccagtctaatcaaaatgctatcaagcagacacaggatcaatctgacgatgatgagatcagcagcgatacttcctacaggagaactcgtagcggacgtcgtcgtggtgctgcccgtcttgccgtgccaaaacaagaggactccagtgattctgaagattttgttgttgtgaaaaagaatcgacggaaacggaagaaatctgtgcataaacaaagggctggatctaagttgaagcatacttctggtccttccaaagcaggtcgattgggtagacctcctctgatcaaatctgaatctagttccttatctctgcagccaggaaaaagggaaaggaaggtgcctgaaggtacaggaactcttcgcgaagaaaagcaaaaaataagtgatcagataaaagccatgcttctagatgctggttggacgattgatttaagacccaggaatggtagaaactacatggattctgtgtatatacctcctagtggcaaagggtcttactggtcagtcacaaaagcatattatgcgtttcgtgcaggtatggaatctgagcagaaggaaagtcctaaagaccagtctttgtcaacaaaatctgttggtagccccgacaaaaggcaggtctctagttcttcaggttgtactttaacagaggatatccttagcaaattaaaaagagttgttgtaaacaaacgaacaaccaaattagagattcaaaggttcagccagaaaaggttcaaaaaaaaaaagagaaa

SEQ ID NO: 28765 - DNA, 457 bp, Zea mays
  unsure (1)..(457): unsure at all n locations
  Clone ID: MRT4577_126244C.1
gggaatgctaanctgtgtacattctattttctactacatttcgaatcacggagctcattttattttatatacaangatccctcgcgctatactatacaaatggcatgtgcagagaaattgggggggggggggggaaaaaaaactgcacattgcatattttgctattcaaaaatcaaagcaaaaacaaactgtttacagggggaaggaattcttgtctagccattttccttgtggatcatatgggggtgccataaccatgcagggccctntgtnaaagatcatttgtactggggatctggcggggtggaatntctctcggaaaggttgaagttccgtgcnncnggtggtgttttttggggaaccttnagggcaactggggggttttttatttgatttttgggcagggtgggttctttcacaaggtttttttcctgccatttgggagtttttagtgggg

SEQ ID NO: 28766 - DNA, 301 bp, Zea mays
  Clone ID: MRT4577_126245C.1
gggagttcttccccttccaccttctccgcactttcccgggcttcgccgctggcgtgacagcattcgattggtcaccggactctgcgttcctcctcgcgtcctgcaaggacctaacagctcggctcttgcctgtcaagaagggactaggaggcaagcctttcctcttccttggccatcgcgcggctgtcgtaggtgccttctttgccacggacaagaagacaaggagagtcaagggggtttatacagtctccaaggatggagctatctttacatgggatttggtggaggaaattggggaaaa

SEQ ID NO: 28767 - DNA, 820 bp, Zea mays
  unsure (1)..(820): unsure at all n locations
  Clone ID: MRT4577_126246C.1
agtaccggtgctcacaatccagcgacgcttgtgaccacttcaagtgttctcttctccgcgcgctttgtctcatctgctccgccaattcggcacgaggcacacagctggagagcaggtgcttctctcacacacacctcggcccacgccgccgttgccagccaagagcagtcgcggggcagcgctgaatcctgattaggtgaaaaagagggtggcgaccatcgttttcgctgctgattctggctgcggctcatctgccccagtgctgtgctcctgcaccgtaccgcaaacccagcccaagactgcaagaggtggcataggctcatgtcctgcccagcggttcgcttcaaatttctgagctgaacgcagctggagagaccgcgcagtcctgaatatgtttggtttctcgcggcgccgggtgaaacttggaaggtcgaagggtgacccaagtgatcctttgaacagctccaggagttctgttggtcccagtaaacacctcagtctgcccaatgggaatgacgcgactatgacgtcagtaagtggccacgcagatgatctttcctaccgttgctcgtccgatacgtttgatccccaaggacgcactttcgatatttcagaaaattggactgtgctgtccacagagggagacaaacctattcctcgtttctatcatgcagcagccattgtaagtagcaagatggtagtgtttggtggtgattctggtaatcgcttattagatgacacaaagatatggtatctttcttttcttacttgtatggngtttggatgtatgaactccgcactgagtggtaccatgttatta

SEQ ID NO: 28768 - DNA, 795 bp, Zea mays
  Clone ID: MRT4577_126247C.1
acaccccacgcgtccgctgctctttcccctccagtcctccacccctgctgactccgttgctgtgcattcctgccaaagcttccccgccgaattccccaacctcccgccggattcgcccagctcgtcgactccggagtccgattcgtgcacggagcagcggcctgggccgccaattcgctcggttcggcgccgcgctgattcgcttcggtactctctttctgcttcccccccctggaatgtttccggtgattcgcgcggcatgagctcgggttggaggtggtgcctctgattcccgctggcccgaggcggaggcgcgagggcatgtgggtttctctggtgtggatccggggctgcgtgggcgtcacgttcgtcgatttccagagccggaggggagccgactagatctctcggctcctgcggttgctgcgctccgtcgggagagttacctgtgaccggagaaggttgccggagggttttgggaggtgaggggacatggaggccgccaggttcggcgcgcggagcagccacttgtacggcagcgggctgggcgagcttgacctcaacaggcgcgagagcagggtgtttggctgggatctcaacgagtggagctgggacagtcagcgctttactgccacgccggtgcctgtcgaggcggcgaatggctctggactgaacagctcgccgtcatcgtccgaggaagccggggaagagatggctaagaatggtggcttgggaggtgaaactgacaagaggaaaagggccgtggtcattgatgacgatgatgatgatgaaacg

SEQ ID NO: 28769 - DNA, 2126 bp, Zea mays
  Clone ID: MRT4577_126248C.1
ggtttgtgctataaatagctactgtagttgcccatcgtcaaagttttgtagagtggttagtgtttttggttgacagacattggtgctagatttgggatcagccttcctaaacagtaccatctacttcagctcaatgatatgaataatgcttgtttgcaggacatattgctaagaatctgccacattatgtttgcttgaggtattaatttatccaggtgtttaatgctggagtacagttagaagatccctaatcaatttcttctcatttcagtcgtgtaagtcactctgtaagttttgctaccattttctaaactccattgttctccatatgagtttccgtctcacatcttcagtcattggatggataactgtcttgtcgttcctaatattttatcctctgaaaatgttaagacgaagcatcctcaattgctttatgagtcaaaattatacagaatacttcaaggaggaactgggattcccaatgttaagtggtttggccgtgaagcggccgggattgctgtgcgacgtcttgtttatttctgcctttaccgtaaaaaactgtacttggtccatagtgtcaccaacaatatattctacttctgtaatttctgatgctgccacatcaggtccataattatattatgcccatgtttgatattgttccatgtaccactagaaattcaaatatctgaaaaatgttctcttagcatgatttgagacagcaccccgatttaaaatatctgaaccttcagtgttgtccatgtaattgtagagagaacaagaacttgactggaacagcaagatatgcaagtgtaaatacccaccttggaattggtaggtttaatccaattggtggtagctagtttccaggcatgcagtttctggattcctgaaaaacttctcttacctttccatgacatttcatttctatattataattgatgtcttctcgcagaacaaagccggagggatgacatggaatctcttggatatgtactgatgtacttcttgcgaggaaggttgtttactgtaacatgattcgccgtttcacctctcattttctgatgtctgggttaatacatggtttgcctactgtcagccttccatggcagggcctgaaagctgggaacaaaaaacaaaagtatgaaaagatcagcgaaaggaaaattgctacttcaactgaggctctctgccgtggatatcctaccgaatttgcttcttacttccattactgtcgctcactgcgtttcgaagatgcaccggactatcagtacctgaagagattgttcagagacctttttattcgggaaggttttcagtttgattatgtttttgactggaccattctaaagtaccaacaggcatagatgaccactgcaccacctcgtgcaattgtctgtacaaggaataaacttaccctcctaccttaagtagtagtagagattgtattgggtatagaaatgtacttcttttgttatgttatatttcattgccccctctctattttggttcctggccttggtttttgtttcttgtattttttttccatgtcgtctagctactgtagttgcccatcgtcaaagttttgtagagtggttagtgttcttggttgacagacattggtgctagatttgggatcagccttcctaaacagtaccatttactttagctcaatgatatgaataatgcttgtttgcaggacatattgctaagaatctgccacattatgtttgcttgaggtattaatttatccaggtgtttaatgctggagtacagttagaagatccctaatcaattgcttctcatttcagtcgtgtaactttattcatgctacaacaacgactttgagcgaacatgagaccactgagctctagagtgaatgaaggacgtcgtctttggaagtcagacatcacctagagctagggtgtccattcttgacatgtttctcttagtgataggtggatactgtctagttaggaacagagtcttgagggattgatggacgcatgcatcttcaattcctgtgtgttgtattactactggtacaatctccaattcttgtgaacttatgtatttggacttgtgtgaatttgtgatatgaacatatatccatgtgtttgaaattg

SEQ ID NO: 28770 - DNA, 326 bp, Zea mays
  Clone ID: MRT4577_126249C.1
ttttgttggttttgttgaaatttactgaccttattgaaccaacaaccacatgaatataaaccattgcatgggagatgcataaatgcggccacagcctcagaatagagtaccgtgtttaaagtgtcaatagctaaccaatcatagaatgaacaggcacaacacatgcgggtatgcttccttccttggtaaggccacactaccaattctgtcaaattgctaacaaatttacaacaaaactgagctgggcacttgacgtgtgccggactttcttttaggaagccaaccgaattacaaggtagcttgctggacggtaaaccactaaccaa

SEQ ID NO: 28771 - DNA, 380 bp, Zea mays
  Clone ID: MRT4577_12624C.1
acactaacaacctacaaacaacgagaaatccactaccaacaatacaacaacattggcgcgaagatatttttcctgcttggcgggctgctcttactgcatgtgttgctaacccaacaatacaccctcaaagctcacacgctcctatagcataccttctacccccataccttccatcaatgatagcttcagtatgtgaaaactcagctcttcaaccatatatgctccaacaagcaatcccagcaagcaacatacctttatcacccttgtttcaacaatcaccagccctatctttggtgcattcattggtacaaaccatcatggcacagcagctgcaacaactcgtgctacctgagatcaaccaagacgctctggcacacctt

SEQ ID NO: 28772 - DNA, 352 bp, Zea mays
  Clone ID: MRT4577_126250C.1
gggggcaatgtcaacttccgttcaattagcgggcaaatcgccagcttggtttgcgataattttcaaagaaatgattgtttgccaaggggggattacattttgtttttgagatggaccctcgggaaaacacaaactgcctttgttaaaccatggtgggcatgacagcggtttaacccaggcggagccccttgcacatgaggatcccgcgcaattccgttatttccaagcttcattcagattacacccccttgggtcgtaataccaaaaaccttgcttttgggcaaaggcaaccaacaacaagctttgtcctttaccttgggacaaaaaccccccacttttttggttccttttt

SEQ ID NO: 28773 - DNA, 481 bp, Zea mays
  Clone ID: MRT4577_126251C.1
atcagtacatttcgtctcacaggacagaaaacagctgctcctgacgacacccgccgcggcccaccacatcaaacgatgagggcgacgggaaagttaaccgcgtccgcgacgtcctcgttcatctgaactagtggcgatgcgcacaggggccgaggactgtgcatggttactcctctcatcgcatttgaagaactcatctctcataccgtttccgcaccatcccgaacggcacttacaagacaaaggggagtatccggacagacacaggcgccaagcaaggctcggcgttgaagtgcctcgcgtgggctaactcccacgcctacgtcttcgtgggcgactccgagagcgctggcatggacgcgacgcttccgttcgccgcggccatcgttgatgatgtgatatactcggatatccccgacgtgaccaagcgagtcggtaaggaaacgctaaacgattgcgccctcgctgcggccagcgccga

SEQ ID NO: 28774 - DNA, 287 bp, Zea mays
  unsure (1)..(287): unsure at all n locations
  Clone ID: MRT4577_126252C.1
atatttttctttttaatttttttttttttaccatacccaaactgccatgcatgagaatagatagacagaaagaacgggaaccaaccaacacaagacacaacaaggtggaacaagggcaggcatggggcaccgtgccactgacaccgggccccaccaccattaccacccgacgcacactttatttagcccacgtnactggctgccggcaccggacacgttcacgcgagagtcactgctaggtacgtaccgggctacgtacgagacacacacacacacatagagagacg

SEQ ID NO: 28775 - DNA, 227 bp, Zea mays
  Clone ID: MRT4577_126253C.1
actgcatcatctactttatgagcatccgcctcatgactgcatgttgattagataaaacattatgacacttctcagtctgatagacacttgctatccattgaaatcgctctaaaaggtgcctctttagaaagaaacttgctatccattgaaaggggggtaaaaagttttttttttggggggcaccgggctcttgggtatgggaataccaacctagttggaggggcgga

SEQ ID NO: 28776 - DNA, 355 bp, Zea mays
  Clone ID: MRT4577_126254C.1
gccgcccgtttcaaaaacgatacggcaggacatctgtttcccacagaacaatgacgacataatcaggagcgccaagaatgccgacaacgtaggtttcctcgccggcgagtgggacgaccagctcgcgtacaccatcaagaaaatgcaccgacaggtggaggaagcaataaaacgcagtaccaagcacggatgcagccgccggagagcatcgagcgcacaatatgccgtcgagccgcctcaggatcctccagcgacgctctgaggacacctatcctgctggccgtgccgataccggaggatgcgactacaggtatagtcgacaaagtgaacagagtgcaagggcgtcgagaagaag

SEQ ID NO: 28777 - DNA, 642 bp, Zea mays
  unsure (1)..(642): unsure at all n locations
  Clone ID: MRT4577_126255C.1
tgggtacctcgaggccggccggaagaaagattccttcacctcctcttccactccgtctccaccatcgtctccccgtcgccctccatcagttgcttcctccgccaccatcatctccctgtcgccctccatcagttgcttcctccgccacgcctcgccggccccgcgcctctgaccactccccttacctccggttcccgtcccacatatccccacgctcccctcaagcctccgcgtcgtcacgcaggtctacccggtcgccacagggatgacctccatggcttcgtcgtcgtctgggtcgatgcgggagccgcttcgagcttgctggaaccaacggaactgcgcacttcctcgagcacatggccttgaagggcacccgacgccagtccaagcgcaggtgctcgaggtgaaggtggaggtcgaggacatgtccgtacgcggtacgcctctacgcgtnaaaaaaccacttctggtagcgacgactttgggcaccatgaaaagcactattccctttccctgtataaaaaaacaacactgtgtgtgggaaaaagaattgggtctgcataactataaccatcaggaccctgccacaccattttcccgctttcagtggaatgggcgtttgacgtaccatcatccggttgt

SEQ ID NO: 28778 - DNA, 453 bp, Zea mays
  unsure (1)..(453): unsure at all n locations
  Clone ID: MRT4577_126256C.1
gcactagctagacancacacagcgagcgagcgagcgagcgagcgagagcggngagcccggccaccagcgccggaggccgncgncgncnnactagccggcgcgccgacgctcgacgngggcangaanggcnagccgggngagagacngcnaggcagccagcnaggcacggngngggggaccgaaccggagggccgccgcncgaggcggcggcggcagacggccggccggacgaagaagcnccaccggccggngcggccccggggcgggccggngccggncnacngcncggcgcnggcccgccgcancgggcgcaccagcgcgcagcaccccgggccggcgggcgccggcgcggcgccgcgcaccgcgaagcgggcccccccggcgcccgcggccagcgccccgaaggaccgcggcaccccgncgcggcgagggggcgccggccgcggcggcgcc

SEQ ID NO: 28779 - DNA, 464 bp, Zea mays
  Clone ID: MRT4577_126257C.1
caaatacctaccactgagccttttcccgctctggtctatcttttccgtatcggagcgctgccggcgcccgccgtcagtgccggtgctcgagaaacatagatgatccagaatctcaactgatccagccgcgatggcgatccatggcctgtttgggggtgctttctgcccgaggcgggcgctggaggtgcgcaagcgcatcgatcacctgggcctgctgtggaagctcatcaagctcaccaccacccggaagcacatcgccaagaagcgccttaagcggctgtggcataatgaggcggctataagggattgtggtgaatcagaatccatatcagcgattaacgtggctttcaccaatgagaaacaacagccgcctttgactgtgtgccacagttcgctgtcataagattgaaagccaagtgcgtgcatgaatcttactatcttcaacatcattcgttgttaccata

SEQ ID NO: 28780 - DNA, 380 bp, Zea mays
  Clone ID: MRT4577_126258C.1
cctaaactataacctacccaaagtaccctcacgccacgcaaggaaaaaaaaaccccccggaaacccgtccaagtcgatcaaaataggcccgaaccaaaaaaccccaaaaggggccccaataaaaggcccccccccccccccaggcaaacggggggacctccagaccaaaaggggcccccccaaaaaaaaacggggggggcaaaatactccagacccacacctctgcaaatatccaggaaagcggggcgcccaaaaaattttcaacccacccccttagcaggatgggaagaaagcgaccggacaaaaagccccacccacacatatctgaacggggcaaagagggaaaccaacccccccccaaaccagggaaaacaaaaagg

SEQ ID NO: 28781 - DNA, 780 bp, Zea mays
  Clone ID: MRT4577_126259C.1
ttcggccgcgaaacaaggaccgaaatattgggagctgcttgggcatcgtgagcttttcttctgacgtctgcatttgatccgtcttttctcttgcccacttcacacttcttacgtcttcacggtgccttgagattcaagctcccctcacattgacccgagagccttctagaatcaccatagatattcatccccacttgacgtttacagtcaccctcttagttcagagccttcccacagcccttgctgcactcaattgatttgagcactctactacagccatgttcaggtctcaagttttccgtcaagtcgctcgcgcggcccgagcccaagctccccgttcagcgttccgaccagcacagccagccatttcctcgctgcgacacttcacttcatcgcctagccgcttcgacaaagaccccaacaacgatgaggtcgatgcggcaacaacatcgggtgagcctggtgagagtggagaccacgagggtcagtatgctcgaacccgagacgacattgtcgtagaatacccggaagaaaaggacctgccaccttcaaatcccgtcgtgggccgaggaggagagcatttcaagcgcaccctggcctccttctccatggaaggcaaggtagccgtcgtcaccggcggagctcgaggtctcggtttggtcatggcgcaggcgttggtgacctccggagccgatgtagccattgtcgacatgaacaaggaagagggtgagcggtcagcgaagggtctcctcgatatcttcaagaaggagaatcctggat

SEQ ID NO: 28782 - DNA, 171 bp, Zea mays
  Clone ID: MRT4577_12625C.1
gtcggcactacacgcccatcggcgcgttaatcagtgatgcgccgtggtcctgcacgaagctgttagctcgcaagtcgactatctgctaggcgggccgcaattaggcggctactaatgcggcgctgaagacggcgtcggcaaccggaggcgggaagctagctgcgccgcagc

SEQ ID NO: 28783 - DNA, 517 bp, Zea mays
  unsure (1)..(517): unsure at all n locations
  Clone ID: MRT4577_126260C.1
attcaaatgttatccatcacgatagaaatttcgaaaattgacataaccgataatctacaaggtacagggagcaaaattgacatccaatccgtgaccaacccatgtcattatgtcaatgtgccaaatcttgaaaggctgccatgtctgctgttgaatttaaaagcaatgcctctgaggagataatggataacagtaacaacgagtgatcatcagaaattgtgcagctttggcttgccatttcctttgcctcttcatatgctataggagaatctggatccttatccatattccttcttttataaacattgtactctccattttatgtgaagatagttatctgtagctatttgaagagcatgcaatccattttggagtcatctgttacggcacatctgacacactcgagagagaaaacaggataaagtataaactacatgctgctccaatccctatggtcaagagcagcaattcatccttgngcgatgaccagcaggagaagagggagagtgcatgcgta

SEQ ID NO: 28784 - DNA, 752 bp, Zea mays
  unsure (1)..(752): unsure at all n locations
  Clone ID: MRT4577_126261C.1
ggccgggccggggatattactcgggttctcggcaaaaccccgcaccggcgccgcctcttcctctcggttaagtccagcccactccgccgccgccgaccgcgagaggagttctcttcgccgcctcaaggacgagatggacacatcaagccctgcagcacttgtcaatgcaaagattctgaacatgtttgttgggcaaagagtgcgcacagttgttcaagtccaacacaatgatggtggaatgcttgtcgggcagtcccctgatgggcatcaattgagtatcaaaagcgccatggatgtccctgtatcacactttatggaagtttatggaattgctgaaaacagccagaccatccgcgctgaagtttgcacagattttggtcctgactttgatcccgagacttttaatcaattgtgcaacctggcgagtaacaagttcaagcacatgttcctgtagaggtcatcatcaagtggaggaccttcagccaactgaagcttgtttgaaatcgatatgattcacctctaaatgttctttcactcaccccagtactctgttgtcagtattggactccttttagcatgtattaatctaagcaacataagactacgaaggcaagcaaaatatatcgtgtagtagaaaaaaaaaaaaaaaaagctacttttaggcaatccaaagctaagcttgttatgttgctgtcacttacatttgnaccctcgagagatgctacaatggctaatgcagccttgatgagagt

SEQ ID NO: 28785 - DNA, 1172 bp, Zea mays
  Clone ID: MRT4577_126262C.1
ccgcatatcggggttaggccaaccgtccgccatctcaaggatgaattgctgctcttgaccatagggattggagcagcatttagtttatactttatcctggttttctctctcgagatgttgcatggtgtcagtgtgtcagatgtgccgtaacagatgactccaaaatggattgcatgctcttcaaatagctacagataactatcttcacataaaatggagagtacaatgtttataaaagaaggaatatggataaggatccagattctcctatagcatatgaagaggcaaaggaaatggcaagccaaagctgcacaatttctgatgatcactcgttgttactgttatccattatctcctcagaggcattgcttttaaattcaacagcagacatggcaggtacgtgtccactttcttctcaaggaattgcactagaggttggactttgtgggtcaagagaaatttaatgcctattgttaatacaacctttagctatttttccatgatgatggagttggacaagtaccatattgagtataagtgttagcctattatatctttgtacaaccatggcaaacgaataatttcttataacaccatgaagataatgtttaacgaagtgtgtttgcgtgcgtgtgtaatttcttcttttgttttgctgctaagtttgatagttcaaaacatgactcttgtaaagtttggttttagtctaacaaatacactcaagtcctgacatgtaaactgtaaagttggactgttgcttggtggatctgtattgaactttattttttttaaaatgttttatggcttgtatagtttgtattcacttctcacctaagctacaatttgtttttgccagcctttcaagatttggcacattgacataatgacatgggttggtcacggattggatgtcaattttgctccctgtaccttgtagattatcggttatgtcaattttcgaaatttgctatcgtgatggataacatttgaataaaacatagttaaatatacatgacaactgcctcgagtctttgagaaatttatgatgcgtatagtggtcaaggagactcatgtgcattttgagggacaaatatagtgtgcatgtttattttaagatgtggagaagaattggcaatgaattcgttcgatgcccactgggtatgttattttgt

SEQ ID NO: 28786 - DNA, 1034 bp, Zea mays
  unsure (1)..(1034): unsure at all n locations
  Clone ID: MRT4577_126263C.1
ggccattaaagtgaacaacagctaaaaagtggaattgtcatatgtccggagcaaaagggtaacttcatgctttccacaatgtgtgtcgacatgatgcttgtagagatgcttggaccaatcttcaactcatggggcgcttcatcctcggcctcctacgcatgcacttctcctgcttctcctgctggtcatcgcccaagatgttgcatggtgtcagtgtgtcagatgtgccgtaacagatgactccaaaatggattgcatgctcttcaaatagctacagataactatcttcacataaaatggagagtacaatgtttataaaagaaggaatatggataaggatccagattctcctatagtatgaggaggcgtaggggaaatggcaagccaaagctgcacaatttctgatgatcactcgttgttactgttatccattatctcctcagaggcattgcttttaaattcaacagcagacatggcaggtgcaggtcctatcctatccattatctacccctgcatgtgtgccagctattctactctatgtttcaatagtttggaaataattcagagctaaggttttctgatacaggtacgtgtccactttcttctcaaggaattgcactagaggttggactttgtgggtcaagagaaatttaatgcctattgttaatacaacctttagctatttttccatgatgatggagttggacaagtaccatattgagtataagtgttagcctattatatctttgtacaaccatggcaaacgaataatttcttataacaccatgaagataatgtttaacgaagtgtgtttgcgtgcgtgtgtaatttcttcttttgttttgctgctaagtttgatagttcaaaacatgattcttgtaaagtttggttttagtctaacaaatacactcaagtcctgacatgtaaactgtaaagttggactgttgcttggtgggatctgtattgaactttattttttttaaaatgttttatggctttgtatagntttgtattcactttctcacctaagctac

SEQ ID NO: 28787 - DNA, 153 bp, Zea mays
  Clone ID: MRT4577_126264C.1
tgctattcgctcgctcaatggcagcttcccttctcattacctcaaggcccatgaccaattccacactaaccacccatgacaagccccacatgttgggagcattctgcgcaccggatgataatcagcagcaactcatctcggaggccgctttgc

SEQ ID NO: 28788 - DNA, 115 bp, Zea mays
  Clone ID: MRT4577_126265C.1
aaacaaaggatctttgataaggggaaccaagggggtttgaactgacagcaaataaggatacaagttttacttttccaaaggaatgggggggccagagggcccggtatggaattgg

SEQ ID NO: 28789 - DNA, 494 bp, Zea mays
  Clone ID: MRT4577_126266C.1
ggggggcaataggccccccccatctaataaaaattcaattggggtcaaggtcagttccctggccctattgggtcacaacaaagcccaggccccgaagggggaaaaccggaacccccgcggggcaagaaagaaaagaccggggcccgcccccttaaaaaagaagggaactttggcggatcccccgctggaaacaatggggaatccaagggccgggtttattacaaaccccggggggggttagggacccttcggggccctaattaaacctaccccccatttttgggttttccaggaacgggaaaccaacttttacttttaggaaaagggggggcatcccccccctcaaagaccaaggttaaatcggggggacataaacaatttaagcccaggcccatttaccagggggcgcttaatttggaaaagcattggcaaaagagcccgggggggccaaaacctcaaagggggggcttggcccaaagcttttaccggggggg

SEQ ID NO: 28790 - DNA, 419 bp, Zea mays
  Clone ID: MRT4577_126267C.1
gctcgacccacgcgtgcgctgcaagaaactggatgtctacgccatggctgtatacaaagcagaagcttgtagggcccgtgacagtgaacagcaccgacgtttgatgctccatgacaacgccgtacagtccttgacgacaggcgaaacttacatgtgtggactagctataatcgtgccgcgctccctcttgatgaaactgtacccgcaacaccgactcttggtcagctgaccatccgccttgttccttaactgttcacctttagcaggactacagctatgcattagacctgcgtttgctacaagatgttcaactagtgcatgtacatgtatatggatgcccacctcgcgtacgcgcaggtatgttcaattcacagaggaaacacaatagcatgtatgcagtgtttttcttaccacacata

SEQ ID NO: 28791 - DNA, 306 bp, Zea mays
  unsure (1)..(306): unsure at all n locations
  Clone ID: MRT4577_126269C.1
gggtccctcgggcctggccggtgatgaaacaaagagactctgattaaagaagacaaagctgcaaacagnnaatcattctgttgttgcagctcagtccttgccaccagaggacgacgacgatgatgaagcacaagctgatggggcatttgaagatggagcagtagctggtaagaagataaagaagaaaaacaaattcataaagaagaaggctcctcttcaacagacagatcctggatgaatacctgtggatgagttttacctctcaggagaattgtcagagggcgcacatccacaatacaaggatga

SEQ ID NO: 28792 - DNA, 453 bp, Zea mays
  Clone ID: MRT4577_12626C.1
cccacgcgtccgctagttctagatcgcgagcggccccctttttttttttttttttttttttttttttttttttttttttttttttttttttttttttttttttttttttttttttttttttttttttttttttttttaaaaaaattttgttttttttttattctaataccgaaggttttttgaaaaaaaaactaaggttttaaaatataaaaaagagactggggaaggtgaacacattaataaattaaaaaattgaaaaagcgttttctgagacaaaaaaaaattgttaaaataacttaagaaaaatgaatttttcctttacagcggtatggtcttaaaaggattaattctttttttttttttttttcccaggtaattcctgggggggggatacagagaaccctttatacccttaaaatggttgcccgggaggaatttaaaaagggaaggggg

SEQ ID NO: 28793 - DNA, 335 bp, Zea mays
  Clone ID: MRT4577_126270C.1
acctgctccccgcgacggcgtcggggggcgaagctggaggtgtggctagaggtggagtctaacaattttaaccggaacccgtggccgttgtggtccaacttcttgggagggcgcttctgggcggggcccccgacgcggcggtggtggacaagcacgcggagcaactcgccaaggtgctcgacgtgtacgaggcgcaccttgcccgcaacaagtacctcgccggggacgagttcacgctcgccgacgccaaccacgcgtgctacctgctctacctaagcaagagacccaaggccgggctcgttgccgcccgcccccacgtgaaggactggtgggag

SEQ ID NO: 28794 - DNA, 154 bp, Zea mays
  Clone ID: MRT4577_126271C.1
ctctcatgcgatccgccagctcccgtgttgcttggaccgtagctaatgagatgtacgatcagaggagaccgaggtaatctcgggacgtgccctctgccgaccgatcggggtctcgaacccgtcgcgtccgatatccacgagcggtatctatcca

SEQ ID NO: 28795 - DNA, 453 bp, Zea mays
  Clone ID: MRT4577_126273C.1
tggctctggacctttgggctggtttatgtgcttgtttatgtgcttgtttatgtgcttgtggatctgcgggttggcgttgaaggtttcggatagacggtttgcactccggatgagagtgtagtagtcgttagtcttgaaactggcggttggactgtttacctctcagagttgcggagttgtgttggtgcgacgagaagaacagccggggtcgagaacgagatgacagttgagccgacgaagactcgtattctgaagtctaagtcttccgtgcttgtactagtcctttcgcttccggcgccgtatcaggtcgggaaaccccgactgcgagaccccccccacttctacttttgatcgtcgctgcgttccttctccgtttttccgacgccgcaaattaaatcaacgcgtgtcggcgcccggcggcctgacgtaaccccggcccgagcgatacgtcag

SEQ ID NO: 28796 - DNA, 492 bp, Zea mays
  unsure (1)..(492): unsure at all n locations
  Clone ID: MRT4577_126274C.1
ggggggggggcggggtttttttttttttttttccgggggggaaaaagcgcgcccccccccgccccaccgggcacggggggggagaacccgcgccgggctccccccccccgccggagaagccccccgcaacgccctcccccccagccccccggcnccgcgggctgcggggggccacccccgtgcgctcgccccgcgcccctagaccgggaccccgaccacggcgcggggcgcccccccccccgcgaggcgggggcagcccccacgggcctggcaggccggcacccccgagcgggcgcgttcccacaacaaacgtggacggcactccgcgacgatgaaccaggtcggcaggcgcggagacccacaagggcaataaaagggccgagcacattaaacgaagcagagccccgcttcccttctcaccggccctcaacattcggtccgcagaaagctcgcaagcttccacggcaaggccacactggcagcaatcaaccg

SEQ ID NO: 28797 - DNA, 820 bp, Zea mays
  unsure (1)..(820): unsure at all n locations
  Clone ID: MRT4577_126275C.1
ctcgnagccggccggggtgctttctcacaggagggttggcttctcctccccctccggttccggttcgggttcgtgatgttctccgacgttctccttccggggcgagcgcatcgagatggaggcctcggatgttgtgtaccgctgcttcaccgtcgtcctctcctggggcacggacgatcactccctccacaacgactgcagcatctaccgagtaggtgcttccagcgacaggatcatcctcgatagggacacgcatagtgcccgcgcctgcggctcctccaccttgtccacgctcgtcgccatgagcaccgacatctcgggcatggacgacatcgagctgtgcggcggctacctgaccgtcaagtggctcaaggacgtggagcacgagtgggcatggaggatctgtaccgcggcacgccggcaggggaccactacggcggggcggccggccactactgtggggcgttctaccaggaccaacaaacgctacttggtgggcagggagtgcagatcatgatgacgatgctcgtcggcgacatatcggcgccaccaccactaccactgccagtgatgatgagcatgctgcaagaggaggaggtggccgaccccgatgcctcgctgtcggcggtgctgatgacgacgtcctcgctgagactgacgcagctggcggtggtgaagctgcagctctagtggatgcaggacacgttcttgacgcagctgcggagaccatggatggagagctggtctccctactaccccagcgtcctctactattaactgactgcatctcagaagctcagatcgaccgtcggcctcgatc

SEQ ID NO: 28798 - DNA, 317 bp, Zea mays
  Clone ID: MRT4577_126276C.1
cccagtcccaaccacaaaacctgggtataggagtatattcatatccatgtttatgtccaaggacttttttttttttggcccctccataaaaggcatcgaaggaacctcccgaaccctgaaaacaacgtaaaacgttgggaaaaggcccccaaaaccaaaaccgggcgggggccccccccccaacgaggctgaacccaacccccccgccgacggccacgggcgggaagttaagggggcccttgcgaacgggaaacccccccggcgggaaaaaaaacccggggacaagggccccccaagccacgcacaccaaccccccg

SEQ ID NO: 28799 - DNA, 512 bp, Zea mays
  Clone ID: MRT4577_126277C.1
aatggattcaatgacttcttgggtcactgtgaaaatatagatggttttttggaaggaaccttcaataaaaggcaaacatcgcggatggttagacctgtggaaaaagagagatacaaggagaacgagggggacagcgatcctgagaaagagagatacaaggaaagcaaaaattctgaaagagtattgaccttcaattctaaggaaggagcagctcatgaagctagtacattccctagcaaagagaagtataacttatgcaaaccaatatcagagcttgatctgtcaaattgtcagcggtgcactccaagttaccgacttttgcctaaaaattatccagtaccttctgcaagcaacaggactgacactgaagcttcagtgctgaatgattatctgcgcatcggcgacctcaggaagtggagcgtttaagcatatgcgcaaaaatcagtatgaagaaatcttgtttatatgcgaagatgacatgtttgagctggacgtgctgttggaatctgtta

SEQ ID NO: 28800 - DNA, 154 bp, Zea mays
  Clone ID: MRT4577_126278C.1
gccggcttcaccgcgaggactgggccagctgctccttccttttttaaacccccggacttaatagatgatggcgtggactgggcgagcttctgcccccgaatatgggctttgttgccaagttgtttctaggacaatttaccggaaattttttttt

SEQ ID NO: 28801 - DNA, 298 bp, Zea mays
  Clone ID: MRT4577_126279C.1
gtcggatgttgagtaccgctgcttcgtcggcggcctcgcctgggccacggacgaccactccctccacaacgccttcagaatctcgtgcagtaaacggaatgccttacatagacttcaaggatcacgactctgtgtctaaagcccttgttctcaatgtctctcacattggtggcgactctgaaccttatgttgacgaagccaaaccaagaggcgacggccagcgtagtggtggtagatctgcccgccgctctggtgggagattaggtgaccgttctggtggcccccgtggtggcggtag

SEQ ID NO: 28802 - DNA, 306 bp, Zea mays
  Clone ID: MRT4577_12627C.1
ccgactctttcggaaagggtcagaggaactcccgggctagaggagatcgggacgatgatgggagggctcgctttggtgctgatcctggtctcggagctgctggttcagatccacgcctctgactcgttgatggaccagcaggtggatgaggactccaagggtagatggatcgtctccacgaaggatgaataccaccgtgtatggaacgcatgccaagattgatgggcatgaggactatgtcctacttgataaagacaaggcgaggaactgcgccatgatcgaggagctcgatgagccacctacctt

SEQ ID NO: 28803 - DNA, 724 bp, Zea mays
  unsure (1)..(724): unsure at all n locations
  Clone ID: MRT4577_126280C.1
actcttgactgacagaatcttcgtcttcttcctcctcccctccccttcccttcccacttgcgcggcagggcagggccaggtctaggggcatccacccccccttgcccctccacctcacctcctcctcctcgtccctcacctcactcggtgagcgacaccagccgtcctgtccagggcctccatccctcccaacccagctttgaccgggctgctcccttccattcccttccctttccctccgccgtcagtccggtccaccgtcccctcccccgccttccgcgtgtgcgcgcccgtgcgcctatcatcaccctcctcgccccctttccccgtcgcttcccttcctgcccggatcggacccacggccccgaggaatcgtgctgctgctcgggtttcgcctcgtcgcgggcaaccgcaccgcccccaagcagcggcgatgaggtgcctgccgttcctgcacggggacggcaagtcaagggacgacgaccagcgcacgggccccagcgccgccatgtcggcctccgtgcgctccttcagcaccgagtccacggagcgcggcggcgacccgcgctccggctccgacgtcaactccatcaacgtgtccgacatgagcgccgagtccatccgccggacgcagtaccccagctcaccgaccgccccgncaaactccgggtcttcaccttccccgagctcaaggncgncacccgcaacttcagccgcttcctca

SEQ ID NO: 28804 - DNA, 760 bp, Zea mays
  Clone ID: MRT4577_126281C.1
gggtacctcgaggccggccgggacgggagtgaaagcagacaggactcctcctcctcccccttccctccccctaaaagctaaaaacatttggagagagagagagggagatcgaggggaaaccgagagcaaccaagacgcacacgacgatggagcgagcggacgaggacgcgtgccgggtggcgctgctggacgccgcagccgcgctctgcgtccacctcctcgcaagctggctcctcgtctccaggctccgcttcggcctcgcgggcatcgccctcacgctcaacttctcatggtgggccaccggcgccatgctcttcgcctacgtcgcatgcggcggctgccccgacacctggcacggcttctcgctcgaggccttcgccggcatgtgggagttcgtcaagctatcctccgcgtccggtgtcatgctatgcttggagaactggtactaccggatcctcgtcttgttgacgggaaacctaaaagatgcagccattgccgtcgacgctctgtccatatgcatgtcaattaacgggtggcagatgatgattccgttggcgttcttcgccggcaccggagtgcgtgtggccaacgagctcggcgcgggcaacggggagggcgccaggttcgcgaccatcgtgtcgacggtgacgtcgctggtgatcgggctcttcttctgggtgctcatcatggggctgcacgacaagtacgcgctcatcttcacctccagccccgtcgtcctcgacgccgtcgaccacctctc

SEQ ID NO: 28805 - DNA, 214 bp, Zea mays
  Clone ID: MRT4577_126282C.1
tctcaggccactcgcctgggacctcgaatcgatgaccatctggcgctaggaacttacaagcatacttactccttgtacgaacatgttgattacgcagttcaagcttgattacatcataccattctgcgccataatctaacctgccattgataacatatcgatgctgtataacgctgttatacttggaccggacgatagctgctctaaccaatgt

SEQ ID NO: 28806 - DNA, 646 bp, Zea mays
  Clone ID: MRT4577_126283C.1
aatagcagactgctaaatgcactagcctccgatccccttcctctctccctccgccgcttctgccatctcttgcaacacccgtaatgtgcgtctacgccgtcgcgcgccgccacaacgaaggccagggaaacgacaacgaggactgcgaagggatagaagattccgccgctaccccataccatgtccagcaacgactgcgcgccgatgactgcaaagaacaactctgactacagcgtccagacgtacttcatccttcgtctcccccgtgctccagcgtgtgcacccggacattggcatctcgtgcaggggcatgaacgtcgtgaactccttcatgcaacgacatgctccagaatctcgccgcgctggtcgccaagctcccccgctacaacaaaaagaccaccatcacctccagagagactcacgacctgcgatgctcctcgtcctactagaggagctcgccaagtacggctcatacaaatggagcaatgcgcctgccgacgtaacatcctctgatggcgtcgccgcacaccggtacaactctgtttaattgtcatattcaagcctgtgctatgatgctacagaaacgatgtgtaatttggaatcatatgctcaacgaagcagttacccctgaatgaagtttctaata

SEQ ID NO: 28807 - DNA, 1879 bp, Zea mays
  Clone ID: MRT4577_126284C.1
cattgggtacctcgaggccggccgggtcgaggggaaccgagagcaaccaagacgcacacgacgatggagcgagcggacgaggacgcgtgccgggtggcgctgctggacgctgacggcggcggcggcggcgagggcggcaagaagcagcagcagcagctcgcggcgcgggtgtgggaggagtcgaggaagctgtgggacatcgtggcgccggccatcttcagccgcgtcgtgacctacagcatgaacgtcatcacgcaggccttcgccggccacctcggcgacctcgagctcgccgccatctccatcgccaacaccgtcgtcgtcggcttcaacttcggcctcatgctgggcatggcgagcgcgctggagacgctgtgcgggcaggcgttcggcgcgaggaagttccacatgatgggtgtgtacatgcagcggtcgtggatcgtgctgttcatgtgcgcggtgctgctgctgcccatgtacttcttcgcggaggacgtgctgctgctgacggggcagccgccggagctggcggcgatggcggggaaggtgtgcgtgtggttcatcccgctgcacttctccttcgccttcctcttcccgctgcagcgcttcctgcagtgccagatgaggaactccgccaacgccgccgccgccgcagccgcgctctgcgtccacctcctcgccagctggctcctcgtctccaggctccgcttcggcctcgcgggcatcgccctcacgctcaacttctcctggtgggccaccggcgccatgctcttcgcctacgtcgcatgcggcggctgccccgacacatggcacggcttctcgctcgaggccttcgccggcatgtgggagttcgtcaagctatcctccgcgtccggtgtcatgctatgcttggagaactggtactaccggatcctcgtcttgttgacgggacccctaggatatgcagccattgccgtcgacgctctgtccatatgcatgtcaattaacgggtggcagatgatgattccgttggcgttcttcgcgggcaccggagtgcgtgtggccaacgagctcggcgcgggcaacggggagggcgccaggttcgcgaccatcgtgtcgacggtgacgtcgctggtgatcgggctcttcttctgggtgctcatcatgggcctgcacgacaagtacgcgctcatcttcacttccagccccgtcgtcctcgacgccgtcgaccacctctcggttcttctcgccttcaccatcctcctcaacagcatccagcccatcctctcaggtgtggccgtcggctccggctggcaatccatggtggcctacgtcaacatcggctgctactacctcatcggaatccccatgggcatcctgctcggatggctattcaaccttggcgtgctggggatctgggcggggatgatcggcgggaccgccgtccagacgctcgtcctggccatcatgacagtccgctgcgactgggaaaaggaggccttgatcgcgagcacgcgcatgggcaaactgtcggaagttcggtgatggcaggatctggtgctgcacatctgaacgagcgcccgtgatttttaagctctggcgggatcgtgtgttcccgcatgttagtttcgccaaattttgcctcgtggaaaagcaacgcaaggtgctcaggaatcagggacacaggtcgccggggcagctcttgaagacgacggaggaggggcttggtgtggctatgatggttttggtgcttttgcttatgggctttatggtggtaacttcaaatcaaatagcttgactgtggaccgttgatctggatgtgttttatcatatattacttcatagaaggtaataataaaatttaattgttttaaattttggaaaaaacgaaaattcaaaa

SEQ ID NO: 28808 - DNA, 252 bp, Zea mays
  Clone ID: MRT4577_126285C.1
agacaaaatgactgcaggttccgttttgaataaaaggattcgttcatgaaaaacggaacgctgcagtcattttgtctgaggcgcttaaggaggcccgtgcattcaggaccgaagccttctgatgtacccatctagccctagagatcagactatttatacacgcaatgttcaagttcttttcttttaaaaaattgtccaaaatatgtgactgtacaataagctaaaatcgcactatgtggactatatattagt

SEQ ID NO: 28809 - DNA, 614 bp, Zea mays
  unsure (1)..(614): unsure at all n locations
  Clone ID: MRT4577_126286C.1
gcctgnccgggaaaaaaaaaaaaaaaaaaaaatcttggcccccgcctgccggcgcgccgcgcgctccctccgcgctaccgccttcccagaaatcccttccatccatggcgtcgttgctgcaagtgcccccgcaatcaactccattgcccccgcgatcccgccttcccagggtgcccttccatccatggcgcctccccagggatctccgtggtcaatttttacggagaaaacgccgcttcacctcgcctcctcccccaccgcgtgtccgcaagagctaagagtgggcgtccagattcctgcaccatgcccccgctcgcgcaatcctctctcccacactcgctctccgagctcgaacaggcatcaagtcttccccgcctccgcaattctgcgccgccacccccacgtcacccccatccttggtggctcggcgacttcaccgggcataaatctcatcgccggcgcttcttggcgtgttcctcggctctcctgggcttccttcaaccctctcatcgnctctactacacacggcacacgcgctcgatgagccctagccccagttcacggccgccagggatgaccctacacccccgcgacgtcgttcccgccggccaccc

SEQ ID NO: 28810 - DNA, 858 bp, Zea mays
  Clone ID: MRT4577_126287C.1
cctcgaggccggcctcaagtcttaactttcaaccaacctactcaacaacaagcaatatgccttcatacctcgtcacaggcgcctctcgtgggctcggctacgccttcgtacgccatctcgccgccatcccaggcaacaccgtcattggcatggtccgcaacaaagacgttaccctcgcccgtctagagaaagacggcatcaccaatatctccatcgtccaagccgacatcacagaccgcgacgccctgaccacagcctacgaagaagtcaagaccctcaccaaaggctccctagacattctcatcaacaacgccgctctcatcgatgagaacagcgcctacaagacccttctcgacgacgacctggaagtgctggaacaagacctcacgtcctctttccgcgctaacgtcgtcggcgtcgcgaatacagtcaatatcttcctcccactcatccgcgccggaaacgagaagaaaatcatcactatttcaagcggcatggcagatacagagctgatcaaccgcttcggcgtgcccgtcgcagcgccttactccatctccaaagcggctaccaatgcgctcatcgccaagtacaatgctgcgctgggtaagagcgaaggtatacttttcttagctcttagtcctggtctggtcgacaccagcgaaggcaagccgatgagcgagcaggcgattcagggagcgcaggctatgggtgctttgttccaggagtatgcgccggatttcaaagggccaatttcgccagagcagagcgtggagatgtgtctgaaggtgattgaggatgcgacagtggaaacgtctgggagcgattttgtgagccatttcgggaataagcagtggttgt

SEQ ID NO: 28811 - DNA, 1590 bp, Zea mays
  Clone ID: MRT4577_126288C.1
atgctcaacatcgcccaatgctcggaccgggagaaggtcctttatgcttctggtcgtctgacaggtcctgctgctgactggtgggattcttatgttgttgcccatgatgctgctgacactattacttgggcggaattcacaactgagttcagaaactaccacattcttgctggattgatgaagatcaagaagaaggagtttctgtcattgaagcaaggcaatatgtctgtcagtgtgtacaaagacaaattcattaagctgtctagatatgctcctgatgaggtgagactgctggataaggctcttgctattgaacacaagcgtgttcaactaggtgacttgaagaggaaggccattacccaggggcaggggtacaccagctcatccaggaggaggaccacgcccagctcagtacactccacaggggtctccacggacacctcccattcgtcaggctgcccccactggcacccggtgaggcctacaggacagaagactggccctacatgcttcaagtgcagtcaggttgggcactatgctaatgcttgtccggtggggaattccggtacaccagctcagaacaagcaacagactcctagcaagggatactctattgccagggttaatcaagtcagcgcagatgctactcctgatggtgctgacatcacacttggtacattttacgttaatgcaattcctgcaacaatattatttgattctggtgctacacattcatttatgtctgctcgatatgctaatacaattgaaataccactacaacatatgagaaaaccaatgatagtaatcacacctatagggcctgttgaggcaaatcatataacacataaattggcattaacaattatgggaagagaaatctgggctaccgctatagtattagaggaaagcagtatagatctgatccttggtatgtcatggttaaggaaggcaaatgacataatacaatgtgctaggggtactgtagaactcaccaaccctaaaggagaaagatttcaagttcaaattgcagtaaccacctcttccagacgtgcgatgttctttatagctgaggagtttgttggtgaaaacatccgtgtggttagggattttccatatgtctttccagaggagttaccagggatgccacctgagagatcacttaatgatgtcaccatcaagaacaagtactcgttacctcgtattgatgacttatttgatcagatgagaggtgctagggtgttctctaagattgaccccagatcaggctaccatcaaatgaagattaggccatctgatattcctaacacggttttttctacccgatatggtctatatgaattcacagtcatgtcatttggcttaaccaatgcaccagcttattttatgaatctgatgaataaggtgttcatggagtatcttgataaattcgtcgtagtattgatcgacgacattcttatttattccaagaatgatagttattactggcgattcattgaagggttctccaagatttctaagcatatgacctcattgttggagaagggcaaggagtttaagtggactgagaaatgccaagagagtttcgattag

SEQ ID NO: 28812 - DNA, 275 bp, Zea mays
  Clone ID: MRT4577_126289C.1
atcaaaaattttaaaaatggggcaattatagtgatcacggggataataataaaacactattgtggactaaaccagtccgtgaaaacggaactttgtatgtattagggacaaactgggctacctatttacttgagagccattgatcgtgagacatggtagcaattgatattcacccgatggatgggtggaaaaattacacgatgtagtaactcaacttagcttatgtgcataacaaaccagggggcgcccatacttgttggggcattaaacataca

SEQ ID NO: 28813 - DNA, 841 bp, Zea mays
  Clone ID: MRT4577_12628C.1
gatttccctcaaaaaaaaaaaagctggttgacccatccagatgagccatcacctcgccgccaccaccgccgccgctagcacgtctcccagccgccggccgagcttaacctcattcccgtcgccgctccaccgaccaagcgcgctgttccagcagactagcttcgctgccactcgcacagagaggaagcccgcaccttcagtggccgccgcagcggcgtcgccggtatcacccctgcacaggctcgaggaaatgagtgaccatgaggcaatccccgaaaggctcgctgtggtcactggtggaaacagagggatcggcatagaggtgtgctgccagcttgctctccaaggtgtgacggtcattctcacagcaagggatgaggagagaggaaaggctgcggtcgagtccctttgccgtgaatctaacctctccaacatagtcttccatcagctcgatatactggatgctggtagccgtgcctcattagcgcgacatatcgagaccagatatgggaagctcgacattttggtgaacaatgcaggtgttggaggggtggcagtagaccaggaaggcctgagagctctcaacattgatcctaagatgtggctatcgggcaaagcagcccatctgatcgaatcggtgattgtacaaacatacgatgaggcagtaaaatgtctaaacaccaactactatggactgaaatgggcaacagaagctctccttcctctgctgaagaaatccacatcaggagcaaggatcatcaacacctcctcccttcgttcagagctgcagagaatgccgaacgagggagctgcgggagtccctgcgcgatgccgacagctg

SEQ ID NO: 28814 - DNA, 2145 bp, Zea mays
  Clone ID: MRT4577_126290C.1
gggtacctcgaggccggccgggacttttccctcccctacctttcttccttcttcccgaagaccgcgagtaaaaatttcgcttaaaattcgattccacgaagcagcaatcgcaagctcgaagctctaaaataatctcttcccgacgtctctggaaggtcatcatctgaacccaggtagcctccagcgctggagacgtgccgtactcaaaccctagccaccaatggcagccggcggcggggctccgtgggcggagcgcgcgcgggtggtggggacgcagatccgcaacaggttccgcgtggcgcccgtggaccaccggtcgctgtggctgcgggcggacggtcgtgtcgccactgaggcggtccggcggtggtcggatcgcgttcgggccctgctgcagaggggccggagcgcggatcggaactccacatcgacggatacatcacctgaggcggtggcaaagccttcgtccagcgttttgagattctacagaaagagagtgggcaaagaagttaatgggattgaagactctgttattttccgttcgcttcaagcattggctgttcctcttattggcaatgcatgctatgtttttatgcatggtcttaactcagttcaggtttatggtgtagagaagcttcatcaggcattacatgggagacctaaaggcaaggctcttctaacggtcagcaatcatgtggcagcgatggatgaccctttcgtaattgcttcccttctcccaccatctgttatgctggaagcacaaaagctgagatggacactgtgtgccactgatcggtgctttacaaatccagttttgtctacattcttcaggtctgttaaggtgttacctgtttctcgtggtgatggcatctaccaaaaggtatccatcttatgaaaacatcagtatggcctaaattttttaatgttgatgaaccgatttatccacgcgattcatattgtgaaagcatcatgaataatgggggcaatacataaggaaattgaacaccaggcttcacaatattttgaatagggaagttgcaaccggaggtgtgctattctttaagcaattagcagatgtggatttgagaattattcttatagaattgcttggtttaactttaacgtaagaaattagatgacaaacataacaaagtctctggtagttaaagcactatagtgagtcctaaggtatttatatattggtattccttgctgcatgggtttacagacttccttttgccctcttctcagatatacaatgttaatgccttcatgccttgaatatcataagtcatcctttccaatctaaatcgtgaatatgatcgattacatttggactattgaatgaaatgcatcaccagatccactcttcacttgtacccttttttgttttctttgttcagggaatggacatggcactttcaaagcttaacagtggtggatgggttcatatattccctgaaggaagccgttcaagggatggagggaaaaccattgctcctgccaagagaggtgttggaagattggtaatggatgctgacagccttccagttgtaataccctttgtccatactgggatgcaggatataatgcctgttggaaaacgaatccccagagcaggaaaaagggtgattgtggtcgtgggtgacccaatcaactttgatgacctgctcatcgacaactgtggtgacacccaagatatccctagagggatcttgtacgacaaagtgacacagagaattgggcagcgattgcaggaactcaaggtcgaagtcgcggactgatggagtgagtgacgttcctctctgcctgcttgcaagagcacacgactaagaagaactactaagaagaattattttctccctctctctttctctctctcgcaaattattatttttgtccactcctttctcgatctaccttatatgacgaaggtggtaagaattggtccaggagaaaaaaaaaggtttggcgaacgatgagaatgttgtaaactgtaaatcttgggtaggggaatagctggcgatgtgattgccttggatcaaatcgctgctgttgttgtcatgatggtggtgcaaacaaagggagtttctgttattccaaaacaaaagcttggtgaaatttcatttcagcagtataaactgt

SEQ ID NO: 28815 - DNA, 386 bp, Zea mays
  Clone ID: MRT4577_126291C.1
agcccaaaactcgcccttcgtcgctaattgatttacatgaacacggctgaatggaataacgagaaggggcaagagcaccacaaaaagggaggcattactcaaaggggaaaactacgtgataactaaaaatactctttaacaactgacgcacctgggtgcggaaactgagctgattgggactgggcagacgcataccggatacgtgacccaagacactaagagagacggaaagagaaactgggacgcaagatgttggacaaggccaacgttgtcacatgtaaagaagctgtgcaataaaacacggggtaaaccaagcacatgaacttagacaaaactctgtctgtgcaccgccagattctcaagactacaagcagagtcagatagcc

SEQ ID NO: 28816 - DNA, 698 bp, Zea mays
  Clone ID: MRT4577_126292C.1
aattcggcacgaggccacagtccagaacggcgcacggttctgccgtggcgctccctccgcctccctccacgctcaatcctagattctcgcggcttccatcctcgcatcctcgaaccccgcccgcggatcaagcagccgcggttccttccatccttgaattgagcagctccatcctcgaacccccgcagcggctcccatcctcgaatcccggcggctcccatcctcgaatcccgccggcggatcaagcagcggcggttgcttccatcctcctccccccatctaatccgcgattacctagaaccgaggccgcaatttgaaaggtgccgcagatgctgttgatttcttgatttcttgccgcggatggaaggtgtcgcggatccccccaccctcctccccaccgcccgtcatggaaggtgccgctcttgatttcttgccacggatgaaggcgtaactcgcttgactacagcatcgacggcgtgctggggtccctgcccaggggcagcgtgcgcatcgggctggacatcgacggcgggtctgggacgttcacgagatacgtctgtgccgccgccaccaacccccgtgctaaaatctcaccgtgacccccacccctcaccataagcctgcatttcttgcttgcttatgggtgctccagagggacaccgggcgggagccggccggtggggactgggggacttatc

SEQ ID NO: 28817 - DNA, 191 bp, Zea mays
  Clone ID: MRT4577_126293C.1
gcccaaacgcagcggcggaggcggttatggtggcgggcgccgagacggcggttatggcggtagaggcggctacggtggtcggagcgaaagtggcagcgacagctacagaagccgtgacagatacagaagtcggtgcgaggatggcggtggcgactactgtggctaaggcaatatactagttgaaaggactg

SEQ ID NO: 28818 - DNA, 191 bp, Zea mays
  Clone ID: MRT4577_126294C.1
ggccaatccaaaccatacaatcaaggaatacccagttggctaatagtgttgtccgcctcctctatctcgggggggacgacgcggtagccgccgcagacgactcactaagacccgctgtcacgcctagaagaccccgttgtagaagacaacgacctcggacgtgaacgcggagtcccactccctgagcctcg

SEQ ID NO: 28819 - DNA, 363 bp, Zea mays
  Clone ID: MRT4577_126295C.1
tctattgggtttttttatacttttgaggctttttttttctttctttttttttttacatttccttagataatcttttcatttactattcaacattttttttctgctcgagctaaaaagtgtggactccttcaagaagagctttgtccgcctaccttttagccctcatgcatatggacaacagcctcaagactgcaactatgtaaaactgagaagactgggtaccaccaggtgaaacgattttactaaataaaatagcttgcttgctggctctcttaaatgctaccaagtacctttgctcttcattttatgaatcgggactgtattccacgctttcctggtcatcatcatgtgaccaacgttcat

SEQ ID NO: 28820 - DNA, 723 bp, Zea mays
  unsure (1)..(723): unsure at all n locations
  Clone ID: MRT4577_126296C.1
gaaactgaaacacagcctttcagttttctattcagaggacgcacaccaacatgaaactgaaacaacttttcagttttctattcagaggacgcacaccaacatgaaactgaaacaacagcctttcagttttctattcagacaatgcacaccaacatgaaactgcaaaccaagagctcaacgtgacaaccagaaaaagggacatgacaaccagaaaagggacaaaataaaaggaggcgacatctacacagctgcttggatgaacgactgtggactgtggtggaccttctattccgtgtaggcatctagtgctagctttcaactgaactgagaaaagaaccggtgcaagaatcaaatggatggtctcgaacgaagtcagagcctgtccgtgttccaccagacctgcctttagagtttatccatcttccctcttagccaaaggagagcgacttctggctcatcatcattgaaacaaataaatgtttccctgtaatttggtatgttgaacacctcagctgctttgaccttctcatctcttgtcatatccatagtcttaagaacagaaatacacctcttgatagaaaaatcattatcttgagcaacatcctttacttttgctgattgtgcagcctcatctgcanacttgcttcgttttcacatcaaggtacctccctatcagcccttctagtgcatctttcctcactctttnntgnctccttctcttga

SEQ ID NO: 28821 - DNA, 480 bp, Zea mays
  Clone ID: MRT4577_126297C.1
atgcccctgctcgcgcaatcctcgctcccatggaaccctaaccaagaatccgactcggcgctagacgaattggacggaaggaagacgagaaggccccgaggcgagcgggggaacaaagaagaagatgaagctacgcaagctgcggcgctccaggcggatccggccatgttcacgtccgatcccgaggacgccgaggacttcgccgcgtggagcaaggaggcgctctcccaggcttgtttgggagcaatgatagaggaggagattgaagggtctgtccccagtacaacccaatataccggttctaggatcggtacaaaatcatcaatatcatccacgaaggaattgataaaagacatggaagggaatttgcatcgattatctgaaagctcaataagggagaagaaaaccctccagaaggaactttcatatgtgaaagaagacctatccagatctgcttcaaaaaataatgctgaggtttaa

SEQ ID NO: 28822 - DNA, 651 bp, Zea mays
  Clone ID: MRT4577_126298C.1
agttctccctttgcttgcgcctccacagcccccactttccaacttagggttctagggtttctccagcagcgccggcgcctccacccgcctacccaaccaccatgacggccgagaccgcgacgcaggcggagctgctccgcgccgtcctggaagagcagaagctcgcggcgcagggagatgagcctgtagttgaggatgatgatgatgaggaagatgaggatgatgatgaccaggatgacaaagacgatgacgtggaaggagttgatgcaagtggaagatctaagcagagtaggagtgagaagaagagcaggaaggccatgctgaagcttggcatgaagactatcactggcgtcagccgtgtaactgtcaagaagagcaagaatatcctgtttgtcatctccaagccagatgtattcaagagccctgcctctgacacctatgtcattttcggtgaagctaagattgaggatctgagctcacagctgcagtcccaggccgccgagcaattcaaggcgcctgatcttagcagcgtcatctcaaaccctgaggcttctacagctgttcaggaggatgacgaggattgtgatgagactggggttgagccgaaggacattgagctggtgatgacccaggccggtgtgcctaggccca

SEQ ID NO: 28823 - DNA, 284 bp, Zea mays
  Clone ID: MRT4577_126299C.1
aacaaaggacactttactttccaaaactcaagttttacaagggaaaaagagatgtatttattacaagtcctgatagtacccaaagggcataacttattaaaagggggggaagggggaatttttttcttaaaatatatacataaacattttaagcttcaagggctccacatgaagtaactaaccaaaaaaataggggaataaaacttttcctttgttgcaaagaagagggtctagattcttttaacacgatgatcaggtggaggggtccatccacttgaagaaaa

SEQ ID NO: 28824 - DNA, 196 bp, Zea mays
  Clone ID: MRT4577_12629C.1
cagtggacccacgcgtccgggacccatggcgccgccgtgagtgacatgacaccagcgtcttctgctcgccctctagctgatcgtatcagagaccgccgtgcccgatgtcatacacacggtcccggacgacctcacggaggctcctctggcgcggcagaccaccgctgacgcagctctactgctacagctggaggct

SEQ ID NO: 28825 - DNA, 551 bp, Zea mays
  Clone ID: MRT4577_1262C.1
ccggccgggatcatccgatacatgacttcctccgtgtgcctaaagatatatctatgtatcgcgatcaagaaattatagtgtccttgatgatagagatcatgggggaagtgttcctcttcgtcttcctcgcagcggcgccgctgatgacaaacaatctactccctcggcgctgcgtaaggtcacgcgacggaagcaaccccgaggcgcaatgaagccgcaggctacgcggcatttgatctcgctgacagctaatcagatgcgcccgtgcaccggccgggggcacgcgtccaatgaacctgataatcgagaacctggccgagctgagcgtgcaaaagcaagaactagtcaagggctccattgaggggccgaatactactgcgaatgccatacgtatctttacatcccaaaagagggaggaactctacccatgtgactgctagtgcatgaatacgaataactacatattatcggagtagatcctgatcaagtgtaacgacaacgtcaccatatatatcatgttgcagctcgtcagtgaggacttcgactcgtgc

SEQ ID NO: 28826 - DNA, 232 bp, Zea mays
  Clone ID: MRT4577_126300C.1
aacttaagacttggctcggttattcctttcttggaccatatttctggtaatgggacacaacccttatttttcttcttaatacagagacgcaacttttttgggttttcgggaaaaaaagcacagggatccttttttttctttcaaacttaagaaaacaaccaattttaaatggaactggaggacaaggctaactgggtttgggcctttggccaaccggttaaattccccaaag

SEQ ID NO: 28827 - DNA, 274 bp, Zea mays
  Clone ID: MRT4577_126301C.1
tctcttttttttttttttcctgggggggggggttttttttgtgccgctgcaaacccgggtccctttggcctggctcttctcgagccttcgcctttctggaagttgtgagccttgcgttcggcctttacctccttgccgtgcttggcacgcttgtttatttccgccctagtcttggtgacgccagccttgtcttttttttctcgctgggctcccttctgttccttttacgtggagtgccctagggctattacctcccgcggggaaccctttccct

SEQ ID NO: 28828 - DNA, 318 bp, Zea mays
  Clone ID: MRT4577_126302C.1
gggggggggggggggggggggggggggatgttagctactaggcggctaaagaagaggcttatagaaggatatagtgttacagcaggataggatgggtggagttagagctgagtaataagctcggtatgttataaagagttaacctgctaactactagtgcggagggcaatgaccattgagacatgagagacacataactagaacgagagacgaggcatggaggcaatgactaatattgggaacgccaaccggccgatagccggcgctgtggtgccacgctttaactttgcgctggaactggcagcaacggtcaactga

SEQ ID NO: 28829 - DNA, 615 bp, Zea mays
  Clone ID: MRT4577_126303C.1
ctacaatctgtctggatgatgcgcaacattattcatttcaatacattagcgaatcaggctgtggagcgagcagccaatgctgatggacataagataacctacgctgtcgtaaagagtcgcatgggcgatctattttaccgccttgtatcccaaaagtttgaagaccccgccgaaggcgaagacgtcctaatcgcgaaattccagaagttgtacgacgacctcaccaccgggttccgcaacctagaagacgaggctaggtaaaaaggagagaagaaacattgtgtatggccaccgtgtaaacaataaggagcaccaaatgctgtgaacgacttgcgagcaatttgcttttgcttcaccggagtttgtgtagatgcgaattacgtttcaggatcccctccctctttttttgcgacagacaggcagacttgtttttcccccaggatttttacattgtttggtctccagcgccaggatgcacgccattattttttcaccatgtgtaccattatttgttgtataagaagattgagcaccggtggacatgttcatagaggaataagcacgatgtccatctacttgaacatcaataatggctatatttatatctattattac

SEQ ID NO: 28830 - DNA, 110 bp, Zea mays
  unsure (1)..(110): unsure at all n locations
  Clone ID: MRT4577_126304C.1
gcagtaccggtccgattccgggtgtcagttggagcccctgaagttttctcgtggcagcactggcaagggatgctgaccctgaccaacanactctccgccccaatttagtg

SEQ ID NO: 28831 - DNA, 328 bp, Zea mays
  Clone ID: MRT4577_126305C.1
acaacttgtaattattcttgatatgtactcacgagttttattgctgctaaaaaggtataatcctatgttttatttcagagcttatcctcaatctactgaacatattctctctggctgctagctgtttcagacgcctataggatacgaaatgcaaaataatagttagccaggtaccgagttattgagcaaccaccgtggaggctgcaagcctttggtaaggaaggaaagttgacttgttggaagcttatgaaaaagtggacgcacagtcacctgcaacttgtgttatctggtattatcgggtgttcccatacttgacctgataaattag

SEQ ID NO: 28832 - DNA, 1332 bp, Zea mays
  Clone ID: MRT4577_126306C.1
tttacctcaacctggtccgcctcatcggcttctgctccgagggccggcaccggctgctggtgtacgagttcatgaagaacggatcgctggacgcgttcctgttcggcgacgcgccgccgggcgggaagatgccgtggccgacgcggttcgccgtggccgtgggcacggcgcgcggcatcacgtacctgcacgaggagtgccgcgactgcatcgtgcactgcgacatcaagcccgagaacatcctcctggacgagcacttcaacgccaaggtctccgacttcgggctggccaagctggtcaaccccaaggaccaccgccaccggacgctcaccagcgtgcgcggcaccaggggctacctggcgccggagtggctcgccaacctgcccataacggccaagtccgacgtgtacagctacgggatggtgctgctggagaccgtcagcgggcgacgcaacttcgacgtgtcggaggagacgcgcgggaagaagttctcggtgtgggcgtacgaggagtacgagaggggcaacctcgccggcatcatcgacaggaggctccccgcagaggacctcgacatggcgcaggtggagcgcgcgctgcaggtgagcttctggtgcatccaggagcagccggggcagcgcccgtccatggggaaggtggtgcagatgctggatggggttatggagctcgagaggcctccgcccccgaagtcgtcggacagcttttttagcaccaccacggccagcggcggcaactccagcatggtctcgacagtcgcctcgtcggcggcgcccccggtcgcgccctcgacgtcgccgaacctagagcaggagatggcgttgggacgctccgagtcggccaggaaccgtgaccgggtgacgcggcagctgctgtcgccgcagccgtacatgacgatgtaaaatgtgcgtctgcgtcatcctcatccatccatggcagagatcatcatctggatacacgcacgcaggcagaatgcctgcttctgtcgtccattccaggtttactacagattgtagagcgattacgtagggctacgctgaatttgctcctaacattctggttggcaatatgtaattgtaagcatcaaatttggaccgagtttggtattgggcattgcaatctgtacaaaatcactgaaacgaggcgagaaactgtagcatggatttgcaggctagtggtttgtttgttttgttcccccggcagctcacacaggcgatatgtaattgcatcataatttcataatactgagctaccgcatactgttgcaggtctcaaaaaaaaaaaaaaaaaaaaaaaaaaccacaaccgaattccgag

SEQ ID NO: 28833 - DNA, 260 bp, Zea mays
  unsure (1)..(260): unsure at all n locations
  Clone ID: MRT4577_126307C.1
ttcccttctctcttcatgtctctcacatctccactcccgtggcctacgcgacccctttcacccaggcgtggagagcatctcactcctcctcnnccgctcgtccctcgcccgccaagcctattgcttgggcaatagccgaccccggctccaagtcaccattcgtgcacaaggatcttcactgacctgcacccttctgtgcgtcgttgcgacaaaccccttgcaacccgtcctactactaccctctcctcgtaccctttctt

SEQ ID NO: 28834 - DNA, 281 bp, Zea mays
  unsure (1)..(281): unsure at all n locations
  Clone ID: MRT4577_126308C.1
aggaacgcaggccaaaccgttttttttttctatgttcatgcttgactggtttgttgttaacattatgtggctggcaacaagccatgctcatgcaaaccgatgaatctatctctgtatcatgcatcgatctcggttgcttgctaatcccaactctgggggggggggggggctatatatacctnntnccaataaatannattataatcntaatatcaatcaattacctntttaatnccaatcaantttntaatcttttccaaataacaaacctttatttctcc

SEQ ID NO: 28835 - DNA, 2018 bp, Zea mays
  Clone ID: MRT4577_126309C.1
ctgtgcggcgctcgaggcccggccggccgggactactttgagctgcaaggtccgaactaaaaagcacaagaaatggcggccgccttctcctccaccgtcggagctccggcctccaccccgaccaggagcagcttcctcgggaagaagctcaacaagccgcaggtgtccgcggccgtgacctaccatggcaagagctccagcagcaacagcaggttcaaggcgatggctgccaaggaggtggacgagacgaagcagaccgacgaggacaggtggaagggcctggcctacgacatctcggacgaccagcaggacatcaccaggggcaagggcctcgtcgacaacctcttccaggcgcctatgggggacggcacccacgtcgccgtgctcagctcctacgactacatcagccagggccaaaagtcttacaacttcgacaacatgatggatggcttctacatagccaagggcttcatggacaagctcgtcgtccacctctccaagaacttcatgaccctgccaaacatcaaggttcccctcatcctgggtatctggggaggcaaaggccagggaaaatcgttccaatgcgagctggtcttcgccaagatgggcatcacccccatcatgatgagcgccggcgagctggagagcggcaacgccggagagcccgccaagctcatcaggcagcgctaccgtgaggcctccgacctcatcaagaagggcaagatgtcctgcctcttcatcaacgacctcgacgccggcgcgggtcgcatgggcggcaccacccagtacacggtgaacaaccagatggtcaacgccaccctgatgaacatcgccgacaaccccaccaacgtgcagctcccggggatgtacaacaaggaggacaacccccgcgtgcccatcatcgtcaccggcaacgacttctccacgctctacgcgccgctcatccgcgacggccgcatggagaagttctactgggcgcccacccgcgaggaccgcatcggcgtctgcaagggcatcttccgcaccgacggcgtcgacgaggagcacgtcgtccagctggtcgacaccttccctggccagtccatcgacttcttcggcgcgctgcgtgcccgggtctacgacgacgaggtccgacggtgggtgagcgagaccggcgtcgagaacatcgccaggaagctcgtcaactccaaggagggcccgcccacgttcgagcagcccaagataacgatcgagaagctcttggagtacggacacatgctggtggcggagcaggagaacgtcaagcgtgtgcagcttgctgacaagtacctcaacgaggctgctcttggtgaagccaacgaggacgccatgaagactggctccttcttcaagtagaaagcaactctttgctattgctagctaggcgcgaggccggcataggatcgaggaggtgaatatatatattacttggatagttttgtaatatatatatatatattactgaaccaggacatgcatacatatattcgtctatataatggatcatgtatattcctgatccatgtattactcttaatttgtacgtactacaatacgggatctggccaagcgcgatatatagctgggcatgcaaagtttttgtcgatgtttttttttttgaaagaaacaaggtagaagggctagctgtgcttgttaaattaaaaagaaggtgagccaagactagcagaacaaggctgtacaaaaaaaactacacaaagtgtgccaaagaagaactctcagtgtcggcctatatatcaaaattgccatatgtttcactcctgccatgatccacactccgctttcatcttttattttctgtatgttgggctgtgtgtatgtgttggtgttgggcttggaccttgtacttaggggtgtttggttccttcagtcatatgtgtttgcaacctatatgagtaccctatctgacggagtatccccgtgacacaacgaacatgtctggtgtcttatggacctctccaacacgatgtagacctctacga

SEQ ID NO: 28836 - DNA, 424 bp, Zea mays
  Clone ID: MRT4577_12630C.1
gtttctacatggatcatgttgcttctatggctgtctcatgtttgatactggacattagaatatgctcctttcaagttcttgcgtaaaagaaaattttgcattctgattctactgttttttttggagcatcatgttagctgaaacctcaggtgtcctgaatatgtcaagcatccctctggttctgaaaaatttcaacaatccagcattaaagagtgccatttgtgccttttccatgcagataacttggcagctaacttcagcagagaattagcagactacataatctacattatcgatgtctctggtggggacaagataccaagaaaaggtggtcctgggataacccatgccgatctgttggtaataaacaagacagacctagcacctgctggtggagctgatctgtctgtaatggagcgagacg

SEQ ID NO: 28837 - DNA, 703 bp, Zea mays
  Clone ID: MRT4577_126310C.1
agacaccgtcatgttcttgctccggcgtgtaggctgctgtttgccctcgcctgagacgcccaacagtgcctcctctccttcaagcttcctccgtcgtcggcgtcatcaccccttgccaggtccggcgtaggcccctgcccgactggacccgtcccgtcgccctccccttcattgctttcgttggatccatcactgtcgcgcccttcccggtcggattcatcattgctgcgaccttcctggctagatccgccttccctttggccagatcgctgtcttcctggctagatccgtcgctgtcgtggccttcccggccggatgcaccgttatcccttctattctgccgcggacgcggccaccatgaccgacgctgtcgtgtgcgctgtcgccggcctccctggcgaggctcctcgacgtccggacgatcgaagatgcaagaaggtcggcctgttggtactcttttgttgtgtcgccccgccgaccgttgacgctcaaacgtcgacccctcccgttgacggtcacctcgacttcgtctacctcggcatccaggggctatcgttttcttggagtccacaccggtttactctaggctctagccgcaacattcgcaccctcacgacgctgcgactgcgaggggatatcaacccgtcggctcctaccttcggcttctactccagtctcatcgtgtgtggtgcccccgttgcga

SEQ ID NO: 28838 - DNA, 1578 bp, Zea mays
  unsure (1)..(1578): unsure at all n locations
  Clone ID: MRT4577_126311C.1
ctcggtaccctccggggcaaagccgaacgaaccagagacagagaagcagagaacccctcctcgacctcggcctctcctcttcctcctccgctcccaaaatcctagggttttgctcgccgcggcgcgatggagcccacctcgtcggcgtcgatcgcgcggcagacgtgggagctggagaacaacattcccgcggcggcctccgacccggacgcgatggacgcgatctaccgctacgacgacgcgtctcaggcgcgggcgcagcaggagaagccttgggccaacgacccgcaccacttccgccgcaccaagatctccgcgctcgcgctgctcaagatggtcgtccacgcccgcgccgggggcaccatcgaggtcatggggctcatgcagggcaagtgtgagggcgacgccatcatcgttatggacgcattcgcgctccccgttgagggcaccgagaccagggtcaatgcccaggccgatgcctacgagtacatggttgactactcaaccatcaacaagcaggctggaaggttggagaatgtggttggctggtatcactcacaccctggctatggatgctggctgtcaggaatcgacgtgtcaactcagatgctcaatcaacaattcacagaaccattcttggctgttgtgatagaccccacaaggaccgtttctgctggtaaagtggagattggagcctttagaacatacccaaaagattacaagccaccagatgagcctgtatctgagtatcagactattccactcaacaagatagaagattttggtgtccattgcaaatcgtactatgctttggatataacttatttcaagtcatccctggattctcacctccttgatctgctctggaacaaatactgggtcaacacgctatcttcatcatcacttctgggcaacagagattatgttgctgggcagatctttgatttagctgataaactagagcaagctgaaggccagctggcacacagtcgatttggtggtatgattatgccatcgcaacgaaagaaagagcaagaagagtctccactggctaaggtaacacgagatagctccaaaatcacagctgagcaggttcacggcctcatgtcacaggtcataaaagacatccttttcaactctgttcacccgtcaagcaaggcaagcacaagtgctccaccagattcatccggtcctgagcctatggttgaagcctgagttccagcggaaggggacaatggatatttgtgttatgttatctgattcagaaggtgcaaaacaagttatcttttgagtacagaatcatcatgtaattatgagttgccatcttgggctgccactgagagggtgtgatttgggtccggttagcaatctcatgtattggatttcggatcagtattcgaagctttcataacgaggagccatcatcttattttaaaaaaaaaaaaaaaaaaaaaaaaaaaaaaaaaaaaaaaaaaaaagaaaaaaaaaaaaaaaaaaaaaaaaaaaaaaaaaaaaaaaaaaaaaaaaaaaaaaaaaaaaaaaaaaaaaaaaaaaaaaaaaaactcnagggngggcccg

SEQ ID NO: 28839 - DNA, 182 bp, Zea mays
  Clone ID: MRT4577_126312C.1
acgcgtcaacccaagcgtccggccacgggttcgtcatcggcctccgtctccttcccgccgccgcggcattcctcgtcctcctcttaaggttggagtgctcaaattcaattgcgattaccgggaggagttgtctgatgccacatgccggggctgcgtccgggcccatggaggtccgtggcaga

SEQ ID NO: 28840 - DNA, 701 bp, Zea mays
  Clone ID: MRT4577_126313C.1
caagtcatccctggattctcaccctccctgatctgctttggaacaaatactgggtcaacacgctatcttcatcatcacttctgggaacagagattatgttgctgggcagatctttgatttagctgataaactagagcaagctgaaggccagctggcacacagtcgatttggtggtatgattatgccttcacaacgaaagaaagagcaagaagagtctccactggctaaggtaacacgagatagctccaaaatcacagctgagcaggttcacggcctcatgtcacaggtcataaaagacatccttttcaactctgttcacccgtcaagcaaggcaagcacaagtgctccaccagattcatcaggtcctgagcctatggttgaagcctgagttccagcgaaaggggacattggatatttgtgttatgctatctgattcagaaggtgcaaaacaagttatattttgagtactgaatcatcatgtaattatgagttgccttcatcttgggctgccactgagagggtgtgccggttagcaatctcatgtattggatttcagatcagtattcgaagctttcataacgaggagccatcatcttattttagtagtttgtttggcttgccatttagttattggaagggtcgcttctttaagactgttcgcttaattgatggcggttactcggaagagctatcttactctc

SEQ ID NO: 28841 - DNA, 231 bp, Zea mays
  Clone ID: MRT4577_126314C.1
gacgaggagaagctcatcatccacctccactccctcctcggcaacaagtggtccgccatcgccaccaagctgcccggccggaccgacaacgagatcaagaactactggaacacgcacctccgcaagaagctgctcgccatggggatcgaccccgtcacgcaccagcgccgcaccgacctcaacctcctcgcggccggcggcttcaccaacctcctcgccgccgccaacctc

SEQ ID NO: 28842 - DNA, 968 bp, Zea mays
  Clone ID: MRT4577_126315C.1
attgcagccctcgaggccggccgggggggctgctcatacctccactaaagcaccggatcccatcagaactccgaagttaagcgtgcttgggcgagagtagtactaggatgggtgacctcctgggacgtcctaggggtgcctacctgcggaagcaaacaggtgggctgggcacctgaaatacgggcagccggtcacagcgcgcagcgccgcccgaaccagcgccgtctcctgcgatcccggtcgcatccacctcttctcccacagcgccggtgtgctcctctcacgctacgttccctccggccccggcgtcgacggctaagaaaccctaaacccaggaacgagttcgcaccctcgggacctgtggcgatgcatctcactctcgaattcgggggcgggctggagctgctcctggagaactccaccaaggtgcacaaggtggaggtcaccacgcccaaggacggccaaggcaaggtgacgatgaagttcttgctctcttgggtcaaggagaatctgatcaaggagcgcccggagatgttcgtcaaggctgattccgtgaggcctggggttcttgtccttataaacgactgcgattgggagctgtgtggtggtcttgatgcagagttggaagagaaggatgttgtggttttcatctccactttgcatggtggttagtttgattacatcaggatgataccatcctatgattttcctgaaaaccgcaccttgtatcaagtctttggaagggatggattggtctgagttgtgtggctttctggagatactaattgcaaattgcggaactgcacttgttggtgctaatatcatcaaactgtagttccattttcttactgggacgcatgcacataatattgtgcacaaccgatcctgtatttttccagtactgctgtggctctccctcgtttgctgtataaacacaaatgaaaggtcaagtgaagtacgtatttctt

SEQ ID NO: 28843 - DNA, 431 bp, Zea mays
  Clone ID: MRT4577_126316C.1
aaaaaaaaacccacttgggtgaaaaaggggagggtcccggtccagcccaaagttctaccccccgggggtgaaaaccctcctcatggcagggcccgggttaaccgaagggggaagtccccctttcactcaaacataacgggcttccccacaaacggcggggactaaacacaaacccccgggggggggcccccctcaccaaagatcgatcgatcgatcgccaccaatttttttttagcaacacgggatcaggtgctgaccacagggggttttgccttcaaagctccaaatacatggggatgaccagggcacccacaaaacagcccatttaccaggggacaattttccaacgctgggtggggccctccccccacttccaaaacaccatgttggtgcccgtgcgcacccccccggggtccttgtccccggggaag

SEQ ID NO: 28844 - DNA, 363 bp, Zea mays
  Clone ID: MRT4577_126317C.1
ccctcccccacccccacccgtcgggacgcccccccactttcccctcccccggatccgcatggcgcctctgcagctccgcgccgctcggcctcccgtagccgacgcccggccccgtcccaccgaccgctgcgccgagcgctgcccgccccagactaatctttggacagagatcattcgaggaagcttgatgtttcagcagcactgtgaccttgattagatgtctttccgcagtattgcgcgtgacgtaagagatggctttaggagcttgcgttggagagggtttgaggcgaagttgctgggcctacgcagtgtgaggctcccaactggctaatcatgacctgtctgagccagccccatggatcc

SEQ ID NO: 28845 - DNA, 295 bp, Zea mays
  Clone ID: MRT4577_126318C.1
tcggtgttactgattccacataacataccgtagctagctgaaggatctgcgtcgtaatgatggacagaaaggagacggaagcggacccacctacgtgaaactggattagattgaatgatatagtgcatcttgagtgtgtctatggtcatcgacttcactgtggcgtttcgaaatgccatattgctgagttggtctgagcacgtgtgttctcatttctgtatcacgcatacagctttcaactctaccttcttctttcttttttttttctagcgtttatgaaactctatggaacttg

SEQ ID NO: 28846 - DNA, 1455 bp, Zea mays
  Clone ID: MRT4577_126319C.1
ggaaaagctcagagacctgtccgttacacttgcaccgcagccagagtccgggagcgcagagatcgctggggagatggcgagagaagcagcgagcgaagccaccgcaagccgcgaaagcggggcggaggcggcaggggagtgctggagcgaagcgctcaagtcgttcctggaccacatccccgtctcctccgtcccgggcgcgctccaacccactgcctccccagcggtggaggtcaagctccacggctccgtcctgggcgccctcgacgccatgtacagcagcaacgccgcgggcgcggtgatcatcgacgtggtgcacagcagtctaggcaagtacgtcgatcgcgatattggcttcgtcgagttctcgagcctagtcctgtgggcgcttgaggaacttggcaaagtggaaagtgaaccaacagacagtacttctgatttcctctctactctgaaacagcatcatcagattgcagaaacgaagatcgcctggttagcgaagttgttcctgtgggagccattcttccctgttcggacccatgacacgctgttccacgcaatgcttctcttttcgaaacaccacaggctcaacgtggcaccggttgttgagtcaatgaactcgagtgttattggatttgtcacacaggatgcagtgatggagctgcttctccagtcaagtggccttgagtggcttgataaaattgcagacaagcagctttcggaatttaggtttgcaaatgtgaggaagcctgttttggtgtactcagatcaaactctagctgatgggctgcatattctctcaaaggaaaaaacgggggttgcagtcattgacaggaaaaccagccgtctaattggatcattacagtgcagtgatctctacctgtttctagatgacagcacccttttcagcaagcgaacgacaactactctggaagaattaatcagcctgaataacaagaccgacaggaaatgcagcaccgctgaaaattcatgtgcgcctggccgaaacatcctcgcgctcaggagcaggcagtcaggcatggtgggcctaccagccaccaacctggaatccgacaccctaaagcaagcgatggagaagctgacaactttaaggagcagctgcagcttcatcgtcgacgagcacgggcgcgtccaaggagtggtgaccacaagggacatcatctccgtgttctccccgctgtgcatggactcgaggattgacggggccacgttcttctcggctgcgctcgagcaggctggctgccgcgttgagaacgggcagatgtttcagaattagtttcagacaaaactggaatgcagggaggctttagtttgttgcagtgaggaagatgtacatggcacttaccggctatgttgccctgatacgagggatatggatacgggatacgtcgatactctgatacgctatttatcaaaaaatactctgatacgctt

SEQ ID NO: 28847 - DNA, 347 bp, Zea mays
  Clone ID: MRT4577_12631C.1
aacatccttgtttggttcattcctttaaaccaaatcacatatctacttctaattatttaacttaaaaaaacaaaaaacatctaacaacaatttatttttaaacaaaaaaaaaaaccaaacaacaacgtttaacaaacaaggaacacttatttacaccccaaaaaaaggtttccaataaaaattcccattccctaacctgcaactttcaaaaccaacattaaattgaccatctcaaccggcttattcaaacttatacaaaccatccggtttgccaaggataggcttcataccggaaatcttcttgcaaccccctaagtaattaacccctggactttttttccggaaaa

SEQ ID NO: 28848 - DNA, 316 bp, Zea mays
  Clone ID: MRT4577_126320C.1
cttcttttttttttttttttttttttttttttttttttttttaaacatttattgataactagaaccatatattcaggatgcgccaagcactgcccggggtggtgaaaaagactataaactccagagcatggcatgatccgttttttcccgtgtcaggaaaaagattctgctacttattttgggagggggaataaaaaaatgcagaatgcagtttcctgtaccggtgagttgatggcccttttactgataccgcaaaagagatcccagacatgtctgcacggttgctagagacacagttagctcgggctaaacccga

SEQ ID NO: 28849 - DNA, 464 bp, Zea mays
  Clone ID: MRT4577_126321C.1
acagggcaattgggaatgggggataaaaaattctacagtcaccctatgagcactgtttatagagaatgtacaactaaaatccagtgatacatatagatgtacaattgacgatgcacaagtccaacattggagacgacaatggcggcttgctctggtatgaccccacatcacatgttaaattctccgtagcatatttatgtatgtataactcgagaacatgacaaacaatcttctaaacctggaaagacacatggaatttgttgattatcttcaataaaaaaaagagcttccctatattcaagaaaaaaagacaatccctaactactgagttaaacatggtacttcttgtttcctgatacaggtaaggtattgatagatgccatctctgatgatatatggcagcaaccagcaagttagtgattcattatatgttggtcaagatatcttgcgagtaacgattttaa

SEQ ID NO: 28850 - DNA, 579 bp, Zea mays
  Clone ID: MRT4577_126322C.1
ttttttttttttttttttgttcactaactggtatttaatacggatttatttaccacgggaaatacgttttgctaattacagacagtaagtcacaattgttccgtttcatttacacttccatttccaccgaacgttctatgatcacgatccaagaaaaacatccactttgtcattcatcgccctcgacagaaacttcatgcagatgggaggcttcaccttggcaagagcaagcactgactgaggtagaacccatatcccatcaccacagatcatgccggaagcaatcgcaggcgcgaacgtgtctgctttggctctgtccagcctttgccacacgaacagtatcactgtaccaacgaacatgtccacggcgaagtacgcaccgatgtagaaaggtatcgccatcgccatcgggatcgggatgaacctcgacaccttcttgggcaccaggtccctgatcaggttgatgacgatcgctgcagcgaagaacacgtagcagagagtgaggcagttctcgggaagcgaggagaagccatccacgccgagcactgccatgctccggaagacaacggcgtttggcgc

SEQ ID NO: 28851 - DNA, 622 bp, Zea mays
  Clone ID: MRT4577_126323C.1
accatagctctgctcctcgttcttcctgccatagccataccccgaggagccataggtccgcggccgcgtcgactttttttttttttttttttttttataataacagagtgtatagagataaatgtcacaataacatcagagtacttgttacatagcggaagtcttacaaaataaaagataaatatagatcgaactaaaatccatccttggcgccataaagtcaactgggagacgccacctagatcaaatcgaactcctcgttatgtggctcctcttgaaccacctgttcttctcaggaaaacacgccgccacaagtccgagttccatcggtggcgacctcctgttcttgcgatccgatgaagagcactctgtggtgatgggcgaggagggcaaccggcaaggatccccacggttggcggcaccctctgattcatccctggagcgacacccgcccatcatctactctacctcctcagctccatatccggccccgaacggcgttcccgtcactaggtggcaccggcggctacaactttcctctctctctcttcgtgtttgtatgacaccggcgaggtcacaaacgaggcttcgatgatgcggatcaggggaggtagcaggcgcg

SEQ ID NO: 28852 - DNA, 326 bp, Zea mays
  Clone ID: MRT4577_126324C.1
gagcggcaaaccccaaaacaaatgcaacatcacataacccggaattacattatcttatctttgcaacattaaaaaaaaaagttaagcccgcaacaaaagggtttgactcgggaccaacttgggcatgttttggcatcggggctggatgccttattatcatcaccataatgcaacaactaccccccgagtgcctgcgaggggcattttgacaccccagttggggggagaggaaaaaagccatgttattgctgaaaactaactttgaacccggtgggggaatggcctacgactcttagaagaaggccaggaaatccagctttcgcctt

SEQ ID NO: 28853 - DNA, 401 bp, Zea mays
  Clone ID: MRT4577_126325C.1
cagaacccgacgaccagcgcccggcacgacaacatactaggtaagaagtggtccagagttttcccgctcacaaaacatgaaaggccatcctttaacgtccaacgctggtttattctctacacaaagcacaatgctggtccataggaattgtggcgtacatcactagggctaatatagtaaactatatgctcttgaatatcctaacataaatacgactttgcacctgtgtaaatttataatgaaaatacagcgccatagcctaatttctccttcgctacaactatatggttcttgtgcagttcagattactgatctgaagcagaaatggcagtgcggattctgttctgccctcggcctctcccctgtccgcggccaccgctggtttgactactgcgtccacc

SEQ ID NO: 28854 - DNA, 225 bp, Zea mays
  Clone ID: MRT4577_126326C.1
ccggaattaaatggtcgacccaagcggcccctatcgagctgaccatcagcaaatgaacgatcacggttgcagctcgatcatcgccaagcagcacgtgggcatatgctctagccttaggtagtagctagacactcggacgagtaatcatcagtctattgatcgtgacaaattgacactgccgaggttcagacacacaccgtcgtggcgaccgactgaagcccagtg

SEQ ID NO: 28855 - DNA, 491 bp, Zea mays
  Clone ID: MRT4577_126327C.1
ggccgggccgggtttcttcccagcaccttcctctcgtgcctctcatattctgtaccccgactcgctctctgcgaactaccgcgcctacatccatgcatgagggagattcgccgcatccacggtgacaagtgcggaaaccagaatcggaccttacataagggacgtgccctgcaacaaacatgactagccatccctgcgcacgatatgtggtgatctccaacctcgagatgaagtgcatatatgtccactagaaccaagcctattgcactggcttcgtgacataccgctgtgctcatggacctcaaatcagctaccactggacaactgcactgaccgagcggactcgtatattgtacgcctcgacagcttaccctcccaactatgtattccttccacacaactgtttcagaggacactactcctatggatgaaatgtcaatgacgccggactcggctatgccagaatggatcctaagaactgcgactgtctc

SEQ ID NO: 28856 - DNA, 253 bp, Zea mays
  unsure (1)..(253): unsure at all n locations
  Clone ID: MRT4577_126328C.1
ccacgcggccgcgcttnggttggggcnccctccccggggagagccggctcttcgtgcccgccgcctcccctccgtctctccctctcccctcccgtctgacgcacatggcctccatcggcggatcttccgccctctccttcgccaggcccgtcaaggcggtcaacacaaagtctctagctctctcaccgctgaggggggggcgcgcatgcctttttttttttccagtgcctatgagagctgcttcctgcgctgc

SEQ ID NO: 28857 - DNA, 538 bp, Zea mays
  Clone ID: MRT4577_126329C.1
cccaaggcacccaattaaaattttcccgaaacataaacccaaaaaaacggtttggaaaaccccccgaaaaaaaaacccagcaaaaaagggggatttcaaaaaaacaccccggaaaaaggggggggttttttttccccggaaaaaaccagggggctgggaccacaaaacccagcacccccccatttttaataaccgggaaaaagaaaacaaagcgggggggcaaaaaattaaaggggggggctaaataaaaaccaggggcaaaggcaagggaaagggggggaattttaaggcccccccccccgggcccgggacaaaaaaaacaacccggggggccctaaaaaaaagcctttcaaaaacaaaaaccggcccagcccgggaaaaccccccgacataagaaaacccccataagggggggaaacgggacccgtttaacgggcccggggggggggattcttggggggaaaaagtggtttccttgatccaatccccgccgccctggtggggggcggaagcccaaaaggcaaagtggccccccagg

SEQ ID NO: 28858 - DNA, 471 bp, Zea mays
  Clone ID: MRT4577_12632C.1
agaggagcagcaggcgctctttgtctattggaaccaatatggttgcaatgttcacgtccgcacgcacacatttttcaaagtcaccaactgaaggcacctgccggccgggggcgcgatcgagggtgttgagtttgatcttaacaaccacgacttaagggtatctagccgatgatctggtcgagggccccggggtttttgatcccaaccactatgcccaccccgaggatgtgggcgacggatccaaatgccatcatgttggccagggtgaaccctttggggtcacccctgtgtaagccggagtcatgcgcctacagattaagacccggcattgactttggggtactccaaggtgcctgaccgaacagtcccgcgaacatgatagaattgcatttttcaccatgatcatgttgtggggggagcccatatagaaccatgggttttccttggacgacgacctattgctggccaccc

SEQ ID NO: 28859 - DNA, 276 bp, Zea mays
  Clone ID: MRT4577_126330C.1
actttgtttgttcggacacaataaatgtatggcgcgtgtttgctctagagctcctaagagacaaattgcctgggggaccaccatagccaaagcaggactgtttgtggcttctgtcactgtacattctgaccagcggcggcctagtttagctcaactgtcaaagagctacactgacgtggatggctcaagaaatgtacctggccccgccaggcagagagaccatcaggctaacgactctctatcatgacgcgcagctcgacccccgaattgcccacc

SEQ ID NO: 28860 - DNA, 130 bp, Zea mays
  Clone ID: MRT4577_126331C.1
ccgacgcgtgcgtgagggtgtaggcaaaagcatgaccgcctttttcagacttaaatgcttgcaaggctgttaaggctggttgcctcattaaaggggcaagggcctgtgtttaatatgatacagcaactct

SEQ ID NO: 28861 - DNA, 616 bp, Zea mays
  Clone ID: MRT4577_126332C.1
tctttccacgcgtccgtgcctgcgcgctagtctgacagcgcgcgaggcggcgataacccgtcgcggcggtggcgtcgcacgagctgccgcctcgttctggcgggacggctggttgtctcctgttcagccagcaaacggcgtgcctcgccgcagagagcttacgtgctcctctcccccacgccgcctccgccgttcagagcttcgaacacctcggccacaccactccctcccaccgccgccgcagatatctcccgcccgcggtgccgggatggagaacgacatcgccgccgccgagatcttcggcggcgtggtcgggatggagaacgacatcgccgccgccgagttctccggcatggtcgggatggaggacactgctgctacgccggtgtgccacgcctcggcttgtccggttgtctgccacagcgaagaacctggaggatcaaaggattcgcaagataagcaactaactagtgaaccatcaaaagaaattgtttggggtgctttacaatttgaggacaggtggaaggaggaagggatgcaattaattgcctgtgaagattctatatatgcctaacttgttttgtagaagaggatgagaggggatgagagaaaaggc

SEQ ID NO: 28862 - DNA, 346 bp, Zea mays
  unsure (1)..(346): unsure at all n locations
  Clone ID: MRT4577_126333C.1
cccactctttccttatcttcctccttattatcctgactggtactacatcatggctgcatggatttcaaggaagagctacctaangcaangcattcttgtggatagctttcataagatctacagtggccgccagaggaatggctacctcccaccacacttctgcaatagcagtggtgctgttgcacgcaacatcctgcatctgctgcagattatgggcatcatcgatgtcgatcccaagggtggacgcctcatcaccaaccatcgaaagcatgatcttgaccaagtggctggaagggtcgctgctgaagcatgagcagtgtcatctgtggtttcaatggtgtcatgt

SEQ ID NO: 28863 - DNA, 208 bp, Zea mays
  Clone ID: MRT4577_126334C.1
gaggggaagcttttaatttgagcatttccaaaagctttttttaagttttccctaaaacatttttttggaaaaaacataaaaacatttttccaactggtaccctaaaggttttccttattataactagaacaggttttacccctaaattttaaaccgaaccggtagtattgctgttttatatacaaaatgtttttttaaatccaaaggg

SEQ ID NO: 28864 - DNA, 321 bp, Zea mays
  Clone ID: MRT4577_126335C.1
ttcccgggatttcgagcatgcacaaacacaccaagcgaagctacctagcatctacttaacaacaatggctaccaagggtggtccctacttgcgcttgtcgccctctttgagagcgcatcatatgcgtgcattattcctcattgctgactggctcctagtgctattataccacactgtctccatctagatactctactggacttcgtccaccgttctcatcatgccagctatttgctacgagcccttgcgccttgcgttcgtcaaccccgctatggatgtttaaatctactgctcacttgtcgactatataaactctgcact

SEQ ID NO: 28865 - DNA, 244 bp, Zea mays
  Clone ID: MRT4577_126336C.1
tgaatccagtcctgatccttgcctttgtcggagctgctgttgctgtcccctctgacgatgatgacaagattgttgggggctacacctgtgcggagaattctcgcccctaccaggtgtccctgaattctggctcccacttctgcggtggctccctcatcgcgaacagtgggtggtatcagcagctcactgctacaagacccgcatccaggtgagactgggagagcacaacatcaaagtcctggag

SEQ ID NO: 28866 - DNA, 557 bp, Zea mays
  Clone ID: MRT4577_126337C.1
gagttggctcatcgagcagcgcgttttgttctctgttgtgtgatgacagtggatcgggtatggccaattggccccgaagtcaagtggtctccgacagccggcgctcgtgggcggcagccgacctcgcacaggaactcgccgtcgccgagctccttgaacgcgctccacagctgcttcggcagcgtcacgacgccctccgcgtccctcaccagcttcctcggctggtccggcgacagcaccgcgaactttcccgtctcggggtccaggtcgccggagaacctcgcggcggcggcgtccgtggtctcccactgcccgatcacctcggcgacgtcgagcttctccccggccgcaaacggggtctccccgacggcgcagccgccgagctgctcgccgtcgcggaacgggccgtaccactgctcggcgaagaccttgaccccgcggagccgcgcctccctgcccagcgccacggtctgcaccacccggaccctgccggcctcctcggcgggcgcgtcggggcgcacgacgcagtgctccacctcgagcacgagcgcggggcc

SEQ ID NO: 28867 - DNA, 331 bp, Zea mays
  Clone ID: MRT4577_126338C.1
ttctcacgcgtgtcgtcgtaatacagcaccacacaacttttctgggagatcattcaacaccagcggtggcgttcaaacctaacccttcacgacttggctttccctaacttccttcgaacccttaactttcaagaacaccacaagaaatcctttcccgcacccgcacaatggtttccggcaccggcttaaacctttccggcaccgggacgcgcttcaacaacgtgcaaccttacacaaccggctttttcgggccgtggttccccaacaaccggttttggacccgcaacaaccacaattgccgcaacggcaacggggccgggttccccggctt

SEQ ID NO: 28868 - DNA, 1385 bp, Zea mays
  unsure (1)..(1385): unsure at all n locations
  Clone ID: MRT4577_126339C.1
cctcgaggccggccgggaaagcaaggccatcgatcgataatgccgcttctccctacgcagctccgtctcctcccgctgtccctccccgacgcgcgccagcgccgcggtattctcccgccggcggcggcggcggcggccttgttgccatcgtggtcttgttcgccgccattgtctcggcttcgatcacgggggcggcaggctaaaacgaggctgcgagtcgtctctcccgagacatccagcaccgctgccaccgacgctgcgacgacgaccgccggcgcgccgccagataacagcaagtgggcagagttcgcgacgcgagtgtccggcgagtgggacggcttcggcgcggacttcacggcgtccggcgaccccgtggagctgccggagaaagtggtcccggaagcgtaccgggagtggggcgtgcaggtggtggactggcagacgcagtgccccacgctggcggacccgggcgcgccgtgcgcgctgcactaccgcctggtccgtctgctccccacggtggggtgcgaggccgacgccgccaccgtgcacacctcccaccagcgccacgcctcctccgccgccgccttcgcgtacgccgccgcggggtcctacgtcgccgcgtggcccaggggccccgcgctcgtgctcgaggtggagcactgcgtcgtgcgccccgacgcgcccgccgaggaggccggcagggtccgggtggtgcagaccgtggcgctgggcagggaggcgcggctccgcgggctcaaggtcttcgccgagcagtggtacggcccgttccgcgacggcgagcagctcggcggctgcgccgtcggggagaccccgttcgcggccggggagaagctcgacgtcgccgaggtgatcgggcagtgggagaccacggacgccgccgccgcgaggttctccggcgacctggaccccgagacgggaaagttcgcggagctgtcgccggaccagccgaggaagctggtgagggacgcggagggcgtcgtgacgctgccgaagcagctgtggagcgcgttcaaggagctcggcgacggcgagttcctgtgcgaggtcggctgggctctgggcggcggcggcgccgtcacgtcgcgctgcgttctgtccaaggacggagacgtcaaggagatcgctgccgcccacgagcgccgggtgtcggagaccacttgacttcggggccaattggccatacccgatccagccatcaaacagagaacaaaacgcgctgctcgatgagccaactcaatttggtatcttcgaatcgaaggtacaacgactgcttggccgtctaacctcaacactcttcgccttaacaatcatcatttagacgattgcaacatttctgttcatttggccgtttcatgcaanaaaaa

SEQ ID NO: 28869 - DNA, 372 bp, Zea mays
  Clone ID: MRT4577_12633C.1
atattttttttttttttttttttttttttgggtttttttttttttttggggtttttttcttttttttttttttttttttttttttttttaggggagaggggccccgtttttaataaatttcagggccctgaaaaacctttggggaaaccattccccaatcctggggcgggtttccaaagcaagaaaaggccccggggcccatcctttggcggggggccccccaaccccccccccagggggggctccctaaccccctggaacccccccgggggcccccaaaaaatgtttgctggccccaataggggcttggggggcccccaattgcctaaaccaacaccccccccatagcatttttccagaaaccgtcctttc

SEQ ID NO: 28870 - DNA, 535 bp, Zea mays
  Clone ID: MRT4577_126340C.1
ggttctagatcgcgatctagaactaggggccacgcgtccgctcttgttctctattccctcttgggctttctgttttccatattattcttttttctcatggttcgcagaactagattaatatgtgagttggttttggttattcgcatggaggttaattgctattggtgaaggttgacgtgtcaaacatcctacatgacccacagcaatgcagaaacattctttggtatgaagcaatatgaattacagattttgtgtcatcattctagatacctgactatcatggcattataaagcatccaatggattttttaacaataagaaagaagcttgataagggggatattcctacttgaagcgatttgagaagactcttggtcatcatacatgctgttgtaaatgccagattgtccaaggacagttctgtggggattctttgtacatgagatatggtgagaatgtggtagaggttaagaagaatcctaacaggatatgtcaaggttggcgcggcatctataattgcaggatatgcagaact

SEQ ID NO: 28871 - DNA, 268 bp, Zea mays
  Clone ID: MRT4577_126341C.1
gcgacgcgttcgacgactcgtgcgaacactcgttcggctaccgaactgaattatgttagtactaagagtgaaaagggggatgtggatgatcctgacaatgcaagcaatggataatctctgcagacgcataatctgctaccgacagtaaatggtgatatggacgagcaattagaatatgctacaggaagtgctgcaagttgtgaagcacaagtgtatgcatatatgtgtctcaaggaaagtttgaaccaatgcaattcatggaatgaat

SEQ ID NO: 28872 - DNA, 340 bp, Zea mays
  unsure (1)..(340): unsure at all n locations
  Clone ID: MRT4577_126342C.1
acggaagaagccacnagcncnccgcaggccgggcacgccacacgggcgggggcgggggccgccgaacacccncacaagagacggccccacgaggacncagaccagccncagcaggcccccgcccaccctccaacaggtgaggcctcccgcagagccaaatcggaaaacgggccttcgaccccaaaccaccaaaccgggtgcatacaaggggggtgctcacagcgcacacaaagccattgtacaggtgggaatggaggccggcactataagcggcaccagctctagagtgaacaccaagggaagcgaaaagatgggggagggcgaagaccgcaaggagaac

SEQ ID NO: 28873 - DNA, 406 bp, Zea mays
  Clone ID: MRT4577_126343C.1
gcaccatgaagtgtctaaccctagtccactacggcactcgagtcactcccttcgtctgaatcccttgtcccctcgacggcttaactccttttggttgggcggctggcaagcgacgaccatgacccagaccaccacgccccacacggttgtaccggcccaccgtcggcatccaccggccaccataccccatgtcagcgagagggccagtaacgaccttggcacagcggcaccctgtgggcatcaccagcgccgcctaccaccgcgacatcaccggcactctgatcaggaatatgcgtaaacttggagacataatggagatgatgtttggtgggcgttatgtaattatggtgatggcggttttttcaatctacagaggattaatatacaatgaattttctctattcca

SEQ ID NO: 28874 - DNA, 317 bp, Zea mays
  Clone ID: MRT4577_126344C.1
actttttggggtgattctaaaaaactactgcctaatttccacaattggacgaactcagaagcggatgtcccacgcgatgccttgctgacgtcgtcgctttccttgccggcattttcctcctcgacactccccctcctacttctcctgctgctgggcagcaaacttgccgtcgacgttggcggtggccttggcgtcatacagggatctggaacggctccttcgcttccacggtgccctcggaggaggccattgctggatcgctcggcggcagcgctaggcgcgaccgaggaggacttcttggcctcgtcgtcaggcac

SEQ ID NO: 28875 - DNA, 272 bp, Zea mays
  unsure (1)..(272): unsure at all n locations
  Clone ID: MRT4577_126345C.1
ggggattattaaggggggggggggcaaaaatgagatgtcaaataaatctgttgtggagcccactcttnagtttncaattgtgcaanagccgnatcgcgtggggtcagttngggggattnnggttncgagagntgttacatatggggggggcgagagcagcgcgttacatgagcctagaattctgccacntgagagcttgtgnagagggaantgcatgtgccaaggggagaggcggacatcaatcaatcattttcatgagaagctttttaaac

SEQ ID NO: 28876 - DNA, 301 bp, Zea mays
  Clone ID: MRT4577_126346C.1
ccatcggctagatgtgtgggttttggtgaccctattgaatgatcaccgaaagccctgacggtattcagaccaatctaaacattggagtcctcaccagatcacaactactcacttatcatcctgatagggacatccatcctcttttgatacaggctctgataatctgctactcattcttgcatgccttgcacttagaggtgtaccagggtttttgcatggttcacgatgtaatagaacgattgttcctgtgcgtaattgaatacgaccgcatgctctacatggttgacggtcatggggtaaa

SEQ ID NO: 28877 - DNA, 176 bp, Zea mays
  Clone ID: MRT4577_126347C.1
ctccttactagaggcatcagtcttcgaccacctttagggttcccgactcacagctgggatgctgattgagtgtgtcatattggggtttggaactgtccctgtggcgtgctgagactgtgtattagcctggtttggtgctctttgggggggggggctctctgggtttggtcgggggc

SEQ ID NO: 28878 - DNA, 272 bp, Zea mays
  Clone ID: MRT4577_126348C.1
ctttgctcctctccccgcgtgctctccctctctctcgcgcgcggcgacgactcggctagtcggctaccgccgccgcccctacccagcttcccagctcttcgtctgatccctccacctcgacgagcacccactacatatcccggagcgtctccaccgcacgtagggagtgtatctattagggaaggcccaagagacagagacctggtggtggctgggggccttgcggccttcgtgctcggggtctactactacaccatgagagccttgggagg

SEQ ID NO: 28879 - DNA, 461 bp, Zea mays
  Clone ID: MRT4577_126349C.1
aaaaaagagaggggggtaaaatttatttggaaaaggcgtaaaggggggggggcccagggggcccttgttttgtccccaggttttaaaaatttaaaggcccccgtttttttgccaatttgggggcaaccaacccccattttttggcccggaaaaaaaaaggggggctggcccttttttggggccttaaaaccctgggaaccattaccctttagctggggaaggggccaaaaggaaaacatccttcccccccttttgtaaaaacagggttgggtaagcctgtttaaagcataaaaacccctcagaacaagctttagtaaatttaacaaaaccctaacagaaccctaattgtttcccccgttaaaaaacatggtttggggggaatgtttttatttaaaggggggggggtgccttcacttagcttattggggtctcctccaacctataacataattttttcattt

SEQ ID NO: 28880 - DNA, 2110 bp, Zea mays
  Clone ID: MRT4577_12634C.1
ttccattccaccccccgactaaacgccgccgtcaagtttccccctcccccaccatctacagccgccgccgacgcccaccagggctgttgccccagccgccaccagggaggcaccaccgaggagcgcgccaaggtgccggccgcgctcacgcggaggggcctgcccgcctctgctagggccgaggctgaggccggatccacactggcggtcagcgtggcagggacgtgcccgcttgcgcagaggagcagagcgcccgttcaggcgtccgcccgtacgagcgtccgtgcccacgctggcaactgaccgcgtccgagccgggggacggccgcagcgtgcccgccggggcgctcggctgccggggaaagctgcaatccgcaggcccaatccatcctcttttttcaaatttcttttagttaaaattttgtttttcaacaaaaaccagagaaagatcttaatcttgttagggagtttggcttaaaatccacctctacaatgtcaccatcggcctctgcatgctcgattggtgggagcgctacctcttcatgggtacttccaatacatgtcatttaattatggatggttgacagtctcgaagacgttttttagctcagcgtggactggccttgataggttgctaaatctattgcatttttagatgatgtcaataccataaaaaggagatcgggtaagagttacgactgttcctaaccttgcttgtggctgttggaccgctgatttacttcgctgcgtatatcgggctgcttcagccccactctgatgatatgtcctgagttgtggaccaactcttaaagttgatcgccacctttataggtttgtctcgtttaagcagatctggaatcatctgttgtataaatgtgtttactagcctcttgggactagtaattgtatcacatttgagtcctagaggattggggcgcttcacctgccttcccctgaaaacccttctggactccccacgggtccagacttctgaaaggttcatacatgaatggccacagccgaagacaagggctccctcgtcgaacgcagatgggaatgcagggtcgggacctagtcctggtgaggtccgccctcgtaagcccggcctgtcggtccacccaaacagttccaatcccatcagacatgatgacatctgaattgaacagccaggcttgtagtttatgacctctctgcgaaagcagaagggcccgacagcctgggggccggctctaaagagcgggagcccgttccatggggtggtccggagcctgtgtggctgcttagcctggttccgtacccaaaagcctgcacactccaccactccatgatgggtacccttcaagcggaatcctagttccatctctactctgcaggtataaactaccagacaccagtggtgtcgcgttggaagttcgcggccactgtccttgcggaatcctctaagtgccattgcgaagaggtcctcgcccccatcctccggcgatggtggacgcctcagtgcgtgcagaaaggtcctcgcccccgtcctcctgcgcacggtgcgaccgtcgcccgtgcggtggacggacagccacgccccacttgacggcggaggcagcgttggaggcggcaccaaagccatccgagccaaggagccagacacgctgcagctgacggcctgcagccagccggccccgcgtagccgaggttcgcctcctctgcaaggctggtgaacatccttctcctccaaatgctggaggaagaagcgggtcaccagcccatgtggagggcagggccccgactcggctcgccttccaccccaacaatgatgatgaacatccttgaagctgagggtagggaaggccgcagcccggcttgcttctctccaccacgaaggatcaccaccggcgggagactgcagccgggctgcatgatgaacatccttgaagtcgagcgatggcagaaaggcgccaacccccacgaggttgcgcccctccaacagcaacaagaagaagacaagatcggcagcaccaccgcgcaggaaacgaagagcgcaagctccccagcggtgagaccactgggaatggtgaccctgacgcggatccccccggcgaacaccggcgagcctcat

SEQ ID NO: 28881 - DNA, 843 bp, Zea mays
  Clone ID: MRT4577_126350C.1
aacccttcctttttcttaattcctcatccactcgccgcacgacgaagagagcggctcccattccccaccacctactcggaccggagcagcagattctcgaagcgaccggtgaaacattctcgcgccaattgtgggggccatgggcgcagaacggatcccactctggcggaggcggaggagggggagggggagtgaaccctagcaacggcggcacgggggcggctcttcggcacgaccctggtctggcgcgggagtggtcgacggaggagcagaccatcctcgacgagctgctggtcaagtatgcatccgatttacccgttgttcgttatgcaaaagttgcaatgaagttgccagagaaaacagttcgggatgtagccttgcgctgcagatggatgaataaaaaggagagcgccaaaagaaagaaagaggatcacaactcgtctaagaaaagcaaggacaaaaaggagaaggtttcagattcttcgtcgaaaccacctgtgcatatggtgggtaggcctaatgttcctccataccctcttccagttcttccaatggacgatgatgaaatctcatccaaagccattggaggtccaacgggtgaaatacttgaaactaatgcccatgttttgggtcaaatttcgtcaaaccttagcaacatgcagatacaggacaatatctctctgctctgccaaactcgcgataatatactcagggtcttgaaagagataaacgatgctccagatatcatgaagcagatgcccccgctacctgtgaagataaacgaggagctcgtcaactcgttgctccctagacaactgtacctatgcagtagtgatagcaaaa

SEQ ID NO: 28882 - DNA, 1185 bp, Zea mays
  Clone ID: MRT4577_126351C.1
aaactcgcgataatataggcagcctcgaggccggccgggaacaccccttccatgctcccgattcctcatccactcgccgcacgacgaagagagcggctcccattccccaccacctactcggaccggagcagcaggttctcgaagcgaccggtgaaacattctcgcgccaattgtgggggccatgggcgccaacggacacccgccggcgagcaccgtcgcgcagaacggatcccactctggcggaggcggaggagggggagggggagtgaaccctagcaacggcggcacgggggcggctcttcggcacgaccctggtctggcgcgggagtggtcgacggaggagcagaccatcctcgacgagctgctggtcaagtatgcatccgatttacccgttgttcgttatgcaaaagttgcaatgaagttgccagagaaaacagttcgggatgtagccttgcgctgcagatggatgaataaaaaggagagcgccaaaagaaagaaagaggatcacaactcgtctaagaaaagcaaggacaaaaaggagaaggtttcagattcttcgtcgaaaccacctgtgcatatggtgggtaggcctaatgttcctccataccctcttccagttcttccaatggacgatgatgaaatctcatccaaagccattggaggtccaacgggtgaaatacttgaaactaatgcccatgttttgggtcaaatttcgtcaaaccttagcaacatgcagatacaggacaatatctctctgctctgccaaactcgcgataatatactcagggtcttgaaagagataaacgatgctccagatatcatgaagcagatgcccccgctacctgtgaagataaacgaggagctcgtcaactcgttgctccctagaccaactgtacctatgcagtagtgatagcaaaatgagcttttaagataggcagctgaaataaaaaaaaaaaggggcagcctctggtacttttttgttcgttttgtagctccatcctctcgccttctgtattgtatgtttcgtctggatgcttatgtttgttccaaccttttgcaagtcaggcggttggaacgtgtaccaagttaccaagggctgcttccacataagtatcaggtcctgactctgttttgtaatctatagctgtttggtaatgccatggaatcggagtacactttagggtc

SEQ ID NO: 28883 - DNA, 867 bp, Zea mays
  Clone ID: MRT4577_126352C.1
atggcgagagaaaaatttattaatgagggtgatgaaaattctagatattttcatcttatcgccaaaggattttatgatggggttcttgacattaaaaggcttaactttggtttagtgacactattacctaaagtagataaccctattgatatgagaaattttagacctatctgtctcctgaatgtctgctataagatcattactaaagtcctgactaatagacttgcttcctgcatcactaaagtgattagtgagtatcagtatggctttattaaagggaggtacattatggatggtgtggtttctctgaatgaaattcttcatgaaggtttcggtgatatttggtgtgattgggttatgaagactatcagaggtggtaaagtggccatcaaaactaatgatttgattggtccctatttttctactcataaaggtgttagacagggtgatcctttttcgccccttttgtttaaccttgttgcagatggcctggcctgtattattcaaaaagctcaagaaagagggaaagctaatgagtttgttaatttgtatgctgacatttttacttgtcccgtggggtgtcttccgatgaaatatcttggtgttccaattgataacaagaaaatcactagtttctggaaaaattcttggattggtgatggtcctctagctgttaaatttcctgttctgtttgatttggctctggataaagacgtctcgatcaagaggatagagttaattggtgtatgggtaacaaaggttttactgttaattctttgtataagaaaaattcgattgatcaggcctacagattcttgtggaaatctaagttaccacaaaaaatcaaagtcttcatttggcttgtga

SEQ ID NO: 28884 - DNA, 1325 bp, Zea mays
  Clone ID: MRT4577_126353C.1
tttattttaaaaaaaaaaaaaaaaaaaaaaaaaaaaaaaaaaaaaaaaaaaaaaaaaaaaatccgtattccctgttgttccctctccgaattcgaccccgccgctaaaccccgcaccggttgccgaggcgtctcccgctccagctccgactctcacgcgactagggttctgtgcgtccacttccccgtcggcgcaatggaggtcgggggtcaagaagtgaagccaggagccacggtttcttgcaaagttggtgatggcttggttatccacctttcacaggctgcactgggggaatcaaagaaagcgagtgagaatgccattttgtctgttaatattgatgataagaaactagtgcttggaaccttatcagttgagaagcatcctcagatctcttgtgatcttgtatttgataaggattttgagctaccacacaattcaaaaacacgtagcgttttcttccgtggctacaagtcccctgttcctctgtttgagtctaattctggtgaagatagttccgatgaagagctaaaaaccgatcaaattccattgcagaataatgaaattaaaatttctgcggcaaaggttcctgcgaaggatgatgatgatgatgttttcattattctagcgatgatgatgatgatttatagcagtgatgatgatgatgatgatttcactactagtgatagtgataatgaaatgtctgaggaagatgactccagtgatgaagatgaaatgtctgaggaagatgactccagtgatgaagatgaaatgtcaggtggtgctgatcctagtgatgattccagtgatgaatctggttcagaacatacttctgccccaaagaagactgatgtagtagttggcaagaagagagcaatcaaagctgaggcaccttatggtaagaaggctaagtctgaacaatcttctcagaaaacaggtgacaaggcttcaacttctcatcctgcaaagcagtccatcaagactcctgcagacaaatctaggaagacccccacagctgacaagaaatcccccaaatctgggagccatggctgcaagtaacgcaacaaatctttcagcagtgcgtcagcactttagtcccatcagaagccaaaaaagcatgaagcctagaggagcatgtgctgtaccttataggttgatctacttgaattatcaaaatcagtggtcttatttttgaacttgaaaatatcaagtttggaacttgcctagtagttatgcgattagtggtcttactatttttaaacttaggaaatctcaagtttggaacatacctggtatgtcttgttaataacatgggtgtgagaggagag

SEQ ID NO: 28885 - DNA, 374 bp, Zea mays
  Clone ID: MRT4577_126354C.1
gtcctgatgaccttccagctacaaaaggtggggcgctgggagtacttcttccgtcttcatcgtcaacagcttcgacgagctggagcggccggcgctcgacgccatgcgcgccaccatcccggccgtatacaccatcggcccgctcgcttccgacacggagcaggtcgtcccaaggggccccctcaacgcggggagctgcagcctgtggcaggaggaccagtcctgcctcgcgtggctggatgccaggaagccccagccgtggtcggtggtctacgtgaacttcgggagcgtgactgtcatgagcgggcaggagttggcggagttctcgtgggggctggcgagcagcggccacaacttcctgtgggtcgtcaggc

SEQ ID NO: 28886 - DNA, 429 bp, Zea mays
  Clone ID: MRT4577_126355C.1
gttccatgaacaaggagcacatttattccagcagagaagcagcagtatgcccccaaatttgggaccctacttaaatgggaaatgttctctataactagcacggctgcgggggaggcgatagggagcaaccacattcgctcgcgcaacttactggtggcttcctcagcctttggagattagtgtcgatagatactgaatatgaacactgtgcagaggctaattacaagaaaccatgagaggacatgcagcgctggcatttttacaagaacaggccttccggtcgccgaactagataggagatctcccgcgagtgtgatttctctcttaggacgggccaggtgggatacaattacgcaaagacgctgacgcctacctagatcactctactgcgtgggatgaaccacttcacctgactgactaatgcatgtt

SEQ ID NO: 28887 - DNA, 652 bp, Zea mays
  Clone ID: MRT4577_126356C.1
tcgagcggccgcccgggcaggtacaagcttttttttttttttttttttttttttaatttttttttttttttttttttttttttttttttttttttttttttttttttaatttttttttttttttttaattttaaaatataaaaaaaaaaaaccaaaaacaaaaatgggaattgtaaaaaaaaaaaaagggaaaaaaaaaaaaaaaagggaaacaaatgtcaaaaaaaaaaaaaaaaaaaaaaaaaggggaacctccaaagaaaacacgctaagggcaaacaccaggagggggggggcaaaaagggggggaccaaataaaaaaaaaaagctgggcgtaataaaggaaaaaactggggccccaaccaaaggggggacaattaaaaaatcctcgggcctttttatccgggacccaaatggtaaaccctggggggcccaaccagggagctaacccacataaagggggaaaaaaaaaggggccgctttccaaaaagaaaacccccggtgccaaattcaaaaaaaaaacgggcctccccggggggaaacccaaaaaaaaaaatgggggttattccaatgccaattttacagaaaaaaaaaaccccgggatcccggtttttggaaagggccccccccaacggggaggggggaataacgg

SEQ ID NO: 28888 - DNA, 155 bp, Zea mays
  Clone ID: MRT4577_126357C.1
cccacgcgtccggtcccgctgaagttgtcagtcaagcaggcattgtatgttgcaccggtgatgtcctatgtgcatgggcgtgcgttcattcatatagatcttacatcgcacaacctcctgatttctgctgataaagccattactattgctgactt

SEQ ID NO: 28889 - DNA, 537 bp, Zea mays
  unsure (1)..(537): unsure at all n locations
  Clone ID: MRT4577_126358C.1
gggaccctcgaggccggcctgtatcgccctgcgaaccctagctccctgcactgccgccgccactcccacgctcgcagccatgccgcccaagctcgacccgtcgcaggtggtggaggtgttcgtccgtgtgaccggcggcgaggtcggngcagcgtcttcgctggcccccaagatcggcccgctcggtctttccccncggaagaccggagaggacatcgccaaggagacgcacaaggactggaaggggctccgagacatcctcatgctcatcgtgcagaatgggacccccagaggtccggagtgcccgcaaaagaggtgcgcgattgattggcgttgcactgtgcacaaaagagcctattttttttctaccccaccacgacagaatgcactctaattatgaaaaaacggagaggtccagtcgaaggcaggacgactcatactgcgtccattgcatcacagatcaacttgctgaagatcataccgtctcacctgataagggtgatagatgttcaatatcacccccctgaacaggtctga

SEQ ID NO: 28890 - DNA, 211 bp, Zea mays
  Clone ID: MRT4577_126359C.1
ccccagggacaagaatttttttttttgggggggggtttaacctttaattaaacccttcgggggtaatataacccattgattccaaattcatgctggttgtagcaagggtcttctggggccgagggtgaaaacagcaccaacaactggcacagaggggcccacaaaaaaaacacagaggggcaacaacaaaaaccgggcgaacgaagtaaac

SEQ ID NO: 28891 - DNA, 548 bp, Zea mays
  unsure (1)..(548): unsure at all n locations
  Clone ID: MRT4577_12635C.1
gagagataacaggtatttttcgtctgttgtacaagctccatcggcatcgtatctttaatctttttttgaaaaagaaactggtgacttacatttgcaagtctgcacttcatgacttcatctgaccaatagagagagagagtatggaagccaatagaaatctctcagcacgtgttgaattacaaacataagaacaacaatgacaggcagtctcttgttcccgtggtactatccagaggaacaccagcttaagctgctaaacgtcgtcagccaatcctggtgttgtccctgccaaacacaagcgtcgttccccagttcaccgccacgtagaacctgttcctccagctcaccacccgcgtcaggtacgctgaccgccacatcagccagctgaggaagccagccatcgacacccccttggcatccttgttctccctgaggtcgacgagcgccttgtaccggccgacggacgccatgctgccgatgtgcttgtacacgaacggctccccgaggtcggccttgccggcgcagtgcgccttgccgncgttctgtgc

SEQ ID NO: 28892 - DNA, 259 bp, Zea mays
  Clone ID: MRT4577_126360C.1
aaccactagaacacatgtctacgatattataaatatgtatatattgttaattggaaaataaaaaaatataattatgtttcgataaatatattatttaaacaaagtctgcctatttgatagaaactgtagcagagtatggataactaactacatctgtgttactcgtgaacacacggtggcgctcatcatcctattgtaattattggcgcagcttgcattattttccttcactacttcctccagctgatcaacatttttt

SEQ ID NO: 28893 - DNA, 2265 bp, Zea mays
  unsure (1)..(2265): unsure at all n locations
  Clone ID: MRT4577_126361C.1
gccggccgggtcgggacgcgcacttcgagttgtacaggagctgcactgcacgctcctcaaattcccacgccgcatcgccacccagtgccctgctcaccgccgaacggtttcaatggccgcaagcacagcggcgccatgctacgacgcgcccgagggcgtggacgtccgcgggcggtacgaccgggagttcgcgggcatcctcacccgcgacgcgctggacttcgtggccggcctgcagcgcgagttccgcgccgccgtccgctacgccatggagcagcggcgggaggcccagcgccggtacgacgccggcgagctgccgcggttcgacccggccacgacgctcgtgcgcgagggggactggacgtgcgcgcccgtgccgccggccgtcgccgaccgcaccgtggagatcacgggccccgccgagccgcggaagatggtcatcaacgcgctcaactccggcgccaaggtcttcatggctgacttcgaggacgcgctgtcgccgacgtgggagaacctgatgcacgggcaggtgaacctgcgggacgccgtggctggcaccatcagcttccgcgacgcggcgcgcgggcggacgtacgagctcaacgaccgaaccgccaagctcttcgtccggccccgcggctggcacctccccgaggcgcacatcctcatcgacggcgagccggccattggctgcctcgtcgacttcggcctctacttcttccacaaccacgctgccttccgcgcaggccagggcgccggcttcgggccgttcttttacctgcccaagatggagcactccagggaagcgaggatatggaacggggtgttccagagagcggagaaagctgctgggatcgagctcgggagcatccgggcaacggtgctggtggagacgttgccagcggtgttccaaatgaacgagatcctgcacgagctgcgcgagcactcggcggggctcaactgcggccgctgggactacatcttcagctacgtcaagacgttccgcgcccacccggaccgcctcctccccgaccgcgccctcgtcggcatggcccagcacttcatgcgctcctactcccacctcctcatccacacctgccaccgtcgcggagtccacgccatgggcggcatggcggctcagatcccgatcaaggacgatgcggcggcgaacgaggcggcactggagctggtgcgcaaggacaagctgagggaggtgcgcgcgggccacgacggcacgtgggcggcgcacccggggctcatcccggcgatacgggaggtcttcgagggccacctcggcgggaggccgaaccagatcggcgacgccgcagggcacgagggcgccagcgtcaaggaggaggacctcatccagccgccgcggggcgcgcgcacggtggacggtctgcggctcaacgtccgcgtgggcgtgcagtacctcgcggcgtggctggccggctccggctccgtcccgctgtacaacctgatggaggacgcggctacggcggagatcagccgcgtccagaactggcagtggctgcgccacggagcggcgctggacgccggcggcgtggaggtgcgcgcgacgccagagctactcgcacgcgtcgtcgaggaggagatggcgagggtcgaggcagaggtcggccccgacaggttccgaaaggggcggtacgcggaggcgggcaggatcttcagccggcagtgcactgcgccggagctggacgacttcctcacgctggacgcgtacaacctcatcgtggcgcaccatccaggtgcgtcaccgtgcaagctctgaatacatgcatgccttttgtcggcagtggagtcagctttcaaaaataacacatcgctgtccaatgcagccatcgaaataaggacggatgaccaacaaacatgatagacatgaacagccttgtaaagcgcactgcatattctctgctctgggacttttagtcgtgcttatgatagtacagggtggtctatgtaataaactgagcttctgttgaaaaaaaaaaaaaaaaaaaaaaaaaaaaaaaaaaaaaaaaaaaaaaaaaaaaaaaaaaaaaaaaaaaaaaaaaaaaaaaaaaaaaaaaaaaaaaaaaaaaaaaaaaaaaaaaaaaaaaaaaaaaaaaaaaaaaaaaaaaaaaaaaaaaaaaaaaaaaaangggggggggccccttttaaaaatacaatttttacttccgggtgttggaaaattttattttttttttttgggccccaaaaaaaaattaccggggcggtgtttta

SEQ ID NO: 28894 - DNA, 1080 bp, Zea mays
  Clone ID: MRT4577_126362C.1
ggcacccgtccggctgggactacatcttcagctacgtcaagacgttccgcgcccacccggaccgcctcctccccgaccgcgccctcgtcggcatggcccagcacttcatgcgctcctactcccacctcctcatccacacctgccaccgtcgcggagtccacgccatgggcggcatggcggctcagatcccgatcaaggacgatgcggcggcgaacgaggcggcactggagctggtgcgcaaggacaagctgagggaggtgcgcgcgggccacgacggcacgtgggcggcgcacccggggctcatcccggcgatacgggaggtcttcgagggccacctcggcgggaggccgaaccagatcggcgacgccgcagggcacgagggtgccagcgtgaaggaggaggacctcatccagccgccgcggggcgcgcgcactgtggacggtctgcggctcaacgtccgcgtgggcgtgcagtacctcgcggcgtggctggccggctccggctccgtcccgctgtacaacctgatggaggacgcggctacggcggagatcagccgcgtccagaactggcagtggctgcgccacggagcggcgctggacgccggcggcgtggaggtgcgcgcgacgccagagctactcgcacgcgtcgtcgaggaggagatggcgagggtcgaggctgaggtcggccccgacaggttccgaaaggggcggtacgcggaggcgggcaggatcttcagccggcagtgcaccgcgccggagctggacgacttcctcacgctggacgcgtacaacctcatcgtggcgcaccatccagccatcgaaataaggacggatgaccaacaaacatgatagacatgaacagccttgtaaagcgcactgcatattctctgctctgggacttttagtcgtgcttatgatagtacagggtggtctatgtaataaactgagcttctgttgaactctcgggaaggacaactgcacaaccctgtatgagtgtaccgagactatcttttcaccctcagaactaccgctctacaacgtgtatctttctaattttataaatcaaacttatttaactttg

SEQ ID NO: 28895 - DNA, 2313 bp, Zea mays
  Clone ID: MRT4577_126363C.1
cggtccgtactatccgggggccacccacgcgtccgggccggacgcggggcgagttgtacaggagctgcactgcacgctcctcaaattcccacgccgcatcgccacccagtgccctgctcaccgccgaacggtttcaatggccgcaagcacagcggcgccatgctacgacgcgccggagggcgtggacgtccgcgggcggtacgaccgggagttcgcgggcatcctcacccgcgacgcgctggacttcgtggccggcctgcagcgcgagttccgcggcgccgtccgctacgccatggagcagcggcgggaggcccagcgccggtacgacgccggcgagctgccgcggttcgacccggccacgacgctcgtgcgcgagggggactggacgtgcgcgcccgtgccgccggccgtcgcggaccgcaccgtggagatcacgggccccgccgagccgcggaagatggtcatcaacgcgctcaactccggcgccaaggtcttcatggtaagtaagcgcgcgcgcaaacgtggctgccgtattctctctctctctctctctctctctctctctctctctttttcccgttctgagctgagaccgcgagagagagaaaaacgtggcaggctgacttcgaggacgcgctgtcgccgacgtgggagaacctgatgcacgggcaggtgaacctgcgggacgccgtggctggcaccatcagcttccgcgacgcggcgcgcgggcggacgtacgagctcaacgaccgaaccgccaagctcttcgtccggccccgcggctggcacctccccgaggcacacatcctcatcgacggcgagccggccattggctgcctcgtcgacttcggcctctacttcttccacaaccacgctgccttccgcgcaggccagggcgccggcttcgggccgttcttttacctgcccaagatggagcactccagggaagcgaggatatggaacggggtgttccagagagcggagaaagctgctgggatcgagctcgggagcatccgggcaacggtgctggtggagacgttgccagcggtgttccaaatgaacgagatcctgcacgagctgcgcgagcactcggcggggctcaactgcggccgctgggactacatcttcagctacgtcaagacgttccgcgcccacccggaccgcctcctccccgaccgcgccctcgtcggcatggcccagcacttcatgcgctcctactcccacctcctcatccacacctgccaccgtcgcggagtccacgccatgggcggcatggcggctcagatcccgatcaaggacgatgcggcggcgaacgaggcggcactggagctggtgcgcaaggacaagctgagggaggtgcgcgcgggccacgacggcacgtgggcggcgcacccggggctcatcccggcgatacgggaggtcttcgagggccacctcggcgggaggccgaaccagatcggcgacgccgcagggcacgagggtgccagcgtgaaggaggaggacctcatccagccgccgcggggcgcgcgcactgtggacggtctgcggctcaacgtccgcgtgggcgtgcagtacctcgcggcgtggctggccggctccggctccgtcccgctgtacaacctgatggaggacgcggctacggcggagatcagccgcgtccagaactggcagtggctgcgccacggagcggcgctggacgccggcggtgtggaggtgcgcgcgacgccagagctactcgcacgcgtcgtcgaggaggagatggcgagggtcgaggcagaggtcggccccgacaggttccgaaaggggcggtacgcggaggcgggcaggatcttcagccggcagtgcaccgcgccggagctggacgacttcctcacgctggacgcgtacaacctcatcgtggcgcaccatccaggtgcgtcaccgtgcaagctctgaatacatgcatgccttttgtggcagtggagtcagctttcaaaaataacacatcgctgtccaatgcagccatcgaaataaggacggatgaccaacaaacatgatagacatgaacagccttgtaaagcgcactgcatattctctgctctgggacttttagtcgtgcttatgatagtacagggtggtctatgtaataaactgagcttctgttgaactctcgggaaggacaactgcacaaccctgtatgagtgtaccgagactatcttttcaccctcagaactaccgctctacaacgtgtatctttctaattttataaatcaaacttatttaactttaaaaaaaaaaaaaaaaaaaaaaaaaaaaaaaaaaaaaaaaaaaaaa

SEQ ID NO: 28896 - DNA, 294 bp, Zea mays
  Clone ID: MRT4577_126364C.1
gaccaagccttcggttttaataccattcatcaatattcattttaattattttagccccaaattcaatttggcaccttcattatatttacttcaaaaaccacttaacttgtgcctgtggttctttggttcattgcgctagattctaatgtgtcttgtgcacacacacgcgggtttacatgtggggaacaacacagacctgtgcagcagcatcattatacacaacatcatcctccacaacaacaacatcatccaccaccaccacatcatcagcagcagcaacaacaacaacaacaa

SEQ ID NO: 28897 - DNA, 2732 bp, Zea mays
  Clone ID: MRT4577_126365C.1
atggggatggcaggtgcacccgcgtccaaccacgcggaggtcgcctgcacggggatggcatgggcgactgcggcaggtgggggaggggagtggcgacaactacgtgattgggggaggatatttcgtgaagagatggaaatgagggtgaagtccatgatcaaactcatagaaataaatgctgacactttcgcaaagaaggcagagctgtacttcaagaacaggcctgagctagcaaaccttgttgaggagacgtatagatcttaccaggcgctcgctgatcgatgtgatcggatatcaggagagctccacaagtcaaatcataccataacaactgtgtttccagaacaagtacaactctcactgcaaaatgacaatggcgacggattcccaaggggtatcacagggatcaatatcatcagaggaactagcccagcttcaaagaggacacagacacataggaggattacctctcagatgagtaaagaaaaggcacaagaagagattgagaggctccagaaggagattttggtgttgcagactgagaaagagttcttcaagtgctcatatgaatcttcactagataagtacttagatattgaacgaagggcaacagagacacaagaggaggtatggagcttgcaagagacttttaataccaacacagttatcgaagacaatgaagctcgagctttgatggctgcacgtgccctcatttcatgtgaggatacattaattaacttgcaagatcagcaaaatcgatcatgtcaagaggcaacaacagagttccaacgagtcatagacactaaaaagaagctaaaagctttcaagagtgagtgtgggcactctgagaaccaaaaggagctaagtgatcaacaacatatagtgaccagctctgcacatccatctatagagaataatggccccattctgcaagaccataggctccatctacaggaaatatgccagaagatcaaactacaatttaattcatgctcagaggcatctgtagtgcatttagcaggaatggttgatgaattcgtggataaggtgatcgcactagaaattgcagctacaactcagactgctcaaatcaatagaatgagagctgaggcagatgagctgcaaaaatgtatgaatagtttggaggaagagaaggaaggtttagttggggattccaataagttgtctgaaaggttgaggcaagttgaggaggtgctgcaaacaattcaacgaattgagaagtctgtgcacattgaaaatggaaatattcagagacaattaaccgaagcatgcaacaatcttactgattttgtggagaggttggatgtgccactaagtgaagaaacaatagattcatctgaagggtccaaaggaattgcttctgaagaagatgcagataagcctgacactctctctgacccatttcaagctgattcaggcactgtaggtgaatcgatggatggagactcattgtactcattcgatatctctagtgaggcacatgaagaagatgtagatgacaccttagggtggcagcaagtagttttgaatgggttggagggcaaggataaaatcctcttaaaagattatgcatccatccttcggaactacaaagatacaagaaagcaactttcagaaatagagaagaaaaatcaagaatatcatcttgattctatgtcaaaaacggaagagttaaagagtgtcaatgcaacaaaagatgacgaaattcactctcttaggcaaatattgagctctttacagtccaagatcaacacctatcgaatccaatttgttgaaaagtctgaagaatcatccaaagaaaacaacgatccttgtctagaagacaaagagattggtgagatagaagaatgcatgaagaattgccaaaatgaagaaccacatgcttcttcattagagaagaaattcagagaagaaattaacaaagtattagatgaaagcttggacttctggttgaggttcagtacatcatatcattatatccagaaattccaaaagacatttgataaagcaaaaccagaagtggatagacttactgatgcaaaagttctggagggcttagacactggttgtactggtcagtttgtgagaaaacaagagccaactatccttgaaaagaaactacgtgacttaagtactgatcttcaagtttggttggaaaagaatgtgttgttgcagggggagcttgagagaagatttttattgatatgcaacatacaagaggagatatctaaggtcacaacattgaatcgaaccaatgaagctcactttactccccacgcgtccgcccacgcgtccggtgaggtgagtaatatgaagcaagagaataacaaggtcaccaaagagctacaagctgggctcgagcatgtaaggggcctccaagtggaaattgggaggacagttctgaagctcagagacaatattgaactatccattgggagaagcagtcgagcacatcagaacttcagatatctatcagggaaggccggggtacctcaacgaacttccttatttggttctaggacgaaaaagacatcattattttcatgtatgcctcccattgccaaagccgatttctgacatgaggtcaagtctttttagataacattggttagagggttagctaattttttcttctattcgatatgggtggttctctatgaacatgcttaaaaaaattgatgcaaggtaaaaaaaaaaaaaaaagggcggcc

SEQ ID NO: 28898 - DNA, 231 bp, Zea mays
  Clone ID: MRT4577_126366C.1
cgcgtccgtggacacgccgatccctctcctcaggttgtatttccaggctaacatcacctcgcagggccggctatgttgttgctgcctacctgcttgctattctcgctgggaatgccagcccctccgttcattatttgactggcattctggactcagctgactaagaagatgacaatgaatagatggaactgctgctgtcccaactgacctgtaaggacattaccgatctca

SEQ ID NO: 28899 - DNA, 223 bp, Zea mays
  unsure (1)..(223): unsure at all n locations
  Clone ID: MRT4577_126367C.1
ttgactatgttattgccattttaatcggtaaaagataaatgttgcaatgaccacgtttggatgtagatattggtgaacggaatagggaattaaaatctacatccaaacgtggtcattgccacatttatattatacctantgactatgttattgccattttaatgattttttttggttttcatacgtgaaattaatcagcatggtaaggtctgatctggttccc

SEQ ID NO: 28900 - DNA, 284 bp, Zea mays
  Clone ID: MRT4577_126368C.1
acggagtcccggacctgtctagattctaccctggcccccaacattggcctgatgctgttgcgggggagcccagcgctgcgccctgggctttaccggcggcggaggcaaccacagtgaagactacatcgcgtgctagctccgacggtggtgcgtgccctgttgaccatagggcactcggagcgcgcgcagcttgtaagcgtttgatcggacatgtagggcaactatacatctgtggcaggtctacaactctccatcatcctgcgtgggagagaacatggttatgg

SEQ ID NO: 28901 - DNA, 780 bp, Zea mays
  Clone ID: MRT4577_126369C.1
cattgggtacctcgaggccggccgggctcgtcactctcggcacgctccccctcctctagatctctctccccccctcctcacacgcactcactctcgtcactgaggctagctactagctggtactggaagcctggaacacgcactgtcacttgctcgtttcaaggacctgccctgtgccaattaagtagtacgccgtcgtacggtttgctctgagctagctcttcgtgttcgcgatggcgtcggagtgggaaatggccatgggggtggagctcggcatgggaatgggcggcacgtaccaccacaacgcctccagcatcaccaccgcgccgatgatgatgagcagccatccccacagccacagcggcggcgccgccagctactccacgccgcaccaccaccattactacggcgggatgccgcccatgggcgacgccatgcgcgtcgacgacctcctcgacctctccacccccggcgccggcgcccatgagttcttccccaccgcggcgccggccactgacaaggggcaccactcgtcgggggccatgggtgagccctcacccaccgccaactcgtcggatcaccggacgtctgccctctccttcgccgatgagttctacatacccaccgaggaagctgcggagctggagtggctatccaagttcgtggacgactcctattcggacatgccggactactcgtccgacccgcatgcggcgtttgtgaaggcggctgctgctgcacttagctaaaaaaagggttctatatatgccggaggattgc

SEQ ID NO: 28902 - DNA, 321 bp, Zea mays
  Clone ID: MRT4577_12636C.1
gctctactgtcttgaccgctctgcactaatctatcatcatcaggcggagggggtaccgtgatgattcagaactttgtacatgcgtcggtggatgatggtataacataatgtctatgcacaagtaatactactacaaaccgatcaatgtatctatgtatcatctatctcaaatgctagctagtatagcactacaaacatgtctatatatatatagcatcatgctaataaataggaatataagcatgatatctaacggctgcgtaattaattccaatcatgtgtgtaatatgtgggcaaatagcaaaactttatagattccaa

SEQ ID NO: 28903 - DNA, 228 bp, Zea mays
  Clone ID: MRT4577_126370C.1
caccaaatatctattccttatacggaaggtatcttatacaccagtaccacccatttagacagcagacatcttttactatacaaacctacatactctcacacttattcactcggacacatcattcatactaaaacacctagtctatacactcgcctcactctccttttaaaaacaaaactatacacaccacaacttacgcttattatgtcacatccaaactcaacggtg

SEQ ID NO: 28904 - DNA, 533 bp, Zea mays
  Clone ID: MRT4577_126371C.1
gaaccaaacagcacccgggctccgacaggaggtagacagaatcccttgcagttgcagggtgctttaccaaatcaacaccaacaccagcaaagcggctacagaattgcaagggcaataggagatgcttactctccaattctctccataccattcaaccatgcccctctcgctgcgcagatcctctctgttccggcgtgctctgctaggaaggaagggatcttccttccacttgtgctagcagttctgaagatgccgaatccaaaagccccgcgccgcttggtggagacaaacgtcagcaggtccttgcgcagatcgccatgctccaggcgcaaatggtgcgcatcacaggcttcttggacgagcgctctgcttgcctgaccaaattcgccaaggacgccgactccgagttctacctgattgggcagaacgccatgaaagaacttgatgcggtcggtgaccaggtgagcgtctcttgcaatcaaaactcagcctactgctatccattgtttgcaatcaaactgcggtgtctagtg

SEQ ID NO: 28905 - DNA, 627 bp, Zea mays
  Clone ID: MRT4577_126372C.1
catcagatgtgttgtttgcaggatttgggcgatgatagccgattcattgaattctataatcttgtctttatgcaatataacaaaaaaacgatggatctctagaaccgttgaaacaaatgaacattgatacaggaatgggccttgagcgtatggcacgcattcttcaaaaggttccaaacaactatgagacagacttgattttcccaattatagaaaaggcagctagcatggcgttggtgtcctatgcaaaagctgatgatgccacaaagataaatctcaagataattggagatcacatgagagcagttgtttatctcatatcagatggggtaattccctcaaatatcgggagaggatatgttgttcgaaggctaataagaagagtagttcggatgggtagattgataggaataagaggcgacgggcatggaaactctgaaggtgcatttttaccttcactagctgaggtagtgatcagccttagcactgagatagattcagatgttgaatcacgacggagatcgatccttggagaacttcaaagggaagagatgcgatttattcagactttggaaagaggagaaaagttattagctgaacttctggatgaagctttattaaatgctg

SEQ ID NO: 28906 - DNA, 861 bp, Zea mays
  Clone ID: MRT4577_126373C.1
aaaaacatgtagacaggtaatcagaaaaatctagttgaaatatcttccttatcgtctccagtgatccagtctccacgggaagcgggactgagctcccctccactctcacccctccgccccacagcctccacctccgttctccatgcgcgcctagttcccttccctccacccatcaccccgaggacccaaagctcatgtcttcgatgacagtcacctcctcaccattacccttcctctcctcttcgtcctcgttaacgtgccatctccgccgagcgggcaccgccaccgctacggcagcgtcatctgcttctgaagacttcgactaccctctcgccgacccctctcttcgatggccccaccttcgcttcccgtacctccccgcgccgcgcttcccagccaccgtcgccgcggcacctccggtccccgccagaccaccccaggaagtggaggaccccgtggcgacttccggctcggcatcttcactcgtggagccgctggacgcgcgtgctcatcgcgggagggtgaaaaagctgagtaagctcgcgccactgttcaggtgttcaacgccatgatgggcgtttatgcgcgctctggccgattcgatgacgcacggcagctgcttgacacaatgcacgaccgggggatcgatcctgacctcgtcagcttcaatactctaatcaatgccaggtccaagtctggggtgtttggctgctggcgtcgcccttgacctgctttttgaagttcgacaatctgggctaaggcccagatgttatcacttacaacacgctcatcagtgcttgctcacagagttctaatctcgaagatgctgtgacagtgtttgaggagatgatagcttcggag

SEQ ID NO: 28907 - DNA, 547 bp, Zea mays
  Clone ID: MRT4577_126374C.1
cattgggtacctcgaggccggccgggccaattctctcgataaaatcttgcttcgaacaccaaactttcgcatgcgaagctacccacagacatacttgcacgattggacgcggtgaagagcgacgacgagttggtcaagcaggtcggtgttcagatcatggatgagatagtagagcacatcaaggcgcggccggacacatgtaggaggggtttccatttctacacgctcaatctggagaaggcagtatcgcatatactggaagatacaaaactcattcctagcacattgattgacgacgatgaggtcattgtcgagacaacacccgccatcaacttggagccaccacccaacgggatcatggcccaccgacggcgatcatcagctggcaactctggtccgcggaacagaatgatagtatcacatggttcagctggtccggcgaggaatccttcctatgaagcaactggagaagagggtggaattccgcgaggggccatcaataatcccgcgaacaccctaacaatttccgaaagggaggggtcccctg

SEQ ID NO: 28908 - DNA, 239 bp, Zea mays
  Clone ID: MRT4577_126375C.1
gggaaacttaattggggataaattcaggcatcatattattatgatagagtctcctgagtggttcgtctataggtaatgaactcattggtgttatttcttggacatcttggccttttaatcaaagactgtgtgctgctatttgctatgagcaaggtttctcaaaagcaaaaggtgcttggaccatttggatcacctgagttagaatctctaggtatagggcccaagtatctgcattttca

SEQ ID NO: 28909 - DNA, 303 bp, Zea mays
  Clone ID: MRT4577_126376C.1
tcgttacgcttgggaaaaggggtactctatctacaactacattagtattagtctcgaaagtgtcgaaatgttaaatagctagtgtacaatatatttgatatagaacacttatatcaataaaatagtttgaactatttactagaagggcacgcagcccttttttcaatgccaaatcgactttcctatgtataaaaataagagaaattctttgtattcgtacaaaaattaacatgaatcctatcaatttgaattttccaataatttagttatgtattttctttaatttattgaaattattaactt

SEQ ID NO: 28910 - DNA, 517 bp, Zea mays
  unsure (1)..(517): unsure at all n locations
  Clone ID: MRT4577_126377C.1
ggtatttgcccttcacaggaaatgtttcccagcccattcttctaagggaggnttctcatagacaggttaaaaatattaagacnngcaaagtcactgcatacatancgccataacagnctagtggaggggttgnnccttacattggccatactggcgagcaaattggcgtccacatgcatgtctaagtcttccggagatggtaagcacgctggaggctaacatttatttgaggcaagtaaacataacaagcactagcagattacaagccacatagttttcaggaaagcgaagataatagtttgtcttntgggggggcgaccattcagagatatgtacagaaactacaatataaagatgccagcctnatattttagaacacctttaccatattgtaagcttgnattcaacgctgtgttnagtttttagatgagtgtggaacacttgtattatcattagatgagaatggatcagagaagagtgtgcttagagctgagaagatgggactatnagaatgggt

SEQ ID NO: 28911 - DNA, 209 bp, Zea mays
  unsure (1)..(209): unsure at all n locations
  Clone ID: MRT4577_126378C.1
annngggggccaaggaaggaaaatagcaaaacatggcgggtgggtccgaaaaaaacttccattccaccgaatatcaatcgccgccctgttgaaccggccaggaaaagctcggcaaaagctagctggatttttacatggcaggcaaaaacaaattcggcagagtcccataaacaacggaacccattttttttcaggcttaagggcagggg

SEQ ID NO: 28912 - DNA, 309 bp, Zea mays
  Clone ID: MRT4577_126379C.1
tcgagccggccgggtaactattcccactgatagtgcacaaagggctggcgcccactacaccccatcaagaagccaacgtgcgcggcgacagaagcgcccatcgtggacatgaatgagatgctgacccgcgagatctagaagaatcgctactacttcggcaaggtacaagcccgccacatgcgaattgatcacaccatgagtggcacccgcactcagagggttctcatccgagaacggcccgagaatcatccagctgaattctgtgattaagaaaagcatgaacttcccgttgacagtgggtgaaatcca

SEQ ID NO: 28913 - DNA, 399 bp, Zea mays
  Clone ID: MRT4577_12637C.1
tatcaactacccacactaattttacaattttctccctacaatgactcctcgggcacatggcctacttatgctgcttgggggctctacacctgcttctactacagatcattttcccacaatgctcacaagctcctatagcttcccttcataacctcattcctctcacctaccgtatcttatatctatgaaaacccaattattcatctctataagacccatctctcaatcacagcatctatctaacctacataaccctttctcctcctacaatcatcctacctatcacagcacttacattacatgcacttattgtcacataccttcatgactaatcttctacaacaactcttgctacctcacaccgctgaactactctcagcctctgctgcttatttcatt

SEQ ID NO: 28914 - DNA, 118 bp, Zea mays
  Clone ID: MRT4577_126380C.1
ccaacgcgttcggagcgtggcctcactatccttgtagcatcccccatcgtgggcttcttatcggattcaaccgcaatggatatggacttcacctacgcgctagacgtctgcgccacag

SEQ ID NO: 28915 - DNA, 262 bp, Zea mays
  Clone ID: MRT4577_126381C.1
gtttgaagaagatggcttcaatcactcagacgcgtccgcaccaatagtctgacaccggtgacgtcatcgactctgactctcacctagcaaagatagcactgcttgcggcggccaagaagcgtgagaagagtcattatctccctgcagcctgtgcggtcgatcggcatgacgttctcgagttccgtgctctgcgttgtatactgtcctgtagttggactcagcataatacggtcatgatctgtcgtatttatcaccgggaagt

SEQ ID NO: 28916 - DNA, 836 bp, Zea mays
  Clone ID: MRT4577_126382C.1
actccctactccactgacggacgggacgggacgcggccttcttcttgccttcctctccctcctcccctcccgccgccgccgtcctccgccgcgcgaggctggttcagctactaaccgcggccggggggaggagaaaggccgcgtctttcccggctacctttcggctcgccccagctcacttgggagccggattgggatggagtcggcggccggcggcgggctgggcagcatgcgcgcggtgctcgccatcctccagtggtggggcttcaacgtcaccgtcatcatcatcaacaagtggatcttccagaagctggatttcaagttccccctgacggtgtcctgcgtgcacttcatatgctcctcgatcggggcatacgtcgccatccacgtgctcaaggcgaagccgctgattcacgtcgaccccgaggaccgctggaagaggatcttccccatgtccttcgtgttctgcatgaacatcgtgctcgggaacgtcagcctgcgctacatcccggtctccttcatgcagaccatcaaatcgttcacccctgcaaccacggttattctgcagtggttggtttggagcaagcatttcgagtggcgcatatgggcttcgctggtcccgatagtcggggggatcctcttgacctcaatgacagagctcagcttcaacgtttttggattctgtgctgccatgataggctgcctcgccacgtctaccaagaccatcttggcggagtccctgctccatggatacaaatttgacagcattaacacagtgtactacatggcacccctttgcaccatgatactggctcttccagcaatgttgcttgaag

SEQ ID NO: 28917 - DNA, 850 bp, Zea mays
  unsure (1)..(850): unsure at all n locations
  Clone ID: MRT4577_126383C.1
gccacgtgagtctgaaaaatcttaattttcagagagacctgatctaatgaatctcagattttattaaggtataggtttatttaatttctttccttgaattcttctatttcagaaaaccaaatctgaattctctttctccaaagcggccggtgctcggaataatcacttaggatttcaggaaagaatggcattttaagagttacatcatggcgtgaatcaatatagttgccagtttgttaaattagtttcataaaatgttgtgctctgaatttggaaattttccgagatttgttcattgcttagttgaactatatgaggccgtttcttgggcggtgattcctgaagcattcacaggttactataagaaagaaccatgacgtgttgatatttctatgaaatattgtattttcatataatagtgttaaagcttctctttgtctgtgaatctataggcaggtcaatacttcgtcattaatttgtacccgatttcttgtcattcatttcataaaaacatgtagttttgatgtatttggtcataactaacaattatctatccttctgaactaaactagtatcacagggtcaaatgtacagaattgttaatataatagtattatcttatttagtgtatgtgaaagggaaatgtgcccttgngccatttttaagtattttggtgattaagtgtccaacacaaatggttgtgtgttaaactatgacaaatggtggacaaagtgcaaatcaatacaaaggtatgattctagacttagtacattnggttttgtgtactaacatatttatctaagtgctagaatcagagaaaaaacaaatggattagacttggcttcagcag

SEQ ID NO: 28918 - DNA, 851 bp, Zea mays
  Clone ID: MRT4577_126384C.1
agttctcagagcggcagcttcctcccttccccttcctactctctcctactccttccccttcctactccactgacgcggccttcttcttgtcttcctctccccttccccctcccgccgccgccgccttcctccgccggggctggttcagctactaaccgcggccggggggaggagaaaggccgcctcttgtccggccacctttcggctggttcagcccacgcgggagccggattgagagatggagtcggccgccggcggcgggctgggcagcatgcgagccgtgcttgccatcctccagtggtggggcttcaacgtcaccgtcatcatcatcaacaagtggatcttccagaagctggatttcaagttccccctgacggtgtcctgcgtccacttcatatgctcctcgataggggcttacgtcgcgatccacgtgctcaaggcgaagccgctgattcaggtcgagcccgaggaccgctggaagaggatcttccccatgtcattcgtgttctgcatgaacatcgtgctcgggaatgtcagcctgcgctacatcccggtctccttcatgcagactatcaaatcgttcacccctgcaaccacagttattctgcagtggttggtttggagcaagcactttgagtggcgcatatgggcttcgctggtcccgatagatgggggaatacttctgacctcaatgacagagcttagtttcaacgttttcggtttctgtgctgccatgattggctgccttgccacgtcgacaaagaccatcttggcagagtccctgctccatggatacaaatttgacagcattaacacagtgtactacatggcaccctttgccaccatgatac

SEQ ID NO: 28919 - DNA, 653 bp, Zea mays
  Clone ID: MRT4577_126385C.1
gacgtaccacaactaatctacttcgtgagtgattctgtgcgccctcctcgtgaccccgacgtacacacaagaacatcaaggggagggtcagtgctgtcacagatcacctcattcctctgtacaatgctgagaacacgcgacgacgcaggccatgatcacgcccgcatcaccatggatcataccgttcctaacggtcatgcaacgatatggttacatcgtgaacttcccaaacatgtatgaccactcacctagcaaaattgtgctgaaactaaccggcagactacccaaaagtactgtagttacaccccggttctatgttgcgacacaggaaatttaacgctggactgcgaggttgattccatctcctcacgttggctatatgctgcttacaatctcttgcgtaattatggatatccaggacgacaaacgcaacaacgtcggagacaaagtgcgtgtcttcgtctattaactaaacgtccctcagagtttcttctattacatggtgaacccaccgatgttgtgctcactgattatctctgaatgcaatacagggcatgctttgctaatactgtaatgcgatatgtacctttgctaagactgactgctgcggaatctttatgagcaaaaaaacaaaaaaaaaggcctctaaggcc

SEQ ID NO: 28920 - DNA, 560 bp, Zea mays
  Clone ID: MRT4577_126386C.1
agccactcccgctttcctctccccgcgccaccttggcatcatcatcaccgacatatccagctgatcttcacctcccactttcccgcccctcgatcgccagccggccgaaaccatccatccatccatccatgggctccagacccgcggacgccgcagggggccaacagcagcagcaggcggaggagccctccatggcggacgtgtacggcggccacgagctgacgccgctgcagaagcacgccgccttcttcgaccggaacagggacggcatcatctacccctccgagacctaccaagggctgcgcgccatcggctgcggcgtcgtgctgtccgccgccggcaccgtcttcatcaacgtcttcctctcgtccaagacggtaccggcgaacgtgaagcccccagctttcaagttccccatctacgtgaagaccattcagcagggcaagcatgggagtgatacagacgtctacgacacccagggcaggtttgttcctgaaaagtttgaggagatattcaagaagcatgcccacactaggactgatgccctaacggacaaagag

SEQ ID NO: 28921 - DNA, 318 bp, Zea mays
  Clone ID: MRT4577_126387C.1
aacctaataaagttaatatataaaactcatatatagttcatgtataaaacttatgtataaaactaatatattgtttaaacccatatattgtaaacattagtaaagaattataaatagtttatattggctaattattgataatagttgtcttcggatattttgcagcgtgtttttaacataaaaatcaacggccttttgaaagggtaggcccttttactccataataggggacacgtcccatttaaacatgcacaaaacggggcaaaccccgtatttttatgtttcaaacctaaacaaggggaaatcttttatgcgccc

SEQ ID NO: 28922 - DNA, 196 bp, Zea mays
  unsure (1)..(196): unsure at all n locations
  Clone ID: MRT4577_126388C.1
cagaatagtttccccggggcccggnccagccaaagaacccntcgcttggctgaaagtttcacnccngnggcngccccnccagccgggcgctgcggcgccgtcgtccatggcgagagcgtgcgccggccagcctttgtgtattgcgttcgagccaatgtgatcgactgcgtgagtgagactggggttctgtgtgtca

SEQ ID NO: 28923 - DNA, 633 bp, Zea mays
  Clone ID: MRT4577_126389C.1
ccggttcgacccagcgtccgcttatgggtgcgagggttgtagcgagggttataggaacgccatagacaaactggaggacattgtccgccaatctggccagccatctggcctgagggctgttcagaacactggtgaccatactgtcgctgatgggatcactggggggcccaccactggtacattcactaattacttcaagacgtctttaatggtgactcttatggtcatactgactgaccataagactgaccatgagtcagttatggagaacattctggggatcatcttgagcatcgctttctgtgacattgactatgccatgctgggcgtccatatgaacatcacagggaagaacaaggtgaggaacatgatttgatttctgttcaggatggtgctcaagatgatggtgactatgatgggcactatcctttgtgaagacatgggggaagtgatggtctacctgtacctatacaaagacccagaggaagcagaggaacctgacgaggaagctgactttgccgctgagtctgactaccaaagtgctgaccaatgaactgatcatcagggtgacctatcatgggacctctgatgctgctgctcctactgttgctgatagtggtgctgatcggggtg

SEQ ID NO: 28924 - DNA, 498 bp, Zea mays
  Clone ID: MRT4577_12638C.1
cgtttgcggtcgggtcgcagtcgtacaaaaccttctttgctctcgttcgtggtccaagcctaaccctagccgtcaccccctttcttcctcgcacgcgaaccctcccggcagatatcagccgggcgctagggggcggagggagacgtccgtcgcgagcttcctgcgcgctcttctctcccctgtgacccggctgccgacggccggcgcgcgcgcggaaggttctcctccccgcggacccccccccataaaaggtgttgagatttatcaggaaaatacttatacaatatggctgggggtagcacagatgcagcaaccaaggagatggaggcattgcatgttgggcaaaccaaggaaacagatgagattctgaaaaaggcgtcagatagcaatggcggggctcccgaagctcagtccccaccaccaccagcagatgatgatgacgcacaagtggatggtccatctgaaggtggagcaggagcttcagcggctgcgaagaat

SEQ ID NO: 28925 - DNA, 375 bp, Zea mays
  Clone ID: MRT4577_126390C.1
attcggctcgagtggacattagagttactatcttgcgccaatgaagtctcaagagattctcagttactatgaggtcctttgtttgatgctactgcttgttaccttaatgttagcatgcttttagatgtatagttagcttgctgttggttgttaggctcattgggtactatccagattaaattctgatttttattccttgctatacatttcaccaacaaagaacaaatttgcatgcatgcatcagaccttctggacattatgaatgaatgacgctggggattctacatccttattttataatgcctcctgtacatgattcgctctcgcctcctaatgactgacaactggctaataatgcattacggttgccagcta

SEQ ID NO: 28926 - DNA, 645 bp, Zea mays
  Clone ID: MRT4577_126391C.1
atggcatacgatggcatctatcgattctatattcaagtccaatccctttctacaaaatatgatgagagatgcaagattgttggagatgtggcatctaatctaacaatggatgaggccactttccgtgattcccaggaacataggttggaaatttattacaccataattaggccgcaaaaaattgtctacatattcagagaagtgcaacagtgcacactcctttcaaagactgagtgcagtgaagaatgttcctatgccctcagtcatcaagatacaacattggatcgaacactcaaaaatgatggatcagcaaaaaagggtactattattgtctgggagtgtcccaccctttgctcaatcatagatgatgatgaaaaggttctaattacctttgccagttacaacgggaactacaacaacaagtcaccagttgcagttgtcgccgtcgcttctgcgacaactgcctatgctgtaattactaccacagatgagaaacctagagatattgttgtgacagatgattttgatatcaagagaactcaacctacaagtaattccaaaaagatcgttgctgaaactgatgtacttactggacagaatggtaaactagcgaccagattggcagaagttcttgatgaaaactaa

SEQ ID NO: 28927 - DNA, 204 bp, Zea mays
  Clone ID: MRT4577_126392C.1
gccaacatagctagactccagaagtctttaaggactggtcttctggagaaatgaattcagaagaaaactcatcaggtgcttctttttaaaactagaacttggctatattgaatgtgtattattctttagtgaaatgatgttttatgttattatgtgtgaagtaatatattgtacaagtaataaatgtattgttgagatatattg

SEQ ID NO: 28928 - DNA, 2298 bp, Zea mays
  Clone ID: MRT4577_126393C.1
ccggccgggagtgatgtcgtgtttgaccacctcctccctcgctcggctcggctcccaccttcctccgttgcctcctcttccgcggccccgtcgctgggcttggctttaccagtggcgggttcccacacgggggctagacgccgccaccgctgaccccgtctacaccgaatcccccgcgcgatttaacccctcgcctcgctcgccgcctccgcttccatacaaccgcgcactccaaacgcgcacgcgctgttcgttcctcggccgctctgtccacccccgtccttctccgcccccaacagatctccgccggccgtgcggttccttaattcgccttctccggggctgtcggatctccgcggcggctggggatgggcaactgctgcgtgacgccgaaagcagccgacgacgccggcggcggcaagaagcccaaggagccgaagcagaagaagggtaagaagccgaaccccttctcgatcgagtacaaccgctcggggcaggcgagcgcgccaaagctggtggtgctgcgggatcccacggggcgggacatcgcggcgcggtacgagctcggcgcggagctcgggcgcggcgagttcggggttacctacctctgcacagaccgcgcctcaggggaggcgctggcctgcaagtccatctccaagaagaagctccgcaccgccgtcgacctcgaggacgtgcgccgggaggtggagatcatgcgccacctccccaagcaccccaacgtcgtcacgctcagggacacgtacgaggacgacaatgccgtgcacctcgtcatggagctctgcgagggcggtgagctcttcgaccgcatcgtggcgcggggacactacactgagcgtgctgccgccttggtcttacgcactatcgttgaggtcgtgcagatgtgccataagcatggagtgatgcacagggatctcaaaccagaaaatttcttgtttgcaaacaagaaagaatcagcggcacttaaggccattgattttggcctgtctgtatttttcacaccaggcgaacggttttctgagattgttggaagtccttattacatggctccagaggtgctaaagagaaactatggcccagaggttgatgtttggagtgcaggagtgattctgtacattcttctttgtggtgtccccccattctgggcagaaacggaacagggtgttgctcaggcaatcattcgatctgtcattgatttcaaaagagatccatggccaagggtgtctgataacgccaaagaccttgtcagaggaatgctgaatccggacccaaaacgacgattgacagctcaccaagtgcttggtcacccatggttgcagaacattaagaaggctccaaatgtcaatttgggtgaaactgttaaggccagactccaacaattctctgtgatgaacaagttcaagaagcatgcacttagggttatagctgagcatctttcggtagaagaggctgctgacataaaggatatgtttgagaagatggatcttaacaaggatcaaatgcttagtttcgaggagctgaagcttggtctgcataagtttggtcaccaaatgcctgatgcagatgttcaaacactaatggaagcggcggatgctgatggaaatgggtccttgaattatggagaatttgttacattatttgttcatctaagaaagattggaaatgatgagcatctgcataaggcatttgcatacttcgaccggaaccagagtggttatattgaaattgatgaactccgtgagtcattagctgatgaccttggacaaaaccgtgaagagattatcaatgccatcatccgtgatgtagacaccgataaggatggcaagataagctacgatgagtttgcgacgatgatgaaggccggaacagactggaggaaagcatccagacagtactcgagagagcggttcacgagcctgagccttaagctgcaaaaggatggatcgctgcagatgacgagtacacggtagcccgataacaccacataggcaagttgtgaattacagatggaaaccatgtgtagatttttctggttgtttgttgacagctcttctgcttgtcctgatgttccattgctttgtattcttcgcttgcggcctgtttgaaggattaggggggattgtttatgctatgattgtatttagactgcatgatccatgcctcgctcgtttccaaagtgtactgtacaaaagaaagaggagaaagggattatgaggctctgctcatttcttaacttctgtggacccatttgaaaaaaaaaaaaaaaaaaggcccctaccc

SEQ ID NO: 28929 - DNA, 589 bp, Zea mays
  unsure (1)..(589): unsure at all n locations
  Clone ID: MRT4577_126394C.1
ccccgcgtccggtggcctgatactctttttcttgncattgaatttgggtgtggtgattgggagatggggctgtagaagataaaatgcatcttatttttttcgttgttaaatgtttttgactttttttgtgtttcaatgttgcaatgcagaaacggaacagggtgttgctcaggcaatcattcgatctgtcattgatttcaaaagagatccatggccaagggtgtctgataacgccaaagaccttgtcagaggaatgctgaatccggacccaaaacgacgattgacagctcaccaagtgcttgtcacccatggttgcagaacattaagaaggctccaaatgtcaatttgggtgaaactgttaaggccagactccaacaattctctgtgatgaacaagttcaagaagcatgcacttagggtacatttcaatctgatctgaccacaaatggtacccctttaattgtcatacttactctggaattcctcacatatttgaaaacaggttatagctgagcatctttcggtagaagaggctgctgacataaaggatatgttcgagaagatggatcttaacaaggatcaaatgctta

SEQ ID NO: 28930 - DNA, 320 bp, Zea mays
  Clone ID: MRT4577_126395C.1
cggacggtgggcgaatgctgctggctccaccactggcaatcaacacggatcagctgaggaggcaccgacgcctgatgcaccctcgaattccctggtgcagaacatctgcgactgattggtctatgggtttacagcactccgttctttttatttggctgcgcgtcatcttcgggactggtcatatgaaccgattggcatcaaagaatgatggtggtactgccacagattgggaccttcctactaatgagataatcagcttgaggaaaaggataaagaacatagaatatattgtcagtgagacaaataaatcacctctgtcg

SEQ ID NO: 28931 - DNA, 719 bp, Zea mays
  Clone ID: MRT4577_126396C.1
tgagctgaagcttggtctgcataaatttggtcaccaaatccctgcatgcagatgttcaaatactaatggaagctgcggatgctgatggaaacgggtccttggattatggagaatttgttacactatctgttcatctaagaaagattggaaatgatgagcatctgcataaggcatttgcatactttgaccggaatcagagtggttatattgaaattgatgaactccgtgagtcattagctgatgaccttggacagaatcatgaagaggttatcaatgccattatccgtgacgtagacaccgataaggatggcaagataagctacgatgagtttgcagcgatgatgaaggccggaacagactggaggaaagcgtcgagacagtattcgagagagcggttcaccagcctgagccttaagctgcaaaaggatggatcgttgcagatggagagtacgcagtagtcgataacacccataggcaagttgtgaattacagaaggaaacctgtgtagattttctggttgtttgttgacagctcttctgctcgtcctgatcttctattgctttctattcttcactcgtctgtttgaaacattgggggggattgtttgatgcccgtgattgtatttagactgcatgatccatcctccctgatttccacgcccttagggcaaagttttcttgttcaagaaaagaggggaaaatgattaggagtttgtacgc

SEQ ID NO: 28932 - DNA, 586 bp, Zea mays
  Clone ID: MRT4577_126397C.1
gtccgtaagctcggaattcggctcgagggcggatgctgatggaaacgggtccgtggattatggagaatttgttacactatctgttcatctaagaaagattggaaatgatgagcatcttcataaggcatttgcatactttgaccggaaccagagtggttatattgaaatcgatgaactccgtgagtcattagctgatgaccttggacagaatcatgaagaggttatcaatgccattatccgtgacgtagacaccgataaggttcgtacttcttgatcaatcggtttttaaatggatgctagcttgcttctcgcttcttgtttagctcatttggtgtaatggttacaagactgaactttgtggtacggactatctaaaactgtttttgttgtcttgttcctcaagatggcaagataagctacgatgagtttgcagcgatgatgaaggccggaacagactggaggaaagcgtcgagacagtattcgagagagcggttcaccagcctgagccttaagctgcaaaaggatggattcgtgcagatggagagtacgcagtagtcgataacacccataggcaagttgtgaatta

SEQ ID NO: 28933 - DNA, 855 bp, Zea mays
  Clone ID: MRT4577_126398C.1
gcacgagggcgaggccgccggtggggctcgcgcacgccgtggagaccgcgctggaggagggccgattcgctgacgtcctggacgcggccgccgggcagtggcctctgggcgaggcgcaggagctggccgttctcgcgctgcggtgctccgagatgcggcgcaaggaccggcccgacttgaacggccgtgttctcccggcgctagagcggctcaaggatgtcgcggccaaggccagagaaggcgcctttcagggtcacgcggcggcacctccgagccatttcatctgccccatacttcaggaagtgatggtcgatccatacgtcgcgtcagatggctacacctacgacggcaaggcgattgagctgtggctgagcacgaacgagacgtccccgatgaccaacctgcgtttgcccaacaagagcctgataccgaatcactcccttcgttctgcgatcatggactggaggtcgagaagcaagtgacttgtgatcgtgattcgttcagccctcgggattgcatgcttcttgatgccgcagcggtgaccgatttgtcttgcacaacgaagctgccagggttttttttttattttgttctaagaaatgtatgcgagtagtattcagatagggttttagaggttgtgcagcagctcaagcaaaaatgtaaaaaaaaaaacggcatctgatagcattacctcgctgtcttagcgaagccaaaaaaaaaaaaaaaaaaactcgagggggggcccggtggtccttttccttctttttcttttctttctctcggatggaaacaatgcatttgcataagcctgtagtcaatgtcaattgttatgatctagcatctgattccgagacg

SEQ ID NO: 28934 - DNA, 654 bp, Zea mays
  Clone ID: MRT4577_126399C.1
cgcgaggaccagtgcacgtccaactgcggcgacctctcccagagatggtaccacgtgccgcggtcgtggctgaagccgagcgggaacctgctggtggtgctggaggagtacggcggcgacctcgccggcgtcagcctcgcgacacggactacgtgaacaaggcaggcgagcgacacgcgttgcatctaactcgtacatgtgtatgcatatactccgacgtgcgagtatatatatacatcgattggtatttgtttagtgaggtgaggccatggcgaggaggagcaagcaaaccgaccatgccgtattcgtggaccgtatttatacacacgacaccgtacactacactcgcgtcatagcaatggttatactgcaaggggaaggtaaggatggcatttaagtgcagagcggagagggtgggtgcctgggtggtctccggccatcagtgcggcggcaggaccggcagctagctagctgcgccggcgcggcacacacttcgaggccaattcaattcaactgtttcaattcatgtaactggcactctggcagcgggtgttttgctgctgcttgctgtatttttttgaagacgtgaacatgaaatacaaaactgagcttgttttgtccatgaatatattttgctgtcgtaaagttgttggc

SEQ ID NO: 28935 - DNA, 558 bp, Zea mays
  Clone ID: MRT4577_12639C.1
tttttgtatccaacaatccaccgactaaaaaccaaaaatgtcgaccgaaaacgctgaagtgatctctcaaaccccagccaccgaaacaaacgtggaagaattaaagactgaagctaaaaaagttttagaacaagccgcagtcaacaacaagcgtagtctcgaagtcgctgacgaaacttccaatccagttggcgatgaaaccagtgatgctttagccgaagaaacagaaccagccaagaatggcaacaagaacaagaaacaacgtgttgccaaggaagacaatgaagacagcaacgatgtcgatgaagaagaagacgaagaagaagatgaggaaggcagtgaagctgatgccgattacgatgaacaattgtccaacggtgctgccgatgctgacgccgacgatttgaacgaagaagaagatggcccagaaggcgacgaagaagatgttggtgatgatgattagattcgtctaacctactctgacattcacttgcacaccatttgcaccattcttctttttcattcttgcattgaaattccacgctgggtgctatgaat

SEQ ID NO: 28936 - DNA, 496 bp, Zea mays
  Clone ID: MRT4577_1263C.1
ccggccgggaacagatgctagcgcggacggcgggggagggtgcgaggtggcgccaccgcagactggcgtccgcgcaccatgcccgtgactggcacgcagcacaggggcgctgccgtggacgcgatcgtctactggatggacgttctcacgtcctatgttgtcagtctaccatacggacatcggtccaagtcatatcgcatctgcagacagggcgtgctcgtagagtgtgcagcctagctgcctgtgatgggactggtgtggctcgtacgtgaaccgaaccacattagagcagcctctttatgggcgaccgggagcgtttacaagatcgtgacgccacgcgtcaagatgtcagacaagggcgaactgacacagtccagaagaaagctagaaagaatgaattgtgagacacccagaataagatgcgcagcatgccgataaaacagagcgtgcgctggagaagctaactatggaaggcgagcgctagcacaggagctgc

SEQ ID NO: 28937 - DNA, 476 bp, Zea mays
  unsure (1)..(476): unsure at all n locations
  Clone ID: MRT4577_126400C.1
tcgtagatggcgcaatggagcgtatcttatgatgataaagcctgatggcggccagaggggcctcattggtgagatcatcactccggtgtgagaagaagggtttgtatctaaaggcctcggaggttgcgcaacgtgcagaggcctgnttgctgagcagcgagacgccgcataggcggctgccagcgcttctctcagggactggtgtcacccattatttctggccctgtgggggccatggcctcgatggacaagagcgngtgcacaactggccgcaagataatgggcgcccccaacccccctggtttctgagcccggaaccatacgtggcgactttgttgtcgacattggaaggaatgtcattaatgagaagagacagtngtggagagtgctaataaggagattgccctgtggttccccgagggcccctgtttgattggcaggagcagccagcccacctggcatcttacgagaggtaa

SEQ ID NO: 28938 - DNA, 550 bp, Zea mays
  Clone ID: MRT4577_126401C.1
cctcgaggccggccgggccgggtttcaaatccccctccgactccaggctcctgcgcgactcatgaaaacccaaacgcgccagacccatggcgtcgcttactgccatcgcagcgcactcgcgccactagcgagatacataccaaatccctgagcaaggggagcccatggccgaaaacttccagctccagcgccggcaaggtgagccccgcatgcgcgtctccctggtctgacgacgcccacacggaggggcggaaaacataatcgccgagcggaaggtcgccgtcaatatggtcttctactgcctcccgctcctacccctaccagagtacaactccaacactcggcaccgcatatatccatcaaggaacaccgtgtatgtctaggaagagagagagtgcaacaagcggtgatacatggaaaaagactccgagactcatgaaaaggattacgacgccgtcaaccctcaagactcagagaccacttggactatcatgtagcagacatgcagagcgaagtgactgtcgacatacacgcctattcacatgttcta

SEQ ID NO: 28939 - DNA, 289 bp, Zea mays
  unsure (1)..(289): unsure at all n locations
  Clone ID: MRT4577_126402C.1
ccccagcgnanccggacccccgcgccgcccccacgccncccngacnggggggagcngnccaccanncaccggaaaccaggggccgcggccaagcnngcggcagccaccccncgccggcgaaggaggggaggagggngnncgancagacngngcgngaaanaaagagggaggncaancngaaggnacccaaggcccccgagaacgagcagaaggcacccgaggcaacaagngaggaaccgcggggcccccaaggaagngcgcnnncagaacgggcacacgcgaccaagaa

SEQ ID NO: 28940 - DNA, 242 bp, Zea mays
  Clone ID: MRT4577_126403C.1
atatactggaactcctgctgtctgctcattttttctggagagactttatgtaacgaacaggactgtgtcaatggggggagtggtacaaaccactctgtgtatgggcctctctatcagaaacagcaatgagactacacgtatgtcacctacagtcattaaactcatgagcacatcatcgacttactagaactaaaatatgtggataaactgtccacactatgcatcattgatcacttattcac

SEQ ID NO: 28941 - DNA, 622 bp, Zea mays
  unsure (1)..(622): unsure at all n locations
  Clone ID: MRT4577_126404C.1
agggcgtccatggtcctgggcggcgccgcgttcctggcgggcgcggccgtgggcggcgcgtcggtgaacgtctacatggtgatcctggggcgggtgctgctgggcgtcgggctcggcttcgccaaccaggccgtgccgctgtacctgtcggagatggcgccggcccggctccgcggcgcgttcagcaacgggttccagctcagcgtcggggtcggcgcgctggcggcgaacgtgatcaacttcggcacggagaagatcggcggcggctggggctggcgcgtgtcgctggcgctcgccgccgtgcccgcggggctcctcaccctcggcgcgctgttcctcccggagacgcccagcagcctggtgcagcaaggcagggaccgccgcgacgtggcgcggctgctgcagaaggtccgcggtgccggcgtcgacgtgggcgacgagctggacgacatcgtcgccgcgggtgagtctgcggccggagccggagggggcggcctgcgtcggctgctcgtggagcggcggtaccgccctcagctggtgatggcggtggcgatccctttctttcagcaggtgnacgggatcaacgcgatcgcgttctacgcgccggtgctgctgcgcacca

SEQ ID NO: 28942 - DNA, 601 bp, Zea mays
  Clone ID: MRT4577_126405C.1
aatcttgcttgtgttcgcattccttccatctatcctagacctacttagtcaccaacaagcgcgcgtgcgtgcatgcatgcaacccagcactgaatctagatggaaggaaagcaaggaagcgagcggtcgcaaggacggccggccgagcaagaaataagtgactaagaccgtgaaggacggcctccatttccccgcccgtcggatggatcgctacctacaataaagaacggctacgtacacgcagtgcgtagggaggcccgcctctacctacgctggcgtcctggatgacctacctggtcagggactggatctagctggcaacgctggctaggacagccagaagacacacatgcatccgcgccacctactgcttgctatccataccgaccaacgactagctaagctagttgctggctggaccatccatcacgcacggcggtttgccaacataaatccacccctgcttgctaagaaaacagaggagaaagaatgcatccaccggagcaagcaaggcaagcaagccaacaaagacggcaagcacctcaacaaagatagatattggaggcagatccaacctatgcatgcataggtaggaagcgag

SEQ ID NO: 28943 - DNA, 311 bp, Zea mays
  Clone ID: MRT4577_126406C.1
accttccctggccgtccctttaaagggcgaatttcatcaaattgggggccccccccgggggcccccaaaaaggggcaaaaccaaccaaaagcagggccaaaacaggggccccggggaaaaggccaaccgcggacaaatccagacaaaaaacggagccccgacaaaaaagggaaagccggggaagcccaaagaaaaaaccaacccaaaaaaaaagggggaaacccgcggggcccaaaaaagggagaaaacccaaaaaaacagggggaggaaaaaagcccccaacccgcggggaaaaacgggtgggccatggg

SEQ ID NO: 28944 - DNA, 1430 bp, Zea mays
  Clone ID: MRT4577_126407C.1
ccattgggtacctcgaggccggggagggtatagtatagcagtaggaaatagaagagactatgaaggtgaggagatcggaaccagttctagtccatgcgaccggagccgcgaccacccaagagtactacttcctctcgaacctggataggaatgtcgccgtgctcatgaaaacagtccacatcttcagcgtgtcatgtgacgatgtggcaacgctgctcagggattccctgagcagggtgctctcgcagtactaccccttcgagggtcggctggccgtacgcgaggacgggaggctcgccgtgcggaacgaccgccgcggtgtccccttcgttgacgcggtgtccgattacgagctgcaggtggtctgtgacgcaacggccccgggttctgagcttctcggtgacctcgtctacgtcagcatgcagcacgagaacgccctggaagcgccgatgctgaccgtgcaggtgaccacgttcaagtgcggcggctttgtcctcgggctcgccatgaaccactgcttggcagacggccagtccgccgccgagttcatctgctcctgggcggagaccgcgcgtggtgtggccatgtcgacgccgccgtacctcgaccgcacggtgcagcgcgccaggccgatcccgacggttgacttcgcacatgacgagttcgcagagatcgaggacgtctccggcctcgccggcacattcggcaaggagccgtgcgtttaccgctccttcactttcgacgcaggcaagctgcacaggctgaagcaagccgcaagcgagcaagggcaaggaggcaccaagagctccgtcttcgtcgcgctcacggctttcgtgtgggtatcaaggacgcgggccctgcggatgctccccgatcagaagagcaagctgctgttcgcggtggacgcccgtctgcgcgtcgacccgcccttgccgcccggcttctggggtaacgccatcatcttcgcctgctgcatctccactgccagggatctcctcagcaaaccactgtccgcggctgcccgttccatcagagaagccatcgtccgcaccgacgacgcgttcatccgttccgccgttgactacatcgagttgaacagcggtgctcgcccgtcgctaatggcaaccaccctggtcactgcttggaatcgactcaggtttcgcgcggcggacttcggatggggtgaagcaatctactcggggccggcggagctgccgcagaaggaggtggccatgtttctgcgcggcgtgagtgacagccagagcacagtgctggttattgggatgcctgtgtcatgtatgcaagcattccaagaaacggtagatctgctgtgaaatgtgtgtcttcacaagttaaaaaaaacagaagccttctgactgtatgagggaggaaaatttggtgatttatattctgcagtgatctattgtacg

SEQ ID NO: 28945 - DNA, 636 bp, Zea mays
  Clone ID: MRT4577_126408C.1
cctccctcgagtttttttttttttttttttttttttttttttttttttttttttttttttttttttttttttttttttttttttttttttttggggcctaagccctttttttaaacgggggcaaaatccctttccttaaagggggccccgaaaaaaaaacaaccccccggaacaaaacggccggggagggcctttaaggggccccccaaccccgttgtaaaaaaacaccccttttgggttccccaaaaaaaaaaaaaaaattttttttttgaaagaccaaaatctgcccaatttttccgatatttgttcattgggaaaaaggaaaaaattttgggggggggtttttcgggggagggcccggcccccctcaaaggggttacccggggtttggacaaacccccaacttttttaaaaaatttttttggaggcggaacccgttggggtttgcccaaaatttttcctaaacgggaaagccgccctttggcttgatttcccaaaaccgggtgggttcccccggggggttttttgaaaggggttttcccaaccccccccacggttttaagggtaaaaatttttttgggggccccaaaattttgaaaaaaaagttaagggggctttttttttataggggctccc

SEQ ID NO: 28946 - DNA, 1067 bp, Zea mays
  Clone ID: MRT4577_126409C.1
ccggccgggacacagttcgatcgagcccaaccgaaccaaatctctagcagacgggaacctgggaacctgaaccctcaaaacccgccccttggcctcccataccttccgcgccgaacacccgccatcgccaaaactgacggctcccccttcgtttgtgcaaaattggtgggtcggaacgattcctaaccagattgcttctttaatttatataaattttgattagctggaacaatttcgaatgtaatccgacgtaaacgaacaaggccttatgtgattggactgaaggccttttgtgattggactgaagtgggattcatatatcaggtgtttggattcttctctttcctctgctggtgaggacgtcggtcttcttctttttgtgctgtttcccccctttatcttctcattcagcgatcttcaaattcaatatgttgtctgtcggattggcgctctagtctggtgggtttgctttcagatttgccgagtatcaatccaggtccccattcggtggtggctgaagctcggtttctccatggcgctccgtgcagcttcatgaatccatgttctcaagtgtatttgatcatgattctataacaaccatcttatattactaatctgcatgagtttttttacatgttggtggtccaagctgaaaaaattaacttaggacaaagttagattgtcttttacatttgtgattggaaggagtaggctttttcattatctagtggcagttataaacagttgttgcgctcgtgcagcttcaaataattttgggatgttgccatgttaaggtattagcctttttgttgtttcagtatactagcttcctaaaggatcgatgtcggctatctccaatcagaagaaacgcaccttggaagcccttcagcaacaatatactgctgcaaaagctaagaaattgcaagatgaacaggttaagagtcagaagaagagcaattttaatacccctaagcctaaatttgatgcaccaaggggaagcaaaggtctagtaatcactcctcgaagaacatatgcccagccttcttctcataaagatgtagcatttt

SEQ ID NO: 28947 - DNA, 137 bp, Zea mays
  Clone ID: MRT4577_12640C.1
taggattaagtggaacagaactgctgctcgtaggcagaaaccctagtgctactgcaagtaaagggccatggctcctatcatggtcacgcatattaagctgggaccccactcgcaacaattattacctgggttgaaat

SEQ ID NO: 28948 - DNA, 2124 bp, Zea mays
  unsure (1)..(2124): unsure at all n locations
  Clone ID: MRT4577_126410C.1
gatcccctgcttccttctcgcacctggggatctactctccgcacctgcggatctaccccccggggaaaaattcggcacgacgacccaagatacccatgcgccaccataaagcccggcgcctgtgtcgtgtgagggagcgtctgagctcgccagaaaagaccctgacagtccgacacccgcaagccacaaagtgcagcctcgttgctacaggaatgctgagaaatgtctgaccttgccggaaagcgcaacctgcgcagtggccgcaactgccaccgcaagcacgtcgaggacgggtaggttcatcggtctcgtcgccgggttttcaggtaaagtcaggtcaggccaactctgtcgaagaaggaacatcgaagaaaggaaggaggtgggcggcaatggaggatgcgatggcggcggacgggaagagcgtgctgcaggggcggtacgagctggggcgggtgctggggcacggcaacttcgggcgggtgcacgcggcgcgggacctgcgcacgggccgcagcgtcgcggtcaaggtggtggccaaggacaagctggagcgcgcgggcatggcggagcagatcaagcgggagatcgccgtcatgaagatggtgtcccaccccaacatcgtggagctgcacgaggtgatggccacccgctccaagatctacctcgcgctcgagctcgtccgcggcggggagctcttctcccgcatcgcgcgcgcggggcgggtccgggaggacgtggcgcgctgttacttccggcagctcgtcgccgcggtcgacttctgccacggccgcggggtgttccaccgagacctgaagctcgagaacctgctcctcgacgaggtaggcaacctcaaagtggcggactttgggctcagcgcgctcgccgggcacgcgcgctccgacgggctgctccataccgcctgtggcacgccgtcatacgtcgcccccgaggtgctcggcgggaagggctacgacggcgccaaggcggacctctggtcctgtggcgtcatcctctacgtgctcctcgttggcagcttgccattccacgaggacaacctcatggtcatgtaccggaagatgcagcgcggcgagttcctctgcccgccgtgggtctcagcggacgcccggaagctcatcggcgagctgctcgaccccgacccgagcacgcgcatcaccgtcgctcgcctcgtcgagacgccgtggtaccggaagccgttgcccgtcctgccgccgctcaacctcaaggagccaaccccggacgcgcgccgcgccacctctgacaaggaagagcccgaggtgctgaacgcgttccacctcatctctttctcggagggcttcgacctgtccccgctcttcgaccagggccgtggcggcggcgtagggaggtctagcgcgggcggcatccgtttcgtgacgcgcgaggccgccagcagcgtggtctcccgtctggagtcgctggtcaccggccgcggagccaacatgcgcgtgacaaagagcggctcgcggggcgttcgtttggaggccgtgtcgcgcgggcgctcgggggcgcggctggcagtggccgcggagatcttcagcgtggcgccgtcggtgctcctggtggacgtgaagaaggacggcggcgacacgatggagtaccggtcgttctgtagcgaggagctccggccggcgctcaaggacatcgtctgggcctccagccaggacacaccgggcgccgcttgatgtcgtcgctgtcgctcctgccaccattattgtccttgcccatcaattgctgttggtgtccgtgtagggggggtcgtgctcgtgcattattgtttggtgacgaagtgatgtttgtttgtcgtttgccactctcgtagttggtttctgctgtggtgcagcggctgctggcagttgcagttgggctgttgcccgcggggcgcgagcaaagcagaatcagcgggaactagcattcgtatcctgcatgcacgcccataccgtgtcagctctgaagtgggaagaactgtaacaagtagtagtacgaatgtaccagggtgatgtgctttcgagtcacttgtgtatatattcatttttttatcaaaaaaaaaaaaaaaaaactcggaagtcttctagaaaannccgg

SEQ ID NO: 28949 - DNA, 493 bp, Zea mays
  Clone ID: MRT4577_126411C.1
gatccgttcgcccatgggttcgacaggagcgagggatggttcagtctctccttgacggggcgcagcgccgttgttgccgccagcagcaggatcaccgtgcgctagaagatgtgcgagccgtccagcttatccgtggcgatcaagagacaccccttgtcgggctccgctagagggtgcgcccacctgtcgccgccagtctgcaccgccggcagctgctccttgaagtagagctgcgcgcggatcgagcgccagtcgggaccgatgggcggtggcgcggcgccgtcctccggcgccccccgcgcgctgatgctgccgcagcaggcacggcggcggctgctgccaaggagctgcagacaaggcttaggctttgcgaagccgggggcggtgggcggcagcaccgccgtgctcctgctggcggacgatgctttggaggtcaggaagcatgacgtcgtttccatgacagcgagcaaaggattctgcttcaagtccccga

SEQ ID NO: 28950 - DNA, 1667 bp, Zea mays
  unsure (1)..(1667): unsure at all n locations
  Clone ID: MRT4577_126412C.1
gggaagcgagagccgagcaagagaccggatgctttaattcgaacgcggttgcctcctccctcgagcccttctccttccttctttccttgcttcctccccccacagccacagtggcatatcgcatcacgccaaagcccatccgccggccgtagatcggctccggcaaccggcttcgaccgcggcctcccctctgaggattttcgacctagaggttccccatggcatcagttacttatattgatgatagccatgctgaggttattgatcctccaaagaatgaggaaatgctggatgccactgaacttgttggtgatcatattcagaattcaccaaaaccaaatgtggcaagctatggcaacgtgcgtgagctactggaatgccctgtgtgtttgagtgccatgtatcctccaattcatcagtgctccaacggacatactctgtgttctggatgcaagccaagggttcataatcgctgtccaacatgcaggcatgaactgggtaacataagatgccttgctctggaaaaggtggctgcatcactagagcttccatgcaagtaccagaactttgggtgtttgggcatatatccttactattgcaagcttaaacacgaatcacaatgccaatacagaccatatacttgtccatatgctggatctgaatgcacggttgctggtgatattccgtatctagtaaatcacttgaaagatgaccataaggtcgacatgcacaatggaagcaccttcaatcatcgttatgtcaagtcaaatcctcatgaagtcgagaatgctacctggatgctcacggttttcagctgcttcggccagtacttctgcctgcacttcgaggctttccagctgggcatggcgcccgtgtacatcgccttcctccggttcatgggggacgacgctgaggccaagaactacagctacagcctggaggtcgggggcagcggccgcaagatgacatggcagggcgtgcctcggagcatcagagacagccaccggaaggtccgggacagctacgacgggctcatcatccagcgcaacatggcgctcttcttctcgggtggcgacaggaaggagctcaagctgcgggtcaccgggaggatctggaaggagcagtgagtcgcgtgcatgcagtgcaggtgcaggcagcagctcgacgcatgcggcgttgcgtgtgttccttctccggtgttaccatgacctgaagcatggaatccaggaaccttgtagggtggtgtaggtggtagttggaannntctttgagtcgtgggtggttcttgtgtcgttgtgtggtagtggtaccgactgatttagagaactggaggcaattctctcctttgctttgaacctgtcgagagctggtcatgatgggcacggctgtggactccatgaaatgtaaatgatgtatcccggctcactctgtctgtggatcagactcgctctctatcggcggaccacaattgttcctgagtttggccaatgagttaggtcccaaccattctctgctccagctggtacacgtagttttagggtccgtttggtaaagctacagctcttacttctttagctctagatcctgatcctcctgattctcctagaaaatcagaatcannnnnaaaaccgtttggcaagtaaacagattcttgtcttcnnnnnngg

SEQ ID NO: 28951 - DNA, 422 bp, Zea mays
  unsure (1)..(422): unsure at all n locations
  Clone ID: MRT4577_126413C.1
aatatacacagccagatgttttgaaagaatggacctgttctacgatttggatctactacatgacctattttatacacaggtttggaggccggactccatttccggcttccactttggtccctgcccagaccaccagctttcanaatttctggccggagatggggaatgtccagaccctgacagaagctgaacaagaggggcttcattttcanacactcnngctttcctgccccttccgggggggccgatcagaaactcaccttttttgaagttcaggtaaccctggttaaggacaaccttttnngtgccnaagaaaacattttgcctgaaaaaaaagcntgccgcccaatttatcggtccgtcttttcttattcctgctgccnacttttggatgcctaaaatttggcnctttctggcttcct

SEQ ID NO: 28952 - DNA, 199 bp, Zea mays
  Clone ID: MRT4577_126414C.1
attcggctcgagccagaacgagattttgaatatacgaccatcgtccatgtttaatggaaggtttctttcaagacaagcatgggatcagcacggattgaacaaacgtaggcgggtctcaaaacgaaaaaacatgtcatctagcaagaggtaccagagaaatatttgggtagggacaggtatccaaaataacaaccactga

SEQ ID NO: 28953 - DNA, 193 bp, Zea mays
  Clone ID: MRT4577_126416C.1
tacgagagtcgatcgtcagagtgatcaagctaatcacatcgaatactgagacatggctgatcatcaacataatagtgagagctgatatcaagattgcactcgctgtgtgactcagattgcgagagtaaagcactgactaattgacagcagagtactatctcagaatgacatcaggtcatgagaggcgcacata

SEQ ID NO: 28954 - DNA, 607 bp, Zea mays
  Clone ID: MRT4577_126417C.1
gtttctcaccgaaatcccattcaaatccctcggaaaccctcgcggacagcgcgccgcgccggatcggaccgcctgccggagatggaggcggcgcgggattcgatggcgaccctcctcgacgccggcatcttcgactccgcccagactctcggatgctttcttgtgtcttctggtggtgccagtaacgaggccagcatatccatgaaggcggaaagcttggtcctgcacggtgatgcgttgtatggggagaaagaatttcggagggcattgaatgtctacaagcaagctatgcaatgtagcaaaagtatccccagacaagcaacaagtactaccagaatctcagtttccagcaccggccggtcaccttctccaaattcttcaaatgttatgccgttcaatgaaaatgaggtgaagtgtaaaatagctatttgccattctgctttacatgagcatcgtgaagcactccaagagatggaagggattccttctaaactgagaagtctaaaaatgaatctgatgttaggaaagctttatcggatatccagaaataaccgtgcagctgccatatgttataaagagtgtttgaggcaatgcccttatgtatttg

SEQ ID NO: 28955 - DNA, 209 bp, Zea mays
  Clone ID: MRT4577_126418C.1
gagacacgttcgaagacattgatcggctactctggaggtgccagtgagcaagctatgaggtcagccgccaagaagagctcgagaggcaatggccaccgcacggaaggatcctaagcaggttgataaagtcaacctgaaacccaacgagtctcacaaaggggtagtacggcatgcaagagtctgtgccgacctctgcggatcgcatatcg

SEQ ID NO: 28956 - DNA, 807 bp, Zea mays
  unsure (1)..(807): unsure at all n locations
  Clone ID: MRT4577_126419C.1
atttcagaccaaaaaggtgagaacgcaaaagtaagaaacaaaggaataggaagagtcacacaaaaggaataggaagagtcacagaatctctgcgcacctggatcatcggacaaaaaaaagatggacattacaccactatcacaagttcgaccaggggtctaccactatatcatttgtgttcggatatcaagaatttgggaatttcatggcaaaaatgatgatgatccaatcaaacatttggatcttgtgattattgatcaacaggggactgcgatgtacgctgaagttcctcaagaagctatatctacacttcaaccacaactacaggaaagcatgattttaatcatgagaaaaatttatgttgacaatgcaaagctgtcctacaaacctgtgcatggaaagtatatgatcaggctacatccaaagactttgcttgagaaagtaaatgaggatccacaagattttccaaaatatacattccatctaacaccattcccagaactaccccaacttgaaggaaacaatgagtatttcatcgatgtcattggacgcgttacagctctttctgatgcaacaccatttcagactagcagtggattagttcgcatgaaaaggctgatccaccttgtggatctaagggaaaataaaattgaggtatcactatggggaccaagagcagaggaattcccaggacaagaagtctttanagccagtgaaatgaatcatgtaattggttatatttgttgggacatcagtcaaatccctatcngtggatcaccacctttttctaagtggcacagcttgcat

SEQ ID NO: 28957 - DNA, 431 bp, Zea mays
  unsure (1)..(431): unsure at all n locations
  Clone ID: MRT4577_12641C.1
cccgcatnttttttgtggtttttaatgggaatctggcctccgaacaagttattacaaaaaaaaactccacaggagcaccaaatagaatctgtggaacactacacatttcttgaatacaaccagcactaggctggtgtaaagaattatggtatcacaccatgtatgtttagtatacagatgagaaaacccaaccaggttgttgaggttaccggggagggggaaatgtatgacgcacacaccacgaaagttaccacacaggatggaaaaaaacaacagggatgcacagggttgattacagtatgcacaagtccctcggtgttgctgtaaacaaagaacattgtcgctaggttgttctaactgaaaggatctcaagctgtgcccaccagagtgaggaaaaccggggacggagcagtctcaggcgaaaatgacag

SEQ ID NO: 28958 - DNA, 533 bp, Zea mays
  Clone ID: MRT4577_126420C.1
ccggccgggaggacaccatcgggtacccataaacaacaagactgacagcgaggatgatgccatagctgcgtaatatcgtcgcgctgtttctcgagttcacgggcatagacgccgatcccgcggttagtggtctgccattaccgggagcatctactgcgacatctgatgcgtcgtcttctagacaaaggttggccacgccatccaaagcgagatcgcggacaaggagagccaccacttcgagtattgcgacgtctagccacaacgcggatcgtgaccaatgtccccgaatattgggacaggatggagatcagctggagagcaccaacattagatctcggacaggtcgactgctccatagaccgagggagagtggcggaaagatacgaaactcatggaactgatggacagtcacgatgacgacatatgacaggatcaattagagcagagtccgctacaggaatgccatcagcttcatgcggaaagagaccgtccccaactgctgctaactactaaccgcctaataactctacaac

SEQ ID NO: 28959 - DNA, 1177 bp, Zea mays
  Clone ID: MRT4577_126421C.1
aattcggcacgaggtttatacatatgtttcaatggagcaacgggcatttaccttagatccacaaggtggatcagccttttcatgcgaactaatccactgctagtctgaaatggtgttgcatcagaaagagctgtaatgcgtccaatgacatctgcgtgttgttgttacaacaatattaatttggcaaagtgtttattatccttttaaaaataggaaaatggattgaaactaacagtaccgatgaaatactcattgtttccttcaagttggggtagttctgggaatggtgttagatggaatgtatattttggaaaatcttgtggatcctcatttactttctcaagcaaagtctttggatgtagcctgatcatatactttccatgcacaggtttgtaggacagctttgcattgtcaacataaatttttctcatgattaaaatcatgctttcctgtagttgtggttgaagtgtagatatagcttcttgaggaacttcagcgtacatcgcagtcccctgtaaagttaaattgtttagatttaagttgtgctaaatgataagacaattttatgcatattaggattgttagacaatttaaatggggcttgcagcccctgatagctattactaaagtagctgatcctagatgctatataggattgcactacctgctatacctgacagagcttcgttacctatcctcttgtaggagaaggatggaaagcaacctatagattatagtaattataaattatagtaataatttgacaagaccaagaagaatacatatacctgttgatcaataatcacaagatccaaatgtttgattggatcatcatcatttttgccatgaaattcccaaattcttgatatccgaacacaaatgatatagtggtagacccctggtcgaacttgtgatagtggtgtaatgtccatctgcaaatacaatttgttcaaaatagtatcaatgtatgttgccatggctctcaatagattgtattacttctctatacacaatattttctgtcattgttccacatgaaccgtcatcattttctatcaatattttgagccctttcttttctgtaactcgtgacacagctacatatagttgaccatgtgtaaacacttttttctttaaatataaccctacatttgatagtggtttgcccttgactttt

SEQ ID NO: 28960 - DNA, 842 bp, Zea mays
  unsure (1)..(842): unsure at all n locations
  Clone ID: MRT4577_126422C.1
ggtaccctnccgggccggccggggttggcttggaccctgccctgattgacgcctcgggtgaccccacgcgccagcaccctgagcaacacactgttggcgctcccgcctaccttcactctgagggaaaggccacgcttcaggatgcctatctctcagaggaagatgacttccccaccgaggaggagctcgctacccttcctcgtgtccctgccaggatcccatggaagatcttcactattgcctttgtcgaattggttgagcgcatgagttactacggtaccgttgccgtctactccaactacatcgccaagcccctcacgactcccactggtgctgccaccaaccccgacgatgcgcaggcccagcctggtgccctgggcatgggcaagcaagttgccttcagcttgactaccttcaacgccttctgggtctacgtctgcccccttctcggtgcctggattgccgacacctacctcggtcgtttcaagactatcctctactctgtcctcgttgctgaagtcggtcacgttatcctcgtcgcttccgccgccccctcggtcctcaagaaccccgacactgctctcggtgtcttcattctcggtcttatcgtcatgggtctcggaactggaactttcaagcccaacattgctcccctcattgccgagcagattcctcaggagaagatgcgtgttgagacccgtggcaccactcgcgtcattgttgaccctgccgttaccaccacccgcatctacaactggttctacttcttcatcaacattggtgcgctcgttggtcagatcagcatggtttacgccgagcgatacggttggtttctggttggc

SEQ ID NO: 28961 - DNA, 444 bp, Zea mays
  unsure (1)..(444): unsure at all n locations
  Clone ID: MRT4577_126423C.1
cgcccttagcgaaaacggggggggggggggggcncatcaaacacaacaggtgggggggctcgtgctacctgtgatcaaccaagtngctctggccaacctttctccctacttctcagcaacaacactttcttgccttcaacctattgtttacactgaaccctaaataatatggttatgaacggggcttnccattcanccngctagnctctgcctactctggagggcggcaccttcttcccttcaaccctttggccgncctgagccccgctgcttatttgcggcggccncctcctcttccatttatgccgctcgctgcngcnggccgtgcttccttctcggcacatcccccgttgctgcctttctcctcttcttttgcggctgtccccgtacccctcttgcccctcccccccttggtgcccttcgcccctcttgcttttgccctcc

SEQ ID NO: 28962 - DNA, 549 bp, Zea mays
  unsure (1)..(549): unsure at all n locations
  Clone ID: MRT4577_126424C.1
ctgcggtctggcgtctgccctggtggggcgggggccgtgcccccgcctccgcctccgccccggcnnaaagcgntacacggcgctgggaaggctgcgaccgcgagttctaccagttcagcgaccagctgcgcctgcagacggccgccttctcgggcctctccctcggcgactccgtgtggggggccggcggccggcgcatcaccagcaacgacgtcctcttcgccgcctccgcgtcgcccgccggcgccgcctngagcagcgccgtcgtcgggctcacgctcaacgacggagggcccggcctcattggctccgggaagctggccttcggcggcgccggctccggcggcgcctnggccggccggtgcttcggcggcctcctgcccntctccgtctgcttgaccgtgtgcatctccttgcttctgcttcttgggnctcggcggcggctgcgccgtgggcttccgcttcaactccggcgtgctggcggttcgcctggtggggagctacgggttcgtccgcggcggcggcggcggtgataccatcaacaacaaa

SEQ ID NO: 28963 - DNA, 276 bp, Zea mays
  Clone ID: MRT4577_126425C.1
gggaacggaaaaccacaggaccttgaaagggcgttaataacgggggttaaaggggcccggaccttttaggttgttacccgagcaagggaacaaagggggggggaaaggggcccaaaaaagcaaacaactctttggaaccccggttccaacacccaaacatttaaaacgctaggaccggccttggcctcaattgaaggccggggaaaaaatgggaagggaacaaaccaaaatctccggggtgtccgccccacgggcaatgggacccggcccagggcg

SEQ ID NO: 28964 - DNA, 590 bp, Zea mays
  unsure (1)..(590): unsure at all n locations
  Clone ID: MRT4577_126426C.1
ccggcgggtcctgtggagcagnacaatcttgagccatgaagctgctgaggagagccgggtccctctcgagattttattccctgaagttgctcccaaagtgaaagccacagctgcccctgcaggagtgcctttacatcctcaggaccttgagtttaccaaattaccaaatggcttagtgattgcttctctggaaaactatgctcctgcatcaagaattggtttgtttattaaagcaggcagtagatatgaggactccaaccacttaggaacctctcatttgcttcgtcttgcatccagtttgactacaaaaggagcttcatccttcaagataacccgtggaattgaagcagttggtggtaaattaagtgtgacttcaaccagggaaaatatggcctacactgtggaatgcctgcgggatgatgttgatattctaatggagttcctgctcaatgtcaccacatcaccagaatttcgtcgttgggaagtggctgcccttcagtctcagctaaggattgacaaagctgtggcttttcagaacccacaggctcatgtccttgaaaatttgcatgctgcagcttaccgaaatgcct

SEQ ID NO: 28965 - DNA, 414 bp, Zea mays
  Clone ID: MRT4577_126427C.1
atctttgtgctgacaagcgacgcataccgaggaagcagcgggtgggctttgatgatgttcagggcatagatgaagccaaggaggagcttgtcgagatagtgagctgtctgcatggttcactgaattataagacgcttggagcaaaattgcccaggggtgttctgcttgttggccctcctggaactgggaagactctgctagcaagggcagatgcaggagaggctggaattccgctcttctctgtttctgctagggaatgtgttgaactttttgctggacgaggcgcagctcgggtaagggatttgtccaaggaggccaaagaagctgccccgtcaatcatttttatcgatgaacttgatgccgagggtggaagtcgaggtagaagatttaatgatgagagggaccaaactctaa

SEQ ID NO: 28966 - DNA, 345 bp, Zea mays
  unsure (1)..(345): unsure at all n locations
  Clone ID: MRT4577_126428C.1
ttttatttagctgcagccatcgctttccgcatatccgcttgttattcctgagttccattacgcaatgtataacataggtgaggaagcttgggaactgtatcatcagtctgatttccctgggagtgcaatcctgctgtangatgaaaaaaaaagccagattcaggccgtggcatgattcttttaagactccatcatttagcatcttttcgtttatggcagcgcggcgagcttgagtagctgaacaacagaacaaggcacctgcatctgcatgggttctgctcgcttgtgccaatttttgttccccagttgccgtgagaacaaactataatatcttatattcagaac

SEQ ID NO: 28967 - DNA, 454 bp, Zea mays
  unsure (1)..(454): unsure at all n locations
  Clone ID: MRT4577_126429C.1
accttattaaattcaatgtcttttcccaaggttatgttcctttacaaaaaattagggggggggcaccctttannctagatacccaaagccaaaacattctcaaaaacaaatggagcccaccacttcagatccccacagtaattttgaatatacaccccctactgagcgcgccaaatgcagacaccctcttacaaataacattgcaaaacacgtgaaaagccaatgacgtagaaaaaatttgaaacacctaaagagtgcactcacctgtatgccagcggtgcataagaacgcaccgatggtctccatataataacccatcatacttcaatcctcatctatcgccattccctttataaaaaataaacaacagatattccccatggaatgaaaactctacaacactaccactaagaagggtttggttaaacctgccctttccccctctcgaaaaaca

SEQ ID NO: 28968 - DNA, 338 bp, Zea mays
  unsure (1)..(338): unsure at all n locations
  Clone ID: MRT4577_12642C.1
gggcctaggggccttttttttttttttttttacatatanaacaacaaaaacccaccccttatactacacaacaccatattacaaacattcacatnaattcccacacatccatcaaaaacccataaatcctactaaaatcttaaccaaacaaacacctactaatactaacatcatcttcatccccctatcctatccacattccacacctaaaaacaactccacaacacactctctcttacaacatcctaacatcccaccatcttcatctcctcacaccaacccccacacctctcaccctatttttacctatttccaaaaccccatccccaatcatccac

SEQ ID NO: 28969 - DNA, 214 bp, Zea mays
  Clone ID: MRT4577_126430C.1
atccacatgcggttgtaccattgttttttgtttcttgaacacaactgtttcttgtttcccgcgcaaccacgagtcacggacattccgtgccaacacctggaaggacagaaccattcatgggcaacggccgagacacttgttcacccatatacaccaccagcgtttacgaccgttggcttaataacgcacgttaaaacggggcaccattaaaggg

SEQ ID NO: 28970 - DNA, 264 bp, Zea mays
  Clone ID: MRT4577_126431C.1
ctagcggaggggggcttttagaattgttttatggtttactgacaaacagaggggcactgcattagcccgggcatgtttaccattaggtgtgcacacacccaaagaccggggacattcatcagcatctgcgctgttgtccgtatataaaaaaccctaacgcaaggtgggcgctctttatttgaattaaggggacggataggggtcttatacaataacgctgagggagtaggtgtccctactcgcaggctagaggaagtttttttt

SEQ ID NO: 28971 - DNA, 369 bp, Zea mays
  Clone ID: MRT4577_126432C.1
gttacttggaaggcactgataataccactgttgctgatgctcacgagctgaaggtgatacttgagcacatcgtggagaggatatcctgcatctctgacgctgctcgtactgatcgtccatgacagatcacagattactcgtatatcgaggacgctcttgctgctaaagcaacacacacacttaagcaccttgggctcactcatatatcgtgcttgtgtgctagtgaaatcggacacgtcgaaatcgcagaatcctgtcctttttgcgcatatcgaattcatccatatactatgaggacgatgcagacattggtgatccttctcaagaaggtgctgatttcctgaggtatgctcatgacttgccttggta

SEQ ID NO: 28972 - DNA, 376 bp, Zea mays
  Clone ID: MRT4577_126433C.1
attcggctcgagactgcctctaccggcatggtgactgtggcccttataggcccgattcaggagccgatcttgggattaaccgagctcgcagcgtaacgcagtcttcgtggcgcgtcatggcgcctctccacatgcacttgaggctgcagatgtttcccgctctctccttcgacatgctctaggactacgattatataggagtatgatttgatggctattatggtgacggtctcttacgccggttatagctcctgccagagatgataagaggtgggctgcccagcgccgtaatggtcgctctgttgatgatgctgatgatatgcatcgctggcctcgtggatattgatttcgtcgaccaccatttggagggcggtat

SEQ ID NO: 28973 - DNA, 549 bp, Zea mays
  Clone ID: MRT4577_126434C.1
attgtgatcattggcagggtgatggtttttgcattatcggttctttagcgtgtcgactgtatattttgttgaaccatgtaagctgtcgtcttctctcagtgcaagctttgtgggagagatggaacaattgtgatgattcatgggctttcattcaagatttttgaagatctatctagaacttccaccaatagtccaaccattacaaatggaagaggatctagagcaactgaaagtttttgaaaacagctatcggatgaaggtgatcaaagtggagcaaaatgcccgtggtgtggatgcacctgaggtgcattgagaaaatcgaagcgctgacgtgagcgagaaatatccagtagaaaatgatggcagagcgagtgctttgcattgctatcagtgtaggcttgataggagacttttggttgtgatatcttattttctaaatagtatgataccagataggggggccgtaagggcgccttttgctctagtattaggctgtctccagcaacgtctcctaaatttcgtcctttaaagtaatattctttatcattt

SEQ ID NO: 28974 - DNA, 395 bp, Zea mays
  Clone ID: MRT4577_126435C.1
actactaatccgcggctgactgagtcttatgcccagccacaccgagtgcccgtgccaacagttcgcatccaagcccagtgctatctgcatggaacctgcggtgctggcagcagcctgatcctgggccagtgcgtcgagctgctgatgcatcagcgcagaccgactgcgacgccctactgctctgctcagtgccagtcgctgcagctgcagtgttgccagcagctcaggcaggtggagccgcagcacctggaccaggctatcttcgaggttgtcctccaggacattctgcagcatgagacgaacagcagtcaggtcgcggcgctgttgacggatcacatagcgcatgatctgacggctatgtgcggtctgatcagccgactgcatgccactacgct

SEQ ID NO: 28975 - DNA, 288 bp, Zea mays
  Clone ID: MRT4577_126436C.1
taatattttttgttctaaaaaaaaaaaaaaaaaaaaaaacaaaacatttcttactccattcaagggtaaagaaacttatcttcaaaagacaaacctaatttaacttcactctcaaatttatttacactgaccttactggcaaaacttttccactgccaaaactattacatctccaaactttcccactttaatcagcttgcctattaccccagctgccctaaccactataatttccaaacagattccccttctcaatcttactaaaactgaccttctaatagatacata

SEQ ID NO: 28976 - DNA, 525 bp, Zea mays
  Clone ID: MRT4577_126437C.1
agcagtggtaacaacgcagagtacttttttttttttttttttttttttttttttcttttttttttttttttttttttttttttttttttttttttttttttttttttttgttgccccccaaacataaagcccccctaaaaataaaaacgggccctctagcaaatcccacagggaaaagttataggggggccagcttggccgggggggcatttcccagggggagcaaaaaagggaaacatccccccgctgggaaagccgggggcgcatcacctccctacttgggggctcgggggggggaaaaccatagaaccatccagtccaagggggccctcgcaaaatggaagagcacccaaagggccgggaaccccattaggggaggcggctaacgggggggcgccccgcacttttggggctccaccaggggtttaatggcccccctggaacgcccccggagcagaaggagcctgcttcctgggcattttttcctggagggggggccacaccgcgcagggggggccccccgca

SEQ ID NO: 28977 - DNA, 447 bp, Zea mays
  unsure (1)..(447): unsure at all n locations
  Clone ID: MRT4577_126438C.1
tgtgcggcgctcgagccggccgggccgggagcanccttnacagcgcactgtccagtgcgcgcgtncagcttgcttagctagccgccatggcctccttcgccgccgtctccgtngagcccgtggccatcaagggtctcgccggcagctccatctccggaaggaagctcgccgtcgccaggccgtcggcccgctccatccgcaggccccgcgcagacgccgngggggccacagacggcgacaagagcgcgtactgtgaccgcagcgacgtcgggaacagaagaggacagaggtgccgctccggatgctgccggtcccgcgccctggagcgtgagatagcccaggacttcaagaccgatcgccgcttccagagatccggcgcgcgccgcgctccatgaggcgcccccacgcctacctcgtcgggctcttcgaggacacccgcctctgcgc

SEQ ID NO: 28978 - DNA, 350 bp, Zea mays
  Clone ID: MRT4577_126439C.1
gccggccggaaatccaggggggacccagcgtccgagcgagagagggagcgcgagaggaagaaaggaagcgaggagccgaaggcgagaagccgcaggggaggggagaagagggacccgagagcaggccgaggcggcaggcagcagggaggcccgcagccaccacaccccaaggcgaccagcggaccggagcagcaagaggaaagacgagaggaggacaaagggaagaagggccaggcccggcgccgagagggaggcagacacgcccgcgaagccgaaggagcagccggacgacaaggaggtcagcaggcaggagaacaaagcaaggctagacctacaggcgagaagagggg

SEQ ID NO: 28979 - DNA, 354 bp, Zea mays
  Clone ID: MRT4577_12643C.1
aacagatcgccataattatagatcccctaaaaaaagacctgggccccctttgtttaaccctgaaaggaagccaccttttgggaaaaaataccccccggggtaacaaaatggtgggggggggcccaaaccacttttggggaaaaattaaaaggggcgggctgattttttttggccaaaaataaccccccacactattggggaaaaggggccttttttggccaggggacccctggtgggtttcccaaaaaaagcgaagtttttggccgggaagccccccacaagattttggccttaatcccaccttttggtttgccccctggattaaggaagcccacaaacgttttcggttttggg

SEQ ID NO: 28980 - DNA, 525 bp, Zea mays
  Clone ID: MRT4577_126440C.1
acatagaaagcaactactacgtattcttcatttaagaaaattaagaaatgatacatgttatggtggcagaaccaaggcaatacaggctacatattccatcacacatctagaacgggcgagcgcacagtaccactggattgccggacccctggccagattgctctcttaagtggaacagctaaagaaccatgcttcttatcttcgcccaaaaaggaagctgagggtttatcctacgcttttgctacgtactattgtttatatacctgatgcatgagaggatcgggatgtctgtgtttatcacccttcacagggcctactaatgacatggctagatgactaggctcaagcgcacgatcaaggtgatcctcaacgtgcacacggacaaactgttctgggcttctgcgcaaaacccggccaaccatcttgggagcatatccaacctaagcaattcctgctattaaagcttggggagaacaggtcattttatagggtgcggtccctgaactccaatttgatgattggaaa

SEQ ID NO: 28981 - DNA, 359 bp, Zea mays
  unsure (1)..(359): unsure at all n locations
  Clone ID: MRT4577_126441C.1
ttttagatccaagctgggtttcaattacaattatatatctaattacaacaaaaacaacggtgtttcaggaggctgatttacctcttggttgacacactaattgttttcactactcttaaaatttcccataatttgttgataatttttctgacaattacaaatttcacacacccccgttgattaaaatacctatctacaagtactattttaattacaatcacaagaaatcagtaaagcaccacgcaacaccctgcattttcttcccctttcttttgtcaaaaacaaaattccacaacatcgggtgtccacgcacagttcccattntaggttctcctcaaatcaaccaccaccacgctcac

SEQ ID NO: 28982 - DNA, 253 bp, Zea mays
  Clone ID: MRT4577_126442C.1
ggttaaaccatgatttccattgcccactgaattcaggcccaaaattggtttcaccgaacgcaaaaaaattttctttgctgcaagttcacggggttgattttaaagggaaaaactgctactttgcagggggggtttttaaatcataatcatgcttttgaaattatggaacattcttttgggcccttatgacaggggataatttttgaaaggctaactccgggggtttccgtgggtgtttttcccctttttaaaa

SEQ ID NO: 28983 - DNA, 702 bp, Zea mays
  Clone ID: MRT4577_126443C.1
atgggaaggcagctcgtgcccgggcaagactgaagacgagaccaaccgcgcaggtaggctcggaagggcgacgcaaaccccccaactcgcgcccaccttccaccccagatctcgcggccgccgccgccgccgacgagatgctcctcctccgcggcctcctcctcgccgctctcctcgctgtcgcgcggcagcccctggcgtccgcctccgagtccgaccacaagtacaaaatttcagaaccagtcaagctctgggtaaacaaggttggcccgtacaataatcctcaggaaacatacaactattacagccttccgttttgtcaaccagctgaaaaccctgcacacaaatggggtggactcggagaagttctcggtggaaatgagctgattgatagtcagattgatatacagtttttgaaaaatgtggacaagggccccatttgcacaattgaacttgatgctaaaaaggttcagcaatttactgatgccattgaaagctcatactggtttgagcttttcatagatggatctgccattgtggggttttggttggggagactgacaaaaacaatgaaaacaagcactatctttacacacacaggaatattgttgttaaatacaacggtaacagggtaattcatgtcaatctcactcaagagtcacctaagcttcttgaagctggaagaaaattggacatgacata

SEQ ID NO: 28984 - DNA, 451 bp, Zea mays
  Clone ID: MRT4577_126444C.1
atatactgtcatcatatatcatatttcgacacagatctgctgtgcgtaccaataggtgagacatcaggtcctgggccatgaatcatcatatgtgtgatacttgggcccatctcacctggctattgtggtggggcccggcacctggacccctaaattccgagtgggacaatgggccttggtgcatatacctacggtggctcccgggtccattcgtaaacacatcaggtccatctctagccttctctaaaaatacttatcactcatagaagattcatacaccattttgagtgtgggcaaccttaatacagcatagaacaaaagaactctccttgatcttttccttctaaaggctcttatttttgacctcctcattgatgtatttctgcgacaaaatttttcttgactggaagagatcttgaatcctggcccaacacagggtttgtcactctga

SEQ ID NO: 28985 - DNA, 482 bp, Zea mays
  Clone ID: MRT4577_126445C.1
taatatataaggaaaaaagatgattggaaactgataaaagagaaaaaaattaaaaaaaaaaaaaaaaaaaaaaaaaaaaaaaaaaaaaagaaaaaaaaaaaaaaaaaaaaaaaaaaatttttaaaaaaaaaaaaaaaaaaaaggaaaaaaagttggaacacctgccgggggggcctttaaaaaggccaaattctgaaaatttcaataaaattgggggccgttaaacaattaattaaaaggcccaaatcccccctataggaagtggaataaaaataaatggcccgcggtttaaaaacgccggaacgggaaaaacctgggggtaaccaaattaaatcgcttggaaaaaaatccccttttcccaagtggggtaaaaacaaaaaaggcccaaaccaatcgcctttccaaaaatttgcccaccctaaatggcaaatgaacccccctttaaacggccaataaaccgcggggggtgggggggtaacccc

SEQ ID NO: 28986 - DNA, 1501 bp, Zea mays
  Clone ID: MRT4577_126446C.1
taggaaggcaccaagagaaaagagcggtggcctgcttcttttgtcgtttggggcgtcgtcattccaatctcacgcgatcacatccggccttcgttggtgcgcagacgacgacgacgacgacgtgcccagtgcgcggccggccggggattcatatcgaatcggatcggaggggaagcaggagcccacagggggcggatcgaccagtctcaattcaaggagctgaggacgacctgtccgtcaggagctgatcgagaaacggagggacggttccacagtttcagtccagctagctagctagctagaagatcccattcgctgacagatgggttcctacatccaaggagatggtgaggtccctgtgtacgagtcgggcgccgaggtgcttgagaaggtgcaagagaaatgggcggcggcggcggcggcatcgcggcctcctccctacccggccatgtactcgagcgtgttcggcggcatcatcctggacccggccatgatggttctccccatcgacgaccacatggtccaccggggccacggcgtgttcgacacagccatgatcctggacggcgccctgtacgagctggacgcgcacctggaccgcttcctccggtcggccgcggcggcgcgcgtgggcacggccccgttcccgcgcgaggcgctgcggcgcatcctgatccagatgaccgccgcctcgggctgccgcatgggctccatccgctactggctcagctccgggcccggcgacttcctgctgtcctccatcggctacgcgtcggacccgggcgacttcgcgtccgagtgggtggacgaccaagggtacgtggccgagggccccatggtgaacgtggcgttcgtgacgcccgagcgggagctcgtgctcccggccttcgacaagatcctcagcgggtgcccggccaagaggatgctcgcgctggcgcctcgcctcgtggacgccggcctgcttgcgggggtgaccaagggtaacatcccgagggccccatggtgaacgtggcgttcgtgacgcccgagcgggagcgcctgctcccggctgccgacaagagagtcggcgggtgcacggccaagaggatgctcgcgctggcgcctcgcgccgtggacgccggcctgcccgcgggcgtcagcaccagggacatcacggccgaggacgccaagcgcagcgccgaaatggcgttcgtcggaagcggcctccccgtgctgcccgtcgtcgagtgggacggcaaacccatcggagacgggaaggttgggaagctgatgccggcgctgtctgatctgctgtgggaggacatgaagtccggtcccgacaggatccccgttccatacaagcagtagcctgaagcgaaggcgaagccaagacatgtctgtcagtctgtgtgtgcgtgtgtgtgtgtttgcagtcgaatggtgattgccttgcctgaataaaaataaacctctctctgtatatctgagcgaatcgttttggaaatacgagcagattccatcc

SEQ ID NO: 28987 - DNA, 589 bp, Zea mays
  unsure (1)..(589): unsure at all n locations
  Clone ID: MRT4577_126447C.1
caaaccaccgcctccttcccccggaccgggaggagggagcctcaccagcacggcgccccattgggcgacacnngctacttgnnatcgtgtcgcttgcccccgtgcagatacgccccggcgcccccaccgccagnnctccctttgtggnntcgcgcccctccaggaacttccattctctctcgccactttccttcgnacnnaccccgcttctgaccgggtggcagacgnntcccggnatcttttccgcgnntcggcaccccttcgnactttcgcttccttgcgcgcctcagntnngacgacncnntcgtcagagtcccaatgtncnnttcgtggagggggcgtgtcacaaacaagaatccggnnaggcagaatnncgaggacccctcgagnccgcgccggnnaggggnntcgagaaccgggaaccccttcacncnngtcgacgngnncgtccccnnngtcgacaaccttaacctncacttannggttcngnntgtgggaaatgaaagggccaagtaccccccacaaatgnnntccccttcttcaagggagaatnncgtcgnngcagcataccanngtcacagnngttgcc

SEQ ID NO: 28988 - DNA, 176 bp, Zea mays
  Clone ID: MRT4577_126448C.1
gatggtcaaacaagaggggggaggaataatccacgggcaaacaattgtacaaaccagttattccaaattctctctacgacatataagtttcgaagaaacggatcaaaggtgattgttttctttcgagctccttctatcttctgatactgcaagatgccatattgaatgcattgtaa

SEQ ID NO: 28989 - DNA, 1386 bp, Zea mays
  unsure (1)..(1386): unsure at all n locations
  Clone ID: MRT4577_126449C.1
gaatcacaacaagtccatcgactagtctctttcccaggagctgaggacgacctgtccgtccggagctgatcgagaaacggaggggcggttccacagtttcagtccagctagctagctagctagctagaagatcccattcgctgacagatgggttcctacgtcaaaggagatgatgaggtccctgtgtacgagtcgggcgccgaggtgcttgagaaggtgcaagagaaatgggcggcggcggcggcatcgcggcctcctccctacccggccatgtactcgagcgtgttcggcggcatcatcctggacccagccatgatggttctccccatcgacgaccacatggtccaccggggccacggcgtgttcgacacggccatgatcctggacggcgccctgtacgagctggacgcgcacctggaccggttcctccggtcggccgcggcggcgcgcgtgggcacggccccgttcccgcgcgaggcgctgcggcgcatcctgatccagatgaccgccgcctcgggctgccgcatgggctccatccgctactggctcagctccgggcccggcgacttcctgctgtcctccaggggctgcccgtcgccggcgttctacggcgtggtgatcgcgtcggagtacgagcagtgcggggtggacggcaccggggtgcgcgcggtcacggccacggtgcccatgaagccgccgcagttcgcgaccgtgaagaacgtgaactacctgcccaacgtgctgtccatcatggacgccgaggaccgcggcgccttcgcgtccgtgtgggtggacgaccaagggtacgtggccgagggccccatggtgaacgtggcgttcgtgacgcccgagcgggagctcgtgctcccggccttcgacaagatcctcagcgggtgcacggccaagaggatgctcgcgctggcgcctcgcctcgtggacgccggcctgctcgcgggcgtcagcaccagggacatcacagccgaggacgccaagcgcagcgccgagatggcgttcgtcggcagcggcctccccgtgctgcccgtcgtcgagtgggacggcaaacccatcggagacgggaaggttgggaagctgatgccggcgctgtctgatctgctgtgggaggacatgaagtccggtcccgacaggatccccgttccatacaagcagtagcctgagcgaaggcgaagccatgacatgtctctctctctctctgtgtgtgtgtgtttgcagtcgaatggtgattgccttgcctgaataaaaataaacctctctctgtatatctgagcgaatcgttttggaaatacgagcagattccatccaaaaaaaaaaaaagaaaaaaaaaaaaaaaaaaaaaaaaaaaaaaaaaaaaaaaaaaaaaannnnnna

SEQ ID NO: 28990 - DNA, 549 bp, Zea mays
  Clone ID: MRT4577_12644C.1
cctcgaggccggccgggccggaagtacatgaaagccgcgggcttccacgccgttaccggcgttgcctccaaggactggacagagaacgatcgccagctgcatcaggacgtgtgtctagcctgtcacggcatgcctacgcagcccgtcatcgtcccacagtgcgacgagatggaccacgacatgggtgacgacgcgaccaacattacccatccttcctcatcattgccacggcgcacgcattctcaggatcacgtcacacggctgatcctgaggtccaccgctacatgaacaccctggtcggtagctgcccgcgtcgactgctgtcgccaccccttaccgcctcgcgaccgagcaaccggtccctgcatgctacgaggactcatgaaccgagctcaactgagaggttatcagagtataacgcgggcgtcgccggccacggcgacctcggacgcgtcttcgtgggcggcaagagatgcgcctagaatgtcatccagaacatggccgacggcgcgggcgtgacatgcttctgccccctggaaccaccactac

SEQ ID NO: 28991 - DNA, 283 bp, Zea mays
  Clone ID: MRT4577_126450C.1
ggtgggacgacatccaacttcgatgaatagccttgcaaataaaaacagggtgtttttaacaacatttttggcccattggggggttccaacatttttttacaaaattcaaaatgggaacccccaggttctgcccccaatggggtggccccctccagggttttctcaaaataactcaaccctttagcccccgcggactttttttttaccggcttcttaattttttttgcccttgttacccttttatttttgacccttttggccgatttttttattatccttttta

SEQ ID NO: 28992 - DNA, 306 bp, Zea mays
  Clone ID: MRT4577_126451C.1
ttggaaaaactgccgcacgaactaattataagcctttgatcagcaacaaataatgtccagattataacccctttgactcggcatattgacaagatgattggtttgtttgtgacacgaataaaaacaatgggcgaaacacaatgactttattatccaatggaaggtcattccaccacctattcagtatatttcgagactaactaaaccgaacaacttgctctctatacccccaacattagcctacgccacgaacatgttactacggagaatcgatccatgtctgaggagctaaagcaagtataagag

SEQ ID NO: 28993 - DNA, 496 bp, Zea mays
  Clone ID: MRT4577_126452C.1
ggcggggggctaccccatttttttctggactacctcttgagattatgcatatacacatccagatgaaaataaacttacgaacacttcccctaataacaacaatccacccggaaccattccagcctaacaatctagacaaactacccgctcctatgggagagctgatatttttttttagctacagaccgagccctatttctataaaccggaacccttccaaacgggacatccccatcccatcccgatcatgtgccacctacaggtgcctattacgaacttggttgcctgggaactgcagagacaaatcgcctccgtaaactgccatccaacactaaaaccattccagagacctatagcgaacaactacctacctcgacaccaccctaaatgccaatcttgctcatatccataacactggcgcgcgatcacgcttacgtctaaatctcccaatttcccctatactgagtcgcattacagcatacttgtagagggccca

SEQ ID NO: 28994 - DNA, 284 bp, Zea mays
  Clone ID: MRT4577_126453C.1
cacagttattaagtacgacaactagacacatactcatagtcgaacgcgaatctcgttgcggtacacacggataatcacgtcaaattacatgtactcatgttcactatcacattccaacacatcgataatcttctcttcatcctgaaactggacaccctaatgtctcacacaatacaattcgagatctacagtgagcctaactgtccgcatgccttatcccatacatctgatccaatgaatgcctctcttattcttactgtacttcatgtacatcacctttcgac

SEQ ID NO: 28995 - DNA, 242 bp, Zea mays
  Clone ID: MRT4577_126454C.1
gttaaacctcctggacgcctgactgcctatgatagcgcatatccttccgggtagactaatcctagctgaccaatgggcttgagtgagttcagctgcacctatgcaactctcattctaagctacgactgattccttatcatcagcgacaagatcgccaccttcctgaagtctgtcatcatcacatttgagtactacttgccggctctaattcgtaggttcatctagaatctatagccctttag

SEQ ID NO: 28996 - DNA, 259 bp, Zea mays
  Clone ID: MRT4577_126455C.1
cgtccactctttccttgttcatcaccggacacactcctggaccaaactgaactgcttgaatgcggcagagtgtcaccatgtgagatactcatcaattgatcatgcttatacatcactaacatattgttgtcccaagttttaagtttgttctgttgtggatggagccaattgccagtgggctcggtcttattatataactatatgccatctctagcttctttatatgaggactgtcacttaagctagcatgttttttaaa

SEQ ID NO: 28997 - DNA, 120 bp, Zea mays
  Clone ID: MRT4577_126456C.1
attagctcagaaacgagcagtcacacatttctgatttctcgaaactttctagcgaatcaagaataaaaacgacaagaatctaatagaatacagacgatattagctcggagcagctttttc

SEQ ID NO: 28998 - DNA, 850 bp, Zea mays
  unsure (1)..(850): unsure at all n locations
  Clone ID: MRT4577_126457C.1
cattgggaccctcgaggccggccgggcaggaacatccggaactcaccgtggagaaccccagatcaaaccctttccccgcccattccccttcgcacttccactctcccagtcctccggtgcgattcgtttcttccttacttccctgcccgcccgagggagaagacgaaatcgggcgaggaatccggccgccagggtttcttgatccgggcgcgtgattcgtcgtgcccaggcaccagtgagaaatcaaatcaagaacacgccagcggaagtgagacgagggcgcggggaggaatcaagatcgcttctttgagctgccagttcccccgcgccaatgccggatccggccggcggcgccgggctggcatgttccctctaactgcccctgtccgccgccgcggctcccgatgctcgtgtggtcttcgggagcaggagagggagcagcggccgtcgtgggcggcggctaggagcgaagatgcagatccggctgtcgccgagcatgaggagcatcaccatctccactagccatggcctgctagacttgatgaggctcaaggtcgccgcgcgacacttttcctaccgcaccgtcttccacaccgtcctcatcctcgccttcctcctgcccttcgtcttcatactcaccgccatcatgacgctagagggcttcaacaagtgctcctcactagaggcttgtgagggatttatatgtgatgcttgataaagtaattctgaggaagcacctcttgacttgaagttccagaaacttttgatgaattatctgngacatgaagaataaatgatatgatttaaggtcatttgctttttagctgaaggctacgatggagagcatgga

SEQ ID NO: 28999 - DNA, 1482 bp, Zea mays
  unsure (1)..(1482): unsure at all n locations
  Clone ID: MRT4577_126458C.1
aaaaagtatacaaggtttgctttgcataatcaaaatccatgcttttcacatggtgaaatgtgtatgctcttcatcaattacaataacgatgggactaccatcaacccaacttatattgctccataaaatacaaaagaaccatcctaagcaatatcttaatttcatgagctatgatacaaatggaataaattaaaggaaaagggccctacagtaaatggggaaaaaataacatttcctttctgttcattgaatattctccacagcgcatgtaaccatgttaagggattactgagctccccagttgcacttgataaactccctgctgttgatttccaaaataacgaatttaatttcacttactatatgcttttatatatattgtcaagacaatctaaactgaggctccattatatgacagtttcttatgaattcatttgagtagttcacatattttgtccaaaatggctgaagatgtttaaaaccaatctccagccacggtttactttgcccgttataatgtataactgctgcttgttcaacgctactgacatctgtcttttcctgataacccaagcctaacagatgccatgatggatcaattgggtgaacatggcctttaaaggcaataaggcctggtggcaatgttccaagcctccaaagtgtgaagtttgacttcaagttctccttgacccaatgatgatactgatctttgattgttgtcttcctccatgcattcaggtcaaaaatattcataccatatgcccaagcacactctgaagggtcaaagttttttgcaatgaggggatgagaaaagttgaaataattcctgaacctcttagacatcacccgactgtctccacctatgcaagtctcaacagcaccattaaccttcccagctagatcgatatcccaaagtggtgataggtcatgctggacaacaacatcatcatcaagaaatacgaccttgttgaggcttgggaacaactcaggcaagtatattcgaatatgattgagtacattagtgtatgttggacttcctgcctgcagcttggccgcaaaaacccttgggttatcactagcactggttcttggacggtgacttccatggtaacgatctctagcagtgcgctgagtttctatagcttcaagtacaggaacattttcttttgttaaccaatcaaattggtgaacacctttcacctcaacaatagcaggactgagagaatttaaagcaaaccatgagtgcatggcaggataggtctttttgtcagtaataacatggaaaactattctctcaggtttcagtgatgatctaactgttgatctgaccacaactgaggctgcaaggatgttatctgatgctaaaacaaaatggtaataggagttgtccgaaagactaggcaccaactccgggggtggtagttgtttcccttgcacagggcattctgnagggagtattncatccagttaaacgccaataca

SEQ ID NO: 29000 - DNA, 2551 bp, Zea mays
  Clone ID: MRT4577_126459C.1
aacaagtatacaaggtttgctttgcataatcaaaatccatgcttttcacatgaactgtgtatactcttaatcaattacaataatgatgggactaccatcaattcaactcatatattgctccatcgaatacaaaagaaccatcctaaacaatatcataatttcatgagctatgatacaaatggaataaattaaaagggaaggggtcctatgaggggaaagatgctctgttcattggatattcaccatcaacgcatataaccatggaggggggttactgagctccccagttacccttcataaactctctgatgttgacttccaaaataacgaatttaatttcacttgatatatgctttttatttattttgtcacgacaatctacaactgtggctccattatatggcagtttcttaagaattcatttgagtagttcacatattttgtccaaaatggctgaagatgtttaaaaccaatctccagccatggtttactttgcccgttataatgtataactgctgcttgttcaacactactaatatctgtcttttcctgataccccaaacctaacagatgccatgatggatcaattgggtgaacatggcctttaaatgctataaggcctggtggtaatgttcccagcctccaaagtgtgaagtttgacttcaggttctccttgacccaatgatggtatttgtctttgattgttgtcttcctccatgcattcaggtcaaaaatattcataccatatgcccaagcacactctgaaggatcaaagttttttgcaatgaggggatgagaaaagtttaaataattcctgaacctcttagacatcacccaactatctccacctctgcaagtctcaacagcgccattaaccttcccagatagatcaatatcccaaagtggtgataggtcatgctggacaacaacatcatcatcaagaaatacgactttgttgaggcttgggaacaactcaggcatgtatattcgaatatgattgagcacattagtatatgttggacttcctgcctgaagcttggcagcaaaaacccttgggctatcattagcactggttattgggcggcgacttccatggtaacgatctctggcagcgcgctgagtttctattgattcaagtacaggaacattttcttgtgttaaccaatcaaattgatgaacacctttcacctcaacaatagcaggactgagagaatttaaagcaaaccatgaatgcatggcaggataggtctttttatcagtaataacatggaaaacaatcctctcaggcttcagtgatgatctaattgttgatctgaccacaactgaggctgcaaggatgttatctgatgctaacacaaaatggaaataggagttgtctgaaagacaaggcaccaactctgggggcggtaattgtttccttgcaagggcatttgaggagtattcatcagttaaacgcaatgaaaggcaataaaggcctttaggaatagcaattgcagcatagtgcttgttcaactgctctgatagccttgatgacctcaattccttatccatgctctccatcgtagccttcagcttaaaagcaaatgaccttaaatcataatcattattcttcatgtcccagataaattcatcaaaagtttctggaaccttcaagtcaagaggtgcttcctcagaatttactttatcaagcatcacatataaatccctcacaagcctcatggaaccatcgtttcccctaccaagaaggcgcggacctaaacgtcttcctagacaatctgaaaaatagctagtgaggagcacttgttgaagccctctagcgtcatgatggcggtgagtatgaagacgaagggcaggaggaaggcgaggatgaggacggtgtggaagacggtgcggtaggaaaagtgtcgcgcggcgaccttgagcctcatcaagtctagcaggccatggctagtggagatggtgatgctcctcatgctcggcgacagccggatctgcatcttcgctcctagccgccgcccacgacggccgctgctccctctcctgctcccgaagaccacacgagcatcgggagccgcggcggcggacaggggcagttagagggaacatgccagcccggcgccgccggccggatccggcattggcgcgggggaactggcagctcaaagaagcgatcttgattcctccccgcgccctcgtctcacttccgctggcgtgttcttgatttgatttctcactggtgcctgggcacgacgaatcacgcgcccggatcaagaaaccctggcggccggattcctcgcccgatttcgtcttctccctcgggcgggcagggaagtaaggaagaaacgaatcgcaccggaggactgggagagtggaagtgcgaaggggaatgggcggggaaagggtttgatctggggttctccacggtgaggttccggattgtggattaggtggagaggatgcgacgaggaagaagacgaaggatttgacccgatgaacagggcggcccggtacggccacggcagacggtccccggccgaccccggagggtacc

SEQ ID NO: 29001 - DNA, 1833 bp, Zea mays
  Clone ID: MRT4577_12645C.1
aaaaaaaataaaaaaaaaaagtgccccatcccgaccgccgggtagctcgtgcatgccgccctgagcgccactgcacagacgcgcagagacagacattgcgactttgcgagagacaaaacctcccagataacgcccgcgcgctccccgatggcgtcgtcgtgccagaacgtggagattcccggcaagccgacggagacggggacggcgctgctggagacggcgacgggcaccatccaggggttcgcgccgctgagccagatccaccagcacctgtgcgcgttccacttctacgcggacgacatggggcggcaggtggaggcgcaccacttctgcgcgcacctgaacgaggacgtgcggcagtgcctcatcttcgacgggcccggcgccggcgcgcgcctcatcggcgtggagtacatcgtctccgagacggtgttcctgacgctgcccgacgccgagaagccgctgtggcacacgcacgagttcgaggtgaagggcggggtgctgttcatgccgggggtgcccggcgtggtggagcgccgggacctggagaaggtgtgcaagacctacggcaagaccatccacttctggcaggtggaccgcggcgacgcgctcccgctcggcctcccgcagatcatgatggtgctcacccgcgagggccagcttcggcaggacctcgctgactgtgtggagaagaagttcggtgtctccttccagaaggagagggagaaccgggcgtacatgagcggaccggagcatggtatccacccgctagcgaacgctaccggcaagggcctgaggaccgagatccgtgaggtcgatttgccggcgagtactaccgccggcgccgggagggtcttcacttgatcgccgtatcgtgtgttgccgcggcgggtctgcgtaatgtagactatatagacggtgcttggtttggtctgtagttcgtgagtacgtgctcaatcgtttgtgttctcttaagacacgaactactgttcatatgaactttgaattttcgcataataagagatggcgctctactaaaaaaaagtgtcaaaaaaaaaaaaaaaaaagaaatttgaaaaaaaaactaaaaaaaaaaaggaagctcgtgcatgccgccctgagcgccactgcacagacgcgcagagacagacattgcgactttgcgagagacaaaacctcccagataacgcccgcgcgctccccgatggcgtcgtcgtgccagaacgtggagattcccggcaagccgacggagacggggacggcgctgctggagacggcgacgggcaccatccaggggttcgcgccgctgagccagatccaccagcacctgtgcgcgttccacttctacgcggacgacatggggcggcaggtggaggcgcaccacttctgcgcgcacctgaacgaggacgtgcggcagtgcctcatcttcgacgggcccggcgccggcgcgcgcctcatcggcgtggagtacatcgtctccgagacggtgttcctgacgctgcccgacgccgagaagccgctgtggcacacgcacgagttcgaggtgaagggcggggtgctgttcattgcggggggtgcccggcgtggtggagcgccgggacctggagaaggtgtgcaagacctacggcaagaccatccacttctggcaggtggaccgcggcgacgcgctcccgctcggcctcccgcagatcatgatggtgctcacccgcgagggccagcttcggcaggacctcgctgactgtacggcgtgctcgcagattgagtatctgggatctctctctgatctctctttttttactgatggatttgaacctgcaatgtacgtgcaggtgt

SEQ ID NO: 29002 - DNA, 3362 bp, Zea mays
  Clone ID: MRT4577_126460C.1
gccgggcgtccgctaaacgctcaagccgggcgggcctgcctaaacgctgcaaccctgtctttccttcttcatttccacaagacccttgcgtgctctctctctctcctcttggcgacgactgggtggcaggtgcccaggtcttcttgggacccttcgccggcgacaagcaccaccaggttttgtcatgagtgggcttctcatgagcttccctaagtgatgcttcatatgttttctaacatgtaacatctcccgatgttatccatgtactggatatatccttagaagtcagagatgcagaagtctgatcatcatgagcagaagctaacttcaccaagagggttaatccataagatacttcgtcgtacaaatagcaggcgttctcccactgcagctgaccaacaaccttctcctgtatctccagaaacaagcaactcatcaatattctcaaagcaaaaggatgttgatgatgccatcaaggattcagaaaagctgagcacacatactatcagaattgaagatgagaaatctgatttgctagggtctgaaatttattctggaaagcttacattagataacaaaacaaaaagttcatcaaatgaacaatctggatcaggatctagtagcaattgctttgatgctaggctcagcactgaagccctaatatggggttctaacatccttaagcttgaggatattgtatctgtatcatataattctggtctccggtatttcaccgtgcatgcttgtcctcttgaaaaaatatccagtggactctcctgctttatgaagcctagaagaacccaaaggacttgaagttcgtatcctcctctccgcacgggccctttcggtgggttaatagttttgcggaccagcaatgttacgtaaacctgttgcctcaccccatggcatctagcaagaagcattcttctgaactcattcagtttgatgccatgtttgatccttatgttaaatgtcggtctccaccaaagatacttgtcatcttgaatcctcgatctggacatggtagatctagcaaagtttttcatggaaaagtggaacccatatttaagcttgcaggtttcaagatggaagtggtaaaaactacacatgctgggcatgcaaaatctcttgtatcaactattgattttagtacctgtcctgatggtattgtatgtgtgggtggtgatgggattgtaaatgaggtcctcaatggtcttctatgcagagatgatcaaaatatgtctgcctctgtaccaataggtataatacctgctgggtctgataactcacttatttggacagtcttgggtgtcaaggatccaatttctgcagcattgtcaattgtcaggggaggtcttacacctattgatgttttttctgttgaatggattcaaagtgggactatgcattatggtacaaccgtatcatattttggttttgttagcgatgttcttgagctctcagagaagtatcagaagcattttggtcctttacgatactttgtagctggttttctcaaattcctgtgtttgccaaagtacagttttgaattggaatatcttccagtatcagatgttaatggcgccgagcataaaattttggtaggacaagaaaaggttgacacatctgatctatatgatgatgtaattcggagatcaagagcagaatgtttaccacgcgcctcaagtttatctagcattgattcaataatgtctacaggcatcatgtctggggcagagctggaggtttgtagtcctcgtgcaaataatgaaccttctgaggttgttcgtggacttgatccgaaatcaaagcgcttatcgttaggaagagctagtacatttaaagaaccagaagaagtgctccatccccactcccatggtacatctactcccagctggcgtagatctaagtcaaaatcaaggactgaaaaggcaaggccaggcttgtctgctacacacgatgcaaaatcttctaaggttaatgcagcagacaaagaggacacgtcatccacaatttctgatcctggacctgtggctgtatgggattcaggaccaaagtgggacgatgaacctaaatgggataatcaacctaactgggaacccgagacttcaattgagctccatagccctcgcgaggatattgagcttggtctgactaaggagctggtacctagtttagatgaaaggtggactgttaggaaaggacgctatcttggtgtactggtgtgcaaccattcatgcaagactgtgcagagtctgagctctcaggttgttgctcctaaggctgaatatgatgacaattgtttggacctgctgttagttggtggtagtggaagactgagattactgaggtttttggtgcttttgcagtttggaaagcacatatctcttccaaatgtagaatatgtaaaggtgaaatctgtgaggctcaaagcaggcccaaatacacacgacggatgtggtatcgatggcgaactactccatgtcaaggggcaagttcgctgtagtttgttgcctcaacaatgtcaattgatgggcaggccagtgaaaaaccctgtacagtagctgtaaatacactatgcggactgtctgcagctctgaggtcagcccagaatcttgcacctgtggtgtgtacaagcggcgaaccatggattttcgtctgcatccacatgtcagtaaattatattcagaagtgagaacatgaacatcctagctggcactcagctacagagatgtacatttgtggttgacgagcagaaggtgctgagtgggtgctatttcatcccatatgtaaagccaaagcctatctcggacagcagcttgttgcgcacctcttgcttttgcctttttctcgtccgatagaatgcatctactatacagccatcctgatgagtgtacttggttgctccagaacatagtgtccacctccaccagccgggtgtctttggaggttccctgatgccggccacttgatactcattgtagggacaacaccccagtgcccgtgtccttgatcagtctgttgtgtttgcgaagtgtgaataagatataggactgtttgattcccggtacagcgcagggtttcagcagaaagggctggatggatgatgttttgtggcgatgctgcctcgttgagtctttaaaacgggtgtaactcttcttcttttgtgagtcgtgatgatgtatgaaccgtgtactgatttgtaaaccttgcctggcaggcatacaactgtttctgaggtgtggtattctctgccggggaataagcagcgtagcttctcctttcgtacgctgccagcaaagcagcgctcgtgctagtatgaacaacttacaccaggcaaattttgtgatgggttttgtgag

SEQ ID NO: 29003 - DNA, 174 bp, Zea mays
  Clone ID: MRT4577_126461C.1
gctcgcccaccctcccttcggacagtcaaatttccgtacaagagggtcgtggaaatcgggcgagtggtccttgcgaactacggcgcggagtatggtcgtctcttctacatcgtagacctagtcgaccataacatgccccttgtagatgcccccgacatggttcgtttccaaatg

SEQ ID NO: 29004 - DNA, 304 bp, Zea mays
  Clone ID: MRT4577_126462C.1
gagccacaataataaataaataaatatataaatrratrrrtatkccaaccacgaccgccgtttcccaatatctgatgtgctcatgtgcagatgccacatggccggctcaatgatttctgtttgatcagctactctycactaaatcacccaattgctttagaactgttaagaaaccagtttggacyccgaagcccatgtggcccatctagccgaaaccctaactatgcactatatatagaggaggacactaccatttgttgtaaccagtgaacagaatacatgaatsagaatatcagttcctcct

SEQ ID NO: 29005 - DNA, 317 bp, Zea mays
  unsure (1)..(317): unsure at all n locations
  Clone ID: MRT4577_126463C.1
caagggagaagagtggccacacacaaaaatgccaatgacccccatcaccttctggagtgaggactccaccctctctgcaacaaggggccctccttgtcactgacatgtgctagaccacggcaattcatagacgggaaacattagtgaattgacagcattccttgtgtttaactaatatgtgcacatgttcttagtctccttcctgatggtcacctgtcctcccctcttgacagatggcattctgtcccaactccctccgttttattcgattttagctttaggtntgctgtcacttgtcatatggccagcaagtgcag

SEQ ID NO: 29006 - DNA, 420 bp, Zea mays
  Clone ID: MRT4577_126464C.1
gggagaaaaaacccaaaacccaaaagggtggtttttttggacttctacaaacgcggggatgggccattaatcgccattcatacacaagttgttttgcgcaccagttgggcgcggagcggtttttttatgacgggggggaactcgcgcgtttaaaacaaatccacctcgtcgccggccacctttttccattgaaattccctgaccaagttggggacaaagtactccaagtgaaacatggggatgccgaccccggcgcaaatcccccgcccggggccaaagggcataattttgatctccctggtgccagtcacgtggaccccctcgccgtcgccgcctgaaaggaatcgctccggcacaaactccatgggcctgtcccactcccgttggtcccaacccatttccgccaccgggaagttcacc

SEQ ID NO: 29007 - DNA, 139 bp, Zea mays
  Clone ID: MRT4577_126465C.1
ctctctctctctctctctctctcctggccgcgctgaagcttctgcaccgcgttggcatacgcacgctctcctctgttcgtgagagcaggctctcttcacgccatatgcagggcgtcctcccctctacctcgtccagcgc

SEQ ID NO: 29008 - DNA, 355 bp, Zea mays
  Clone ID: MRT4577_126466C.1
ataataaatttatttttttaaaaaaattgtgccaactaaaattttacaaaaacccacaactcccatctgaaaatttcacatgtatgcctctcctttcgtctgaaaaaatttatacaatgtttattatacaattattatacactctaaatccaccgttcaaacccaattttttccaattttaacagttaaaattatgcacctctactgtgggttcttatttttcccttttattcgggaactgacaaaccgatcaacccattttttttcttccctttcaaccccttcccaccttttttaaaaatcacggagctcggatccccattttattccaattttttttcccattataaggccc

SEQ ID NO: 29009 - DNA, 2836 bp, Zea mays
  Clone ID: MRT4577_126467C.1
ccgctagctcttgctttgttgtgtgtcctgatggtcgagttcctcaccgtgcttttgcttttctgctttcacttgcctgcagctgcagctcgtcaatcaggtccatgccgtatccgcatccgtatccgtggcaaagcagcaggaggaggaggaggaggcgcgggcgcgacggggccccgcggcagcctcaggctcgccgggtggtggagcgcgcagcagcaggccccggccacgcgacgacaacgcagcagcccgacaacgtctccagtgctaaagtgttccagaccagccgtgtggaaaccgagtcgaaattgcgaaatggcaggaaaccacaagaccttgaggatgagcaccaggctgaggaggcagagctgcagccacttatcgaccaggtgagggcgatgctacggtcgatgaacgacggggataccagcgcctcggcgtacgacacggcgtgggtggcgatggtgccgaaggtgggcggcgacggcggcgcccagccccagttcccggccaccgtgcgctggatcgtggaccaccagctgcccgacggctcctggggcgactcggccctgttctccgcctacgaccgcatgatcaacaccctcgcctgcgtcgtcgcgctgaccaagtggtcgctggagcccgcgaggtgcgaggcggggctctcgttcctgcacgagaacatgtggaggctagcggaggaggaggcggagtcgatgcccatcggcttcgagatcgccttcccttctctcatccagacggctagggacctgggcgtcgtcgacttcccgtacggacacccggcgctgcagagcatatacgccaacagggaagtcaagctgaagcggatcccaaacgcgttcgtccacgcgttcgcgacgtccatcctgcacagccttgaagggatgcctgacctggactggccgaggcttctgaacctccagtcctgcgacggctccttcttgttctctccttcggctaccgcttacgcgctgatgcaaaccggtgacaagaagtgcttcgaatacatcgacaggattgtcaaaaaattcaacgggggagtccccaatgtttatccggtcgatcttttcgagcacatctgggttgtggatcggttggagcgactcgggatctcccgctacttccaacgagagattgagcagtgcatggactatgtgaacaggcactggactgaagatgggatttgctgggctaggaaatccaatgtgaaggatgtggatgacacagctatggctttccgactactaaggctacatggatacaatgtctctccaagtgtgtttaagaactttgagaaagatggagagttcttttgttttgtgggccaatcgactcaagccgtcactgggatgtataacctcaacagagcctctcagataagttttcaaggagaggatgtattgcatcgtgctagggttttctcgtatgagtttctgagacagagagaagaacaaggcatgatccgtgataaatggatcgttgccaaggatctacctggcgaggtgcaatatacactagacttcccttggtatgcaagcttgcctcgtgtagaggcaagaacctatctagatcaatatggtggtaaagatgacgtttggattggaaagacactctacaggatgcctcttgtgaataacgacacatatctagagttggcaataagggatttcaaccattgccaagctctgcatcagcttgagtgtaatgggctgcaaacgtggtacaaggataattgccttgacgcttttggagtagaaccacaagatgttttaagatcttactttttagctgctgcttgcatttttgaacctagccgtgctgctgagcggcttgcatgggctagaacgtcaatgattgccaatgccatttctacacatcttcgtgacatttcggaagacaagaagagattggaatgtttcgtgcactgtctctatgaagaaaacgatgtatcatggcttaaacgaaatcctaatgatgttattcttgagagggcacttcgaagattaattaacttattagcacaagaagcattgccaattcatgaaggacaaagattcatacacagtctattgagtcttgcatggaccgaatggatgttgcaaaaggcaaataaagaagaaaacaaatatcacaaatgcagtggtatagaaccacaatacatggttcatgataggcaaacatacttacttttagttcaggttattgagatttgtgctggacgaattggtgaggctgtgtcaatgataaacaacaaggataatgattggtttattcaactcacatgtgctacttgtgacagtcttaaccataggatgttactgtcccaggatactatgaagaatgaagcaagaataaattggattgagaaggaaatcgagttgaatatgcaagagcttgctcaatctctccttttgagatgtgatgagaaaactagcaataagaagaccaagaaaaccttatgggatgtcctaagaagtttatactatgctactcattccccacaacatatgatcgatagacatgtttccagagttatctttgagcctgtttaaaaatgtttaagtggtagaccattatgttaggtgtaaatgtgtacataaaagttatcataaggagtaatggtagcagaagcatgcagttgtaagtttatttgttgcttagaatagaaattagtgtagctataatatcaagaatgttcctatataagtaatcatattatggatagaggtgttcatatgaataataattttatatgttaagtgttatcttacctaattttagtagcaaaaaaaaaaaaaaagcaacaaagaat

SEQ ID NO: 29010 - DNA, 534 bp, Zea mays
  Clone ID: MRT4577_126468C.1
accatccaaccttacggaagcagtcatagatgatatgacctcgtcgacaacacgcctgatgaggacgtacaccgtagcacgctcactgtcacggagcgacacccatgacatacatgcgctcattgaccatgaggactggaacgtcctggagctctaagagagagcggaagcacaggacactggtgtgtgtatcaacacacggatgtgagagaccatgcgagggatagcctgtacaattgaaaccgatctaggacttctagtctatataacatacaggcgctccaagaggagagaccaagcccagagaccgcacctcctccacacggccttagaagacgagggaagcacctgactagcatcagcattatctggctgcttactgatgcggtcaacgaccatgtcaacaatctccttgcctatggcgtagtgacccgaccgaagacgttggttgccttctccttgccaccgatgaactggtctgatctgagatcagtgcataggcgccagtcctcatctcatcaacgacagtggact

SEQ ID NO: 29011 - DNA, 486 bp, Zea mays
  Clone ID: MRT4577_126469C.1
ggggtggtggggtgttttttttttttttttttttttttttttttttttttttttttttttttttttttttttttttttttgacaggaacagcaaatcttccattttatttcccatggggggggggctgttaacctttcctaaaacttccgcgcggggcagaccctttcggcataaataaaacacccatgctggggtgcctccttgttttcctcaccctccacatttacaggcaggccctcttgaaaaactgagcctggggcccaatgggatcctccaccaacgtagcgatgaaatagtacgagggggcatatccaggctggatgcccaagggcaaaacaaccccttggggcttgcccccctcctcgaacttgggagggaaaaactgttgtttaaccaaaaacttgtcggcctccccctggtcaattaggatagtagggggaactttgctggtctttttaaacaggccgggtgcgtgatattccccc

SEQ ID NO: 29012 - DNA, 276 bp, Zea mays
  Clone ID: MRT4577_12646C.1
acaccagcacatccgcgaatcacagacgcgtctatctcagcttgctgcacagcactaccctgccctgccatcatatcgtacgtgagcccggccgagcgagagcgagggagaggcatgggtgcttgccgtctgcgtccgtcttcggtgaggcccgtgtgacgatgcgcttgacttcggggatggccttgttttcatgttttgttcgggaggggggggggcggtcccgatctttttgtgttcctgggtcctctgtccggcgagccatcgtgctacctg

SEQ ID NO: 29013 - DNA, 335 bp, Zea mays
  Clone ID: MRT4577_126470C.1
ggttgttattactttttcttttttcttttttataggggggaaatggacatgaagtacccatgggcaaaacagtgttcgggcccaaaaaaaagaaaactaggttttgggaaaaggtagcagggtggccatccatgaaaaaagcccggggcaacccttaagggtcttttaaaacccccacgcatcaaattttcccccggaaacaaatggggggggggggggccgaaacaaatattctgaggccccaacgatctaagggaacctgggggcggagaaccccttgttggggggctaaataaattccttttcggggttgccaaaaccaaaagggttgaaaa

SEQ ID NO: 29014 - DNA, 899 bp, Zea mays
  unsure (1)..(899): unsure at all n locations
  Clone ID: MRT4577_126471C.1
cacgctaggcttctactctagtccagtggatnccgacctaccgtctcgttacgtgatccaattgcagcctttacgggcccagtacggggccatcgccgttccagttccagcaccaccgcccgtggccgttgtagtagggctgcgccgccgctctgactgccgtaggctgctgcgtgggcctcctaggcacacacacgggcgtcggcgctggccatggcgtcgccgtcgcgtaaggttctcctaggcgtaaccttcgagaggcggctccggtctcgcactcggcaactcttctgggccgccgatctccctgtagctaccacctctcgctctctcgcggccgccgctgccacgacgctgccgtcgggcgggtctccagcggctcttctgttctctttgaggaccatctcgtcaacgcgcctctcgaaactgtccgccttcagtgacgcgcccggcccatctgtggtggaccacaagtcgataatgcaagaggatgaatttcacaaattagcagatgagacaattcatgatttgcttgaaacacttgaggaatatggtgactccattcagatggatggtttcgacatagactatgggaaccaggttttgacattgaggcttggggatttggggacatatgttgtgaacaagcaatcaccaaacagacaaatctggctttcttcacctgtaagtgggccttctaggtttgactgggatgcagcaactaatggttggatatacaagcgaactggatcgaatcttgtgcaacttcttgagaaggagattggtgagctctgtggtactccagtacaactttcataatagtacaggaaatgcccacacactaggttggatggagagcagtgcactttgagtacagtatgaatgagaaatatgagaca

SEQ ID NO: 29015 - DNA, 302 bp, Zea mays
  Clone ID: MRT4577_126472C.1
cgctcgagccgccaccgcctcagcaggagtaccagcagtggccgctaccgcctctgcatccgccgcagtagcagcagtagccgctactgcctctgctcccgccgatgtagcagctgtagccgccactgcttccgctcccgccgaagaagcagcagcagcatcagccgctaccgactctgcccacacttccgccgatgaagtggctggcgtcactgcctctgctgcatgaacactagatgcagtcggtcatgtcgtcgccgtcggacctgcggttcgtgctgttgccggtgttggctctcatc

SEQ ID NO: 29016 - DNA, 553 bp, Zea mays
  Clone ID: MRT4577_126473C.1
gatttcgaagcatctccttctccctccaagtcgtaccagggaccactaccgtggacatgagccgcggcgtagcagccagaagcaggctgagcgctgcaggccatctacaacgtgaagatcatcacgccggaacgcgagttggagatgcacgcgaccgacaacggctacatcctggactacggcgaggaggaagggatcgaactgccttactcctgccgcgcggggccgtgctcctcctgagacggcaaggacgccgccggctccctcgaccagcccgaccagagcttcgtcgaccacagacaggtaggcgacggctgggggctcgcctgcgatgcggaccccacctccgacgttgacatcgagacgcacaaggaggatgaacttatctcctaacgagaataataacgcaccgccaattatcccgccgcctcgcaagctcaggacaggataatagaagaaggctccgtactggctatgcatggaattttttttgggttttgcccgttccaaatgtattctaaattattaccgccggtttccaatatttgcggcc

SEQ ID NO: 29017 - DNA, 389 bp, Zea mays
  Clone ID: MRT4577_126474C.1
gaacggttcttattgtggtgtctttttttggtctctgcaggcaaattattaattaattgcactggtacacttattcgaacatttaatgaatacatcatcttttgttttttgaagctacaattccaagcaggggggaaagctatcaaaaaaattgcaactgatggttttccctgccgatgttccattacatgtggaaaaagagagggataaaaaattttacaacctttgtgaaaaatgggctgggattggtgtgaccttttttgaaactagcataagagtgccgtttttttaaattcttaccgactaaaaaaatggtgggaaaaacaaggggcctacaagggggggaggtacagccggtggtataccttgggttgctaaaagcaaaaagg

SEQ ID NO: 29018 - DNA, 974 bp, Zea mays
  Clone ID: MRT4577_126475C.1
aaggaattaattcagtggagaaggctggaggggacctttgggccaaacaccttgttgaaactgatcagggccaaaatatttggctggaccaagaggttcctaaggaagccgaacgaacctctgataaatcaaataaatcaagtgggacaaaggatgtaaaatctgatcttgctttggacaatgttgcaaagttggagatccattgggaagaattttctattggtgaagggattggccttgtcgaggccggccgggtttatagaggagaatggcatggaactccggttgctgtcaagaagtttttgcaacaggatatttcaagtgatgctctggaagagtttagagctgaggtgcgaataatgaagaggttgcgccatcctaatgttgttctcttcatgggtgccatcactcgtgtgcctaatctttctattgtcactgaatttcttccaagaggcagtttgtttcgtttgattcaccgacccaacaaccagttagatgaaaggaagcgcttaagaatggcacttgatgtggctcgtggtatgaattatctgcataattgttcaccagttatagttcatagagatctgaaatccccgaatctactggtggacaagaattgggttgtgaaggtttgcgattttggtttgtcaagaatgaagaacaataccttcctgtcatcaagatcaacagctggaacagcggagtggatggcaccagaagtacttcggaatgaacgatcggatgaaaaatgcgatgtttttagctacggagtcatattatgggaactttgtacactactacagccttgggaaggtatgaatgccatgcaagtggttggtgcagttgggtttcagaatcgtcgccttgaaaatcccagataacatcgatcctgctgtagcagagataatagtgcaatgctggcatacgttagtattcttaccgacatcatttgcagatatcatggctgcactaaa

SEQ ID NO: 29019 - DNA, 596 bp, Zea mays
  unsure (1)..(596): unsure at all n locations
  Clone ID: MRT4577_126476C.1
gtaacttgggcttttatggttaggtatacaatacccaagaaaagacgtacacccacccaacggatagtcatagctggaagtgcgtgttagtgttaaagtctaaagaagaaagaactatcgcgggctgggtgcgatagcaaaattatgttacgtgcacagggctagcattgcagccgatagtaagctgctctggctataggtattggcggcgctgaaaattaattaaatagcgaagagatgcatgatactaagataccgtaggctgctacttggcgactatatcgaccaaatacttactgccttcgctggttaacggctttagggggtgcctccnttgcagaactaggttctggggagcagatggtaggtagccttaataaatagggtcgacagtattggaagtaatacaaggtcaccctagcccctgggttagtaagccncatagactccnccttttttgggaagcnagtggcattagncctggcgtagagcagttctgattaaatattaaaaatagccagactttaaaatcnctttaaaggtgctccttccccagtatggggggaaaccttttatttcccccatgttttgggggg

SEQ ID NO: 29020 - DNA, 1713 bp, Zea mays
  unsure (1)..(1713): unsure at all n locations
  Clone ID: MRT4577_126477C.1
ctcgaggccggccgggattcttcctcctcctcctcctcctcctcctccctctcactctcccgtcccttccccagttgcccttgccattgtttatcccggcctataactagtacaagaccgagcccgacccccggccactggagctgcagggccgcaggcggcaggcacgcacgcagggagagagatagataaaaggtcgcccccttgaggacagggcagggcagctgagggcaatgagcgctggcggaggcggcggcggcaccagcacgcttggcggcgggggcccgagcggcagcggcagcggaggccctggaggaagcggcggcggcgggccttgcggcgcgtgcaagttcctccggcgcaagtgcgtcagcggctgcatcttcgcgccctacttcgactcggagcagggcgcggcgcacttcgcggccgtgcacaaggtgttcggcgccagcaacgtgtccaagctgctgctccagatcccggcgcacaagcgcctcgacgccgtcgtcaccatctgctacgaggcccaggcgcggctccgcgaccccgtctacggctgcgtcgcccacatcttcgcgctccagcagcaggtggtgaatctccaggccgagctgacctacctgcaagcacacctcgccacgctcgagctgccggccccgcccccgctgccggccccgccgcagatgcccatgccaggcccgttctccatctcggacctgccgtcgtcgaccagcgtccccaccaccgtcgacctgtccgcgctcttcgacccgccgccaccgcagtgggcggcggcgcagcagccgcaccaccaccaccaacagccgccgcagcaccaccagctccggcaaccggcgccgtatggcgctggcgcgtccgtcaggcccggcggcggccccggcatggcagagagctcaggcggagacgagctgcagtcgctggcgagggagctccaggaccgccaccggtccggcggcgtgaagctcgagcacccgccgccacactcaagatgagctggatgggggagtagaaggatcaaaaacccgtgcagaacaaggtgagagttggcgcccggcagtatcgagggagataggggtcggtgacgggcgatgtccagcacagcaggagtaggtaagcagcattggccggttttcgcgtacccagcacccctgttgttaatcggctggggtgcagtggcggcgcccacttgcttgatatattctccagtttgatcatatttgctccaagacaaaagaaagagtgctggggatcgacgagagtattactagaattgacatgtattagtaacattattgttacctttgataccgttccattagttgcaggatttttattaagaaaagaatctcaacatggttacaaaaaaaaaaaaggggggccccccattagggggccttggcccccgggaattatttccgggcccgtacctcgggggggaggagagcgggtggaggtcgtcgtcggggtcccaagactgcgaggccctgcagagcgtggcttacgcttacctgaaccatcgctcgtaagaactgagaactactcctcctccaagagagagagagagagatatagatatatagccatatctgtcctcaattcctgatcatgttttggactttagcctggggaaatatacccgcgattttcgatagatcacccgatcggtctccgctaanaaagggaaataat

SEQ ID NO: 29021 - DNA, 312 bp, Zea mays
  Clone ID: MRT4577_126478C.1
cgacgaagctcggaattcggctcgaggcctacgatgaggtgttgagcgccgacggcaagcaaagagggggggttttgaccgaacgagaggactccatcctgcagccgctagggacgcgggaccacgaccagcgtggtcgtcggcgccaagcaacggcagttgttcctgaccagagcacaggtaagatagggaacgcgatcaaggggctgttcatatactgcgacgcacctatggcccatatcatcgcctacctgaacggtgtcgatgccgccgccaggataggtgcatcgtgcacatgcttgacactaccaa

SEQ ID NO: 29022 - DNA, 1014 bp, Zea mays
  Clone ID: MRT4577_126479C.1
accgcgccatatatagccgcagtaagcaggcgagaacgacgaagaggtcacgcaccacaccgatcaatccagctcgagcgaccgatcacgtgcagcacagcacagcacagcggtgctcgatcggcgaagagagatgacggggttcgggtcaccgtgcggggcgtgcaagttcctgcgccgcaagtgcgtgcgcggctgcgtcttcgcgccctacttctgccacgagcagggcgcggcgcacttcgccgccatccacaaggtgttcggcgccagcaacgtgtccaagctgctcgcgcacctgccgctcgccgaccgcgccgaggccgccgtcaccatctcctacgaggcgcaggcgaggctacgcgaccccatctatggctgcgtcgcccacatcttcgcgctacagcagcaggtgatgaccctgcaggcgcagctggcgtcgctcaaggcgcaggcggcgcaggggcagcagggcgtgcacgaggacgccaagggctacgtgggcagcgccgccgcggagcagctaggttacggctacccctggtgcagcggcaatggaggcgccgcagcagcagcaggcgccgtgggcgcgcccgccgcgcagccgggcgcgtacggcaatggcgcgcacgagtccctgaccgcgctgctggggtcgtcggactacatgcagcagtcgctgtaccacgcgttcgagcaggccggcgcggacgacgacgacggccggcaggggtacggcttcgaggcagcggcggagtcctcgtcgctcggggcggaggagagcgggtggaggtcgtcgtcggggtaccaagactgcgaggacctgcagagcgtggcttacgcttacctgaaccatcgctcgtaagaactgagaactactactactacaagagagagagagagagagatagatatatagacatatctgtcctcaattcctgatcatgttttggactttagcctggggaaatatatgcgcgattttcgatcgatcagtcgatcggtctccgctac

SEQ ID NO: 29023 - DNA, 725 bp, Zea mays
  Clone ID: MRT4577_12647C.1
cattgggtacctcgaggccggccggaagagaaccctagtcacgttccacatctccaccacccgccaggccattagctgttgccctgctgtgcatcccgccgcagccatattcccacgcatcgacgcgccctcgccgcgatgatctccctgctccgacgcgccctcggcgacggtgcgtctcggcgctctctggccgaaggggcggtgcgtctcggcgctctcccaactggcggcgcgcggcagctccttacaggctcgtgccaggcgccacgtaccggagactcctcgtcgtcgcgccactctctccgcccgcggcccctccaggcccatgccaggcgcccgcggcagggtcgcaggagccgccgaggcgggcgttccactgttctacgccccccctggggttcaggtccaccccggcgtcgtgggccggtccctgtccgggggagggcgagggcgagggcgtggatacgggggctgagaaggggctggagatcgcgaggctggggacctcgccgcggatcgtggagaagctcgccgcgcggggcatcaccaggctcttccccatccagagggctgttcttgagccagcaatgcaaggaaaagacatgattggccgtactcgaacagggactgggaagaccctggcttttggtattcctatcatggacaagatcctaagctacaacgagaagactggaaatggcaggaatcctttagccataatc

SEQ ID NO: 29024 - DNA, 561 bp, Zea mays
  unsure (1)..(561): unsure at all n locations
  Clone ID: MRT4577_126480C.1
ccggccgnggaattttcaaattcccacactgcgagcgagcgaagacacagacgctggcgtgagatacacacacacacacacatagactgggatcgaagcgattttgctgatcatgagggcacagagcagagaggtccagatgatgttctcgctccatcggcctgctgcagcacaggctccggcagttggagaggatcaaggacaagcgggaggagaggctactccacgtgctcgccccgcgccctgtggtcaccaactccccgagggatatgtccgtgaagtgtgtcctctcatcaggatctgctctacccgtgcagggcactgcgggactgcgctgccgcctcctaattcccgggctgtggatgtcaaagcattccagctccacgatacattgcgaccccatcacgaggaagctgtgctgccgggaatacttagctctacgagcgtgcctcatgccgaaggcaacttcgactgcctcggtgcacctctagactgctactgctactagacaaatgttccaatgcgctataaactgctgttaagcacttgattgttgctctc

SEQ ID NO: 29025 - DNA, 1994 bp, Zea mays
  Clone ID: MRT4577_126481C.1
ggccagcagctagctaggcaggtagctcttgccaacgccccggccggccggcacctcacattttgtagcgtgatcgcgcgccgccgccacgcctccccatgcaagctactccgatcctagctactggctagctagttgcaactactcgagctaccagctagctaactggccagcagcaggtagtctgctcagggtcggagggtcggccggcgcggcggcggggcgcgcgcgcgcgggaaggcgggaaggcgggaacgcatgggcaacgccctggggtgcgcggggctcggcgagcggctggcggccagcgcgaggaacggcgacgcggcggaggtgcgccgcctgctggaggaaaacccggggctcgcgcgctgcgccgccgtcggcagcagcctcaactcgccgctccacctcgccgccgccaaaggccaccacgaggtgagcaacgacgacgacgattggtaatcgtttatttgagtcacgcgtcatgcgttttcgtccttgcaaagctggtctgccgcctcgtctacagtggcacgcgcaattaatcacctggacagtgacacaaaatctactactaccggcttccggcacacgtattattttccgggggattttcagaggatcgccgcgttgctgctggagaacggagcagaggtgaatgctaggaacctttccggcgagacggcgttgatgcaggcgtgccggttcggccactgggaggtggttcagacgctgctggttttcggatgcaacgtgtccaaggtggacagcctgagcggccagacggcgctgcacctggcggcagcgggaggccacgccacgtgcgtgcgcctgctgctggccggcgccggcgccggcaggaacaagctcgtgaacagggcggccagcggcggcgtgacggcgctgcacctggcggcgctgcacgggcacgcggactgcgtgcacctgctggtggacgagcgcgccgacgtcgccgcgccgacgctgccctgcacggcggcccccatggcggccatcggcgccgggagcgcgccgctgcactacgccgccgcgggcggcgaggtcaggtgctgccagatcctcgtggcgcgcggggccgacagggccgccgccaactgcaacgggtaagggatgatatgggatcctcttttgttttctggtccgtcgaccgctccatgtcgttacgtgtcctcttctgctaggcaggtggatcccggtggacgtggccaggacgtggggctgccagtggctggagcacgtcctgtcccccgagtctcacctgcgcatccccaggttcccgccctccgcctacctctcgtcgccgctcgccagcgcgctcgccctcgcaagggactgccgcctgcttctcaacacggcgcagctggacagcggcggcgccgacgcctgcgcggtctgcctggaaagaccctgtgacgtcgcagccgaagtgtgcgggcacgagctgtgcgccaagtgcgcgctggacctgtgctcggtggtcaagtcctacgacgtgcccgggatcgccggcaccatcccctgcccgctgtgccggagcgccatcgcctcgttcaggatgcgggccgcggcggacgagtccgagcctgacgtgaacgacgccggcggtggccgccgcggtgccggcgatcgccaggcggcggcgtccagcccggagaagaaacggagcacggactcggaacaggatgtcgtcctccccttctactgcgcgcctctcgccgtcccgtcttgaccggccggcgatgcaggcagcctgcatttgctggacgcagaggagctactgcctactgcatcatcagtggaaacgtaaaatgtgcatacacagcagaggcagacagattgtttgctgatgcttgccgacggcattgctggattttattttttttttattatggttctgcacatggcactagctggtgtaatgtaacatgttggtttattgtggaaagaaaggaggaacattcttttgctgt

SEQ ID NO: 29026 - DNA, 535 bp, Zea mays
  Clone ID: MRT4577_126482C.1
tcgagttttttttttctttttttttttttttttttttttttttttttttttattattgggggtgtgacgcaaagccagtctcttattatagaaacatgacattcgataccctaagtgaggacaacgtgggcctatttgtcctagaccactgagcctgagcggagattaacccgccctgaaagacgcacctgtgcatgctttgggggggacacacacggacgggctgccttggaagctatcttaagcaagcgtagcaccgacccttgccccattatgcagctagcgcacgcaaagtgccatttggcactgacaagacgaagccatcgctattacttgaagggaggctggcaacaaagaagcatgcacgcgagctcaatgaaactcagcagcaaaatgatgcccttgaggtagcggaacaaaccattccggagggcgaatgctgtctctattaccgaaacgaagagacagcaggactctatgagctcgaaggcaagacccatgtgaatacccgggctccaagcaactgagaccctca

SEQ ID NO: 29027 - DNA, 359 bp, Zea mays
  Clone ID: MRT4577_126483C.1
accgacggatgcgttcgggagtacggcttaaccatggataacttgtattcccttatcatgaacgtgttcgtgggcggggtatctaccatagatctggtgctagagtacgtcatggcctagctcatgaaccacaggctcgtgatgaagaagctgcacgctgaggtacagacgtaccgagcgtagaataagctggacatgatcagggaggactacctgagcagcctgtcgtacctaaactcgttcatgaagtatgcgctgctgctgcaccgatctgtgaacatgctgatgccgtactactataccgatgactgcctgatcgacagtgaaaacatccctttcatcactcgcgttctcgtgaa

SEQ ID NO: 29028 - DNA, 425 bp, Zea mays
  Clone ID: MRT4577_126484C.1
aacaaatcttgtgtatttcatccacgatgaatcccttcaaaaccttgccaaccctgggtttcctcttcttaacccttttcagcttagcccatgcagccacatttgatataagaaacaactgcccttacaccgtttgggctgccgcatctccgggtggtggcaagagacttgaccaaggtcaagcatggcaaatcactgcagcctctggaaccacacaagcccgaatttgggctcgaaccaaatgcaatttcgatgcctccgggaaaggctcatgcgagacaggcgactgcggtggagtcctcgaatgcaagggatacggtaaagctcccaacacactagccgaatacgcaatcgaccaatttgagcaccaagacttcattgacatctccaacatcgatggctttaatgttcctatggagtttagc

SEQ ID NO: 29029 - DNA, 348 bp, Zea mays
  Clone ID: MRT4577_126485C.1
tttttttttttttttttttttttttttttttttttgtttgttttttttttttttttttttttttttcgaaacgggaaccccacaaaaatttccccccaccaaattttgtttttaaaaaacaaaccattcttttcaattttaaaacaattggaggaaatactccccccaacaaaaaaaaaaactttccaaaatcttccccttttccccgggttaaaaatttgatcccaaaacaaaaatgtccccaccaaaatttgctttttggctttaccggtttaaaaagggaaccccctatagggcaagcccctccccctccataataaaccaactaacccccttttagcttttagg

SEQ ID NO: 29030 - DNA, 264 bp, Zea mays
  Clone ID: MRT4577_126486C.1
cacatggaagtcattggcgccgatggcgccatgtcgggactgtcgacaaggttgaaggcaacaggataaaactgaccaaggctgacagcggccaaggcagtcacaaggggcaccatcacttcatcgacatgagtcttgtggccgaagtggaaggccagaaagtccgcctatcggccaatgccgacgttgcggtaacgatggaacaagaaaaagcctgatcggcttggccgtttacgacttcccgtgctgaccgccgtcgagcgg

SEQ ID NO: 29031 - DNA, 492 bp, Zea mays
  Clone ID: MRT4577_126487C.1
ccggccgggatgaaccaccaacctcttaccgactttgaggtcttccatgatacaggatggaggggctcgagagacagccaacctcctgtggcctcccatatcctccttgggaatcaacattcaacaatgaggtgtggggcggtctccgacatgcgcctacataaggggcaacaagggttttgcggccatccacaggctgatgttgttgtgtaggaacctgtgctattgaaggtccacatcaacacgtcttctatgttctgggtgagctccatcggttgaagtccagagctaggcgattgggttatctgggggcttgagggtcgaagccgcactatgtgtttattggaaaaataagagcaacaatttcagcttacctcgcttagactgggtattttttggcaatgggtccctttctaagaccaagagcgaagggcgaaaggggggtctccttgcctcaaggggctttccatggaagaacaattgcccccggaa

SEQ ID NO: 29032 - DNA, 696 bp, Zea mays
  Clone ID: MRT4577_126488C.1
attaatcccacggcccagccggcgactcgtccctagcaaccacagccacactacccaccgtccgtcgaagcctcgtacgtgcgatggccggcgggcgccgctccggcttcgccgccgcggccctgcttcccctcctcgcactcgtcttcctgtccgccggctgcggcgcggcgccggagggtgcggaggtgacggggctgccgggctacgacggcgcgctgccgtcgaagcactacgccgggtacgtgacggtggacgagcatcacgggcggaacctgttctactacgcggtggagtcggagcgcgacccggccaaggaccccgtcgtgctctggctcaacggcggccccggctgctccagcttcgacggcttcgtctacgagcacgggccattcaacttcgaatcaggcaggtcagttaaaagcctgccaaagcttcatctcaacccttacagctggtccaaggtgtctaccatgatatacctggactcccctgctggtgtggggctgtcatactcaaacaatgtttcagattatgaaacgggagacctcaaaaccgccgctgattcgcacactttccttctgaagtgggttcaattgtaccctgagttcctgagcaacccgttctacatagctggggagtcgtatgccggggtttatgtccctactctttcgcatgaaggtggccaaagggata

SEQ ID NO: 29033 - DNA, 417 bp, Zea mays
  Clone ID: MRT4577_126489C.1
gccggcttctaatccgtactctttgtggcttcgcattcatggcgccctacgcggttaagaggcccgtttcgaacagagccacataggacgatcccattgccaataccgctccttccgcgaagaactccaatgcggcaaagcctatcacagcatgcaaatccgccttcacagactacggcaagggaatagaggtgccggtcgaaggtcaagaagagcagtgcagacctacaacatctacatcttcaaggcgctgtagcaggtgcacgcgaacatcaacatcttctataacgtcatgtgcatcatgaactacttgatcaacgacatcttccagaagctcgccgtcgaggccgtcaagctcacgcggtacaacaagaagctcaccatcacgtcccgtgagatccagatcttcctgcgcct

SEQ ID NO: 29034 - DNA, 133 bp, Zea mays
  Clone ID: MRT4577_12648C.1
agctttcctgtatagacaggccgcaccaagagggtgagtttcccaatagaccggcaaaccagttagagacagaccggcaaaacctccgtggcagagtgcataatcatagtttgagaggaactgacccaccgca

SEQ ID NO: 29035 - DNA, 366 bp, Zea mays
  Clone ID: MRT4577_126490C.1
ttcttttgcaagatcatcctagcgcgggagacgctgaggttcccggtgtcgggcttcggaaccttctataccgcggaggcgatgcgggacgccatactggggatgaacgcgacggagctggacgcgactaatatcacggtcaacgagggccagaccagttgtctgcctcgtggcgttgtgccgccggcaccgaggagaacgtgtaggcgtgggataccgcgttcgctaacgccctgatcgtggtggatgcctaccgctgtggcggaggttaccgtggccgcagaggcttcagggtcggaggctgctgatactgctgtggtgaccccggcggcggctactgtaactccgacagtaactggaggaact

SEQ ID NO: 29036 - DNA, 504 bp, Zea mays
  Clone ID: MRT4577_126491C.1
atgtggttgcctaaaggcataagaagaacactgatggacatggtaatgagtatgcttagttactctaacttaccattgggtctatggatggaggctttaaaaaccaccatgcatatactaaatagagttcctagtaaatcagtggctaaaactccatgtgagttgttgactggcagaaagcccacgctcaactacttcaacatatggggttgtccagcagaagctcgaatatttaatcctggacaggaaaagctagatgaaagaaccactagctgccattttattggctaccctgagagatcgaagggttacagattctactgtccaggcagacaaaccaagtttatagaaactagacatgccattttcctagaagatgacatgatcaaggggagtaaggtactcagagaggttgaccttcaggaaaagaggacgtatgtcccaattccgatggttgaagaaccatacttctcgatacccgctgtggttccaccaacagtgtaa

SEQ ID NO: 29037 - DNA, 556 bp, Zea mays
  Clone ID: MRT4577_126492C.1
cccacgcgtccgcccagcgctagcgctccgcgcggcctgcgctccccacgccgcagctaggtgccccggccaacgccccctcccaacgggaagccggtgcccctccgcggcgtgcagccatggctgccagcccgcagccgccgcggttcgttaccctgctcgaccggccctagcccttgcgcgcggtcggcctgccagcgcggcggcgcgaccagctagcactatcgtcgtcatgctcgtgtcctcgtcgctcgttcggtgcgtcgtgcacgcaacatgtcgtcgtacctcgcctcgtctcgccgtcgtcgcgaggtacttgatatatgttgggaatgaggggagtagcagcacgtccactttcactctcataatagcgctgcccaggcgtagccatgatttaattagaaacttgttgtcaaaagaagttatttttttttgctagtcgtgcgcactggttaattcagttcatgtcgtatgtttaacttccctttgctagccgattaataatacttggtatgtttttgtgaaaaaaaaaaaaaaaaaatttgcggcc

SEQ ID NO: 29038 - DNA, 763 bp, Zea mays
  Clone ID: MRT4577_126493C.1
ccggccgggattttctctccctgccccacgatgcacgcagcagccagcagcgcccagcgctagcgctccgcgcggcctgcgctccccacgccgcagctaggtgccccggccaacgccccctccgaacggcaagccggtgcccctccgcggcgtgcagccatggctgccagcccgcagccgccgcggttcgttaccctgctcgaccggccctagcccttgcgcgcggtcggcctgccagcgcggcggcgcgaccagctagcactatcgtcgtcatgctcgtgtcctcgtcgctcgttcggtgcgtcgtgcacgcaacatgtcgtcgtacctcgcctcgtctcgccgtcgtcgcgagattgcgatccggttccaagcttcgagggatcgaggatcaagcgttggcgaccaagtgatatagctttacgagttctacgatactaaagaccctgagcatctgtttggtgaaggtacttgatatatgttgggaatgaggggagtagcagcacgtccactttcactctcataatagcgctgcccaggcgtagccatgatttaattagaaacttgttgtcaaaagaagttatttttttttgctagtcgtgcgcactggttaattcagttcatgtcgtatgtttaacttccctttgctagccgattaataatacttggtatgtttttgtcatgatatatgtttatacattgttgtccccccccccctcatttatgcaattttgcaaaaaaaaaaaaaaaaagagggggggcc

SEQ ID NO: 29039 - DNA, 377 bp, Zea mays
  Clone ID: MRT4577_126494C.1
cgggtgccgggccggaatatccgggtggagccacacgcgcgggttttggagtctgacccggcaaggcaggtgtcgcaggagttatgagaagtcgctgcagcacgggaagcgctggacccggtacaagaaccgactcgccgtgcgcaaggtgcgcagagacagctagaaccgctacggtctccgcgagttggagctctgcacgcgtagcagcccttgcccagacaccagcgggaaggccaccgaggtcgtgcccgtccataaggacggaggcaggatgcgaggagacccgggggaccagaagagcgagaagatgctcatcgaccgatacctgatgaagaagtgcgagacgagcgggagccatctgtactattatgatc

SEQ ID NO: 29040 - DNA, 285 bp, Zea mays
  unsure (1)..(285): unsure at all n locations
  Clone ID: MRT4577_126495C.1
tccgaatgtntcggtggcgatggcgctctccgaccgctcncgcgagnngctcnacngagttcctctacgctcctcggagcgctctttcgctgcacaggagcngangcgcgctnctgtntctccccagcgctgcnacggtggagnaggaggcgggtgcagttntcgatccangcgcncaaggagaagatcgagatgtactcgcnggcntntatgcngctgaatgcggangaatcncanctggggtnacccacatggcgtnacgctctagactgtaaatgaatatcc

SEQ ID NO: 29041 - DNA, 300 bp, Zea mays
  Clone ID: MRT4577_126496C.1
ctttcggagaatttaaaaaactgttttttacaagttttagaccccgtagaaattcctccccaattttattttacctaaaatttgggggggttgatacagtttttcaacataatttccggcaggggttctgaacatattgcctaaatggggatcaatggggaagaaccccattttaagcaactggtggcccagttttatttgaacaatgacaagatgcccccccaacctagtggctgtcactcatactcaaattgggcattaacatgcccattcttttttatgacacaaacttttaatggg

SEQ ID NO: 29042 - DNA, 436 bp, Zea mays
  Clone ID: MRT4577_126497C.1
gaaactcccttgttgtcgtggccccagagctctcatttactgcaatttaatgaaagattggtgctggtggtgtatggatccaggattgcaagactggtgtttctgaatatgcaacatgccacatcctaagattttttgctagcatgagacacaaccaactatggatctgccttcgagttgggaactgtgcacgttttgatggcactcatggtgtcagtggtataattccgagccgactggatgaaccagctcggaaataaaatggtggttttaacagtgagccaataagcaatggcttttatatggttgtgttatagatacaaaaccaacttgcccagagcaaggaacaggagctcatcctgcactacattaaaagtctttgtgagcgggttccgcgtcctatggcagacataggtggggactgtggcattgttgg

SEQ ID NO: 29043 - DNA, 288 bp, Zea mays
  Clone ID: MRT4577_126498C.1
ccggggaacccaatttaaaagggggatagaaattagcccccaccccgcaatcagggggtttggaacatgtttcacatgaggtttaaattggcgggttttttttttatttgggggttcacggttcaccgccgggttgatttccgatttcgcccttagctcaccggccccttagttgttgcagggggcacctcccaagggggggcagcaggggcagttcccttaaccggggccgccttgttatccttgtgcttaaccatgcccgggtcgaccaaaattgggacttccccc

SEQ ID NO: 29044 - DNA, 365 bp, Zea mays
  Clone ID: MRT4577_126499C.1
actttcttttttttacagctcacagctatcaccaaagagcgggtatcctgaccgctcggaaacgccccctagcttatccctaagccctccaacctcagatcaatccgcagtatctatggcgcccatggcggagaaaaagccttctgctaatatgcccgtggaggaggagcccgctacggacaatgcggcgaaggctcctgcagggaagaagccgtatgcggacaagcgcctccccgccgtcaagtccggcaccagcctgggcaagaacggcaagaagaatagccaaaaaaaagcgtttttaccttcaagatctacatctttaaggagctcaagcaattgctccctcgacattctgcttttttttc

SEQ ID NO: 29045 - DNA, 680 bp, Zea mays
  Clone ID: MRT4577_12649C.1
tggacgaactgctaccccctcgcctcgccctcgccgcctgctcctctccagttctcccccaccaaccgcagcagcgagagcgagactgagaatggccgcggcgccgtcgtccctcgtgtcctcccatctctcccgcctcgccgacctccgccgcgcggcggcgccggccactcccaccgtcccacagcagcttcgcgtcggcttctcgcgccgccgcgcccagcgcgtcgtcgccatggctggatccggcaagttcttcgtcggaggcaactggaagtgcgtaagtgcatgttctgcttcttcagctttacgcggcttggagatgctgtgtaccgatgatcctggagatgctgtgtaactgtatcattttttggctgttgccgcattgggcattccaacgggacagggacgagatttttttgtcgtcatgcataccacggctccatcgaccatcgccacagtgttgcgccggcctcccctccttggttcctgccgtagtgcagcgctggccgccggcaccatacatatatcgtgatttactccgtacatggccacttctagaaatacaatcgcttctctgctgcccagcccagcttggtctgccagccagagccgttttgttcggtatataaaaagtgtgtctgtggtgtttttttggaaaggcaggtgtattaaagttg

SEQ ID NO: 29046 - DNA, 559 bp, Zea mays
  Clone ID: MRT4577_1264C.1
gaaacctaattgcttatattcttaacaaagcacaaaataactagatcttaaagaattctgttacaggactggggctgataaaatgaacacaaaatgacaacgtgtgcaaaaccaggatggatccagcgtacaggggcaccgttcacgttcattatgaccatatacaatcttcaaagatggtctgcgactcaaaggccacttgcggacgacccaccatagggaagcacaaatatctctctctactgggtcttgaacatcatgtggatcatgtccacgacgctgctgctgaacccccactcgatgacgaaccactagacgagcttgatgaagtggtgcatcaaggcaatcccacccttgatgatcaagatgctagaacagatgtgaccacacaagtcgccggtaaccagatcctcatccatgtagctccataatacccttgagtaggccactataagcatgcttaatagctggcttgatttcctcgtaagaggcccccttcttgatcatgacagtgatgggaacaactgatacattcatggagggaacccggaaggacatg

SEQ ID NO: 29047 - DNA, 404 bp, Zea mays
  Clone ID: MRT4577_126500C.1
agcaactgaatcaaggggcgaaacaacttattcttttaaatacaatggctaattaattaccacatgcccgacgacctagatgtttattttatatgttacctgactcagactagaaaaattcattttgatggttgatatacatggccaggggtattactatcactatttctcaacaaacattgggtccaaagtccacaaacccatttgctccatcaaccgaaatctgaagcccttcttgctgaatatttccggtggtggaaagacccgatgaagaaggtgcatgggtgaagcaagaagttcccacgtcatcgagtgggatcaaaaagttcctagctggcgggggcaaaattgggccacccgagaagtaaaacgacacggtgggaacccggaccggcacaaacccg

SEQ ID NO: 29048 - DNA, 246 bp, Zea mays
  Clone ID: MRT4577_126501C.1
cgggggggcccttttccgcccggggggaaaaaaaaattaaagggcgttccccgcagaaaccccccttttttttttgtttttttcccccaaaaggcctttcttttttaatggggaaaccctgccaaaaaaccaagacccgggttcctttttaaaggggggccctttgccggaaccaaaaaattttgggttaagcctttttgaaactcgctcttttggggggcccaataaaagaaacctttgggaggg

SEQ ID NO: 29049 - DNA, 3323 bp, Zea mays
  Clone ID: MRT4577_126502C.1
atggccttgtcttgtctccagcagaggttagcgaccagagaccagccacagccagcagcctggaccaaggcaagtagcgcactaacatttcactgttcatggcctgtgtccctgatcaactcagattggccggacgcttgggacgcttccgcgttttttttcggtcttttccgagcattaaaatccctacctctggattgagatatacttttgggcatcaggggctatctgaaagatccacagaattacctacacaactaggatgaatcccactcatcgtgccaattctacggtgttacatgcgaccacaattctggcgatgtcatcgggatatcactctcaaatatctccctgtcaggcactataccatcttcattttctcttcttggacaattacgcactctggagcttggggcaaactccatctcaggaactgttcctgctgcgctcgccgactgcacaaatctgcaggttcttaatctgtcaatgaacagtttaactggtgaattgcctgatctttcagcattggtcaacctacgagttctggacttgtcgacaaatagtttcaatggggcattcccaacatgggtcagcaaattaccaggcctaactgaactaggccttggagagaacagcttcgacgaaggtgatgttccggaaagcattggagacctgaagaacttaacgtggctgttcctgggacaatgcaatcttaggggagagataccagcttcagtcttcgatttggtatcactcgggacactggacttctcgcgcaaccaaatcactggtgtattcccgaaggcaatatctaaactgaggaacctatggaagattgagctctaccaaaacaacttgactggtgaaattcctcaagagcttggaactctaaccttgttatctgagtttgatgtttctcggaatcagctgactggcatgctgcctaaggagattggcagcctgaagaagctgaggatattccatatataccacaacaatttctttggtgaacttcctgaagagttggggaacctgcagtttctcgagtcattctcaacctatgaaaatcagttctcaggaaagttccctgccaacctgggtcggttctcaccactcaacacaatcgacatatcggagaattatttttcaggcgaatttccaagattcttgtgccaaaacagcaagctccagttcttactggctttgaccaacaacttttcaggtgaattccccgcctcttactcttcttgcaagacacttcagaggttcagaataagtcaaaatcaattcagtgggagtattcctgctggcttgtggggattgcctaatgctgtgataattgatgttgctgataatgcatttagtgggggcatattttctgatataggcttttcagttactctgaaccagctgtatgttcagaacaacaacttcatcggggagcttccagtagagctagggaggctcaccctgcttcagaagttggttgcttcgaacaacagactctctggccaaatacctaggcagattggaagactcaagcagcttacttacctacatttggaacataatgcattggaagggccaataccaccagatattgagaattccttgactggagacattccagacacactggtctcccttgtctctctgaattcactcaatatatcccataacatgatctctggtggcattcctgaaagtctgcagtcattgaagctgagtgacattgatttctcccacaacgagttgtctggcccggtccctccccagctcttaatgatggctggacattatgcattctctgaaaatgctggcctttgtgttgcagacacttcagaaggctggaaacaaagtatcactaatctaaaaccttgtcagtggtccgataaccgtgacagcttgtcaaggagacgactccttgttctggtaactgtggtatctttagttgtcctcctgtttgggttggcgtgtctaagctatgaaaattataggctagaagagctcaacagaaaaggggatactgagagtggcagtgacactgatttgaagtgggttctcgagaccttccagcccccagaacttgaccccgaggagatatccaacttggatggagagagtttgattggctgtggaggcactggcaaagtttacaggctagaattgagcaagggaaggggaactgtggctgtgaaggagttgtggaagcgtgatgacgcaaaggtcttgaacgctgagataaatacccttgggaagatacgccatcggaacattttgaaactcaatgcatttttgaccggagcatcaaattttctggtttatgagtatgtggtgaacggcaatctgtatgacgctattcgccgtgagttcaaagctggacacccggaacttgactgggacaagaggtgccggattgcggttggggttgcaaaggccatcatgtaccttcaccacgactgctccccggccataattcatcgggacataaagtcaaccaacattctgctggacgagaagtatgaagctaagcttgcagatttcggtatcgccaaaatggtggaaggttcgacgcttagctgcttcgctggtacgcatgactacatggctcctgagcttgcgtattctctaaacgcgactgagaagagcgatgtttacaacttcggtgtcgtactgctagagttgcttacaggacgtagcccaactgatcaacagtttggcggtgaaaaagacattgtctcctgggtttcattccatttggcagagaaagaccctgctgatgttcttgacccgaaagtaagcaatgatgcatcggatcacaatcacatgatgaaggcgttgcatattgctattctttgtaccactcagcttccatctgaacgaccgacgatgagagagatcgtgaaaatgctcaccgacattgatcctagctccacagctaggagggcaaagaacaagactgataagtaacagcgacaggctttgtcttagtaaaatatactagtaataaccataatgtcagggcctcttggcaccctgtagcaatcatgggggaagcttattaggccgtcagaatggctgattagttaatagaaactagagggctggtaaaataatatggaggtatagcctatgcaatgcttgtccatgtgtaaaagctttagatcatgtacaaattagtattgtgccccgaaagtttaggtattgttgaatataccccgaaaaacaaaagataatccatgataccgctaatgggtctttaggataaaagtcttttagtaatgatccatatatacaaagccgttgacgtgcttgagagatcc

SEQ ID NO: 29050 - DNA, 934 bp, Zea mays
  Clone ID: MRT4577_126503C.1
gcataccataccatagaagctgaagagaccaaggacaaggacgacctgccttgcatggcgcaatcggtgaaaatattgtgtaaggatggcttcaacttgtacgtcaccattcgtggcaataaggccgttcttgcccctgaagatcccgacgacgaaatgcaggaatggttcaaggactactccagggtaagcagtgtgacggatgacaacggtcaaagggtgttcgcgctggtaaacaaggagacgcaacaagccatggtaaacagaagggacgagcaggaggtaataattaatacagggtcgtcatacatgcatggtcgctgtcaggattattttctctaactcagggagtgtttgcttactagagactaatttttagtccctccattatattctactttagtctataaattgtaaaatacggaaactataactctatttttatttccgtatttgacaatttagtaactaaagtggaataaaataaagagactaaaaattagtccctaaaaccaaacaccccatcatttgcttctctgtgttacggatcgaccaggtgcaacttgttccatattacaaagatgacgaccgtgtggatatctccatgctttggacagagctcccagaggaccacggcgacggctttcaccaaattgcagcgctcaagaacacatatgaggccctggacgggctaggcggcaattgcaaagaggggacgatcgttgggatagatcctacgcattattcatatctcggaactgttaataagaatcagctgtggaagatcgttgataaagggaccgctaggcgcttgaccaaagagctaggactaggaggagcgcgtctaaaaaagttggctcccatttctttacgtaactaataaaacttcacaatataataaaatttatgctctgtgttgtgctaagtatttgct

SEQ ID NO: 29051 - DNA, 375 bp, Zea mays
  Clone ID: MRT4577_126504C.1
atattgccggatcgacgtgcttactagtcggtggccgccctttgcttttttttttgatggggatggaccatcatagtacagacacgagacacgtctaactctatcagcgcgcggctgcagactacatacaccgtacacgtaccaacatgctgttcgtggtcctggaggctacaataacacaggcagtataagaatttgttaccaccacaccacacacagcaccaacatactgcgttacaaatggtcaagtcctggatttatataccatgttgcgatggcctctgtctgtccttgatacggtgatcgtcaccgatcgtcgtagcggacgcgtgtcctagcggaccagatgcacacacacgctcgcgctggcgcatt

SEQ ID NO: 29052 - DNA, 771 bp, Zea mays
  unsure (1)..(771): unsure at all n locations
  Clone ID: MRT4577_126505C.1
ccgncgctgctggncatgcagnaccccgcaggttgcaccaagttcacgctcaccaggtgaactggaccgactcctttgacggccacccgcacacgtaccagccggaggaggtgtccccggagctcatcaggtacctcaggaagtccatggcacatactcccactgtttgcgcgcaaatatgtgccaggatgccccgttccacttatggacattgttgccgatgcagtccttcgcccgtgactaggctgctttttagcatcacctccgtttgcattgcacgaccggaaaagttgagggttgcgatgtgatgaacaagcgtaagctgaccccatccatcccccctttggaattcttcagcaccgaacctaccttgttcttctgcacctgcagttgctctttggcaaaagatggatgccacgcctcggagggtacggtggctgtggcagtgtctgtgtctgtgccgacgggccccgcgctgcctcttgtgagtatgttctttttgtgcgtccttgtttcttttcttttttccagtgagagagagagagagctggctaaagatgagggagaagctggcacgtaatagggtcgatagttaagcatgatcaccctgtgtatttgcatggagacaatctgtcggtacatgcagtgatggtttgtagtagtatatgttacatatattgcatgtgtcaatatcacgccttgttgaaataaaaaaaaaaaaaaaaaaaaaaaaaaaaaaaaaaaaaaacaaaaacgcgatgaaaaagaatt

SEQ ID NO: 29053 - DNA, 595 bp, Zea mays
  Clone ID: MRT4577_126506C.1
agcagtggtaacaacgcagagtacgcgggtatcggttccttttacatttttctcttacatcattcaaaacaaacacaggagaaattgttttgctaaacaaattacaaaacggctctggctattccagaaaagtcaaggagccagagccggtttttagaggagtcggagccctgccaaagggggcctaacttttgagctcttttctttctgcatgcaatatttcaaaggttcattgttatgtctgttcagaaatgcgttcaaacacgagcttaccttacttgagaaagcacggcatcccaatttggtccaatttgttggagctgtcacgcaaaatgtcccgatgatgattgtttcagagtaccatcaaaaggtacgtaactgtaactgactaaacaagacaagcacctgtattcagtttcaattagttgttcaagccattttctttcaaacagcactctttttacacataaaatctgtcacgtctttgtcattgatgactatctctgttttttcctgattacctaatagggtgatttagccagttatattgagatgaaaggtcggctgaagcctcacaaagctataagaatttgct

SEQ ID NO: 29054 - DNA, 840 bp, Zea mays
  Clone ID: MRT4577_126507C.1
ccggccggggttgattttgtttgctctagagtagaattcatgttaaatcacactagattgataaatcagcttaaacatgtttccattttgagctgaagtcccagtgtgtgtccaaattcaaaagtgatctttatttagcccactttgttatgtgcacaccaagcaccactagttgcatgatagctatgtaatgaaatgatggtattgatggagcatgtgtttcttaccttgccttttcctgaactggaatatgtcataagagcatctccaacaaggtgactcaaaatagtgccctaaaaattaaaatgctaaatcattcaaagtgtttagtgcactaaaaacaaattgtgctccaacggttaaaccctaaatcatgtatttttggaagtgaattatattattaggaaagaaaatattgagaatagtgtagaaaacaaagatagggcactagtatggggtgtagtatatttgggtcacttcatggagtgctctatatttttttgacaaaaaattgtaaaatagagcaccgtttagagtctatattttaagataggacactgttttaaggcactgttggagatgctctaatatgcctttgctagtgtgactttcaaacttttgcatgaacggactcagtctctagttagtttctgtttttcttcctcagctctatgacattccttttttctggatccacaggccacagcagggcactagggtcttcgatatcatcgaggatttctgcatcggtcagttgaaggcttcatgatgatgacaggatagtttgtattgaatttgttacgggacataaatttgtgagaagctacattttatctatgt

SEQ ID NO: 29055 - DNA, 318 bp, Zea mays
  Clone ID: MRT4577_126508C.1
ggagcagctgcgtgtgggcgagcgctgcagggtcggctgcaccaacgccgccgccatggtcgaccatctgcggggcaagaggcacagcctgtcgaacaaggtctggacggcgataaaggccgtgaggaggagcagctaatacggcgataaaggccgtgaccgtgaggaggaggccgtggtgaggtgaggaggcacaatcttgtcgaatacggttgagcagggcctgtgttgagctttggaaagaaagggcacagatactagttgtttgacaactaatgaagtgtgggttttcatagatcctcttaatttagcagcgga

SEQ ID NO: 29056 - DNA, 299 bp, Zea mays
  unsure (1)..(299): unsure at all n locations
  Clone ID: MRT4577_126509C.1
acagtgtattagcactggcacaaggaacaacccttaccgcattgccggatgttattgatcaaacattgagcncaacactaacgagtggtctggcaccgatcaacggactaatgctgctttgtcacatcttcaggcagtctgtaagatggctcttggcaaggttcagcacgaacagaggaccgttcttgggctgcgcatactcttcgatcttgttcatgtcttcaatgaattcctggaagtgtgcctggcttgggcgactgccgtagtttctaagatgggaatagtatatctggaccctt

SEQ ID NO: 29057 - DNA, 381 bp, Zea mays
  Clone ID: MRT4577_12650C.1
gttgtacgtaataaaggagctacatgcgtacaacttcctgccccacagcgttcctttcttccatatcaataacgcctccgaactcttcgctattggtgagggcatcccatgcattatccgaatgacaaactagatttatgctccctagtgtgtgatctggcccatcctttgggctaattaaatatgcaatgtttgtctacccttactacgaggatgatcatacactctagcgatggatctgactctgcgtgtcgagtgaagcatggctttccccaagcattaggcatgatggccaacaccctaattatatgatgtgaaccatcaccttgcgggtttacattggttgaacttaagatactttttcccactcagccaaaacca

SEQ ID NO: 29058 - DNA, 531 bp, Zea mays
  Clone ID: MRT4577_126510C.1
aaaaaaaaaaaatttaaaaaaaaaaaaaaaaaaaaaaaaaaaaaaaaaaaaaaaaaaaaaaatttgttcgttgggccgccgcctccaaaatcgtcccttcgtccccacaagaaaccaaaaatccgccggggttaaaatgttggttaataagaatctccaatctgggaacaagctcctgtcgaattaattcaccaaaaagaagctcaaaaacggcgtcctggggaaggtcaaggaaaagggggtcacccaaggccctgttgatgggaaaattggggcaaatcaatccgccaagggggggaagaacaaaagcgttaataacacagttgtaaagggggttaaaattgttaaaaaattccgtcaaaaggagaaacctccttttaacaaaaaataatttgggtctaacatcaaaaaaaacatcaaaaatctcactgctgggttgaacccaaaaaaagcgaatgagttaaaaaagggggtcaagggtgaaacaaagtttctcctaagaaagttaaaggacctccaattttttgttgg

SEQ ID NO: 29059 - DNA, 454 bp, Zea mays
  Clone ID: MRT4577_126511C.1
gagaagataattcacatcatgctcgaaggtaaagtacatcggatcgaagaaccatgagaaaattgtttgtggaattgtactgaagccacgccccacgcgagcgggaggtcggtcccgcgtgcttacgccggcggcgatgtagcggcctcgagcaggtcctcccgcaggtcgccgtcgacgtcatccccggtgatcgtacgcctccagcccgtcccccggggtgaagagcgtcgtcttgcgcaccgtcagctccctgtcctcgccctcgcagcactcctccccgactatcgccgtctgctgctgagactgcggcgacatctccctcctcttctctgtctctctgcgtgtgtgtgtgtgtggtgattcctcgctgcagggctacacgcgtgctgatagcggagacggcgggtctgctctctgctggtggtgtagtcggctagtggcagcttggttt

SEQ ID NO: 29060 - DNA, 444 bp, Zea mays
  Clone ID: MRT4577_126512C.1
ccgcgaccagcagagagcagacccgccgtctccgctatcagcacgcgtgtagccctgcagcgagaaatcaccagacacacacagagagagagatagagggagaagaggagggagatgtcgccgcagtctcagcagcagacggcgatagtcggggaggagtactgcgagggcggcgacagggagctgacggtgcgcgccggcttcgacgccgccttcgccatggggatcgtgctcgttctcgaccggatcaccggggacgacgtcgacggcgacctgcgggaggacctcctcgaggccgccacatcgccggcgtaagcacgccggaccgacctcccgccgctcgcgtgctctgcgttgggcgtggcttcagtacaattccacaaacaattttctcatggttcttcgttgtactttaccttcgagcatgatgtgaattatcttctc

SEQ ID NO: 29061 - DNA, 425 bp, Zea mays
  Clone ID: MRT4577_126513C.1
atctgatggctttagatctttattgttattgttatgtttttttctgttttatgcttgcctctaatggtgcccggcagaacattatcccctgtccgggggccgacagcaaagcttgaacgcgaggggggtcgtaccggagaacctaaacaaacaccctagccgcaaacagcggcaacaaccaccgaggcgccactggccacgatctatattcacaaactccgtgtacagggcggggccctttctatgggccatgctgacaatctggaggcggtttttatggcccaccccggaatccccctccggcccagcggacggcccaaagacgacataaagcccgcaaccctacgccgcctgtggccagccacacgctgcggtaagggcgcccgctttcgtggtgccccctagataaccccccagacatatca

SEQ ID NO: 29062 - DNA, 651 bp, Zea mays
  Clone ID: MRT4577_126514C.1
cgggacttcaaccacagcacgcggaggtccaaatcagacagcatactgccccttgcctgcatcatctcgatactatgctacgagtctcacacagactagcggagggtcgaatccactctaacttctaatagatactctaccatctcctctggagtaactcggcatactcagccatgaatactaatgacagaaagctgacgtctcataccaatgctcccgtgaatctctagacgttccccgttggatgctacattatactgacgctgctcagaagcgatctacatctgccgatagatgttatatagccgagaagatcttgcaattatactggaaaatgtatactacctgccatcctcagttgcttgatcagcctctactatacataacaatttaacgactaacaggcacgccacacgttaagagatatgcagttaaggctacttactatgcgatgcagatgtactaactgtgacccactcgatgagatcttctgctatcctcccacagacactgatatcaaagaactacctgtatcacttgccgatcatgtgatcaattacacttcatcatttatctgccattctcatctcgactagatacatcacactcgccctgcatatacaaatcactcctgttatcaaaaaccaaagc

SEQ ID NO: 29063 - DNA, 1040 bp, Zea mays
  Clone ID: MRT4577_126515C.1
ggccgggtcctgccaacttcataaaccaagctgccactagccgactacaccaccagcagagagcagacccgccgtctccgctatcagcacgcgtgtagccctgcagcgacagcgagaaatcacacacacaccgaggaggaggaggaggaggaggagggagatgtcgccgcagtctcagcagcagacggcgatagtcggggaggagtactgcgagggcgaggacagggagctgacggtgcgcaagacgacgctcttcaccccgggggacgggctggaggcgtacgaccaccgcacgggcgcgctggcgttccgcgtcgagacgtacggccgcggcggggcgtgcgggggcggggccgccaggggggacctcgcgctgctgggcgcccagggggagcccgtcctcacggtgcgccgccgccgccccagcctgcacaaccgctgggacggcttcctcggcgacggcgccgcgcacggccagaagaagcccgtcttctccgcgcgccgctcctccatcctcggcgccggcacgggcggccgccgccgtcctcgtcgacctcctcgcccccggcgcccgccggggagttcccgcgtcgacggctccttcccgcgccgctgctgccgcgtcgtggcctccgccagggcctgggccgcgcccgtcgccaaggaggaggaaggaggaggaggacgcggacggaacgtggtggtggcgcgggtcaggcggaaggtggacgaggacgcgcacgtcatgatgggccgggacgtcttcgtgcactgggtgcgcgccggcttcgacgccgccttcgccatggggatcgtgctcgtgctcgaccggatcaccggggatgacgtcgacggcgacctgcgggaggacctgctcgaggccgccacatcgccgccggcgtaagcacgcgggaccgacctcccgctcgcgtggggcgtggcttcagtacaattccacaaacaattttctcatggttcttcgatccgatgtactttaccttcgagcatgatgtgaattatcttctcaattccgtgcaaaa

SEQ ID NO: 29064 - DNA, 463 bp, Zea mays
  Clone ID: MRT4577_126516C.1
aaagaaaaaaaatcccttttaaaaaaaaaatcctgtttaccaaataagggggaaggggggggtaaatgattgggttttaacaattttaaaagccccttattttaaaaacttgccctttggggaaaaggggggccccaaaaaaaggtttttccttggggggggggggggggggttaatttggttactttgggggtttaaaaaacgggaggccccaacccccttttttaaaaaagaaatccctgtccaaggaaattgggggggaaaaaaccactgcccttttagggaaagggagggggggaaaaaaatggagttttttaaaattttttgggggggaaaaattgggggtttgccccttataaccaaaccggtttggatactggccaaaatccgggaaggggttaaagccggggcccctccaatttccaacaatttgggccaaaatttttttttttttttccccccg

SEQ ID NO: 29065 - DNA, 646 bp, Zea mays
  Clone ID: MRT4577_126517C.1
gccggccgttccgggaggctccgatcatactcacaccccgcaatatctccacgccgccacacatcctcgcgccccttaggctccgccgagaacatgcgcggaccagccctctacaccgaaagcggatataagaccagagatctgctgtacaaagactaccacagagaccacaagtctctccctcacctacctacaagctccaatgcgcgtcatctcgtcactgactactgacctccacgcaaagatcgaccatgaccttcctctgagatccattcacagatcaaggaagagaacatgatcgcagatgacacatccaacatcagaatcaaatatcattactacggttactgtcaatgaaattgccacaacacgcactgaagactatcttaccctttgctgttacatgatcgacacatctgcgaaagaggtgagacttcagccatttcgtcctgattatagcatggatgtacatgcacaccgtaaactgacagccactcctgtaggcaagctctctgctgcctttggcactaaggctctccctgttcaagcacatatatcgtctgtattcgtgccactgtgaactctcacatacaccatgctgcattgatgttcactcgtgacataccttatctcatccctgaatatg

SEQ ID NO: 29066 - DNA, 157 bp, Zea mays
  Clone ID: MRT4577_126518C.1
cggacgcctgtacatacgcttgatcgccttccaagcttgcatggacgagcattttccctcagactgccgggtggtatgacctcaactacaccctgtaccctggccacaacgccatggatgctgtcgtgaagggcgaccatgatgaacatcaccatgt

SEQ ID NO: 29067 - DNA, 354 bp, Zea mays
  Clone ID: MRT4577_126519C.1
aaaaaggaaaaccaaatgcatttattgggcatccatattgaaatcgaataaaaataccgatatccattttaaccgtttcagcaaataccaataattcggatcttcaaacattcatttccagtcctacttataagtgtctgatccaaacttcccaacaacattgggctcaaattatattttcccttatatttaaaatttttcaccattgcaactgcaaaattatgttttccacaaccatacccaccaccctgtgacaaacgatttcaacaatattaaccatcaaaagccatttttatcactcccgggtttacttcaaattttttttttacttttcacctcttttaaaaaccccca

SEQ ID NO: 29068 - DNA, 339 bp, Zea mays
  Clone ID: MRT4577_12651C.1
tctgactcgttgactgacgcgtgcgtcataatgaagcaagcgttcctaactgcgcgctacaacatacctttttatcaaatcactcttcctttattttaacatccaaactgttcaacaactgtaactttacaatgctcaacccacttcattactaccagattaaccatatatttccaatttacattttccagatttgaacatctaccgatatattcaagagccttataacaagtttggatacattatgccgttaccttttgtttaattcaatcgctaaccaactgcgctattcaaatagacatacacactactactcctttatcactctttctttatttt

SEQ ID NO: 29069 - DNA, 400 bp, Zea mays
  Clone ID: MRT4577_126520C.1
tttaagcctaccgggtgatatctgtgtaggttgtgctctaccgagtggtggtatggaagctccatactaaggatgtaccatatttgtctgcatgcatgtcgctttcactcaggacgaaccaatgattgttcagaccattggcgctcgacaggactgcgtttaactgaaatagatttaggaccctaggtgaatagggcagctggagtcaaccggggacttaatagggatctacacaggggaacttggcctgcatgattgacctggcatcagtgggggcgctaataataatggctggcgagcttcaccagcttagtagaggtgttctgagcgggagctcaaatacaacgtttagctatactagagatggtgtaattggacttacttactattgggttaaaat

SEQ ID NO: 29070 - DNA, 1411 bp, Zea mays
  Clone ID: MRT4577_126521C.1
cattgggtacctcgaggccggccgggctctgctcctttttcctcctcctctcctttcctctcctctaggctctagtcctctcgcatccgcagcttccccagccagctagggtttgcagatgacgaccgcggcgcgccccacctgggcgccggccaagggcggcaacgagcaggggggcacccgcatcttcggcccctcccagaagttctcctcccgcgacctcgccgcgcacacctccctcaagccaaggtactctctctctctctctcccacctctctctgcgacctctatctgttcgtggaacctagtcgtcctcgctgcatggaatctcttacctcttacctgtccagacagctcgttcatggacgctttcttctttgtccctataaccataatcaatcctttcatcggttggcccccgggattttcgatctggttcccaggtccccgattagagcgcctgccgtcggttcgatgctaccacgagatagtcgccatggtgtggccgccttgtacaccggtgcccaaccttggccttcagaatttcgcgcttgcccgccccaattgtcaagtacaggatgcttaatcttgcctgacagcctttctgtaccacgtgttatctatcactacttataaaatcgagtcacatcgagtgcctgtgttaatgtttcagaaacagtatgcctttagtgccgcgaggtatattgaattagtaacaagaggtcatggttttgatttcttccagcatcattctcttttcctacatctgttcggagtcgctttactcctatacttacattacagccaccactacttcaatagattaagatgttattcagtgcaaagtaatgcctaccacctgtatctgtatgttgattattgtgtttgtttgataattcatttgacttaacatattgttatttctatttgggggttggaaacaccatggttctctcaggtcatcagcccccaccacaaaaaaaaaacagttcttacaaaacatgctatgctgaaatattagctaatctttgtaagtccaagtgtccatcatcaaacgaatgcctgcagagtctaccaaaataattgtctggatattgaaactgaaatccagcaggaccagtggctggggaagaatctgacagaaagttcattaatcctaatccatgtaaagatgttatattatcctttttgagtttggatcctgttgcctagttaactacacaaagcaaatcatttttgggatcctgactttttccccctaaatggccaagaacgaatttcattgcgattgtaacaaaattacaaagttgcacatggcgcagaaaccaaaacagaattacttctagaagcaaatgcattgaagagaaaaatcacacagggtcaaagggatctaactcaaagacgaccccc

SEQ ID NO: 29071 - DNA, 442 bp, Zea mays
  Clone ID: MRT4577_126522C.1
cccacgcgtccgcacagatttggcctgctccgccccacgggacgcctagccggatttgacagctccacgcgcgcgcgcgcgcgcacccaacccgcgtcttctccggcctgccagtgccgcggccggggctccatccccatccatgcattcgccgaggtcgcgcattcgcgtccgcgacccacacccaaacccgcaccggccctcgggtggcggacgaggaggaggaggaggatgcctccgccgccggtcaccgcctgctccgccctccccgcgttaccggcgacgcccgcagaggcacaccccgccgccgcggcgcggcagcgatcctcaccccgacatctacgccatcgcccgccaccgcattctgctcgaggccggccgcttcgccgcgcattacctggtcggccaaggcgtactccccgaccacgtgctcagggacagg

SEQ ID NO: 29072 - DNA, 1933 bp, Zea mays
  Clone ID: MRT4577_126523C.1
gagcctcggcctccgcctcgtccacgtcgacgccaaccgcgccgaggaggtcgcggacaccgtcatggcgctcttcctgggcctcctccgccgcacccacctgctgtcccgccacgcctcctcgtcgtccccgactgctgggtggctcggctccgtgcagccgctgtgccggggcatgcgccgatgcagggggctcgtactgggcatcgtcggcgtcaacgccgccgcacggtgcctggccacccgcagccttgccttccgcatgagcgtcctctacttcgatccgctctacgaggttactgggaaagtaaagcgtccttctattgtatttccttctgctgcaagaagaatggatactctcaatgatctattagcagcaagtgatctagtttcgcttcattgtgcattgacaaatgatacaacacatatacttaatgctgagcgccttcagcacataaaacctggagcgttcatagtcaacactggtagctgtcagctcatagatgactgtgcactcaaacaactcttgattgatggcactatcgctgggtgtgcattagatggcgctgaaggcccccagtggacggaagcatgggtgcgtgagatgccaaatgtattaattcttcctcgaagtgcagactacagtgaagaagtgtggatggagatcagagagaaagcaatcgcaatattgcagtcctttctctatgatggtgttgttccaaacaatgttatttctgatgaagatgaagagatgagcgaaatgggatgtgacgatgatcaacttgataaacaagaaaaagaacatcctttacagatttgtgatggtgaacagcaaacagaagaaagccaattgactgcagaatatgacaagagaagagccatttcacaacctgaagagcctcaagcttctgcacaattccgccgcatttcctccagatctgaagggaggcgcagccgatctggaaagaaagggaaaaagagacctgctcgccgtagatcacaacagaaaatggatgaattgtcaactgtagaaggtggaagtaactattcttcacgcagagacgatgataaccaagtgttaagttctagttcacgatttgcatcgcctgaggactcaaaaaataaacagaagtcttctgttgagtctccaatggagataatttctgaaaataagttgcctgtagggcttggtagaaggcctcctgaaaagctaaaagaaggttttgttattgctctaaagacaagagacaattcaggtttttatgtttcaagagagagggtcactggcggtggatggtatcttgatgtgataccaaatgccacaaagagggatcctgctgctcagtttttagtcactttcagaaacaaggacactatgggattgcgatcttttgttgctggaggcaaactattacaggctaataataagatggagttcgtcttcgcaagtcattcttttgatgtttgtgagagctggatgctggaagggtgcctttcagaatactgcaaacttgttaatcgcaaaaatgctatggctgtacttggggtctatattgaggtccttggagctccgagtgaagatggtgtcgttcggtggcttgattaatacatcaaggctatgctatatttagagaacattttaaggctatgttgtttctatagaacaatttaggcttatgctgccaaactgctatcctcgggttaggtcttctctgagtctctcttgccaagtctcagttttggctgttctactgcatctgcatggacatggacccgcaacgcagtctttttttgtttgtttgtttttttactgtctgtttgttgtaagctgtgtctattgtattttatattatacagtgtgacaagcaatcactattctagtattctctattcaaaattcaaaaaaaaaaaaccgcggccaaaaaagaaaaag

SEQ ID NO: 29073 - DNA, 286 bp, Zea mays
  Clone ID: MRT4577_126524C.1
atttccttagaaaaaaaagaaaatcgccgctgtcttccttgttgaacgccgtcgggtcggcatctagctccctgcgtcctcgcctcctgctccgctccatggccggctccctgagctcgcccctgctcagattccagcgccccgctccctgtttaccccagctcgcctggccgctgcgcacccctgctcttctccccagccacgcgttcccccagctccagctcgctgcgcgtcctgctccactgtgtcgatccagtgcgtcgtcgtcgatggatatcccctgtgt

SEQ ID NO: 29074 - DNA, 395 bp, Zea mays
  Clone ID: MRT4577_126525C.1
aaaccctggaaacaggggcccaaaaccaaaattttttttttaattgggggggggaaaaaatttcaaagatgggccccaattttttaaacccaaccggggtttttttttgggggcaaaactaaaaactccctccccccgtagttaggtaaaaaaatcggggattaatttatgccgattttaggccaatttaaaacttggaaagccccttttccattggggaaaaaaaaaacccaatttttttttttttttaaatttatttaaagccttttcaaaaaaatttttttttttttgaggtttaaaaaaaaccgggattggggcaaaaattggaggccattgttccaaggtggggggcggggatccttgaaacgttttttaaaaacctcttttcccaaggg

SEQ ID NO: 29075 - DNA, 1122 bp, Zea mays
  unsure (1)..(1122): unsure at all n locations
  Clone ID: MRT4577_126526C.1
ctcgccctgatcaaacgttccgataaaaaaaaactggttaaagattcatatgactccgagaattgttcgacgttatcttcctctctcatgtgctagcgttgattttcgttctgcgtttgttcctataccctacagtcgctggatattttcccttagccattgagccgatctgtcgtcctcatcctctatcgcgcaaaaaaatctggccgccgatgtgcttggactcgccagccgctgctgctgaggattgtttttacgcgcgctcttatcctctccacgccgctcagcacataggatatttccaccgctccagcctatcgatcccatctccctgggatttttacctgttgcgcttgccatcttcattttccccatgcacgctctggtttctgatttttatcagctcgtcttccacctccgttcgtcgtacactcgtacccgtgtggttgagctcggcttcgagctcccattcccgatgcgccgtccgtcacctcgccctcggcgcgcgcctctgcttcctggtagccgcgcccagcttcctctcttccgcgcgccccgctgcttctccttggccggggcttcttcctctccctgctcgccatggctggtcgagtttttccccagccgcgaagctccctcgtgtgcgtgcgcgctctgcctctccctcagcccaccgcgtcatggagccctgcgcaccacggtagttctttcctgcccctcccatggcggctcccctggatccctcctctgctcggccgcctccctggagtccaagtccggacgccgctccagccttctcttttctctcttctctagccctgtccggcctccagcttcagccatggttctccctggtatttccccaagccgcgcacctctgcttggctatggtcaccgtcacgcccaggattttgccgcgcatgcagtttccaaattcgtcttcagctcgcggcgctcctcatcttcttccccgacgtcgccctctccccctcgatgctcggctggtcggcgtctctccctgccctcggccatggagcaccgcctcgagcacccgttgctgcacgctctgttcgcctagcgagtcgcgcccaggctgaactgagccattncccctggtcatcg

SEQ ID NO: 29076 - DNA, 1667 bp, Zea mays
  Clone ID: MRT4577_126527C.1
ggctcgccaggagccgacacacacaccgcaaaaggcccacgagaagaccccgccggcccgccctctccctccccacctctactccacctccaatcctccccgttgctgtcccgccggcgtcgaagctcgagagaagggtgagcaccttgccgcgaggtgtgtccggtgagctagctagggacgcgccagctcgtgctgatctgacctggaagctctggaggcgatgaaagcgctcggacgggcgatgagggatgaaccaggtaggaggaagaaggacgcatcgtggcggatcttttcactgaaggagcttcagtcagcaacgaacaatttcaattacgataacaaggtcggcgagggtgggtttggcagtgtctattggggccagctctgggatgggtcacaggttgctgtgaagaggctcaagagttggagcaacaaagctgaaacagaatttgctgtcgaggtggagattctggcacgggtgaggcacaagagccttttaagcttgcgcggatattgtgctgaaggccaggaacgcttgatagtctatgattatatgccaaacctgagcatacacgcccaacttcatggacagcacgcagcagagtgcaatctcagttgggaaagaaggatgaagatcgccgtcgattccgcagaagggatcgcttatctgcatcaccatgcgacgccacacatcattcatagagatgtcaaggcgagcaacgttctcctggattcgaatttccaagctcgggttgctgactttgggttcgccaagctagttccagacggcgcgacgcatgtcaccacaagggtgaaaggcacactcggttatctcgcaccagagtacgcgatgcttgggaaggcctctgaaagctgcgatgtcttcagtctcggagtcatgctcctagagcttgccagcgggaaaaagccagtggagaagcttaaccccaccacgaagcgaaccatagctgagtgggctcttcctctagctcgggacaggaagttcaaggaaattgccgatccaaagctcaatggtagcttcgtcgaggacgagctgaagcgaatggtgctcgttgggctcgcctgttcccaggacaagccagagcagagacccgtaatgtctgaagtcgtcgagctgctcagaggagaatctaccgagaggctttccaggctggagaatggtgatctgttcaagcctgatatctcgttccatggctcatccggacctgatagctcggactgcgtcacggaggagaggagtcccaaggcagatgcgacagaggaggctgttgattcaagtgagacggttccctcagcaaggtagtgtgatgcacggtggtgtactgtcagtaggtgccctgagctccttgcctgggggaaatgtgtttatcagttcatttttgtggttattccttgctatttagcaagttaatctgggagcctccttgcccggttctcttgtgtggtgtcattccttcgtgttggcatggttctatggcttgtaaaattctgtatgtaaatctgggcctggttccatcccttcgtgtagcaagcagttcactgcactgtggttagcgttttagctacttcagtccattaatgatttgtgtgtaagtctgtaatatgtatttttttaggtttttatgatggaacttcgtttttct

SEQ ID NO: 29077 - DNA, 333 bp, Zea mays
  Clone ID: MRT4577_126528C.1
atggataagagacagtggctactagcgcgtctggctgtggcggcggctagtgtgccaggtaaccccatggtggcagcgtccgcacgcgcgcccgaccagcagcagcgatgtccgcctgttagctctgccagcgacggcgacgcccgcgtgtggctacttaggctcacggcgacggctgtgacggagaagggagtgcgggggagaaagtggtcggcatcttggtcagtgtcggcgagggccagcgaggaaggggccgccatggagagaggggtgggctataaggcgacgcgacgtaggggcgtgcggatccggcgatgtcggcctgggaggtag

SEQ ID NO: 29078 - DNA, 801 bp, Zea mays
  unsure (1)..(801): unsure at all n locations
  Clone ID: MRT4577_126529C.1
gtttacggcagtggaaagtggtgatgcgctcagccgacacacacaccgcaaaaggcccacgagaagaccccgccggcccgccctctccctccccacctctactccacctccaatcctccccgttgctgtcccgccggcgtcgaagctcgagagaagggtgagcaccttgccgcgaggtgtgtccggtgagctagctagggacgcgccagctcgtgctgatctgacctagaagctctggaggcgatgaaagcgctcggacgggcgatgaggtgggcttcctgctgcaagctctcggacggggatgaaccaggtaggaggaagaaggacgcatcgtggcggatcttttcactgaaggagcttcagtcagcaacgaacaatttcaattacgataacaaggtcggcgagggtgggtttggcagtgtctattggggccagctctgggatgggtcacaggttgctgtgaagaggctcaagagttggagcaacaaagctgaaacagaatttgctgtcgaggtggagattctggcacgggtgaggcacaagagccttttaagcttgcgcggatattgtgctgaaggccaggaacgcttgatagtctatgattatatgccaaacctgagcatacacgcccaacttcatggacagcacgcagcagagtgcaatctcagttgngaaagaaggatgaagatcgccgtcgattccgcagaagggatcgcttatctgcatcaccatgcgacgccacacatctttcatagagatgtcagggcgagcaacgttctcctggattcgattttccagctc

SEQ ID NO: 29079 - DNA, 353 bp, Zea mays
  Clone ID: MRT4577_12652C.1
tttttgtgtttataatatagggttggttgtgtttaaaacaacaaaaaactttcgttcattatactcattaaacatttacatccacatacctttattcacgataaagttctttaccattaaagcatccatcaacagtttttttaatccacattaggctatctttcttaccatcaatgtaccattatcccttacattaaattttgattaacattcaaatcaatcactctcaataaaaagttacccactccaatcccaagcaaaaaccttattttttttttatttcaataatcacacattctttatactccaattcaaaatctttttatttttaatacacttacatactacaattt

SEQ ID NO: 29080 - DNA, 693 bp, Zea mays
  Clone ID: MRT4577_126530C.1
gctcctcccaccagtgagatcgatcgagcttccacctcctgtcatcctcctcctcttcctcctcttgcaggtcgcagctgagcagcaacaaggccggaaaggatgtcgtggcagacctacgtcgacgagcacctcatgtgcgaggtcgagggccaccaccacctcacctccgccgccatcatcggccacgacggcaccgtctgggcccagagcgccgcattcccgctgttcaagcctgaggagatggccaacgtcatgaaggacttcgacgagcccgggttcctggctccgaccggcctcttcctcggccccaccaagtacatggtcatccagggcgagcccggcgccgtcatccgcgggaagaaggtcttccttctttttacggttaatttccagggatctggaggcataaccgtgaagaagaccggggaggcgctggtggtcggcatctacgacgagcccatgacccccgggcagtgcaacatggtggtcgagaggctcggcgactacctcgtagagcaaggcctgtaaacggaattgcttcagtccaatcggaattgtttataatttgttgttgtcgttccggcaaataattttgtgtggtttcacctaaaagtttggttgtcgtatgatttgtaaaccccgaacagtatctatatgtgattgaactgcgcctacctattcttttattat

SEQ ID NO: 29081 - DNA, 327 bp, Zea mays
  unsure (1)..(327): unsure at all n locations
  Clone ID: MRT4577_126531C.1
ggccgacggacgcgtgcgatttgattaattataagcaagtacttgaacttaaaaaacgagggccanaccacgggcgaggatcgattttatatttgcgaactcctcatttgtcttcttatttcaacttttcaatatgccccttcctataatcttgtcctcccctacaaagtttgtcgactcttgcctaatcaaatctatatatcaaataaaaactacaccttatttttatatgtctttattactcatcatgcaatcgattgcttaatcaattttactttcactattttatctcaaaaaaaacaatataatttttttttcactctatta

SEQ ID NO: 29082 - DNA, 423 bp, Zea mays
  Clone ID: MRT4577_126532C.1
cccaaaaggaaaccctccccttcgtttggggcggaaaaaggggcaaggcaacttgggggggcccgggataaaaaaagggggggggtccactttctgggggaaaaaaaaacctatccctgggggggggaaaccaagggattttttaacaaaaaaaaagttatatcggggggagggggcggaactaatggggggccccggtttaaatgggcgggacccttagggaaacgccaattgggaacccaagctttgaaagaaagttggggaacataaccttttccaggggcaaaagggaggggggaacccccctggtggaaaacaaaaagaccattttggggggggaaaacaaaagaaaaagaaaggcccggggtcttttttctggggggaggagcaccctttttacaagaacagaaggcccgggggggg

SEQ ID NO: 29083 - DNA, 794 bp, Zea mays
  Clone ID: MRT4577_126533C.1
tcttcgcgagcttccacctcctgtcaatctgtcatcctcctcctcttgcaggtcgcagctgagcagcaacaaggccggaaaggatgtcgtggcagacctacgtcgacgagcacctcatgtgcgagatcgagggccaccaccacctcacctccgccgccatcatcggccacgacggcaccgtctgggcccagagcaccgcattcccgccgttcaagcctgaggagatggccaacatcatgaaggacttcgacgagcccgggttcctggccccgaccggcctcttcctcggccccaccaagtacatggtcatccagggcgagcccggcgccgtcatccgcgggaagaaggtaccgccgcccgcgcgccgatctcgatcatatcatatctcccgccgatctctcttcctgatcatagcaggtcttccttctttttacggttaatttccagggatctggaggcataaccgtgaagaagaccggggaggcgctggtggtcggcatctacgacgagcccatgacccccgggcagtgcaacatggtggtcgagaggctcggcgactacctcgtagagcaaggcctgtaaacggaattgcttcagtccaatcggaattgtttataatttgttgttgtcgttccggcaaataattttgtgtggtttcacctaaaagtttggttgtcgtatgatttgtaaaccccgaacagtatctatatgtgattgaactgcgcctacctattcttttattatacgggaatatgtatgtatttcgtgcaaaaaaaaaaaaccccccccccccc

SEQ ID NO: 29084 - DNA, 451 bp, Zea mays
  Clone ID: MRT4577_126534C.1
gctttcgtagcggcgcgccacgggcaggcttacaaaaaacaacaagacgaggaacaagctttttttttcttttttttttttttttctttttgcctttccttctttattttctttacggtggcattccctcgacctcgcttttggtgggccccgttcgccccatcgccccaggggccccattgccctggccttgggtgggccccgtgggcactggtgaacccttgacaatttcccaattggtcgacttcccacacatccccctttagccagctggcgcctttccgacttgcccccactggacgagcttccccactagctgccgctctgaatgttgaaagccctcccccccaagtggatcactaaacccgcccactctcatgggcacgcgcaacgcgacctgtacacttttcaaacccctagcgccctgacctttctctccccgccgttcctt

SEQ ID NO: 29085 - DNA, 765 bp, Zea mays
  Clone ID: MRT4577_126535C.1
cattgggtacctcgaggccggccgggccggggcgtacgtgagcgctagctcctcccaccagtgagatcgatcgagcttccacctcctgtcaatctgtcatcctcctcctcttgcaggtcgcagctgagcagcaacaaggccggaaaggatgtcgtggcagacctacgtcgacgagcacctcatgtgcgagatcgagggccaccaccacctcacctcagccgccatcatcggccacgacggcaccgtctgggcccagagcaccgcattcccgccgttcaagcctgaggagatggccaacatcatgaaggacttcgacgagcccgggttcctggccccgaccggcctcttcctcggccccaccaagtacatggtcatccagggcgagcccggcgccgtcatccgcgggaagaagggatctggaggcataaccgtgaagaagaccggggaggcgctggtggtcggcatctacgacgagcccatgacccccgggcagtgcaacatggtggtcgagaggctcggcgactacctcgtagagcaaggcctgtaaacggaattgcttcagtccaatcggaattgtttataatttgttgttgtcgttccggcaaataattttgtgtggtttcacctaaaagtttggttgtcgtatgatttgtaaaccccgaacagtatctatatgtgattgaactgcgcctacctattcttttattatacgggaatatgtatgtatttcgtgcaaaaaaaaaaaaaaaaaaggcccctagggcc

SEQ ID NO: 29086 - DNA, 255 bp, Zea mays
  Clone ID: MRT4577_126536C.1
ccgaaaacaaattttgcatctggtttttgaaagcaaaatttgttttcggtggccttctagaaaaaaaaaaaaaaaaaagaataaaaaaaaaaaaaaaaaaaattaaaaaaaaaaaaaataacaaaaaaaaaaataactgaacaagacattacaatcaaaaaatatgaacaatattgtgggaatgcacttgatatgcttcttcttacagatgaaaaaccacctggggctggacgcagatgtcaatccacgaactgt

SEQ ID NO: 29087 - DNA, 490 bp, Zea mays
  Clone ID: MRT4577_126537C.1
ctcttctacaagttgaggtgtcggccaactgtggctgtttcttgactctagtatccggatctaactccattaactcgaacccctttaccatgcatgtatgaaatggatgagatgtaatattgggtcgagcttttggagtctctcatgcgtagatccaggttccagttgcgttttttctgttgtgaatcggtcagtgcatctgtgcacttttgattcagtcccaattttgggaatatttcagttatggttcaaaaccgtaatccgatctgtatttctgttacatattgactatttcttggtcgtcgtggatagttggatcttgagccctgtgcaccgtctctgttgatggttgaactgatagggttaggttattaaaccctaaccctaaactgacggtgtgttttgctctttcggtttccatggttgtggtcgagaccaagtctctcagttgccgaaaccctaaatttagtgttaggtaaaccctaacccg

SEQ ID NO: 29088 - DNA, 345 bp, Zea mays
  Clone ID: MRT4577_126538C.1
aacacaaaaagcgcccgggtcctttttttacattaccccaaaaagggttttacaagcctcccaactttttcccaaaaaccaaacatacatttttttttggggggaacaaaaaaaaattttttttggcccataaaaagggaaaggggccccctttattttaaacgggtttcctttagggggggtaaatttgcccgggacaaaaaaaaaaaaaccctccacaaatcctggtacttggggcaggggggggcaacttttgtaaacaaactttttcttcccagggaacaatggaggattccgccccaaattttttgttcaggcccattccctaatcaccttttaaaggaa

SEQ ID NO: 29089 - DNA, 289 bp, Zea mays
  Clone ID: MRT4577_126539C.1
ggttcttgcttcgatggagagggcacacgtcatcagaagagacagccctacatgtactgattggagcccccgtcaagaacacccaaccaaaattaatttgccctctggaaaaagggggggagatgtaaaaagccatccaattacatttcatcctgacgaacccttggtgccactatttgtacgtgtgccagaactctctgaggaaaagggccggagtcaaccgacccgcaaaattagttacgccggggacagacagcccagtggcaagaaaagggtgagcttccttgag

SEQ ID NO: 29090 - DNA, 475 bp, Zea mays
  Clone ID: MRT4577_12653C.1
ggccgggatcctcgttcacacaatcgataactcattgaacttctgcctggaagaccggcgcaggtctaaacacaaagcacagagctgcgccagcatcatagcagtcaccagacgatgtgcaacagatcacacctgtccagggcatgtgatccatacataacaaagctcaggcggcgggagccactcaacagctccccagggatgaagcactgcccgaccaacaccctaggcttgggccaactgatgggaaacttgcgccttggatagacagcatctgcacctccggcccgccgaccatctcgactacagcgtctcaatactgcctagctccatgaggtactcctactgcttatagcagaaccaacttttgatatcgatgacctcatccttaatcaaagagaacatgatgagaaactgccgcgagccaccaggaggactatcactgtggatcgcctcctgcacgcaccgatgaccc

SEQ ID NO: 29091 - DNA, 855 bp, Zea mays
  Clone ID: MRT4577_126540C.1
gggatggaaatcagggggctggggcattgtctcctggggggtccagctcctaccggcgtggtagctgaggacgtctgccaccctgctgcacctcgaggaggtgggggcggtaagcgccttaggaacttttcataggttgtcagtgctcagagaagatccaaggaaaaaggccattctgatgttttatacttagatccactccataataagtttgttgaggaagtttcttcttgtaatatattcatggtgaaggacaatattatttctactccactgttaacggggacaattcttcctggaatcacaaggagaagtgtgattgaaatttcgcagaatcttggatttcaggttgaggagcgtcttatcacaatagatgaactgcttggggctgatgaagtcttttgtacaggaacagctgttgtattgtcacctgttgggagcatcacttaccgtggaagaagagtggagtatgggaagaaccaggaggccggagtcgtgtcccaacaactctatgccgcactcacagctatccagaaaggtctcacggaggacagcatgggatggacgttgcagctaacttagcagcttttttcacatgatcgagctctacaactcttatttccgttttctcgataagtctcacttctatcaacttgttcttctgttgaaacagagtactttaaaagggatccccaataatgactttccctgtgtattgctgatatgttggcactagatatttttggaaactctatttaaagcacagtgttttgcaccaaaaaaaaaaaaaaagggcggccgccgactagtgagctcgtcgacccgggaattaattccggaccggtacctgcaggc

SEQ ID NO: 29092 - DNA, 238 bp, Zea mays
  unsure (1)..(238): unsure at all n locations
  Clone ID: MRT4577_126541C.1
ccgacccacgcgacctaccataccaccacgcacaccnagggcgcgggggggaacaatttaagccacggagggggcggccccccgccaagcgcgccagccacggaacacggcgccccggacggaagcagcacaggccgagcgagccaaaacaggcacggggaaggggcagaagcacgcgcaccgggagcaggccagggccatgggcagccaccaccaaggccccacaccaagaaggggc

SEQ ID NO: 29093 - DNA, 275 bp, Zea mays
  Clone ID: MRT4577_126542C.1
cccacgcgtccgcgagcggcgccgctcgaaggcgacgagcagcagttgcggcggaggctggaggaagcggcgctcctcctccgcaggatcaaagggcttgtgcgctggatcgtcgaagaggttgccgccggccgctccccgtctatagtgctccaccgtgcctgcagctacgacatccccgtcggcacggacgtcctctctctgctccacaaggactaccacacctcccgcctcaatgtgctcctgagggtgctggtcgtggtgcagcagcttct

SEQ ID NO: 29094 - DNA, 669 bp, Zea mays
  Clone ID: MRT4577_126543C.1
atctactctctccactcagagggaggagacaaggagcactccgccgccgccggctgctccgtaacccacgaagctagatagataagcatggcggccaccagcgcgagtgccggtgcctccctctccgtcacggctgccgctcaccgcctcaggcaccggcagctatgcgcttgcgcacgtgggcccgcgacgcgaccgcatcccctcctcaagctgaaccgccgcagctacgcggtcgcggcgtcgtcggcggcggccatgtctcctctgtccctgtgggaaggccaaggcatccgggcggagttggatgcgccgggaggagttgccagcggtgacgtcatgggccttcttctccgggagcgcatcatcttcctcggcaacgagatcgaggacttcctcgccgacgccgtcgtcagccagctcctcctcctcgacgccatggactccgagtctgacatccggctcttcgtcaactcccccggtggatcactcagtgcgacaatggctatctttgatgtaatgcagctggtgagggcagatgtatccactattggaatgggcatagctggatccacagcttctataatccttggtggtggcgcaaagggcaaacgattcgccatgcccaacaccaggattatgatgcatcagcccgtgggaggcgcgagt

SEQ ID NO: 29095 - DNA, 480 bp, Zea mays
  Clone ID: MRT4577_126544C.1
aaattccaaaacccccttttttaaaaaaaaagctttacttatttttaaacaagcgatttttatctttaaaaaaaaaaaactttccggggaaactaaacccgaaagaccctttggatacccccaaaacagaagtttttttgggggacccccccctattttctaaacattttttggccgggccaaccggagctccaatctgaaaaaggtcgggcgggaaggcggcccccaaaaaaactttttgggtggccttttcggggccccaagaaaaagggccttgcctaccaaaccggggtggggcacccaaaccggagccatgggcccccaaaccaccaaccatttcaaataaaaaccagggggaacggcatgggagcggccattctcgccccgggttttatcggcacccgaaagggctgggcccaagggaccattggaagcggggagggaaatctggggggccattcaacccatgataaccctggg

SEQ ID NO: 29096 - DNA, 703 bp, Zea mays
  unsure (1)..(703): unsure at all n locations
  Clone ID: MRT4577_126545C.1
gccggnnggattagctccatgggggggcctcgaaaaaaggaaaataaaaaactagcgccatggcggggagggataagaggcgacgagcggcgccgctcgaaggcgatgagcagcagttgcggcggaggctggaggaagcggcgctcctcctccgcaggatcgaagggcttgtgcgctggatcgtcgaagaggttgccgccggccgctccccgtctatagtgctccaccggtaccggaactactgctcctccgccgactctgcgtccccgtccccatgtgcctgcagctacgacgtccccgtcggcacggacgtcctctctctgctccacaaggactaccacacctcccgcctcaatgtgctcctgagggtgctgtttgtggtgcagcagctcctgcagcagaacaagcactgctccaagagggacatctactacatgtacccctccatcttcgtagaagtagcagttgttgaccgtgccatcaacgatatctgcatactcttcaagtgcagccggcacaatctcaacgtggttcctgtagtgaaaggtttggtgatgggctggataagatttatggagggcgaaaagaaagtgtattgtataacaagcgtcaatgctgctttctccattcctgttgacattgaggcaatcaaagatgttgttagtgttgcccactacatacttgtggttgagaaggagacagt

SEQ ID NO: 29097 - DNA, 492 bp, Zea mays
  Clone ID: MRT4577_126546C.1
tggagggcacaggcggcctgggtggacccaatggctctggttttgcctttgggtctggggaatctacggccacacttcaaattgaacccaacactggcagtatcatttcgatgatcgttgctggtgtgctattaagcgaatcacgacttgatggaggtggtctagtatttggaacaatccttaaaggttcactgctgttgctgctccccttcgtaaggtgtggtgtttggcggccctcttgggactggagaaagtctgcttgccaaggcaattgcgggagaggctgccgtaccattggactcaatttcacgttatgagtttgtggagatgttggctggtgtcggtgcttgcacactacgtgagctcttcatgaatgccgcgctgaacgctcattgcatagtgctagccgatgaaaccgatgctgtttgcaggcacgcaggccaggtattggtggctggaatgatgatgggagcagaccttaaatcaacttct

SEQ ID NO: 29098 - DNA, 226 bp, Zea mays
  Clone ID: MRT4577_126547C.1
ccatgacgctccgccctcactccaggcgtgcagacgcacggattactgccaatgatccacagagactactgcggcagatcgcgtacgctggatcccaactgccagccgtctcccgacgagagtctccacgcacgccccgggcgaggaccccacatggctgcccatcgccgatgggcaaggcgggcgatatcatgacgcgaatccgcaagcacgtgatgatggtcat

SEQ ID NO: 29099 - DNA, 304 bp, Zea mays
  Clone ID: MRT4577_126548C.1
ggacgctgtttgagaataaaactggcacaaggttgaattcaaattcaaattaaaattgaacttagaaatagataaaagaaaagaaaaggataaaaagaaagaggggagagaagctacctggaccgcgcatccccattctggcccatttcacttcccctcgtgcacagccactagcaccacaacattgcgcacagacagggtggggcctgcttgtcattcgcactacacagtgccgctctcacgagcgctcactctgaccagtggtcctagggggacagcgacactcttcactgggatccggtgg

SEQ ID NO: 29100 - DNA, 619 bp, Zea mays
  Clone ID: MRT4577_126549C.1
gaggtgggcacataactagcagtgatacacaaggtttaacccacgtcagcaggctgcccattgcaagctttaaccactgcgctaaaagcgctttcgctttcattacttgaagaaggtaaatttgtaagttagagcccctaactccctataagacctttaacagaaacatgtttttttacgatcatgaaagggatgacccagaaaattaccacacctgcctacaaccacatcccactaaccccactacaaacacagtgagtaggccccaagaggttcctagctcccacaccacaccacaaataaccttcattcatcatagccttggttacctggttcggatcaggtgaaacataattggaaacgtaatcattttaaaaccttaagtatgttgcacttaaaaataacattttatgcaatgaggtggtactggagataaggaaaccccccaaaaatacctttttgttctcttgcttgaagaaaacatgtaatattcttaagtatgcgctgtacttgaagaaacaacagcccacccatgataatttcactgagcgaatctggcagatctaatcctggaaactcaaggccttgaacagcacttggattcactcgcagaacatgc

SEQ ID NO: 29101 - DNA, 379 bp, Zea mays
  Clone ID: MRT4577_12654C.1
gcttacgaccgctttccgtgatggcggattgcgcaacaggactggcacatttttcttcaaagagcatctgaacaaaatcaaggtcccagtgcttgcccttgctggagacgaggatctgatttgtcccccagaagctgtttatggtttggcaacaagctccatttctcctttgttcttttgcaataaggaatcctcctttttatagcactaaacacattaagtccgtttggatgcactatccacctttattcatgtctgttggagtggattagggtggaacttggtttagttttcaccccaatccacacgtggattgaggtagatacaagtgcatttaaacaagccctaaagtgtgagtggtaatttcaaccaaaagaat

SEQ ID NO: 29102 - DNA, 799 bp, Zea mays
  Clone ID: MRT4577_126550C.1
gtacaggtcaaggaatttcatcctgatgtttgcaaggacccagaaattgcagatttaagaatgagcgagtgatggaggtctatcagggagtgttcttcgttgttgtccattgtgaaacatgtcctaccgtatcccttgccaaccagctcctgtatctgttgcccactcgattcgttgaagcacagagtatggagaaaacacaacatatatcgcatggattatgatttgttagtgcatgtgttacatattgacttatcgttttgagttgtcaataggtccaaggtactaaattgttgatgcacggatttctaattttatcaatttgttttgtgggctgcgatttattttaagtcgctctaagatctcaattattcctcttttttgttattttttatgccttagctgtaatgtttgttttgaatatttattattggaaaatttgatattttataggtgagacattaattaagccattttcataaaagaacactcctgtggtgacaattagacaagaatactaataatcagattaacatacttaaccttgactgcacatatagagactacagtgttgtgttgtgttggttcactgtaccacaaacaatattgaagaggactgatgaagagcgcaaagtttatagcatagtcgaagattttgaattgcaattcaaggagaaagaggattgctaaaggtcttcataatacttcttgttttcattttagttggtgggttcttcagtaaagctcacaaaatatttattttttctcaaagctttcttttcaatttaggatgaccttc

SEQ ID NO: 29103 - DNA, 478 bp, Zea mays
  Clone ID: MRT4577_126551C.1
taggggccttttttttttttttctttgcttttttttttttttttttttttttttttttttttttttttttttttttttttttttttttttggggccggggacaattgcgggggggggcttccgggcccaatcaatttgccttcggcttctttttccaaccaaccgattgttgttttttggtttccccggttaattttcccccccccaacctccggccttggaaaaagaaggatttgcccttttaaaaacttggccttttgggcttgcccccgccttgttgaaaaagggggccccagatgggtacaaaagttttttgggggccttaagccggaaaccggttggggtacccccgatgggttggcccttccccgaattcggggtttcaccgcccccttccaatttggctccgcgcaaccgcagggccccgggggtttatttccccggggaattttcccttttcccccccgggggggggggg

SEQ ID NO: 29104 - DNA, 299 bp, Zea mays
  Clone ID: MRT4577_126552C.1
gcaactaacgcgatcgcgcgccgacaacgacgcgcggtgccggcgcctttgttgcggtgttacaaactccgctgcatcgcctcggtcggtcgtcgtcatatcatgggtgtccggctgccggtggcgtggtccgccgtcctcgtcctcctcgtgcgggcggccgtggctcgtgagtactcggccatctttaactttggggactccctggtggactccggcaacctgttggttgacggtatctcgtactacctggccacggtgctcttgccctacggcatgacccacttcggttaccctac

SEQ ID NO: 29105 - DNA, 239 bp, Zea mays
  unsure (1)..(239): unsure at all n locations
  Clone ID: MRT4577_126553C.1
attgtccacgcgnccgttcacgcgnccgcggacgcnnggggggacccacgcgaaggggcaaaaaggggcccccctaaaaggcgcccccccaaacaacggggcntaaaagagcgcccgaacaagacacccaagcacaacacaagcccaaccagcgcaagcgtcaaaagaccaaaacacaagccaaccaggaacgttcggggcgacgggaacggacagaacaacagcagagagacaggcaa

SEQ ID NO: 29106 - DNA, 298 bp, Zea mays
  Clone ID: MRT4577_126554C.1
agccgtttgcaacaagtgctggattaatgggatggtgaccttcttgctgcagtggtgtcctgcgccggtcaagcccgcctcggtcacctaaggcccgggtcttctatgctagaatcgaattcgatgaaggtgaagtgcactgaaaaccgcaaggacaacccctactgcttgaaccggaacatggactgccccgccgactgccccctattcagctaccccgactgcaccacttgccaacccgtctgtctgtgcactcctcggtgccgtgcggagaacccgcgccttctaggtggtgact

SEQ ID NO: 29107 - DNA, 494 bp, Zea mays
  Clone ID: MRT4577_126555C.1
ctcatatgtatgttttgctcttttcgtttccttttctgttttccgcaaaaaaacttctggagaactagtaaatcgggctttttctatcgctaaaacccccttaccaatgttcgatacccctgttcccctacctcttataaagtgggggccttttattcttcaaagtgaaaacccaaaggtggcagcctttaaatctgcaaactggcctaactttttgcgtaaaccacccccatgaggagcgtccagccacgctccataagagaaatctttgtgtctatcaaaaggcttggacacagccccttaatgtgccgtgcccttcctacgtttttccgtatgcagcggagagagttaacactttatatgtttcctcctctgaacaccaaaagcattcttcagcaacagggagggagattcctcttgagcgggtggaggatgctactgaagaattactttttgtttttgcacagtgcaacgaatatgctgaaacacgctca

SEQ ID NO: 29108 - DNA, 191 bp, Zea mays
  Clone ID: MRT4577_126556C.1
cagaagcttgggattccagccggctgctgagcaggatcgacgtggacgtgcacatccagatgacgtcatagacccggtatagtgtcatggcgctgtacttcactaaccgtagtatttctgggcgctgcatgatgatagcggggtggataccatgttaaccacgctggagcacatcgtacgttcgtcacctg

SEQ ID NO: 29109 - DNA, 138 bp, Zea mays
  unsure (1)..(138): unsure at all n locations
  Clone ID: MRT4577_126557C.1
tcctttcatcgtcatggacgacnccaacgccggccaggccgttgtgttttcgcgccaaacaancttcattaaacaagggccaatgctgttgccccggatcgcgaccgttcagccacaacccctttaccaacaagttcg

SEQ ID NO: 29110 - DNA, 709 bp, Zea mays
  Clone ID: MRT4577_126558C.1
ggccggcctcacggcgacgcctgcctcgccaagctctgcggcgtcatcgcggccgacgagaggcgccacgaggccgcctacacgagggcgtccgacagggccttcgaggaagacccggacggcatggtgcgggcgctcgccgccgtcatgcgcgccaaggtcaccatgcccggcgagctcatggccgacggccgcgacgatcgcctcttcgatcacttctccgcggttgcgcagcgctcaggggtgtacacggcggcagactacgccgacatggtggagcatttcgtgcgcaggtggaaggtggcggagctcgacgctggcctgtccggcgaggggcggcgcgcgcaggactacgtgtgtggcctgccgcgcaagatacgcaggatggaggagctggctcaagaccgtgcggctcaaatggaggcccagtcggtatgcttcagttgggtgttcgataggcccgtccgcatccactgatcagctagcttcttccaatccaaagcaagcttggaggcccatttgtccctcatcaactgaagaaggcccagctacttctacttattttactttcccttaataaaaaaaaacttttcgttgcttaatcagccataataaatactcctatatcctagtataatacagcctggctgcatttgtactctgtttatcactactacgtatctgaaatgttgtttcctataattatact

SEQ ID NO: 29111 - DNA, 367 bp, Zea mays
  Clone ID: MRT4577_126559C.1
acacttggctttggtattttgattgctgtttgtttctttcaaaataagtaccgcttttgtattcaactataaaaatgttgacctgctaagagcttaactcctctcagtataaattgtaactttgagcaaacaagccaaggctaggattagtgagccgctgcttctttttcaaagttgtacatgactggaaattaacatatccaggcttttcaattacatttctgttgcaagtttctacctgctaagaaggtgtgtctatccgatactatgaaacttatagattgagtggaattgaacaatttgatcaaccagaaaatattctccaatgtttaaactcactttggggctgatagatcctgcatttgtt

SEQ ID NO: 29112 - DNA, 2183 bp, Zea mays
  Clone ID: MRT4577_12655C.1
gtagcggtgtcagtgcgtcactactactttccacacgcgcctctcgccccgtacgcagccgctctctcgtaaatcgagatcttgtctgttgctctgctcttcgttcttcgcgtccgtccagcgacatcgtgcgcccggcaaggcaagaggcaagctgccccacttccagttactattcgagggagagagagagaaagagaccactaattaccttgtaaatcccccgtagccggggcgataagaacgcaaacccatctgtgtcccattctcccatcccacgtaaatccacccgcaaacaactcgcagtaaccttttgtttgttcttttgttgccttccttttctccgcactcatcgcttgttgcggttcgctctctacaaggaggcggcttgcgcggggggcatcgtgcaatggcgcggcggtgcccgtgcaggctgctgctagccgtggcggcggcggccgtgctcgtggccgcggcagcgcaggcgcaggagacgtgctcggggaccgtccccgcgccgccgcgccgcggggcgcgggtgtccgtggccagcttcggcggcgcgggcgacggacggacgctcaacacggcggcgttcgcgcgcgccgtcgccagcatcgagcgccgcgccgcgccgggcggggcggagctctacgtgccgcccggggtgtggctcacggggcccttcaacctcacctcgcgcatgacgctcttcctcgcgcgcggcgccgtcatccgcgccacgcaggacacatcaagctggcctctgattgaaccgctgccctcatacgggagaggacgtgagctgcccggcggaagatacacaagtttaatccatggcaatgggcttcaggatgttgtcatcacaggcgagaatggaactattgatggtcaaggcagcgcgtggtgggatatgtggaagaacaggacactgctctacacaaggcctcaccttcttgagctgatgagctcttctgatatcattgtctccaatgtcgtctttcaggattcgccattctggaacatccatcctgtttattgcagcaatgttgtgatcagaaacgtgactatcctagctccacatgactcccccaacacggatggaattgatccagattccagcagcaacatctgcatcgaggattgctacatttctactggtgacgattccatcgccatcaagagtggctgggatgagtatggaatcgcctatggccgcgccagttctggcatcaccgtgcggcggatcacaggctcctccccgtttgctggcttcgcggtcggaagcgagacatcaggtggcgtggagaacgtccttgcagagcacttgaacttcttcaactcagggtttgggatccatgtcaagaccaacacaggcaggggcggcttcatcaggaacatcactgtctcggatgtgacgctggataacgtccggtacggcctgcggatcgttggcgatgtcggcaatcaccccgacgacagctacaaccggagtgcgctcccgatcgtcgacgcccttacggtaaagaatgtccagggccagaacgtcagggaggctgggctgatcaagggcatccccaactcggccttctcccggatctgcctgtcgaacgtcaagttcactggtggcgcacctgtccggccgtggaagtgcgaggctgtcagcggtggcgctctcgacgtgcagccgtcaccatgcacagaactgacttcaacgtctgggacgagcttctgtacaaattcgctttgatgctttgccagctagctgagctgctgctatgcttctgtatctacgagtatgtatactggtgctttaaagcttgggcacccaagtatttatcttcccgaaaattaatttggttttactaatttatttgaacctctctatacgaagagaataattcttgactcgtataggactgaacaaaaaagtgtcactggttttcttatttacctgactcaatgttttattcacatgctttgccagctagctcagcctgagctgctgctatgcttctgtatctacgagtatgtatactggtgctttaaagcttgggcacccaagtatttatcttcccgaaaattaatttggtttccgtaatttatttgaacctctatacgaagagaataattcttgactcgtataggactgaacaaaaaagtgtgtcactggttttcttatt

SEQ ID NO: 29113 - DNA, 547 bp, Zea mays
  Clone ID: MRT4577_126560C.1
gctggtacacatttattcttttattgctaaacatcaaatgccagcaactatggtatcttcaagttaaatactaagaatgaattacagcacagtcgaaagatctgtaggaaaaaaaacctgtgcaccattaattagtatgtggacattcaataaataccatagtacaaactgatgaccaagagccatgtatccatgaagtgcttgtttaaaatttgctgttagcatagatgacaatgaccctataagagcgattatcaaaaggtcaagtttaactgcatgtcttttcaaactgagatgaaaagaatatatatgtcctttacacattataggtgatttaaaaaaccttcgaaaatgtaaacaatgtagagtaggaacactaaaaataaagttgtactgttgaacaacatgtcaacacagaaagaacatcttcaaattctcaaagtaattccttttttctaattgctttacagaaacccaaatggattattttcataaagatgataatataccagggacacaaagacctttcattttttgttaacacata

SEQ ID NO: 29114 - DNA, 108 bp, Zea mays
  Clone ID: MRT4577_126561C.1
ttttcatctgctagacccggtggtaactcaccgttgacgggttgttttcgctgagtagattaaaagctcgggattcgagtactacactagttgtgggcatgcaagcct

SEQ ID NO: 29115 - DNA, 661 bp, Zea mays
  Clone ID: MRT4577_126562C.1
ttggggtaccgggcccccttctcgagtttttttttttttttttttttttttttttttttttttttttttttttttttttttttttttttttttttttttggaaaaaaaaaattggaagcaatacatgatcaaacaattacgggcttttttccgaggggctttaccaacttttaaaaacaaacaaaaggggggctaaggggccccaaaaaacaacaaagcgaaagcccctttgctcaaaaaattaataatggcgttgcccccgggccgggaagctcaggcaacccccacaagcttttcgttgatcccccaaagctttttggccttttccggatcggtggccccctggaaaaggtggttttaaaacaaccccgagtccttgttccagctccagaacccccccgacttggggagggtggggtcgttaaccacctgccccagccttttgccggactccccctccaacacaaaacccttggggacaaacttttggaacgggggaaaaagcacccggaacagggggatgggctcccggaacacccccggggggggaaacccccccgggtaaagcgacccaaacgggatgcccctttcctcggggaacccccggggcaactcctgcattgttagcatgttgaaaattttgctgtccttgaaccccttg

SEQ ID NO: 29116 - DNA, 266 bp, Zea mays
  Clone ID: MRT4577_126563C.1
acgctgcgtcttcataccattattttttttctacaccagaccgcataataagcgcggggacattatgagggtgtcggtctatgaactacctatcctggctctctcttccagcgccacctccacccatactaacgaagcaatacaaatgacatccactcctcgcctggtcatatacctccttcagtgcatctaccaccaccagttcacctgccaccatcagtgcatctcccacctgcggatcatctaacgtctccagaccacctgcc

SEQ ID NO: 29117 - DNA, 2262 bp, Zea mays
  Clone ID: MRT4577_126564C.1
atggttcagatcatcgagcaccgcgacttgtctcctgaggacttcctgatggaggaaggggcagcatctttcatgccacaaggctccaaccgccctacgcctggtgctgctgctatgcacgctgcgcgggaggttctacgtaaccctccaacttccacggcctcgctgggggccatgaggcaatggcgcgaagatgtcaaccgactcctcggcatggcccatcctagctcggccaggtctaggcctcgatcattccagcgtcaatgcgaggcgttgacatatgtgcgctcaccctcagtgaggggtgcacagactgacgacctgcgggcagaactcaaccgcaggcgtgcgggcaaggatgctccagtctctctagaaagggcgcatgagcgctggcaaaacttcgagggatgcaacatcgaccaagacttcaatgcaagggatgcccgaatccaggcgggtgtcccattggtcggtgtgggctgcgccgcactagcggatcatctccgtgcggtgacttggccacccaagttactgtcacacctaccgaagaagtacgactgtacatccaacccgtcgaaattcttgcaagtctacgtcactaccattacgacagctggtggaaacactgctgtaatggcaagctacttccatgtagccttgaccgggccgggccggacctggctcatgaacctcaccccagggtcggtctacccttgggaagagctctatgcacgatttacagcaaacttcggtagtgcttatcagcagcatggcgtggaggctcatctctatgcagtgaggcaggaacccggggagactctccaggctttcatctctcgtttcaccaaggtacgggggagtataccttgcatctctgatgcctccattatcactgctttccgacagggggtgcgtgataagaagatgttggagaaattggtgatgcatgacgtggaaaccatcactacgctcttaactctggccgacaaatgtgccagagctgctgagggccgtgcatggcactcggcgccgcaaaccggagttacccagacgggcggctcaggtgccaccacccagggtggtggcaagaaaaagaagaagaatcacggtcacgataagccgcagtctggtgctccggcctccaaggatggctcgccgcctcggtgccggtctggcaaggagaaggtcgacgaaggtgacgtagccgcgggagaatgggaccttgggtatcaggcccccgagcaagtcctcaaggacattctcactggagactccgactccggtgatgacaacgaccgctgcaagaagctatacattatgtatggcggaagctgggagctcacctcccataggaacgtgaagtccctgcgctgcgaggttctttcggcgaccccaggggtcccgaaggcagccccacatcaacggtggcggagcaccactatctcctttggggcatccgactgccccgaaaacatggcaggggccggcatactaccactcatcaccgtccctgtcatcgccaacatgaagctgcatcatgtcctgattgatggtgggctgggctcaacgtcatcagccatgctgcgttcaagcagctgcagatcccaagatcccgactgggaccctctcgcccattctctggagtgggccctcaactggccgaccctgtaccggttcatggccattgcccattacgggtacttggtcctcaagatgccatcccctgctagggtcctcaccgtgcggggcgaccgccccgcagcgcttgcagctgtcaagaagttgcacgccctggtggcagaaaccgctcgcccggatgatgggggagggacccctcgacttcctgtaccaaggcacctaccaaggtgcctaaggtgcaaccatctggagcagacgacggcaaatgccgacgtattcgcatgggaaccgtcacagatgcctgggatccccagggaggtgatcgagcaccatctgaagatccaccctgacgccaaaccggatttcatccgtgaggaggtccgtaagctgctgcaagctggcttcatcgaagaggtccatcacctagtatggctggccaatccagtcattgttcccaaggctaacgggaagcttcggatgtgcatcgactacaccaacctcaataaggcctgtcccaaggacccatatccacttccacgaatagatcaaatcgtggattcaacctctgggtgcgacctcctgtccttcctagatgcttactctggttttcatcagatctag

SEQ ID NO: 29118 - DNA, 369 bp, Zea mays
  unsure (1)..(369): unsure at all n locations
  Clone ID: MRT4577_126565C.1
cccggaagncccgggacgacccacgcacccgcccacgcgaccgaacacacgagcgaagagagggaaggaaggaaggaaccagaacggcacagagaaggccgaagggagaaggcaagccagagcagnacaccaggcgacgaagcaagcggcacgaggaggcggacaagggagnggncggcgcgccgccggcgagagccagagaaacgaccaagagcgcgcccacagagacgcgacgacacccgcgccagccgagacgccaagagcnacagccggccgaacagagcacggcgacgcgcaagccagacccgagcgagcccancagaggacacagaccagcagccgaccgacacggaaagaagncaccagcca

SEQ ID NO: 29119 - DNA, 2085 bp, Zea mays
  Clone ID: MRT4577_126566C.1
atggagatgatggcggcgctggctcaattgagctcggggaaggaggaagagatggccgaggccggggtgaggaattggggagctcggggcggtccttttataggcgcccgaggcggggaagggggcgagaggtggcatgccccggcgagctcaccacgttggagatggtggcgcacagtggtgactacgggatggctcgggcagacggggcgacgggatggctcgggcagacgcaaggcgccaaaccgagctggtgagcgcgataatggcgaggcggcggggcgggtagtggccgacggcgatcgcgtcgctagcccggtcacgggtgcgaggaaggaagagctctgtgcgcggtttacagcaaacttcgccagtgcttatcagcaccatggcgtggaggctcatctccatgtagtgaggcaggaacccgaggaaactctctgggctttcatctctcgtttcaccaagcgcatcagcgagcggcgtgagcaggcctccaaggatggctcgccgcctcgatgccggcctagcaaggagaaggtcaacgaaggtgacgtagccgcgggagaacgggacctcgggtatcaggcccccgagcaagtcgtcaaggacatcctcactgaagactctgactctggtgacgacaacaatcgccgcaataagctatacgttatgtatggcggaagctgggagctcacctcctgctggaacgtaaagtctctgcaccgcgagttgcatcatgtcctgattgatggtggggctgggctcaacgtcatcagtcacgctgcgttcaagcagctgcaaatcccaggatcccgactaggaccctctcgtccattctccggagtgggcccacaaccggtgtatccccttaggagcatcacgctcccggttacattcgggactgaggagaacttccgcactgagaacgtccagttcgacgttgcagaggttaacctccctttcaatgccatcattggcaggccggccctataccggttcatggccattgcccattatggttacttggtcctcaagatgccatctcctgctggggtcctcaccgtgcggggcgatcacgccgctgcgcttgcagctgtcgagaagttgcacgccctgactgcagaaactgctcacccggacgacggagggagggacccctcgacttcctataccaaggcgcctaccaaggtgcctaaggtgcagccatctggagcagacgacgttcccgtcaaacccatccaggaaatcgcgctcgtcgccttcctccaagaaaatgccgacatattcgcatgggaaccgtcacagatgcctgggattcccagggaggtgattgagcaccatctgaagattcaccctgacgccaaaccggatttcatccgtgaggaggttcggaagctgctacacgctggcttcatcgaagaggtccatcacccagtatggctggtcaatccagtcattgtccctaaggcaaacaggaagcttcagatgtgcatcgactacaccaaccttaataaggcctatcccaaggacccatatccacttccacgaatagatcaaatcgtggattctacctctgggtgtgacctcctgtccttcttagatgcttactctggtttccatcagatccagatgtctaggcaagataggaaacatatcgcttttgtaactgtggatgggctttactgttatgttgtaatgccttacagtctgaaaaacgtcttgccaacatttatacgggcgatgagtaagacctttggtgacctgattagggacaggatagagatatatgtcgatgacatcgtggtcaagactaagagagggtcgaccctagtggaagacttaaccctggtctttgacaagctgcgggcaacacacatgaagctgaacccggaaaagtgcgtctttggtgtctccgcagggaagttgctgggattcctggtttcgcaccggggcattgaagcaaacccggagaagatcaaagaaattgaggcaatgagacctctggcccgaatcaaggacgtccagaagcttacggggtcactggcctgtgacaccctagtgtcacctagggttcttccctaa

SEQ ID NO: 29120 - DNA, 248 bp, Zea mays
  Clone ID: MRT4577_126567C.1
ggcagggaacacatcatttgcattcatatcatcctagaattttccccctcacaaccaaaattttttttgaatttgttaaacacaaattttttttcaaacagagaatattttaactttaaaacatatttttccaaattctttaacgtaaaatccgaaacaaatccaataactttaactcaaagttttaaacatcaagcctttttgaaaatggtcctttgccttcaagtttagagtttttgtaacttgcc

SEQ ID NO: 29121 - DNA, 396 bp, Zea mays
  Clone ID: MRT4577_126569C.1
tccacgcgtccgatttcatcagcctgactgtccactgatggcttggagacttcctccgctccggtccgctccccttcgctgccgaacggacgatctttgcatggcagcagcagctgtctccaaggggcgggcgatcgctggaagctgagacagccgcgtcctcgccgaaacggccgtctcgccgaggagggccatgcacgccttggtgtacgacacgaacctggaggaccaggtgcgcccagcgttcgtgccggacgatgtgatcggcagcgcacgaagccccgacatgtactggagaccccatcccaagaccgttgtgatcagcccgacggagggggaccccaagctggccggtggtggcgctcacgacgccggggccgattcttcaagaggcac

SEQ ID NO: 29122 - DNA, 1119 bp, Zea mays
  Clone ID: MRT4577_12656C.1
aagaggcacaaaccaaatgtacaattcgccgcgccagaaggtttcgccttcctcgtcttctcagttctcacttctcagccccaaggcccaagcacgagcaccaaatgctgcgtgccgcgatcgttgcagggttgccggcacggctcgccaccaagaggccacaggcggtaactgtggcggcgagggttgcgcttacgagtaccgaggtgaggtcgccacttctcaggtgtgggcgagtcccggtgccggggaggagagtgtgcttatgctccgctgccgccgacgatagcggctcggaagcggagtcctccgcggcggagggcgaagaggctgcgcgtggggaggaaggcgagggggaaaatgtctctgcgatcgtgcccgctgtcctccgccccgaggattgccacacggtcatagctttgcctttgctacagcgaccactatttccaggattttacatgccagtctatgtaaaggacgcaaagctgttgcgaactttagatgaaaatagcaaaaaatctacaccatatgctggggcttttcttgtcaagaatgaggaagataatagcattcatgaattgaaagggaaagaattgttgaattgtcttcatgatgttggcacgcttgcccagataacaagaattcaaggagatttggtggtgctacttggtcaccatcgtatacagatatctgagattgttagttagacccctcactgcttcctatttagtttctctaacacttcttctttttgtcattgtatgttaataaagactaaactatacaggttgttgatgagccacttacagttaaagttgatcatctcaaggtatatataccataacttttagcgtcccaatcttaaaaagttattgatgtacagatgttcaaacatttcaaaccctggaaacaggggcagatggttttaaaagtcgtccggttgatccaggtgaccgaccagccaactaatcgcgattaggatgtcgaccaggacgattagtcagtgcatggtcggcccctggtcgtcctaaacgtcatgtactgttcagactatatataattatatatagttatatacactacagtatatagctatataatatataatatatttattgg

SEQ ID NO: 29123 - DNA, 696 bp, Zea mays
  Clone ID: MRT4577_126570C.1
atggccatgcggtcggcccccttctgcgcagccgcctgggcaagcgtcttgcagttcttgacggactcgtttagagccgtcttgaaccctgaagacagccagacgatattcttcagacacgaggagaagaatgaagctaaaacaaagtcacaaagcaggcaaaacataccttcggcccgagcacgctgcttgggaagcctcacctatggcggccagcacctcagcaccgacgacagcggccacctgcgcaccaacgccgcatcggcaaatgacggccgccccagcgcgcacaaggaggtcctcactcccgtcctcgctacgggagtggggacaggaccatccaagaacgtggacaccgcccccgcgacgtacaatgtcctatacgacccccccggtgcggccggcggcgcgagaagggccgtgggcgtggccaacctacgcacgacgcgaccgtcgcccgtgcggtggacggacagccacaccctgaccagacagcaggtggcagttcgcctcctctgcaaggctggtgaacgcccttctcccccaaatgctggaggaagaagcggatcgccagcccatgcggaaggcaggaccgcaactcggcttgccctccccccatcacggatgatgaacatccttgaagctgagggcaggggaggccacaacccgactcgcccttctccaccacaaggctag

SEQ ID NO: 29124 - DNA, 217 bp, Zea mays
  unsure (1)..(217): unsure at all n locations
  Clone ID: MRT4577_126571C.1
ccttacnatctcttccaccacccactccttctcttcnnccaaatcctcnttttcctcctnaanctcctccatctncttnntctcttctaaatctttcctnttcatcaaacacaanttaanttttaataatcnnacctccttctctannntttcacancttttaantacctncccnnncnnccccttccaaaggccaattcttcacatatccatcaca

SEQ ID NO: 29125 - DNA, 423 bp, Zea mays
  Clone ID: MRT4577_126572C.1
cggacgcgtgggcggacgcgtgggatatttttaattaggagatcagtttagagggcatttctgtatttttttttgcataatcaaagtggaacttaagatgcaggcacccaaaaggaagagagaatcagggggtggtggtgggcacatgcgcgaggagctggcgtccgaggacgacgaatccccaccaaggaagcaaccgactgttcagcatcgtagaaaggctgtcgtgtttgatgacagcgacgaggactagtgtgtgtatgacctgacctttacagtttattttttccatttcttgtcgagaatgatttatctggaaagaagatgttggtaactgttactttccggcgggccggtttattatgagatggtgaagcaaaaaaaaaatatggggggcccccatttttttatctgggagaggcc

SEQ ID NO: 29126 - DNA, 346 bp, Zea mays
  Clone ID: MRT4577_126573C.1
cgcgttcgcccacgcgttctcccactcttgcttttcaaccttcttcactgctacacgggacgagcgcaatttcgatgcgccctaggaggcactggtgcctgtactagaatcacccgaagcatcatcataagaagcagaaactcgataagtttgtctatgatcaattacgaactggcttgcatctgggcttgccctctttttacagtgtgagctactacataatctactgttacattcatatcatatcacatttcctattttttgccacttgagacattgcttaatacttttgtgttgccttgtgaaaagagaatggtaaggttttgatctgctgatactcttgttt

SEQ ID NO: 29127 - DNA, 2716 bp, Zea mays
  unsure (1)..(2716): unsure at all n locations
  Clone ID: MRT4577_126574C.1
gccgggnaaaaaaaaaaaaaaaaaaaaagaaaaaagctgagcagcagagggacagaaaagcgccaccggccggagccccctcattgccacgacgcttcggccgcccgcgccgtcccctcgtctccctctcctcaaaatccccacaaaccgctctctccctctcgcctcccgcccctaattcccatcccccacctccaaatcccacatcactcaaaaccctcgccgcgcccctgctgcgcgcccccccgatggcagccgtcgcgtcctcggaggaggccgtcaaggcggcgaaggtgctgatggtcggagcgggtggcatcggctgtgagctgctcaagacgctcgctctctccggattcagcgacatacacatcattgatttggatacaattgaagttagcaatctgaatagacagtttttgtttcgacagagccatgttgggcaatcaaaagctaaagttgctcgggatgccgtgttgaaatttaggccaaatatcaatataacaccataccatgcgaacgtgaaggattctcatttcaatgttgattttttcaagcagtttaatgttgttctgaatggtcttgataacttggatgctagacgccatgttaatcgcctttgccttgctgctgaagttcctttggttgaaagtggtactactggttttttgggacaggttactgttcatgtcaagggtaaaactgagtgctatgagtgtcaaccaaagcctgtccctaaatcatatcctgtctgcacaattacaagcacaccatcaaagtttgttcattgcattgtttgggcgaaagatctgctttttgcaaaattatttggtgataaaaaacaggataatgatcttaatgtgcactccaaagatgataccagttcaaaaacagatgtttttgaaaggagtgtagatgaagatcttgagcaatacacccagagaatatatgaccacgtatttggttacaacattgaagttgcattggataataaggaaacttggaagaatcggagaaagccaaaccctatttacattagagatgcattgcctgaagacgctgttcaacaaaatggtcgctctctggatcacgtgaatgaggagcatgatccttctgctatggtatccctaggccttagaaattcgcaagagacatggagtcttgctgacaattcaagagtgttcttggaggctttaaaattattttttgagaaaagagagaaggaaatagggagtcttatttttgacaaggacgaccagttggctgttgagtttgttaccgctgcagcaaatatcagagcttcctcttttggaataccactgcatagtctttttgaagctaaaggtgttgctggaaatatagttcatgctgtggcaactaccaatgctataattgctggtctaatcgtcatcgaggcaattaaagtgctcaagggtgattatcaagattatagaatgacatattgtcttgagcatccatcaaggaagatgctcttgatgcctgtcgagccttttgaacctagtaaatcatgctatgtctgctctgagaccccacttgttctggaggttaatactaagacaacaaagctccgggaagtcattgaaaaagttataaaaagcaaacttggaatgaacctccctttgataatggttggtgccacgctagtttttgaggatggtgaagatttggaagaggatgagattgcaaattatgctttaaacctcgaaaaggtcttggctgaacttccagctccagttctaaatggtacaacacttacagtcgaggattttcatcaagaactaaaatgcagtatcaacatcaaacacagggacgagtttgatgaagaaaaggagcctgacggaatggttcttgctgggtggtctggcccagttgataagcaaattaccagtaatggtgagaatagatcagttccatcttcatccaatacagaagatgtggatggtactgccgaggacatatcagcaacttctggaatgaagcgtaagctgaacgaaatattagagacaaaggagaattttgatgctctcgaaaatctttcgggtgttgattccagcagcgctcaagttgttgaagatgacaatgacgatgaccttgttatgtttgatgaggacccaaggcaaagtaagaagaagagattgcagtagcatcctgctgcggcgataacagctcttgactcccggcatcgtggctaacacattgttcgatcgtaacatctttgataacttatttatgcggttatgtaccaggttgatgttgaaacattagtaacaatgcccagggcaccttttggcctcagatagtcagataccctgtagggttgtaatttgtaggatttaggaacaagagcaactaatgctcagctgacagcctgctgcgagatagaatttgtatctcaagagccaaggtcctgttttggttatgtttttgttcagttgaggggtgaccgggtgaaccaagctctgtcttgttagctgccattcacagggtctggaaatatgtactcatcctgtattcttgctaaggttatggatcagatggtgtatatatccgtgcaaaatactaatttatagttttgcactaatctagaaacaacgcctgggtttagaagctatccctgatttcctgtattttggaccgctttttgaaggaatatcattaaaaaaaaaaaaaaaaaggggggggggcgacagcaacg

SEQ ID NO: 29128 - DNA, 1218 bp, Zea mays
  unsure (1)..(1218): unsure at all n locations
  Clone ID: MRT4577_126575C.1
ngagccaacaaagctccgggnagtcattgaaaagttataaaaggtaagcttggaatgaacctacctttgataatggttggcgccacacttgtttttgaggatggtgaagatctggaggaggatgagattgcaaattatgctttaaaccttgaaaggtgctgtgatactaaccatatcccacgcgtccgattttttctgttaagatgagtcatttgtatgcactgtggcatatattctaaaattcttgtttcttaataaattgcagccctttgttgtgttcttggccagcttagttgatttgtagttaagcttcttcacccttagttgtgtttatgctctgcttagttgatccattactgcaggtcttggctgaacttccagctccagttctaaatggtacaatgcttacagtcgaagatttgcatcaggaactaaaatgcagtatcaacatcaaacacagggatgagttcgatgaagaaaaggagcctgacagaatggttcttgttgggtggtctggcccagttgataagcaaaccactaataatggtgagactaaatcagttccatcttcatccaatacagaagatgtggatggtactgccgaggacatatcagcaacttctggaatgaagcgtaagctgaacgaaatattagagacaaaggagaactttgatgctctcgaaaatctttcgggtgttgattccagcagcgctcaagttgttgaagatgacaatgacgatgaccttgttatgtttgatgaggacccaaggcaaagtaagaagaagagattgcagtagcatcctgctgcggcgataacagctcttgactcccggcatcgtggctaacacattgttcgatcgtaacatctttgataacttatttatgcggttatgtaccaggttgatgttgaaacattagtaacaatgcccagggcaccttttggcctcagatagtcagataccctgtagggttgtaatttgtaggatttaggaacaagagcaactaatgctcagctgacagcctgctgcgagatagaatttgtatctcaagagccaaggtactgttttggttatgtttttgttcagttgaggggtgaccgggtgaaccaagctctgtcttgttagctgccattcacagggtctggaaatatgtactcatcctgtattcttgctaaggttatggatcagatggtgtatatatccgtgcaaaatactaatt

SEQ ID NO: 29129 - DNA, 950 bp, Zea mays
  Clone ID: MRT4577_126576C.1
cggcacgagggcgtcgcggattacggaggaaccctctaggctccggttccggaaacagcgggcgccattcccgggcgaggaggccggcccagatccgagtacggcggcggcggctgcggcggcgagatgactggtggcggcccggccgcggcgtcgcaggcgtacggcgaggcatggtactgggacgagcgctaccgcaaggaggccgggcccttcgactggtaccagaagtacccggccctggcgccgctgctccgcctctacctcgcgccgcaccaacgcctcctcctcgttggctgcggcaactccgtctttgacatgaagatggatgtaaagaacatgtcagattttgagtctggttcttttgatgctgttattgacaaaggaacactggattctcttatgtgtggtcaaaattcccaagagaatgcaacgaaaatgctagaggaggtcaacagaatcctcaaggaaaatggtgtctacatgctgatcacttatggggatccaagttaccgcttgcgtctcttgaaggacatggaaaaatggacagtaaagctccatgtcatagaaagatgggagaaaagttcgaatcagaacaaatgggaactgacaaagcccttgcctttagaggaccatagcacatcactagctgccctttttggccccaaacctgatgtcccctacatctatgtctgtgtaaagggcaacggtggggcaagtgtggattttaaagctggagaagctgccaattgatttttcctataaccctttgaactgacgtgggtaaccggtgtagcaaataatgtagagaaatagaacagatgttgtcccccgaattgatcgttgttgttttattggataataaccagggtgtgaattgtagaccaaaaaaaaaaaaaaaaaaaaaaaaaaaaaaaaaaaaaaaaaaaaaaaaaaaactcgagaagggg

SEQ ID NO: 29130 - DNA, 262 bp, Zea mays
  Clone ID: MRT4577_126577C.1
ctaccttagctgccccgcaacatcctagcatccctatcatcgcgccggtcccggcggcctgccggcctcctcgcaccctcccagagtaatggattaatgcattaagcaaggtaatgaaatgtaccaaaagtgacttatggaaaagaaacagagcttgttcactgctctgaatgaggaactttaatctgatgcagcctcaaaagagcagagtttcggcagcaatgccatcctctttacccattctgccaacttctttgaaacg

SEQ ID NO: 29131 - DNA, 1222 bp, Zea mays
  Clone ID: MRT4577_126578C.1
cccacgcgtccggtcgcgctgcgtcgcgtcgcgtcgcggattacggaggaaccctctaggctccggttccggaaacagcgggcgccattcccgggcgaggaggccggcccagatccgagtacggcggcggcgggcggcggcgagatgactggtggcggcccggccgcggcgtcgcaggcgtacggcgaggcatggtactgggacgagcgctaccgcaaggaggccgggcccttcgactggtaccagaagtacccggccctggcgccgctgctccgcctctacctcgcgccgcaccaacgcctcctcctcgttggctgcggcaactccgtctttggtgagaacatgattgacgatggttatcaagatgttgtcaacattgatatatcttctgtggtaattgagcaaatgaagaagaaataccacgataagcctcaacttaaatacatgaagatggatgtaaagaacatgtcagattttgagtctggttcttttgatgctgttattgacaaaggaacactggattctcttatgtgtggtcaaaattcccaagagaatgcaacgaaaatgctagaggaggtcaacagaatcctcaaggaaaatggtgtctacatgctgatcacttatggggatccaagttaccgcttgcgtctcttgaaggacatggaaaaatggacagtaaagctccatgtcatagaaagatgggagaaaagttcgaatcagaacaaatgggaactgacaaagccattgcctctagaggaccatagcacatcactagctgcacttcttggccccaaacctgatgtccactacatctatgtctgtgtaaagggcaacggtggcgcaagtgtggattctaaagctggagaagctgccaattgatttctcctataaccctctgaactgacgtgcgtaaccggtgtagcaaataatgtagagaaatagaacagatgttgtacctcgaattgatcgttgttgttttattggataataaccagcgtgtgaattgtagaacagatatcgcacctcaatttgcagttgtttcattgaataaccagtgtgtgaataatgtagaacagatgttgtaccgcttgtttcagtgtttcatgaattcgattgaccctgtcagtgaccgtccaagccatggatacgtcgggctcctccgcagccgccggcgacgccccgaccaccggggagcaccggaatgggacccacattgtcgggg

SEQ ID NO: 29132 - DNA, 574 bp, Zea mays
  Clone ID: MRT4577_126579C.1
aattcggcacgaggcccaaaccgctctccctctcgccccaacttcccatccgcacccccaaagcccacctcactcaaaaccctcaccgtgcctctactgcgcccccccccccccgatgtccgccgccgcgtcctcggaggaggccgtcaaggcagcgaaggtgctgatggtcggggcgggaggcatcggctgcgagctgctcaagacgctcgcgctctccggattcagcgacatacacatcattgacttggatacaattgaagttagcaatctgaatagacagtttttgtttcggcagagtcatgttggtcagtcaaaagctaatgttgctcgggatgctgtgttgaaatttaggccaaatatcaatataaacccataccatgcaaacgtgaaggattctcatttcaatgttgatttcttcaagcaatttaatgttgttctgaatggtcttgataacttggatgctagacgccatgttaatcgcctttgccttgctgctgatgttcctttggttgaaagtggtactactgggttttttgggacaggttactgttcatgttaagggtaaaacaga

SEQ ID NO: 29133 - DNA, 429 bp, Zea mays
  unsure (1)..(429): unsure at all n locations
  Clone ID: MRT4577_12657C.1
cgagcaggcggacgcaaggggcaagagacgaaacggncgacagggggcgcacccaancngccgnagcggncgccgnggnggccgcggngcngcngcnggcagcggcggcgacgaccccggaggccgccaacaccngcgggcaggngagcnccgccancgcgcccggcgggggcgacgcccgcggcacgggggccgcccccnccgcgncccgcgggagcggcgncaggaaccncaagagcgccgccagcaccgccgccgacaggcgcgccgccngcaacngccncaagaacgccgccaggggcgncagcggccacaacgccggcaacgccggcagcagcccgcccaagggcggggccagcaaccccgacaccagcagcacccacaccgaccgcgacagggcgaacaaaaaccgagaccacgcgcgacgac

SEQ ID NO: 29134 - DNA, 260 bp, Zea mays
  unsure (1)..(260): unsure at all n locations
  Clone ID: MRT4577_126580C.1
tgtggaggcttcctctccagcgcggagcactccttagttggccgccctcatctcctccgncgccacagcagtcagcagacatcagcagaccgccggccgaccgccccacaggcgacctttccggcagagaatcaacgctcgctggtttactagactcattgtctgtcagagantggacgtcaggatttttcangatcggatgaaanacacgtcgagaagatgacacgacgagcaggtcaggaacggacatagatagatgg

SEQ ID NO: 29135 - DNA, 163 bp, Zea mays
  Clone ID: MRT4577_126581C.1
tcacactcgagagacgagcacacccaccgactatcgacatggccggggggagcagccttaagaacatggtcgttggcttcctggttccgctccctaacattctgttgtacctctccttcgcacgcgccggaggggacacctgcgccagaccgctacgctcatg

SEQ ID NO: 29136 - DNA, 271 bp, Zea mays
  Clone ID: MRT4577_126582C.1
aaattgggggacccggtcgttgtccttaaccacccctaattggaaaccgggggggggacctccctacctttgtactacaaaagtacctaggggttggttgtacccgctgattggtgatgattaattaaaatttggatgcctgccttgtaaaaacaaaaaaaagggggggggtttaggccttccttccttattcatggggccttaatttatttattcacgggcaccggatgcggggggtgaccccggaatttcggaccgggacctggggggg

SEQ ID NO: 29137 - DNA, 288 bp, Zea mays
  Clone ID: MRT4577_126583C.1
aaaaaaaaacagtaaaaaaaaaacaaaaaacaagcgcgcagggagggtcgaacccccacccccaaaaagggggcaccaaaaaacggaaatttaaacagtaaaagcaaaaccggcccggcagataatgacccccgggggcctttttcccaacgaaagagggacccaaaaagggcctcccagtggaaatcccccggaacggcccaagcaaaacccccaagctttaagaagcaagctggaacaggctttcggggaccccattggccgaaacgaaaaaggcccaggggggcc

SEQ ID NO: 29138 - DNA, 599 bp, Zea mays
  Clone ID: MRT4577_126584C.1
gccaagcgtccggcacaagaagattccacgtctctctgaacctgtctcccgggatgaacttcagagtcttaatagaggggcgaggggcaccacgctgggccagctacaagtcgctgagcagaaactgagttatggatctctgtctgttgctgccaccgaatattcttttgatgtgcctggcgctagcatttcatgggccaaaaatggcgttctcacaactgtggctgatgacataggtcgacgttggtgaatctaaagaagacttatgaaaacctcgaagcactagagtgagaaatggcttgcgcaccatgcaggccgatttctattgccaaacacgatgagaactactagatgctgctattgacacaacacagacccatcttgagatcaatggcttctgcaagacaaggccgtgatcttacaaaccacctagtctaaatatagggtggagttgttaagacctatgacggtcgaggcagaatggcagagatgccactatgtcccaacaggtgcagaatacatgacaaatgctgtggcctcattagcactgcgcccaattgcgctaccagcattccattgtgtagggcaagagctattac

SEQ ID NO: 29139 - DNA, 401 bp, Zea mays
  Clone ID: MRT4577_126585C.1
atcctgacgcatccgaaacaagtgatcaccatcgggacgctcggacgttctagccggaggtggctaccatggtctccgccgccatcaatattttcctcgcatgcatgtgcaagctaatatcgaacagaacacacgtgcatgcccacgtacatacccttgaatcgtaagtacaataaaggaacacctgatactgattactaagaaatactgtgtagaacagccacacatctaaaacaccaggcttacactgtacctgagcaagctcaataccctagaaggctctggctatattgactccggaatcaacacttatatctgaaagctaatcaattgacacctgtctatgattgcctgatcctgatgaaccatctaaaaccttgtatgacaccatgatgcgccat

SEQ ID NO: 29140 - DNA, 511 bp, Zea mays
  Clone ID: MRT4577_126586C.1
ttttttttttttttttttttttttttttttttttttttttttttttttttttttttttttttttttttttttttttttttttttttttttttttttttttttttttttttgggtaccagggatctaaaaaccaaaagcctcccatagggggggggaatttcccccgggaaaattcagggggccggaaaaccggtcacaaacccaaataatcctttccaaacctgggccccccaaagggcccagttttttgccccccgcctaaacccgaaagggttgccaagggggaaaaaaacccccttaaaccgggaaatttgaaaaaaaaaagctcgtttaaaccttttttaccgggggggggccaaaacttttgggttttttttcactgaaccctgccaaaaaaaccccccaattttaaaaaaaattaaaacccgttgggggccccccccagttttgacccaaaaacccgcttttatttggtaaaatttttggcccatgcccccacctttttggtttt

SEQ ID NO: 29141 - DNA, 388 bp, Zea mays
  Clone ID: MRT4577_126587C.1
ctgaatcgtatctcaggctgacccttgcattggagaaatgcaaactgctgaggagtttatcgggcttttgggatgcttcgcctttgtgccttccattcatctatcctgtatgtgggcaactaacaggtttaaacttgagctatgctccgacacttgattcttctgatctcaccaaaatgatcagccactgtgtgaaactccaacgtctttgggtactggattgcatcgcggataagggcttgcaagtggtggcctccagttgcaaggatctacaagaactcagggtattcccatcagacttctatatcgccgggtattccccagtaacagaggagggacttgttgcaatatccttgggctgtcaaaaactgagctcattgctatattt

SEQ ID NO: 29142 - DNA, 532 bp, Zea mays
  unsure (1)..(532): unsure at all n locations
  Clone ID: MRT4577_126588C.1
aaacacaaaacctgaaccatatggatattaaatataacaggtgcttgccaaatttacaaattcctcccagcatagaaccgtggctgcgttatttcgtttaagacttataattacctaccaaatcctagaagggcacctaaaaaggaaatctgacaagaatgagacatgcggtcccaattgttcttagggacattcggagttcctcccgggtactccgtaaaacaagtagctcacccagtttctggtagtgcctccctggatatcgagagcatgccattgatgtgtcggcgaggagtttcaggttggctcgtcgggatgaggttggtgaaccagtccaccacctgcaggttccggaagtaggcggagcggacgaagccctctatggtgaagtggccgctgcccatatgcttctcggtatgcgaccccaacggccgggtgttgactaccttgccttcgaactgcaccatgttgcacttggcgagccaggtggctaaaagagnngcagggctagttcatggctaccattgcgccc

SEQ ID NO: 29143 - DNA, 299 bp, Zea mays
  Clone ID: MRT4577_126589C.1
caagagggctttttataatatttatggggttatatttaattttttttcattataacaaaacacttaacccttatttgctgaggagagaaacagaaactcgattccaggatatataggggaggcaaaaggcccaggtgatagaaacggcagattttccacacacggcgaccatagatttggggacccatgacaacccctagagggaccctaacgaatgttgtaaaaaaaacgcatctttccacagcgaacggcgcccaaatcacggctcccaaaatacaggagtttttgtgttaccaaag

SEQ ID NO: 29144 - DNA, 361 bp, Zea mays
  unsure (1)..(361): unsure at all n locations
  Clone ID: MRT4577_12658C.1
agcaggggtaacaacgcagagtacgcggggaccatttcatgtcaaaaaaaaaaaaaaaaaaaaaaaaaaaaaaaaaaaaaaaaaaaaaaaaaaaaaaaaaaaaaaaaaaaaaaaaaaancaaaaaaaaaaaaaaaaaaaaaaaaaaaaggactttggggtgttaccactgtttaagggggaattccaaaaaaatgttggccgtttctaggggttccgggctcggtcccaagcttgggggtcttttggttaaaggtgttccctgggggaaatcgtttttcgtttaaaatttcccccttttttcctgccggggccttattggtgaaagtctggggggccttttaggggggcccccctcccttt

SEQ ID NO: 29145 - DNA, 363 bp, Zea mays
  Clone ID: MRT4577_126590C.1
ttttggggtttttttattttctattggttttaaaatcgatctatttatattatctttttaaggggccaaaactacctaataaaaaagaccctttggaaaaaacaacatccatgaataaattttcctggctacgggctacggaaaaatgatatactattggactgaggaggaagccttaaaaaggcgggggagcccaacttttatctctttaggcaccagttggggtcctttaggcactaaactaaattttagggactaaaagtgaggccctaaaaaaacccccttggttcccagcactaaaccgcgacaaaaaagattaattgttgggaataataacttcagccccattcccagcttaaacac

SEQ ID NO: 29146 - DNA, 405 bp, Zea mays
  Clone ID: MRT4577_126591C.1
ccaggctttttctcaaaaccaaccgcaaacgcaaacgaaaaccttgaaagccaatatgcaaccaatctcaagcaacaatgaagttgaccacttgagtccccttcctctttgctcggggagccgctgcagagtagagggcccgcgctgttggcgaggctgggctctatctctctgagaaccgcccaagccatgctgaagttgaacgttctgacgctccactcgtgggtacgagctctcgcaaccccacgcagccgccgaagcggaaacctcctcaagcgtgaatgccgtggagacaaccgcgatggctgctctgataaggcatggtgctggaagcagagagacaacgctaactggtgcgcggactgctcacaaaggtgggagagaccagtggatatcttgagggtc

SEQ ID NO: 29147 - DNA, 637 bp, Zea mays
  Clone ID: MRT4577_126592C.1
gtagtgctgcattcgcagcgagcgaggaagaggaagagggtaagagagagggatggcatgcctgcacgatcacgagtgtggggatcacaactgcgccgccgattggtcgctctacaatcacatcgacatccccaaggtggtggctctgaacgaatctgtggccgggagcgtcaaatcggtcttcaagtcgtgggaccagcgcctcgagacttccgtgggttttctggagagcaatgagggtgaccctgagttacttgttttcatcccatttacctcagatgtgaagatcaagagcatcgctgttgttggtggtgctgatggaacaagtccttcaagaatgagagcatttatcaatagagaaggtgttgacttttctgatgctcaaaacatgcagcctgtgcaggaatgggaactggcagagaatttgcagggagttcttgagtatcaaaccaggtattcaaggttccaaggtgtggccaacttaactctgcattttcctgataactttggtggtgatacgactaagatatattacattggtttgcgtggtgaagctactcagaacaaaagggatgttgtggccacaattgtgtatgaagtaatgcccaatccatctgatcacaaaacaaaatccgag

SEQ ID NO: 29148 - DNA, 701 bp, Zea mays
  unsure (1)..(701): unsure at all n locations
  Clone ID: MRT4577_126593C.1
cctcgaggccggccgcaatctcatcctctcaaggagatttgatgttagacgactcctgtgttcatctcacgtccctcgagaagacgactgctcctcgccgatcgatacgatggccgtcttctccgacctccacaccgccgacccgctcaagtccctcgaggctcacctcggcgaaaacagctatgagtatggtgactccaatattaacgatgacattaaggtcttcgccgctccgccgtcccaagctgcccctgtaccttcctaatgtcgcccgctggtaccaaaccgtctctgccgctgtatcctcaaaattccctggaaaagctgctggtgtaaatctgcttgctggatcagatcctgcgcaagatgctcctgcggatgaggctgaggaccatgatgaacttgatctttttgatgatgaaactgaggaggactacaacgcagctgatgagcgtgccgccgctgccaagggctcttctcataacaaagaaatgggtcaatcctcccaccttatggatgctctacatgagaggatcacactgatatcaagaaactgcaccaggctggccgcagtgtccagatggatgctctgacttgngccagcatcatgagcttgctccatgctcggatactcatatcgaaaagatgactatcatgttgactattgccaactatcttgtgaccatcaactctctaattga

SEQ ID NO: 29149 - DNA, 531 bp, Zea mays
  Clone ID: MRT4577_126594C.1
gggaggggggggggccccattcccaatctattcttgcgtttctcagagctgtcaacaacacacagacccataccagacctaatgaatattctgaccctcctctaggaacaaaaaaagctgaaccatggggaatagaaagtcatctgataaaccaagaggggggaggcgaatggacacacttgacactgccttttgctggccattctggaaccactgtagtaatgttcatcgcacaattgacatgaagaacctgattggagaagcatcttgtagaactagacaggaaaacttcaccacaactggtactgcactcactgaccctattgatatatataccgaatggatagacgagtgagagcgcgtcaacactgttcaaggctacgatgatgcgtgagcttgacccatgcgatgaaactgcgacctacaatcgtaatgtacagtgctggtgttctcgaatgccatactccataggcagacatggctcggaataacggagtggctcactgatatgccactatgcacctgtctagg

SEQ ID NO: 29150 - DNA, 442 bp, Zea mays
  Clone ID: MRT4577_126595C.1
actaccactctttgtcttcggctacggtgccgattcggaagcgccctccctggcccggcgcgagaccctaactacatccagcatgaagggcaaggctgacacctccaataatgacgagggcagcctacctgcggtccgcaccaccagatagcgcaagacggcctccgcgagcattaagcccaagcgccaggcctccgacattttaggtgaatgacggaactcaggctcgagtatgaggcgctgcactctgtcaccaagaacgttacgaccgtcagcatggcagtaatggataagaggggtgctatttcaaaacaaaagaaacagccatatgtcgaccaagctgggcataagaagcacgactatgaaaagactaatcggaactttgataagaaggagagcacactctcaaagaaggctcagactgcggttgaggatggctcgt

SEQ ID NO: 29151 - DNA, 183 bp, Zea mays
  Clone ID: MRT4577_126596C.1
ggccgccactcagcgccgcgcttgcgtttccttctctccgcttccagatgtcgaagcgagggcgtggaggttcggctggtaacattgctgccctagtcgactactctacacgtgttgttcgggcccttagtccgcgacgatgcgccaccagggatgtctagtagggtaactcttctggttgga

SEQ ID NO: 29152 - DNA, 1063 bp, Zea mays
  Clone ID: MRT4577_126597C.1
ccacgcgtccgaagatcatggatatatatatgggtctgtagatggagaaaatttggtgtgtttgaatgccctgggagtatatagtcatcttattatgcttttgggttttggcaggctctgtatcttgcatccattgatttatttgtatgccctgagtggagatcatgctttatattgtttgtttagttgttttgagctgtctagatacataaatatgagatgtggtttcttttatctctgtcaggtgattacgacaccaaagacaaggctaccatggcttatgatctggctactctgaaatattgggatccagatggatgataaccagagaaaaacttttgaaagccccttgcggacaatgaggaggtagatgtacgtgagacggtcaagagttttgataaataaattaaagtctcaactaaatggataaatggtaccgaggctcaaaaaggaaggtgttgagaagaggcgtactaaagcactgaaagcgtttgctcagatccaacttgatttgagagatataaaaacaggattgtgaatgagaggcgagcaaaggaagaagcagccaaggatttatagagagtgaagagggagagtgaaaagtcgtggtctgaattggctgaaattagtaagatgcatcaggcccaattaactgtgaattggttgaaaacttcgatgcagaaagagcttacagctcattggagtgcaaaagagcaccttctttaccctctcactacttcttattattgtacccttctttttcgaaaaaagatggcatcttttccccatcttccgagttagaactgagcaagatgtgtaatttcactgagatgcaggtttatgtatatttgaatatgcatatgcgtcctttattttctctgctaggaaaatttaggagctaacttcaagttcaaacaaaagtgaaaactgagaaatcgtgcctactaatttgtcttcagtgataaacattccctgggcctgtttcgatctcagtaaattcctgagatactttatggtcaagctatgactgctatttttgcttgctaaatttgtagagactatc

SEQ ID NO: 29153 - DNA, 289 bp, Zea mays
  Clone ID: MRT4577_126598C.1
gtgaataccctgctcacgtcccggcgatcgcgtcggcggccacgtgctgtaacaacctggtatcaaagctcgcgctcctcggagtgggtcagtcgcgacggcgcccgttccaaaaccctcggtgcagacccggtttgtacttgaggccatggcgaacaaggagaaggaagacggggatcggtgggatcggatgatggcgaagatcgatcggctgacggagaaggtcgttggagtggaggaggtacaacagaagctaatgatgcagtcggaattggcggcggctgtggct

SEQ ID NO: 29154 - DNA, 828 bp, Zea mays
  Clone ID: MRT4577_126599C.1
ccggccgggatcccggccccgattctcatcctcataaacacttcaagacctacactcctattcggttacatcttctcacaatggttaacttcaagaacctcgctgttgcggcgaccagcctccttggcctcgccaacgctgctcctactgccaaggttaactctgacgaagtcattcctggcaagtacattgtcaccctcaagtctgacatcgctgcctccaagattgagagccatctcaactgggtcggagatgtccacaagcgtggactaaacgagcgtgccgagaagggtgttgagcgcacctacaacggcaagtatggcttccacggctatgctggatcttttgataaggacaccatcaaggagatcaaggagaaccctgatgtcgcccttgtcgaagaggaccgcgtctggaccatcaactgggtcgacgagcctgagaaagagtctctctctaagcgtgccgagacaacccagagtagcgctacctggggactcggaacggtctctcaccgttccaagggatctaccagctacatctacgacaccaatgctggttcaggcacttatgcctacattgtcgacactggtatcatcaccagccacaacgaattcgagggtcgtgctcaggctgtctacactgccttcagcggccagaacgctgacaccaacggtcacggaactcacgttgctgacactattgccggaaagaatacggtgttgccaagaaggccaccatccaagctgtcaaggtcttccagggtagttcatccagcacctccatcatcctcgctggcttcaactgggctgcaacgacatcatctcc

SEQ ID NO: 29155 - DNA, 755 bp, Zea mays
  Clone ID: MRT4577_12659C.1
gacgcctgcggtaccggtccggaattcccgggtcgacccacgcgtccggtttcttcctgctgtgaacatcagggctctgggctctgtctcccggtcatctccctcgcgccatggccccgaagcggcagtctgcgatcctgcctcagcccaagaaacccagaccggctgctgccccgaagctggaggacaagtcggcctctcccggcctgccgaagggagaaaaagaacagcaagaagcaattgaacatattgatgaagtacaaaatgaaatagacagacttaatgaacaagccagtgaggaaattttgaaagtagaacaaaaatataacaaactccgccaaccattttttcagaagaggtcagaattgatcgccaaaatcccaaatttttgggtaacaacatttgtcaaccatccacaagtgtctgcactgcttggggaggaggacgaggaggctctgcattatttgaccagagttgaagtgacagaatttgaagacattaaatcaggttacagaatagatttttattttgatgaaaatccttactttgaaaataaagttctctccaaagaatttcatctgaacgagagtggtgacccgtcttcaaagtccaccgaaatcaaatggaaatctggaaaggatttgacgaaacgctcaagtcaaacgcaaaataaggccagcaggaagaggcagcacgaagagccagagagcttctttacctgggttactgaccattctgacgcaggtgctgatgag

SEQ ID NO: 29156 - DNA, 284 bp, Zea mays
  Clone ID: MRT4577_1265C.1
cgcacgcgtacgagccaccgcagcattcacagcgcccaggagaaagacgatgcaggtcatgatgcagacgttcacggggacgctgacagggatgaccgtcaccagcaaggtcgccagcaacaacgccatggacaatatccaggacaaggtccaggtcaaggaagggatccagccggtgcagtatcccctgatgtatgtcgaggagcacctgaaggatggccactctatcatggactatgacattacactggagtttacgcttaagctcgtgcttaggatcattg

SEQ ID NO: 29157 - DNA, 577 bp, Zea mays
  unsure (1)..(577): unsure at all n locations
  Clone ID: MRT4577_126600C.1
cggccgcgtgggcggccgcgtgggtttatttgtatgcccttgatggagaacatgctttatattgtttgtttagttgttttgagctgtctagatacataaatatgagatgtggtttcttttatctctgtcaggtgattacgacaccaaagacaaggctaccatggcttatgatctggctactctgaaatattgggatccaggtatttatgtctacattggaccatgaacttaatgacgcagggcatgaattagcttcgatggatgataaccagagaaaaacttttgaaagccccttgcggacaatgaggaggtagatgtacgtgagacggtcaagagttttgataaataaattaaagtctcaactaaatggataaatggtaccgaggctcaaaaaggatngtgttgagaagaggcgtactaaagcactgaaagcgtttgctcagatccaacttgatttgagagatataaaaacaggattgtgaatgagaggcgagcaaagacatgtgcgacaatatggtttagaggaatggtgagctgaaggagatgttatccttcaaggtccagttcccgcatatac

SEQ ID NO: 29158 - DNA, 122 bp, Zea mays
  Clone ID: MRT4577_126601C.1
tcgtgtaaaacgaattgcgtaaattggccaaacgatcagaactccatcacaatagggggccatcggggaacttgcttaaatatagcacccgacatcccctctggcaatcaaacgttttgcct

SEQ ID NO: 29159 - DNA, 288 bp, Zea mays
  Clone ID: MRT4577_126602C.1
gagttctctagtcggcggccgcggcagccggcaccggttgcctagcaggctcctccgggcgcagcgatcgaaccgaccgagcgcactgggcacgcgctggcgccgcctacggggtcacgctcgcctggtgatgcctgagcccgtcaatgctggcagctatgacgacgaggagggcggccgggtgcgacgagatggaggtcatggccgaagccatgcatgctgtcttggtgctttcggatggaatccgcagggggttaaactctctggagcacgaaactcgagccgtat

SEQ ID NO: 29160 - DNA, 531 bp, Zea mays
  Clone ID: MRT4577_126603C.1
cgcgttgttgattttttttcctgcggctggcgttatcccgtcgccgaccctgctcaaatttttgggccaataaccccttcaacaaccgctcaatctctccctctgttttttcttgccgatcatcatccggcgtcctcatctttttgtgcaaccaaaaaaaatcaggccttggcttcattctttcagcaaccgcaagcttcagccttcaccttaccttctgcagaaatcctgccatggccgccctccctggtgctcgccccagccgaggtctctccatgactggctgctgctccctggcactcgatttctccaccaggcatcccttctcttcaacctcgacgcaccgctgcctggggttgacgccggagctctaccaaggcggatctccctcccttcaccctctcatctcctctgctgaccgcgcgcgcacctctctgtggccctctccagctcggccgctcgtctctcggcctcccatggcgcgcgccgtgcccagccgaagctctttccctgctccgcaccatggtgttt

SEQ ID NO: 29161 - DNA, 788 bp, Zea mays
  Clone ID: MRT4577_126604C.1
cattgggtacctcgatgccggccgggactgaaacttctacatactcaaaacttgttgtagagcattcgcataccatacactcaatcctctatacaccttgcgacgactgcgacacaccctctctccttccagacctcgccaacgatggcatcaacaaccgccgttcccgttccgaacatcggcgtcaagacgcaaccaccttcaaagaaagaaaagcccaacccactacgcagtattatcgccggttcaagtgcaggcgccgtggaaatcgccatcacctacccagccgagttcgccaaaacccgcactcaactcaactcgcgtctcgccgccggccagaagatcccattccctccgttcggcaagcaatggtacgccggatgcacgactttgatcattggaaatagcatcaaggctggtgtcagatttgtggctttcgatcagtacaagcgtatactcggcaatgaggatggaacaatcagtgggcctatgacggaggtgtcgggcttccttgcgggcgcaacggagagtttgcttgctgtgacgccctttgagagcatcaagacacaattgatcgacgaccgcaagcaggcgaacccaaggatgaagggtttcctgcacggttctaagctcatcgcaagagagcagggcatcaagggtttcttcaagggcttcgtgccgaccaccgctcgtcaagcagcgaactctgccgttcgcttcagtgcatacacatcgctcaagcaggctgcgcagtcatatgtcgcacctggcgagaagctgggtacgct

SEQ ID NO: 29162 - DNA, 376 bp, Zea mays
  Clone ID: MRT4577_126605C.1
atgccttacccacgaccacaaaaacatggagcgacgcctaatctgtttgtacaccaccaacaagaacctgcacatgaacattcacgacaaggactacgatgtcactttcttatgtcacgagcaccaacctagagaggaaatactcctccaaaactgccatcaggatgccaccgatgcattccaccatgtcgaccacatcgacaagacccacgaaattctttagaaattgaagatcattgtgctcaaactccatccctatgacccggcctcaaaaactaccatcacctcctcatcctgcgcctaaggcaactataactcatccggtcataagcaacaatctctacacaaaactcctgctaaaagccagcatcttcta

SEQ ID NO: 29163 - DNA, 1530 bp, Zea mays
  Clone ID: MRT4577_126606C.1
ccggccgggccgggcgttgcagcgaccgacctctgagcagtgacactgacagtgcagctcggagctcacgatcgccctgtagctgtagccggccagcagccgtttaccagcacgtcaaactccaagtgtcttcagccaccctgctccatggcggcggctcctcatcggccttgtgtaatgatgctgcccttcgccgcgcagggccacgtcatgcccctcatggagctctcccaccggctcgtcgagcacggcttcgaggtcgtcttcgtgaacacggacttcaaccatgcccgcatcctcgcggccatggcaggagcgacccccgctggcggcgggatccagctggtctccttcccggacggcatggaccccgacggcgaccgcacggacatcggcaaggtgctcgacggcttgccggcggcgatgctcggcggcctcgaggagacgatcaggtccagggacatcaggtgggtggtggccgacgtgtccatgagcttcgcgctggagctcgtccacacggtgggcgtgcgtgtcgctctcttctccacctactcggccgccaccttcgcgctgaggatgcaacttccccggatgctagaggatggcatcctcgacgaaacagggaacgtgagaaggaacgagagggtccagctagactccaagatgccggccatcgacgcctccaagcttccctggaccagcctcggcaagagcccagagtcacggagagccatgatccagagcacgctcacgaccaacccgacactatcgctcgccgaaaccatcgtctgcaacacgttccaggaggtcgagtccgtggcgctggcccgcctccccgtaccggcggtcgccatcggcccgctggaggcgcccaagtcggtgtcgtcggcggcggcggccggccatttctgggcgcaagacgaggcctgcctccgctggctcgacgcgcaggctcccggctcggtcgtgtacgtggcgttcgggagcctgacggtgttcgacgcggaacggctccaggagctggcagacgggctggcgctcacggggcggccgttcctgtgggtggtccggccgaacttcgccgacggcgtcggcgagcgctggctcgacgggttccggcgccgcgttggagaaggcaggggcctggtcgtcggctgggctccccagcagcgcgtgctcgcgcacccctcggtggcgtgcttcgtcacgcactgcgggtggaactccaccatggaaggggtgcggcacggcgtcccgttcctttgctggccctacttcgccgaccagttcctgaaccagagctacatctgcgacctgtggggcgtcgggttgaaggtgtgcgccgacgccgacgagaggggcgttgtcaccaaggaggagatcagggacaaggtggcgcggctgcttggggacgaggcgatcaaggcgaggacggtggccttgaagagcgcagcgtgcgccagcgtcgcggacggagggtcctcgcaccaggatttgctcaagttagtgaatctgctgagagagaaatag

SEQ ID NO: 29164 - DNA, 220 bp, Zea mays
  Clone ID: MRT4577_126607C.1
gaagttatataaattttattttttttatttgtttatgttttggaaaacaaaatataaaggagaacatgcgggtttaaggtccatgaaagaaaattttacgtgctttacacaagattttctttgtttttaggtacaaaggaggtctggtaggtggggaacctatatttacaattttaaaaattggtaaggaaaaaaacccatgggtgggtgggtttttaaa

SEQ ID NO: 29165 - DNA, 143 bp, Zea mays
  Clone ID: MRT4577_126608C.1
gcatactataatgttactagacagagatagttatccaataaaaaacaaaatataaaaaggaacggttaacatataacacaggaacttcaacataaactatatcctccactctcctcaactactctctaaaacctactactctc

SEQ ID NO: 29166 - DNA, 228 bp, Zea mays
  unsure (1)..(228): unsure at all n locations
  Clone ID: MRT4577_126609C.1
ggatcgtcaacggcgcccggccccagcggttgtttcgtgcgcggtctgagggtagctggaggcagcgaccgctgctccactaangcggtcgcgccgctntaagagcgcttatgccccaaagcgaagcgttacccgtcctcaatcgtgtgcttagtgccgctttttggaaccctgtttgatttttaatggagatacacttatttgaaatataattgatccccagatata

SEQ ID NO: 29167 - DNA, 265 bp, Zea mays
  Clone ID: MRT4577_12660C.1
acgcgcgagcaaggcggcccgccgcgcgtcgcgaccggcctgctctccatcttcatactttgtctggaaatggcggtgactacctacgctggggtcaaagtcatgcagccggctgtgacaaatctttcattcgcatgacaaccgataacatgctatctgtacatggcccaagcaatatggagatcactgtgactctattgcatgacattctgcttgtttgccaaaagaaggctttgatatacactatatggggagttgtgtgctc

SEQ ID NO: 29168 - DNA, 343 bp, Zea mays
  unsure (1)..(343): unsure at all n locations
  Clone ID: MRT4577_126610C.1
tcgtccagcgtncgcgatcgacggggggggggggggtgggttagagtcaccgagagctcgtcgggcttcgtccccgcgagaagcgagagcatggacaccctagtgaagcttgctgttgtggtgaaggttatgggcaggaccgggttcaggggtcaggtgactccagtaagagtgagaggggtgggtgaccagaaccgtgttataatgaggaacgttaagggatctgttagtgagggtgacattctaatcctgattaagtttgaacggaaggtcagaaggctgatttgaatgcttggtggtcttggatgtaattgtggtaatttagttgtatgtttgtggaact

SEQ ID NO: 29169 - DNA, 574 bp, Zea mays
  unsure (1)..(574): unsure at all n locations
  Clone ID: MRT4577_126611C.1
ctctaanatttcttatatcatcataaatctggatgtgtcaatctatcatcactaacctatatgctcagtatatcatatttgttagattataaagtttgacccaatcgaaaacaatgttacaagtatatgtgaatatacataatatttcatgagttctcttaggtatgttgcatgtgtggttttcatcctgctgcttgtgcaatttccaagaattggaaacgtacattgttagtttagtataatggcaaactagttttctcataccaaactgggtgaaaataaacatttcttgtaaattcactttggtcatctgacacctttgccgtgtaatctgaagccattccgctgcacctggcagtatggaacatggaagtagtatgcggtgcaaagtttagccttttaatatctcatgtataaaacagcggtgtataatagttttccccgtgtgcaggttttaattgttatgcctttgctttttcaatgtataatgggtaatttttctctttctgctattggagagttaatcacagctaactcaactatttttttaccgttccacatatctagtgtttaa

SEQ ID NO: 29170 - DNA, 403 bp, Zea mays
  Clone ID: MRT4577_126612C.1
cggattcccgctcgaccagcgtacggaggctatgaacaagcgctgaaggctctgatcgtattatgctgcacgtagttgggacgggcatccgatgtttggtccactctaaggcgttgttacgtgactatagtcgtgatcttagatctgcacctaaagttcctgttgacacaaccgtagctcgtgtaaagccagggagagtctttggctactgccttagcattctcgtggactcccctttgtgacctctacagcttgagtacgcctttaatgataggcaatcacgcatatttcactttgctgttgtctacccacatatgacatcatattgcacacattctgattcaatcttgttcttctgagcattttggtctgattgaaaatcatgacataccttacatttttt

SEQ ID NO: 29171 - DNA, 212 bp, Zea mays
  Clone ID: MRT4577_126613C.1
atgggattaattttgtccagagggcaaaaaaacccgatcgacaccatgagggggttgctggccgtggttgatctcctgcgtgtcgctacgagaggcacctgcacgcatacaaaccgccgatgcgggtgccagccaccggcggcggttcatctaccgccgacggaggatgtgacaactacggttcacctggcacctacggtgcatatcccacc

SEQ ID NO: 29172 - DNA, 1335 bp, Zea mays
  Clone ID: MRT4577_126614C.1
gcggccgcggccgcggtggagtcgttcatgtgcaggaaatgtggagcagcggcggcggcctcgctgccggaatgcggctccccgggaggcagacatctgatgttgcgttagtggactagagagctccgtccggttcacatccggtgcggtacatcggaggccaagcagctctttgcgcggtgttcacccaccgccgcctcgtgtctcccaattccgtctcgttctgcagtgattccacaccgcaggtgggcagccatgatggcgtgcgccctcgccgtcgcctggcctgcagcgtctctcgcgccatccggcaagaggaacctctccggcggccgtcccccatggctgccgtctcccagaccttcaggcagcagaagggcgtcactgctgctgccccgccggcgctcgcagaagacggcgttcgtggtgggtggtgccgcgagcttttgcacggcctcgctgaagcgatcgccgagaatgcgaggccacggagaacaggtttgtgcaacgcggaggagacgggcggacatccagtcggacacgtacgtgctgatggaacccggcatggatgaggcgttcgtgtccagggaggagctggaggagaggctcaagggctggctcaagaactggcccagggacaccctgcccccagaccttgccaggttcggcacggtcgacgaggccgtctcgtacctcgtcaggtccgtgtgcgtgctcgagatcgacggagacgttggttccgtggagtggtaccaggtccagctggactagttgccgccctagattggatgtatagcgctgagaaacccattgagagccttttttttcacgcccctcaacttctcgcctctggacggccgcccaatatgcagatatggcgacgcgaaccgtgactccgtgagcttacccctcctttgcggtctcctaccagtgaggacttgttttctcaaaaaattccttccgctctagattaagaactactctagatcggcacgcctttggtaggagacctcgaagaatcctttaatcagcatcttgaatatttcatgtagttagcttgatcataattgttcatatttgtgcaactaaacgttaatccttactcctagtttgttggacagaccaatccagtcaagtcttttttttcccacgccccccagcttctcgcctatgtacggccgggcaacgcgcccaactgcagcagtcgtctgtgctcttcccctcatttgtggtcttaccagtggcgagtttctaggtaaatgagaagttgtggatacctgtcactgccaaactcattgtctgactttcttttaaagaagttagcttttataagtc

SEQ ID NO: 29173 - DNA, 2548 bp, Zea mays
  Clone ID: MRT4577_126615C.1
caattcggcacgaggcggaaccccccacccacacgactgggccggccgtcgctaacgccctacttcggtgccccttcgccggcgacgagcaccaccagtcaccatgtcatcttatcctgtgctaaacaaccgaccaatcgatcagtggagggttactgatttgaaggatgagctccgtaaaaggaagcttcctgttaaaggtttgaaggaggaactcgtaaggcgactctttgactccattcagagtgaaatagaagctgatgaagctgacgaagctgatgaggatgtgggagtgaatgtggatgatcagttgcctgatgccaatgctagcgaggaaaatacagttaccgttacggaagttcatcaggaaactgtggttcatgtcactcagcaagttgaagttcctaccaccaaagctggtcaggaatccacaatttctcccactagaagggcccccagtgtcgatgttgaagaggcctcagcagacgaagaagaagtacctgaatcagttgctgaaggaaatatgtcatttgaagaagtgcaagtgcatactgaaattactaatgagcctgttcatgagaagaccacagacgttgacaccaatgatacagttgttgttaatgatgcaatcgatgtgaattcagacttggcgcctgctgaagtcaagtttggtgctacggaagcaagcaaaattgaagaacatgatttcccccctgcacctgtagatgccttaaattcagatgctgctggtcctatggatactgatgtcgtcacagctgcaacttcagatgctggttctatggatactgatgttgtcacacgtgcaccagttagcgatgatgaggagaaactggaactcaaggttgatttgggtaacaaggtgtcaatgtatgatgaagagcacaatagttctgataccatgaatgaggactgcaagcccatcgtatcaaaaccaaacaatcagtccgaagatggtccaaccatcatccggcattacttcattaggtggagatttgcagccattggatgatgacaaagagctggttaagaaccagacatctttggaagacatagattccacagctaatgtggactcatacaagaaggatagtcctgaaggtgggtctccagagaaattaaatctagacaggagttcaggtgatgagtcaatggaggaggatgttgtggaaattaaacaagatgaggccaatatgaaatctgatgatctcggacaaaagaatgagcttaactcagaagatgtgaaagaggtgatcctccctgattctgttgttgaggcttccaaggaggttacggctgaagaaaagtcagcagcttcaacagaaaagagaaaacttgaagatgaagatattgcaaacactgaaccaatcaagcgacaacgtcggtggactgcagacgttgccaaagttccagagagacaagcattgagtcaaactggtcctgaaactcctaaggatatttttcagcctgctttcaaacgatcttttgggaggtctgattcaacagcaagtgtagattctcctaaggaacggattgtaccacctgcagagaaacctgccacaacttctttgagaattgaccgatttgtacgcccatttaccctgaaagctgtgcaggagcttcttggtaaaactggatctgtacaagacttctggatggaccatatcaagactcattgctatgttacattttcttcggtggatgaactgtggctactgatgctgtttacacctacagtggcccccaaacaatggcaataagttggttgccgaatttgttgatcctcaggaagtgaagctcaaggttgacccccctcccccgccagcgctcctgttagcccagctgctaccacaagggcacctcctcttcaacagactcaaagtgtgccacgccaggctgctacaccaaaagaggaactgccacctccaccaccgcctccccttgctaagccccctatggctgacctgacgcctttaggaagagagaggcttccacccactccaaaaaagccggagcctcctgttgtgacacttgatgatctctttaagaagacacagtcctctccgaggatctattatcttcctttatcagaagaggaggtggcagccaagctcgccgcacagggcaaaggaaaaaagggataggaggtgttagcttccattttcggctagcttggagtttgttgcggaacatggcgtgcggtggtcacagcagctgacacgtgctactgctgtggcgaaagagttgtagccttgtagggctgttctgtggaaaaaggacactagtgtaggagcagcagcttgtatttcctaatgagattgttagttttgattgggtctccgagtagagtgtgtgctgaagttatttgatctacatgaagtgttgaggtacttagtttaatttatgctgccaggtactgtaaaactgaaagatactggttctagttttgagtctatggagaatactgttacaccgtctcttattctagtctttgccttgctcaccgtgagtctcggcagagcaggttggt

SEQ ID NO: 29174 - DNA, 2368 bp, Zea mays
  Clone ID: MRT4577_126616C.1
cggacgcgtggggtcgatttctactgataatctatcaactaacaaaaagaataatatagaaggtaatttaaatgctaataattttgatttagaactagagattcagccgaagatggtcgaaccatcatccggcattactccattaggtggagatttgcagccattggatgatgacaaagagctggttaagaaccagacatctttggaagacatagattccacagataatgtggactcatacaagaaagatagtcctgaagggtggatctccagagaaattaaatctagacaggagttcagggtgatgaatcaatggaggaggaatactgtggaaattaaccacgcgtccggatgaggccaatatgaaatctgatgatctcggacaaaagaatgagcttaactcagaagatgtgaaagaggtgatcctccctgattctgttgttgaggcttccaaggaggttacggctgaagaaaagtcagcagcttcaacagaaaagagaaaacttgaagatgaagatattgcaaacactgaaccaatcaagcgacaacgtcggtggactgcagacgttgccaaagttccagagagacaagcattgagtcaaactggtcctgaaagtggtagtgatagtggtatgcctgtcagtaaccgatcattccagtggtctaatgaggaaaatagagttgcttttcctaaagatcatattgaaactgttgctgatgtcactgccacaagttgaagttcctacaacccgatgttggtcaagaatccataatttctcccactagaggcccccccagtgttgatgttgaagaggcctcaacaaccaacggaaaagtatcattgctatgtgacattttcttcggtggatgaagcagtggctactagggatgctgtttacaacctacagtggcccccaaataacggcaataagttggttgccgagtttgttgatcctcaggaagtgaagctcaaggtcgaccctcctcccccgccagctgctcctgttagcccagctgctgccacaagggcacctcctgttcaacatactcaaagtgtgccacgccaggctgctacaccaaaggaggaactgccacctccaccaccgcctccccttgctaagccccctatggctgacccgacggctataggaagagagaggcttccacccactccgaataagccggagcctcctgttgtgacacttgatgatctcttcaggaagacacagtcctctccaaggatctactatctgcctttatcagaagaggaggtggcagccaagctcgccgcacagggcaaaggaaaaaaggagtaggaggtgttggcttccattttcggctatctcggagtttgttgtggaacatggcgtgcggtggtcacagcatcagacaggtgctactgctgcagaccatttgaaataaccggcggccgtgactgccgcggcggaagagtagtcgtagggctagtgtaggagcagcagcagcggcttgtatttcttaaagagattattagttttggttgggtctccgactgcagtgtgtgctaaagttatttgagctgcatgaggttttgtttgggtactctagtattgatcccaatctatatgtgttgaggtgtaaattagtttaagttacatcctaatccaccttaatagatgtgggttgagttaaatattagagtacccaaactaggcctgaagcgtctgaagaacttggtttaatctatgctgtcaggtactgttaaaaggcaccagttttagtgttgagtctatgaaaaaaaaaaaaaagattccaactaaaaaaaaaaaaactcgagactagttctctctcgtgcgcaaggaaaaaaggggtggggtccatttgttatgtatcagtgcatttgaaaaccggccgcccggcgaaagagttgtagccttgtagggctgtttctgtggaaaagggactagtgtaggagcagcagcagcggcttgtattttttaaagagattattagttttggttgggtctccgactacagtgtgtgctaaagttatttgagctgcatgaggttttgtttgggtactctagtattgaccccaatctatatgtgttggggtgtaaattagtttaagttaccccctaatccccctcaatagatgtgggttgagttaaatattagagtacctaaactaggcctgaagcgtttgaagaacttggtttaatttatgctgtcaggtactgttaaaaggccccagttttagtgttgagtctatgaagaatattgttgggattccttgtttaaaaaaaaaaaaaaaaaaaaaaaaaaaaaaaaaaaaaaaaaaaaaaaaaaaaaaaaaccaaaaaaaaaaaaaaaaaaggcccctagggcc

SEQ ID NO: 29175 - DNA, 460 bp, Zea mays
  Clone ID: MRT4577_126617C.1
gggcccaaaaaaaggcttcatttttgaaacaaaagggggggaaggccccctttttcagcccggggccaaatggtttcgcagccccccacgagcccccccccgacaaaaacccgggggaacggcggccagctggtgtaaaccttggggggttctctcaacccgggggggggcccctcggggagcacatccacgggcacaaaaaccggggggggcgcttccaggaaacccacccccctttgggaaaacccccactggggagcgccccttgatcctttgaagaaagccaccaccctgttttcctttaccagccgggttattaagtgttccaagggaacccccaggtggacggggggtccaagcgtaaaacccaagtccgggggcccctggggggcaccaacccaggggggggttcctgcaacgttccctgggggggccttgcccggggcccctatggggtctt

SEQ ID NO: 29176 - DNA, 760 bp, Zea mays
  Clone ID: MRT4577_126618C.1
acctcgaggccggccgggtgctacatccaaagagcaactgccacctccaccaccgcctccccttgctaagccacctatggctgacccggcggctatagcgagagagaggcttccacccactccgaagaagccagagcctcctgttgtgacacttgatgatctcttcaggaagacacagtcctctccaaggatctactatctgcctttatcagaagaggaggtggcagccaagctcgccgcacagggcaaaggaaaaaaggagtaggaggtgttggcttccattttcggctatctcggagtttgttgtggaacatggcgtgcggtggtcacagcatcagacaggtgctactgctgcagaccatttgaaataaccggcggccgtgactgccgcggcggaagagtagtcgtagggctgtttctgtggaaaagggactagtgtaggagcagcagcagcggcttgtatttcttaaagagattattagttttggttgggtctccgactgcagtgtgtgctaaagttatttgagctgcatgaggttttgtttgggtactctagtattgaccccaatctatatgtgttgaggtgtaaattagtttaagttacaccctaatccacctcaatagatgtgggttgagttaaatattagagtacccaaactaggcctgaagcgtctgaagaacttggtttaatctatgctgtcaggtactgttaaaaggcaccagttttagtgttgagtctatgaagaatattgttgggatt

SEQ ID NO: 29177 - DNA, 2042 bp, Zea mays
  Clone ID: MRT4577_126619C.1
gccggccgggcctgcaacagagagatgacccgacgccgaccatatcgacctgtgccctgttgagtgtgaaggaggcgcacgcgcttgagctgaagaaactgccgcgctgatctagcccgccgggatgggcgcctcggggcctgcggctccgccggcaacgcatcgccgccgctgcatccagctgctgctgctgctcgccctggccgtcgcgccgcttggcagccgtgggcttcgcgtccgtgccgcgggggcggacacgggagggctgagccgggacgcgttcccgaaggggttcgtcttcgggacggcgacgtccgcgtaccaggtcgagggcgcggcgacgtccggcggccgcgggccctgcatctgggatcccttcgtccacacccccggaaagattgctgaagacgccaacgcagatgttacaacagatgaatatcatcgctacaaggaagatgttgatctcatgaaaagcctaaattttgatgcataccggttttcaatctcctggtccaggatcttcccagatggcgaagggaaaattaatgacgaaggagtacaatattacaacaatcttatagactacatgattaagcaaggccttactccttacgccaaccttaaccactatgatcttccgcttgcgcttcagaagaagtaccaaggctggttaggcccaaaaattgtggacatatttgctgactatgctgatttttgtttcaagacttttggcaatcgagtcaagaactggttcacattaaatgagccaaggatagtagcattccttggttatgataaagggcttaacccccctaaccggtgcacacaatgcactgccggtgggaactcatcgacagaaccttacattgttgttcataacattctcctatctcatgctactgcagttgcaagataccgcaataaataccaggcaactcagaaaggcaaggtcgggatagttcttgacttcaactggtatgaaccttttacaaactcaactgaagatcaaaaagcagcgcaaagggccagggacttccatattggttggtttcttgatccattaataaatgggcaatatccaaagataatgcaagacattgtgaaagaccggctaccaagtttcacacctgaacaggccaagctagtcaagggctcatcagactatttcgggatcaatcaatatactacatactacattgcagatcaacaaactcctccgcagggaccaccgagctactcgtccgactggggcgtccaatattactttcaaaggaatggcgtgcaaattggacagatggcgcactcaatttggctttacatcgtcccatcgggcatgtatggagtcgtgaactacctaaaggaaaagtaccataatccaatcatcatcatatcggaaaacggaatggatcagcctggaaacctcacgcgcgaggagtacgtgcacgacgccgtgaggatcgacttctacaagaactacctgacggagctaaagagagggatcgacggcggcgcgaacgtgatcggctacttcgcgtggtctctcctggacaacttcgagtggctgtcgggctacacgtccaagttcggcatcgtctacgtcgacttcgcgacgctgaagcggtaccccaaggactcggcgtactggttcagagacatgctttcggggacgggctccaaggctgctaccccgcagactggttcaggcggccggccggctggttcggcttcagccacctcgaacggacctgccttgctggtctcccttttggtctccttgggtgttctgcttccatccatcttcatggtttcctcggtctaattagaaatgtattttcatagtacggatttgtagttgtgtggatgacaacatgttccttttaagaatcaggacatgttgcatcgatgcgggacctgttgtaggaatgagaccatgattcagggcttattgttcagagccagttttgttttgttttgtttgcggattttcagatacagatttgaacgtgtattcatggatagcttgcgttttttggtgtgcgtgg

SEQ ID NO: 29178 - DNA, 645 bp, Zea mays
  Clone ID: MRT4577_12661C.1
gtcacaagaggccggccgggactgcactttcccgtcagactcatatatctctaaatctatgagacgaggcgcatgcgctcatgggggccaaggcgatacatcggcgtgtgggcgctgcacctggaggcgcaagtcaacttcttgaggacgaagaagcggaaccccgaggaagaagcggagcacgtggtggtcacatgactcatcctcttaccaacctcgtgatcctccacttcatgacgatgacgctgcccgtctcccccgcgatggccctcacgctcacatattccgccgcctacctcgctgtcaacacgcagaggcgaagcaggcgcggcgctggtcttcctccaagcatggcccgacagacgcgcccatcaagaccgcctccgcttcactctctcctggaacattgtcctcgtcacccacctcttctactggacctgctaaattgacgtgcacagcctactccatgaagaacgatcctagtgctacgagatgcttcctgatatgtgcatgatggaaccatgacgcatctacctgattatatagaaccaactgatctataatgaggcgaatcctagaagctgctacaaagtatatgcggaagatcgaaatagaactactagtgatggtgagtacatgcagagg

SEQ ID NO: 29179 - DNA, 410 bp, Zea mays
  Clone ID: MRT4577_126620C.1
gccgtcggacccgggcgccgccgccgccgcgaaagcgtcgcggacctgctccgtggtgtaggggaacccggcgcgggtcatggagttgagcagcgcgggggcgccctcgcgcagcagcgcgcccgtgccgtccgcccgcgtgttgcccaccgagtcctggatgctcatcacgtcagccccgtccacgctgcccgtcgtcgtgcctaagaaatggcccatcgacgatgacgtgctccggaaccgaacgccgaccgtcgaccagatctccatcgggtgcgacctgcaggagcggcaggcagctcaatctgggggggtacatggagacaaatgacgtgcgcgacgatgttccgatgccgccgcccaagggttaatggccctatgctgccgttcggacagttcccatagggcgc

SEQ ID NO: 29180 - DNA, 1120 bp, Zea mays
  Clone ID: MRT4577_126621C.1
cctcgaggccggccgggccgggacttcggccccctttaccggcgacgagcaccaccaccaccaggtatccctccctttgttcttcccttcctgcggcgcgaagccgtgcgcccaaaccctaacttctattcgtagtcaccatgtcatcttatcctgtgctaaacaaccgaccaattgatcagtggagggttactgatttgaaggatgagctccgtaaaaggaagcttcctgttaaaggtttgaaggaggaactcgtaaggcgactctttgactccattcagagtgaaatagaagctgatgaagctgacgaagctgatgaggatgtgggagtgaatgtggatgatcagttgcctgatgccaattctagcgaggaaaatacagttaccgttacggaagttcatcaggaaactgtggttcatgtcactcagcaagttgaagttcctaccaccaaagctggtcaggaatccacaatttctcccactagaagggtccccagtgtcgatgttgaagaggcctcagcagacgaagaagaagtacctgaatcagttgctgaaggaaatatgtcatttgaagaagtgcaagtgcatactgaaattactaatgagcctgttcatgagaagaccacagacgttgacaccaatgatacagttgttgttaatgatgcaatcgatgtgaattcagacttggcgcctgctgaagtcaagtttggtgctacggaagcaagcaaaattgaagaacatgatttcccccctgcacctgtagatgccttaaattcagatgctgctggtcctatggatactgatgtcgtcacagctgcaacttcagatgctggttctatggatactgattttgtcacacgtgcaccagttagcgatgatgaggagaaactggaactcaaggttgatttgggtaacaaggtgtcaatgtatgatgaagagcacaatagttctgataccatgaatgaggactgcaagcccatcgtatcaaaaccaaacaatcaggtacctgcccgagcggccgcccgggcaggtacgcgggggggggcgatataggttattgcgcgttttgcagcaccccctccctggttttgctctttgctctgcatcagtttcctgaccag

SEQ ID NO: 29181 - DNA, 710 bp, Zea mays
  unsure (1)..(710): unsure at all n locations
  Clone ID: MRT4577_126622C.1
attctggttccatgtggtcctatctgtgtgtgtcgctgcagtttctgaagatcatcacttccttccatgttgaactttgcaggtcaaaggaatggcgtgcaaattggacagatggtataggcttctccgggttactgactttgaaccatactttattctattggtgctagaagattgataagtgcaaaagtagcatgaagattctgatgatcaatgtacctgtgctttgcaagcgcactcaatttggccgtacacgtgggttggctttacatcgtcccatcgggcatgtatggagtcgtgaactacctatccgatcagtaccataatccaatcatcatcagatccggaaaacggtacctngaaataacctgtttccttcgtctgaaatgtttgcactcccttccatggtgctccttgaaccgcatcaacgaatcatggctccatgaatataataaatatcaggaatggatcagcctggaaacctcacgcgcgaggagtacgtgcacgacgccgtgaggatcgatttctacaagaactacctgacggagctaaagagagggatcgacggcggcgcgaacgtgatcggctacttcgcgtggtctctcctggacaacttcgagtggctgtcgggctacacgtccaagttcggcatcgtctacgtcgacttcgcgacgctcaagcggtaccccaaagactcggcgtactgggtc

SEQ ID NO: 29182 - DNA, 373 bp, Zea mays
  Clone ID: MRT4577_126623C.1
gagctctctagtcggcggccgccctccatctagcgctggactgtggcgaaagcagcccgttatggcctcctccatgcatactgttagactccttgttgggccgtctaatttcaacttacatgtcctgatgcatacatgtcaaaaacgatgataaagactggtgtgtctccagaataactgaactctatcagaacattcaggccttgacggtgagaagactagcaaatggagactactcaaatatgacctaccaacagtagcctggcacagaatggccaactgaacggtgacatatatcataactgtaagaccgctggtgccttctgctatgggcaggaacgacgcgtgatgcgacactgccatagaactctgt

SEQ ID NO: 29183 - DNA, 1673 bp, Zea mays
  unsure (1)..(1673): unsure at all n locations
  Clone ID: MRT4577_126624C.1
cattgggtacctcgaggccggccgtcgctaacgccttcggtgccccttcgccggcgacgagcaccaccagtcatcatgtcatcatatcctgttctaaacaaccgaccaatcgatcagtggagagttactgatctgaaggatgagctccgtaaaaggaagcttcctgttaaaggtttgaaagaggaactcgtcaagagactctctgactccattcagagtgaaagagaagctgacgaagctgatgaggatgtgggagtgaatgtggatgatcagttgcctgatgccaatgctattgaggaaaatacagttactgttacagaagttcatcaggaaactgtggttgatgtcactcatcaagttgaagttcctacaaccgaagttggtcaagaatccataatttctcccactagaggcccccccagtgttgatgttgaagaggcctcaacaaccaaaggaaaagtacctgaatcagttgctcgaggaaatttgacatttgaagaagtgcaagtgcatactaaaagtactaatgagcctcttcatgagaagaccacagatgttgacaccaatgatgcagtcgatgtgaattcagacttgatccctgctgaagtcaagtttggtgctacagaagcaagcaaaattgaagaacaggattttcccccagcgcctgtagatgacttaacttcagattctactggtcctttgggtactgatgttgtcacagctgcaacttcagctgcaccagntagcgacgaaggggagaaactggcacccaaggatgcttcgggtaacaaggtgtcaatgcatgatgaagagcagaataattctgataccatgaacgaggactgcaagcccatcctatcgtccgcaaacaatcaggtacctgaggttagtccagatttagggtctcaaattaagtgtgagtcgatttctactgataatctatcatctaacaaaaagaatactataaaagataatttaaatgctaataattttgatttagaattagaggttcagccgaagatggtccaaccatcatccggcattacttcattaggtggagatttgcagccattggatgatgacaaagagctggttaagaaccagacatctttggaagacatagattccacagctaatgtggactcatacaagaaggatagtcctgaaggtgggtctccagagaaattaaatctagacaggagttcaggtgatgagtcaatggaggaggatgttgtggaaattaaacaagatgaggccaatatgaaatctgatgatctcggacaaaagaatgagcttaactcagaagatgtgaaagaggtgatcctccctgattctgttgttgaggcttccaaggaggttacggctgaagaaaagtcagcagcttcaacagaaaagagaaaacttgaagatgaagatattgcaaacactgaaccaatcaagcgacaacgtcggtggactgcagacgttgccaaagttccagagagacaagcattgagtcaaactggtcctgaaactcctaaggatatttttcagcctgctttcaaacgatcttttgggaggtctgattncacagcaagtgtagattctcctaagggacgnnatgtaccacctgcagagaaacctgccancacttctttgagaattgaccgatttgtacgcccatttaccctgaa

SEQ ID NO: 29184 - DNA, 293 bp, Zea mays
  Clone ID: MRT4577_126625C.1
ctcgagccgctcgagccgctcgagccgtggtggtgttcgggtatgaggctgggactaagccacgggattcaggtgtggtgccggtaggaactgaggaagcgcccaaggaaatgaaacacgatttccaaaatgaacttaatctttcatgagaaactgaggatagagatgtcaataagcagccactgtttccacctccccacctgaagagctaggaggacaactacaaagagcctgactgccttctcggaatgaggagagaggaaaacagcaacagtatcagttttcaagatggc

SEQ ID NO: 29185 - DNA, 928 bp, Zea mays
  Clone ID: MRT4577_126626C.1
tgggacctccaggggggggcgggacagtgtcacacatacatcaagtcatcaataattgcaccggcggattgtacggcgctctgtgctgctgcagggattttgcagtatcttgttggaagccttgtagtggccgcggtggaaagaacaagacgatcaaacgcatggcgccaaacgagctgcttaggatggaaattttcttccatttgttgagcaccgaaggaagccccgatgttaattaatcgttataagtgcctcgcccacactcaccaaagtccaaggatcggtgcattcagaatttcagattcagttcttggttagccattgacagcatctgaggccatatcatggatgcgctcacgtactacctgtgcctcttcttggccttccttcccctcttgctcctgaagctcaagaggcgagacaacaacgatggcctgaggttgccgccgagcccatggagtctgccggtgatcggcagcctccaccacctgctcgtcggcagcccgctcccgcaccgtgccatggctcacatctcgcacaggctcaaggcgcccctcatctacctcaagctcggtgaggtccccgtcgtggtcgcgtcgtcgcccgacgctgctcgggagatcctgaagacgcacgacgccaacttcgccacgcggccgtggagcccgacgatgaaggtgatgatggcggatggggagggcctggcgttcgcgcgctacggcgccctgtggcggcagctccgcaagatcagcatcctggagctgctcagcgcccgccgcgtgcagtcgttccgcggcgtccgggaggaggaggtcggccgcctcgtggctgccatcgcggagtactccccgcggggcgaggccgtgaacctcagccagaggatcgccgagctcatgaacgacacggccgggcgcgccatgatcggcga

SEQ ID NO: 29186 - DNA, 410 bp, Zea mays
  Clone ID: MRT4577_126627C.1
aattcggcacgagggtaaattccacctccacctactgttactttagtctgaacttatttaagaaactgattttgtacttcggttctgcatagatgtttctctatgtaggatgcaatagcagctttaaagtttaaacacatcataacattttgcaaaagttgtgcagtaattaacctcaatgatgatgcttatgtgattacttttggaaataatactgtgtgtctaggtacattcctaggttcatagcgtttgcttcagctaaatttcagcatggagtaatatgagtaatagcctgattagttgtgtaatattatgcattaattaggaggctaccactgtcggagttgtagctcacgtttggctatataagtagaagaggaaaacagaaaaggctaatgtagctcacattt

SEQ ID NO: 29187 - DNA, 469 bp, Zea mays
  Clone ID: MRT4577_126628C.1
acctcactacacgtgctgctcttctgcttctccatttctagccctgtcacttgccagttccatcccaccctccgactatggctgaagagaagttgcacatcaacattgcgtctattggtcatgtcgactctgcctagtccaccaccacatgacaccttatctacaagcttgcaggaattgacaagcgtgtgttcgagacgtttgagaaggaggctgctgaaatgaataagccgtccttcgagtacacgcgaatgctccaccctctcactgctgagcgtgagagagtgatctccattgatattgctctgtgcaagattcgtgaccaccaaatactactgcacgggcattgatgaccctggacaccgtgactttctctgtaacatgatcactggtacctctatgtgtgactgtgtgtgtccttatcattgactccatcactgacgaatgtgaagatggaatctccgaggat

SEQ ID NO: 29188 - DNA, 274 bp, Zea mays
  Clone ID: MRT4577_126629C.1
ccgacgcgagcagccacgcgtccgcaagtctggaatgaactagtgacatgtgaacaggacgatgatcgacataatcaggggaccaaaagggatggacctgacgcaggaataaactacagagaagatgaagagggattacaaaccagagcggatgatgctatgactgagattatactacctggactttatctcgtacttctggtctagtacatgccatcatcggttgctggactgctaagtggactatagtgcattgatggtctccacgctatgc

SEQ ID NO: 29189 - DNA, 320 bp, Zea mays
  Clone ID: MRT4577_12662C.1
aatttgtttgtcttttgtgtgtccgacaaacttttccatattaatgggttgtgaaattcaagtactatatagtatatactccggggattttagccccatccaatcccctccggttttctggcttccaaactagccatcaatcccatcatccaattcccttatcccaaactagccctaagaaaattgggtacagggaaaagaaatcccaacttggcctcccctctataagcatgcagaagctgaaaggctctcagcctgttgtccccgtagaatgctctcctttgtgattgcctgcacagcactgccataacacttgcaat

SEQ ID NO: 29190 - DNA, 180 bp, Zea mays
  Clone ID: MRT4577_126630C.1
gggcctacgacccaggggctgcggtcttacataacctaaattctattcactgcacgtccttatcaacactgtccactgaaaaaccctaacgctacccaacttaatccccttataatacattctcatttttccacatagtgcaattatataataggcccgcacccatcttcctttcaaaca

SEQ ID NO: 29191 - DNA, 365 bp, Zea mays
  unsure (1)..(365): unsure at all n locations
  Clone ID: MRT4577_126631C.1
gacnacaaggagacgagcgaaaaggcgctgtatgcggttttcgggaacgccaccagccccagggagcggggcaggccaacaacaaggagacccccaaccgcaccgcgaaggccgagcgcgagaccgcccngaacaacgagcacaagcacgaccgccgaacgacgggcgcgcaccacaacagcggggagctgcacgacaacgccaacgacgaccaccggacgacggacgacaggcacggcggcaccgagaagaccacacacaagagcgccgcggacgaccaccggacgaggcagagcaccgcgctcacgaaccacgagacgtgcctggacgggggcgagaacaccacgacccccgccgagggcaag

SEQ ID NO: 29192 - DNA, 960 bp, Zea mays
  Clone ID: MRT4577_126632C.1
tttttttttttttttttttttctcggagagaaacaagccttcacttctatcatcattgggcggagtcagaacgaacgctcaacaaaataaagaatggcgaacgtcaaaataaactgcaaatgtacaagggaacgattcaacctatcagctaaataaatgttcttatttctttgcatcagacatccaaggaaggattaggcagcactagctctccagcctggcagggcgaaagctcttaggcggcaactgcgaatgtagagaaacaagccttcatttcatcatcatttgcaatcaaaatccatcaagcagacggatgaaacacttggccaagaagacaatgctacacaaaaatatgtatagctcaggcatcgcaagaatttacagcagtagctagctctcgggcctggcagaacaaaagctcttacgtggctacagcgaaagttcgtgtagaaacatgtaatcacattaaccggctctgtggacacatagagaagcagcccccaggttcctatcaacatgtgaaatgttgaaacaactttgttttggcctaatcatagcatctctggtcaatgcgttcgctaacagagacgtggcatcaggcccaaatttcatttcattcagttggataatagatgaccaaaagagatgtacaatacatattacttgcggttaagcctcagcaagccagacaattttcgtcataagtaaatctgacggtaattccagatgtatgctaatcatcattggctcacgtacggattgcatgtcattgcgatgttgtaaagatacctgcctagagcaaacaatggtaaagaatagaaaatacataaaaacgtaaataaacaggcatgatctaagagtgattgctgtatcatcagaaaagaaggtacttctcactcacagtgatgaaacactgtgtcagaaggtgtcctaagatttttcgaggtttcatcatctgat

SEQ ID NO: 29193 - DNA, 265 bp, Zea mays
  Clone ID: MRT4577_126633C.1
atgggttggtgcaccggaacctgaggcaggtcaacatgctgctggatcgcaactacctgagcaagaccagccaccttaggctggtgcgtttggtgccggcgtcaggggggggcagcatgacgcaataccggctgactgcaacagggggcaccttatgctacattggcccggagtaccaacagacagggaagctgggcgataagtctggcatttactggctaggcgtgctcctgctgaaggtggaaaccgcgcggacaaccatggg

SEQ ID NO: 29194 - DNA, 473 bp, Zea mays
  Clone ID: MRT4577_126634C.1
aaaacacaaaagccccacaatttttttttcacaaaaccctcacaatttttatttcattcacaactgggtcactaagggtgcatatcactccagcttttggtcaaaagccaacaactacattacttttgcacaataatcacaaagaattggggggaacaacagcccctctcatttgggtctacaaactttcttatggtcccctagcccaataaaaacttaagggcaatccagattatgacccatgctttagatcttggctgaagcatccactcaatgaactcatttgaccggtcttggtgggggttggggcccttttgaaaggtctggaaaaaagccgattctgatttgggggggatggactggggaccacccggggtttccgagagccaaacctaaggggggtgaaaaacctttttagggaggatgggctttttttttcaaggtttataaaaagggtttggatgggtggtttt

SEQ ID NO: 29195 - DNA, 270 bp, Zea mays
  Clone ID: MRT4577_126635C.1
cggctacgggcacctaccacgattaatactatgatagtgtactccatggagatactgctgtcgctagacgagttagagcattgcaagaagctgccccctgacatttgatgcaacactgcttaaagagcagcaggagctggctgcatggcgtgctagatagaaacaagggctactacaacacattccacggacggccagaagggtccgggggatatacttactcttctacgggagggaacactaaatggaggggggatactcagtcattta

SEQ ID NO: 29196 - DNA, 242 bp, Zea mays
  Clone ID: MRT4577_126636C.1
tatacctgcagtacggtccgaattccggtcgaccacgcgtacggaggcggatcgtgtcacgcgtccagaaatttcagttctattgtagcttacacaatttgtttgtgatgcttcaaaccgctaatgattttttttaaaaaagttgtgcaatgagcatatcacataatatatgagaatcttaggaataaaccaagttgctaatgagtaaaattttggctttgctttttaaaaaatatgggttc

SEQ ID NO: 29197 - DNA, 719 bp, Zea mays
  Clone ID: MRT4577_126637C.1
gcgaaaaaccatacacacctggggaaaaaaattcattattcagaaacaaggtaaaccgaaacatgaatataggcaagacataccatatagaatagtgccacagggaaacttaaagtgatcagacatctgactggtaaatgtttggaaatactgaatgcccagagtagaaaaatccataaataccaatggtaaagggcatgccactaccagtttactaccttcccagttaaatggaagcctgtaccatcagtagcaccaactaaaccaacggacaggaatacaagaagagttgccatcacaccactcgcagcgttgtcgccaatggatgaatagttcattactctaggctttcaacttgcgagtgttgctgtgtggaaatactcacactgaatatttctttactccattagaatctaattcgcgttctcaaacaaaacccttgtaccacataaattgcagtggatcgaagcctccaattcattactacaaatcatcacaatctttgaactgaagccaaataattagctgtgtatcagaaacatgctcccatccaatgtactgcttttcctagtgataaaggagaacagaacagccgttacaagtatttagttttacaatttacagttttgacattcatgcacatgcatatacctggtaagatgtttacaattcgagttattcatgacaatatgtaatcaatgacagtaagatgcgcacgc

SEQ ID NO: 29198 - DNA, 342 bp, Zea mays
  Clone ID: MRT4577_126638C.1
cgctcggatgcttgagtgcggtcgagcgggcgtttttaagattttttttttgactttttctccaggcgtgtggcacgcattataggggaaagcctttcccgactggggctggactacctcgacatgcttcacgctcatgacatagagttcacccatctctaacagattgtgaatgagacaatttcctctctccaaaaagtccatgggaacgggtaggcacggctcattggcattaccgggttggctctcaaaatctacccttatgggcttgaccgggtagaaccaagcttggtgggcgggattctatcttattggtactacgggatccaagacaccttcctt

SEQ ID NO: 29199 - DNA, 2327 bp, Zea mays
  Clone ID: MRT4577_126639C.1
tgggtacctcgaggccggccgggactcccataatatctctcccagttcagtcccgtatccccggtccccaccaggcaatcaagaacaccacctaccgctgacttgtcaattcctgtctgtgcgcgcgcgcgcgtggcgccggccgagcggccgttgacccgatgaccggcgcggcggccgtcgatcccccggtgcctcggccgcggcggctcacggtcctcccgctcatcgcgctcatcttctacgacgtctcgggaggccccttcggcatcgaggactcggtccgcacgggcggcggcgcgctgctcccgatccttggcttcatcgtcctcccagtcctctggtcgctcccggaggcgctggtcacggccgagctcgcatcggctttccccaccaacgccgggtacgtggcctgggtgtccgccgccttcggccccgccgtggcgttcctcgtcgggttctccaagtgggcgtcggggacgctcgacaacgcgctctacccggtgctgttcctcgactacctccgctccggcggcgggctggcgctgccgccgccggcccgctcgctggcggtcctcgcgctcacggccgcgctcacctacctcaactaccgggggctccacatcgtcggcctctcggcgctggcgctcaccgcgttctcgctctccccgttcctcgcgctcaccgtgctcgcggcccccaagatccgcccgtcccgctggctcgccatcgacgcccgcgccgtcgacctcaggggctacttcaactccatgttctggaacctcaacttctgggacaaggccagcacgctcgccggcgaggtcgaggaccccaggaagacgttccccaaggcggtgttcggcgccgtcgggctcgtcgtcggcgcgtacctcattccgctgctggctggtaccggtgcgctgccgtcggagacggcggccgagtggaccgacggcttcttctccgaggtcgggcagcggatcggcgggccgtggctgcgcgtgtggatccaggccgccgccgccatgtccaacatggggctcttcgaggccgagatgagcagcgactccttccagcttctcggcatggccgagatgggcatgatccctgccatcttcgctcgcaggtccaagtacgggacgccgacgttcagcatcctgtgctcggcgaccggggttgtgatcctgtccttcatgagcttccaggagatcatcgagttcctcaacttcctctacgggctgggcatgctggccgtgttcgctgccttcgtgaagctgcgcgtgaagaacccggacctggcgcggccgtaccgggtccccgtcggcaccgcgggggccgccgccatgtgcgccccgcccgccgtgctcatcgccaccgtcatgtgcctagcgtcggccaggaccgtcctcatcaacgccgccgtggtcgtcgccggcgtcgcgctgtactacgtcgtggagcaggccaagaggcgcccgtgggccgagttcttggcgcccgtgccgcccgctgacagctcccacggaccagccacggcgcctgatgacgccgacgccgccgacctcgaggatgtccgcgccgggctgctcgccggcgagccggccgacgaagaaggcagcaaggtcgagtactcaagactggagattcgtgcatgaacccgtttgccgttctgtgtacagtaattccagcgaatacatggcgaattattgtatgaaattcagaggagccgaggaggaggtcaggtgatcgatcgcgctcacaagaagattcagaactgcaaaccgagtactagataagtctgaaccatgaatcggagaagtgagaacagatctcaaattgtagaagctgtttttgttttgaccttttaagtgtagtgtgatgccaggcgaggtggtgccggtttgagaagaagctgtatttttccagcaagggggtcagataggttgtactgtacttgcattgagtcaacttgataattcagtaaagtaaccagcatagaaaatctgtgtagtgttttggagatgaagaaacgttgtggggggcttgcgcgtgaggggggggattaggattttagatggttaggctcgttcctttaaggaaaatgggtgggagtgacgttattttactatgtcgccatgggttgggcgttctttttatttttgggttttgttatcacaaggcttctgagaactcctggaaatctgctactgacgaatgttctcaagagtgggctttcctgtaagacctattgctcatattacatgaccctggggaagtttgaatattaattaaaatttcgagggactagtatgaaacaaaaattattc

SEQ ID NO: 29200 - DNA, 275 bp, Zea mays
  Clone ID: MRT4577_12663C.1
gttaacaatagattctttagtaacctcttttatgtgcaaagcactaagaatgcactgaccgacatatcaaaataggcagagtgtggcaccttggtctgtcctgtctcaatcaatagtcaccacatttgtcatatgttagttacttgatttattgtttttctgaataaatgctgatactgctatttataatttgcatggctcttcatagttatgaacttatggcaccattggatttgtatgggaacaagtactctcacaacagatctttatctatt

SEQ ID NO: 29201 - DNA, 521 bp, Zea mays
  Clone ID: MRT4577_126640C.1
ccggccgtggccccctgtacagatttgccccactcctcaccccgatcgatgctcgactgatgacaagcatgcccgatcgtcagatgttttctcttcgcgatcgacacttcctcactctcatgtctcaccgtttccgcgcttctctgtgctgatctgagaatgggcttggtcgtgagaatgatgcgttagatatctccttacgcaaatcgattgtgaggtgaccagcaaaatctccaaacagatcggcgcccctacatgctccaactttagttgcacgtaactcctcctcacatctgcgccatcgcggtgaccatggtcataatggtctcctgcgacaaattcttacttcgttcctgactgctccgacatacccggcggaagcatctacggcaaagactggctggcctactagatgagctagactcgcatgaatcgacatgcacgtcactgaccgatttccagctcgggaaagctgtcaaggcagatgccttaatgcatcggccaacgcacgacaagacgct

SEQ ID NO: 29202 - DNA, 345 bp, Zea mays
  Clone ID: MRT4577_126641C.1
tcgttgacatctccctccctcctctcttccccgctcccctcccgcggcgccctcgtcttcaagaagccgtctgcttcgtcgctcgcagtctcaacggcgaggcgtggagtccgggtggtcgcagaggccgcggcggtatcgtcccccgcatcatcggtgtcggcacagcggacccagccgtcggcagccgaggtggcgcggacggtggttgagctcgcgccttccgggacgctgtccgtcgtgggcgccgacggttggccgctcggtgtcggcgctcgttttgtcgccgacgccgctggcgcgcccgcgctctgcctagccacagcggcagtgaccgtgcctgat

SEQ ID NO: 29203 - DNA, 401 bp, Zea mays
  Clone ID: MRT4577_126642C.1
actcaccgtcatcaactgtaaaattacctctttcactaactacaatggtttcaccatcgattactatgaaatccggtccaccaacggtacccgtctgctggtcgccaccgtgtgtaaaatcacatactacaccggctattgtgattacaccatcacctccggtgaaaatcctcccaccaccggcaccagctagctcacctcacgggccaattgccctgagctcagcatccccattagcaaaatgggcaccgacacagataaaaacacctgcgccaccaacttagagaagatctctatctggaccggtgaagccaccgacacgcaccgtgacttgtaaggtctacaccacgtgacaccaatgaccttttcacctgcaccaacaccggcgagctcaccgtctt

SEQ ID NO: 29204 - DNA, 417 bp, Zea mays
  Clone ID: MRT4577_126643C.1
cttatcaagccttttggcccttcgtcctactcccacgagggccctcaccagcaggggcttatcgaaatacctttcacacaacaaaaaccaaccgaatgtccggaacaaaaacaaaatatgttgggatgatcaccaacatggggtgacaaccaccacaaaacgatcggttcaaaccacacgacaactattggctgaaaactacaataacgagccggaaaccaaacgcccaaaacaggacaaccctcacattctcacctctaaacacaatgaaagccgggcccaccacaccctaaaactaaccacctgcaaacttggaatacaaaactaaaccgccccccgacactgacaagggatagctcatgccctactcgtccaaaagaacccagccaaacattacaacccatcccaaggaccgcc

SEQ ID NO: 29205 - DNA, 160 bp, Zea mays
  Clone ID: MRT4577_126644C.1
tcgtcgtcgcctctatcggtcaaagctcaaccaccgccgcgtgcgcacctctctccgtgacccaccacgcccactgccgaagcgcgccgccgtgccccagcctggtcggcgtgcttccaccgccggcgagtcgaacccggtgcgccctatatgcgctggt

SEQ ID NO: 29206 - DNA, 627 bp, Zea mays
  Clone ID: MRT4577_126645C.1
gccggccgggctccggacttaacctagttatccagcatctttttgatactttggcatttcgcaagctcatgtctataccttggtttcttcccagcccatcgtgttgggatggtttgatacatgttcagaaagcagatgtgagaaaccatagtaaaataatacgttgatgctgatccatttttgggtcaaaaaaaaaaaaaaaaaaaaaaaaaaaaaaaaaaaaaaaaaaaaaaaaaaaaaaaaaaaaaaaaaaaaaaaaaaaaaaaaaaaaaaaaaaaaaccaaaaacaaaaaaaaaaaaaaaaaaaacaaaaaaagggaacccaaaggaaccgagggcccccaaaaccgggggcccccccggacggggggaccccccccgcgggcaaaaattcaacttgaacctccgggggggcccccaacccaaggggcccccagagccaaaaccttcccggaggtgacccaatttaccttatccccgggccggccttttaaacccgggggggaagaaaaataaaggggtttgaaaaatttacccctttggaaaggtgccccatttggaaaaggggggaaaaaaaacaacgtccccccccgagccccccttccatatgtgggggaaaccttaagg

SEQ ID NO: 29207 - DNA, 604 bp, Zea mays
  Clone ID: MRT4577_126646C.1
agtagtgctaccggcattagaacactagactactctatgtgaatggagtacatacagaaacagaatacaacttccttcgttagattctgattgatataatggtgatagggagtcaaaaagaatggagtacctatgcatcctagagcacgtctgtacctgatattcatatgttacatcgtcgatcgcggcaattcatagctccgtgtcgtggaggcaatagtacaagaagaggaaaacttgagtttgtgctacctcgcataatggagcttgttggattatgattgcataagctacctaccctctgctactgcctccttgtttgtagccagattcacaatccacccaaagactcctactcattttgatctaggtttctgaaatatttggtgtctgatctaagtgacgagaaatacctcctactcattatgaatgttgtagcctcctctttgaccttttttgtggtttgtcataatctggtatttttatgggatgtagtacttgtgatcactttggagatgaagaggggcgactgtgcttcattctgattatatccatgaaactctacaataacagtttgtgtcactatttgtttttctttcccccc

SEQ ID NO: 29208 - DNA, 2368 bp, Zea mays
  Clone ID: MRT4577_126647C.1
ccgggatttcgtgtccgcatttcccactacccgcctcgctctgctccccagatccctcttccctctccgctcccccacgtcatctagtcgccgcccccgctcaccgattgtcctctgctgtggagcgagcaagcagcggcgaagcgatggaggaggagatcagaaaggagttccagagtaacggcttctccatcggaggagccggccccgaggacgccgcccagatcctctccacgctgctgacctactgcatcaactacaagatgagccccgcggatctcgtctcaaactgggaggtctactacctcaataggcaattggatggcttaaagctcgaaagctcgtatcttgatggttttctgtcacaccttcaaaatgaagttaaagacaggataataaaagaagaagctaaccttcacatttactccagtaacgatgttgacatgctcttaagcaattcacatgtagatgaagcagcattccatgacacaccaggctatgaacaggaaaaggcacctgaaggatcatctatctctgagttaactcctcgggcaagtgacagaccatcatccagcagagtggccaaaacaaatgctgatcgtattaccccttttgcaacacgagtaaataaatttacccaacagtatgttctcaatgctgataacgcagttagtgtgccaagtaaaaatgctgaaatcacagaagatgaaataattagaagagttcaacctagtcaaagatgttacttacaagttcagcgctcacagcctgaaccaggttgcagattcatgtatgacagaatggaagacagatttaattacttggaagatcggatacggaaatcggcgagcttgttttctgcatctggattttgtggacaacctgcagatgctacccttgcttcagaggagaaaatgtttgcagtcggtacagtagcctgtgacggggaaggtcatttgaatgaaaagtctatcttgctacagggcagtgttgaacactccagggggcagtgtgtgcgccttgatttgaaggatcttgatcacttctctttgtttcctgggcaggttgtgggtattgaaggccacaatcccagtggacactgttttgttgcatcaaaattatttgattccataccggtctctgtggatgctcaacttcccagtgctaagaaacaagctattgataatgaaagcaaccaaaattctgacgctggcactctgtcaagagcattgtcatcgatcatcgcagcaggtccctatacaacaaccgataatatgttgtttgagccacttcaagaacttctttcatatgcttgtcgaaagccgcctcagcttctcatattgatgggacccttcattgactctgatcatcctgacataaaaaagggaactattgaccagagctttcatgacatttttcattttgaagttctgagaaagattcaagactttacccagtatctggggaacaccgttcgtgtaattctcattccatctgtgcgagatgctcaccatgactttgttttccctcagcctgcatttgatttgaatttgctagaagataccacccatcagattacttctctggcaaatccatgtctcttcggttccaacgagataaattttggctgttgtacagtggacattctgaaacagctcagtggccaagaaatttctcgcaagccacctggcggaaagcctggagacaggattggtagacttgcctcacacatactaaagcagcaaagttactaccctctatatcctcctgcccccggtgtgccgttagacttgtcactcgctaaggaagcgctggagatcccatcagcgccagatgttctcctccttccttctgatctcgcaccatttgtgaaggtgctctcccttggagaaggtagcgacgacgacagacggtttatctgtgtgaaccctgggaggttggcgaagggtattggcgggggcacatttgtggagctttactacaacgagggcatcgacaagaccaatgcctccatcatccgcatataggatcgctgaaactagggtgcgccgcagaaaatcacgtacgtagtttttgagctcggaaaatccatctcagcgtttgttatcccaggaagtgttgcttaacatgtggcatctccgctgcaaccgagtacctggactgaaatgttcatgttatcgtcaactaacaactgacctggtttacttcaggccctactgtataattacaggaattggttggtccatctttgctgttttccacagcattcttatggtaaaattattactgggagtttgttgtccagattaagctgtaatgcgccatacaacttccccgaatactggaatatgaagtgattgatgaacct

SEQ ID NO: 29209 - DNA, 1502 bp, Zea mays
  Clone ID: MRT4577_126648C.1
ctaaccctagatgggcgccgtcacctctacggtcgcggcgcgctttgcctttttcccgccgagcccgccgtcgtacgggttcgagcagccggcgccgcttccggcccctgccacacccgagcctccggccccggccacatccaagccgccgcctccggccccggccacacccaagccgccgccagcgggggaggagaagggcggtggcgcggtggtggagctcacgggcgtcccgcggagggttaacgtggaggcgcggcggctgcggacgaagcggggcacggaggtggtcgcgatgcacgtgcgccaggcgggggccaagctcacgctgctctactcccacggcaacgccgccgacctcggccagatgtacgagctcttcgtcgagctcagcgcccacctcaacgtcaacctcatggggtatgactattctggttatgggcaatctactgggaagcctagtgaacaaaacacttattctgacatagaagctgtatacagatgcctcatagaaacctatggagcttctgaggataatatcattctttatggacaatcagtgggcagtggtcccactttggatttagcatcccgattaactcgtttaagagcagttgttctacatagcccaattttgtctggcttaagggtgatgtatcctgtaaaacatacatactggtttgacatatacaagaacatcgacaaaattccattagtcaggtgtcccgtgttagtgatacatggcacagcagatgaggttgttgactgttcccatgggcggtcactgtgggaacttgctgaagtgaagtacgagccgctgtggatcaaaggcggaaaccactgcaacctagaactgtacccggaatacatcaaacatctgaagaagttcgttggagccatagagaaatcgccacccccacctccgatcgacgagtgcatggagagctcaggcccgtcggattgtaccccagcagaacccgagtgtacagcggactcaaggaagagcacggactgcagggacaaagcaaggccaagcatagatcagagacaaagcacggaccggcgggacaagccgaggggcagtacggataggagggacaagacgaggaagagcgtggaccatcccgagaagccgcgggctagcgtcgatcaaccggatcggccgaggaaaagcatcgaccggtttggaggcatgatgaagtcggtgaggctgtgcaatatcgactgcttcaaagtgacagcaacctctgggagctgaagagaaggaacggatggatagtagcaggaaaggttagtgttgggtgccgtctgtatgtattcttcccttcgtgtaacttattcaattgggtgattggtttggccgcagtagaaggcgtgtttttgttttctttttcttcgctccttcctcatacaattacaatggtgttgtttccgttgggctgttctttttaacatgagatgaaataataatcttgttgataaacaaaaaaaaaaaaaaaaaa

SEQ ID NO: 29210 - DNA, 623 bp, Zea mays
  unsure (1)..(623): unsure at all n locations
  Clone ID: MRT4577_126649C.1
ctgcttttggngtgtctttacaacctgtttcttataacttgcctgtgccatcacaagtagtactaatagctccaagatatgttctttcaaatgagtctgatgctgcaattgctgttcgtcaatgttttgttgagcacggcattgatggattgacagttgaagctaaacagcgggccgctttacagacatggaaacctgggngaaaaacgagaagtaaattactttgatttatttgttaagaagcacagaaatgtttttgaggattctcacatttttatccagttctgtccaaaagaacctggatacagttggtctggaccaatctgtgtttcatcaattggtcgttttttcttgaaatttagaagattagaaggaatgctggaagatggttttaaaagagaccctttgaatgctgggaagctgaaactatttgcttctgtcgatgttgctcaagagacaacttcttttgtgctacacttcactgaaccaccgaaggttacactcccatgtcgaatagaaaattgcttgagcgagttatctatcctgtgtttccagaaggattcagttgttttcggtgttttacaccctccaaagtcgaacactttgcttgggttgatttaatt

SEQ ID NO: 29211 - DNA, 426 bp, Zea mays
  Clone ID: MRT4577_12664C.1
ctcggaccaagcatccgagagactccacagccaggtccccatcggcgcggcgctagccccagctatgccccgtccgggagtagaactcgccaacgttgcccagatggggttcgtatccttcgctcgggaggcgatcttggttgccgatttcctgctctcagcctaccaggagtttaatgaattctgtgctgatggtggaccaaaacctaaggcccttccaaccaaattaaacaagggtgtcaaaaatgtatctgctgaactaggagtaggtgcgccacacattgaggtgaaaataagattgctgctacaattggaaattaaggtattggaagccttctttttattaaggagcaactatctcggtgcttatctcctgctgctgtaccttgatttgatcactcctataatacatgacttctacaacta

SEQ ID NO: 29212 - DNA, 335 bp, Zea mays
  Clone ID: MRT4577_126650C.1
tccgccccgcgtgcgcgggcgcgtgggtggtgctgcttagggggcatgtcagtgagggccgtactgcttggtgccctacccgtagcaccagtctgtgctgttcctgctatggctccagcgctctgtgggtgtgggggctgcctggagcaggtgtatgtggctcggggtagtagcgggtgcttggggcgcgtttggttgatgggggtgtgcgcagctcgccttggtttgttgatggcctggtgcctcatgtccgggggatgtgtgcccagggtggaggctggtgtggcccctttggatctgcgcccttcctgtttgtgggctggggccctttgggt

SEQ ID NO: 29213 - DNA, 210 bp, Zea mays
  Clone ID: MRT4577_126651C.1
atctctcttcttcttctacaatccttcctccccgcgccggagttcgaggagggggaggggacaagctttttggcgccaactccgactcggacccggagctgacacgagccggtgggacaagtgcattacaccttcttggaggctcatttgacagcagatagtgctgcaaatgctatatagctctgtcgcatcatggactatgtgggcatt

SEQ ID NO: 29214 - DNA, 1857 bp, Zea mays
  Clone ID: MRT4577_126652C.1
gttctattttgtagctcaaagctcaaaggtgaggctagggtttctttgcgccaaaccagcgaggcagcgactgctttgtcgccacaacactcccgccgaccccctcgccgccgccgggaatggagaccagcactaagaagcttagcagccttcgtatcacctccctggatgacgatgacgaagagaccgagatcccgcaccagccccctcaagcaggcctctcccccgctggagcggattatgaggacgacgacgatgaggaggaagaagccgaagtgactcttggtgtccttagcaaaccgaagcacccaggcttcctcctccgccacttgttccccagcaaggccggcggcatcccggcgtggctagacccggtgaacttgccgtcgggaaagtccagctactgtggtttctgtggcgagcctctgcagttcgtcctccagatttatgcaccaattgaagataatgtagcagccttccaccgaacgctgttcatgttcatgtgcccatccatggcatgcttgcttcgagatcaacatgaacaatggaagcacaagtacgggaatccatgtagaagcgtgaagattttccggtgccaattgccacggaataatgccttctactcagctcaacctccaaagcatgatggctctgacaaaccactctgtccaggagctcctgtatgccactggtgtggtacctggaaaggtgataaaatatgtagtagctgcaagaaagcaaggtactgttctgagaaacatcaggcactgcattggcgtactggtcataaaaatgattgcctccagataataagttctgctgcttcaaattcagttctgccagctgtaggaatagttcctgctagcatttcttggccagaatttgagataaaaatagactacgaaggtacttttgattctgatagtggtgatgaaaataactcaaagtcattggtgatgcaaagacatgggaaacctgatgctatgatgcagtcgtggatggaccatttccaggctgatgctgacaacaaatgctgggcgtcttttcaagagcgggtctcaagagcaccaaatcaagtgttgaggtattgtcgagaaccaaatgctaaacctctctgggccttatctttcggatgcccgtcagatgctgatatcccatcatgtagctactgtagaggtccattatgctatgaatttcaggtaatgccacaattgctttatttctcttggtgttggaatcaaccagactcgcttgattgggcaacaattgttgtctacacatgtcaagggtcatgtgaccaaactgttagctacaaagaggaatttgcttgggttcagttgtaccctacaacaaccacgaggcagtaataatgtttacctattcctcggagtaactactgtccaattctgcaggaatcataggcaagtgcataccaccacctttgggcactagaattttgagatatgctgtggcttcaatgtttccactttccaagtctattgctcgtgcagggagttaagcatcttccgaccgtggcccaatgcttggtgctcgttacagtgcctttgatccatttaggcactacccttgggcccacgtagacgtgatggcaaatagttgcatacttccattttgtggtggccaccattttcggtttaattgtcatcatcacatcattaaaaagctttgttgttttttgttatctaaaaggatcattggtctcagaaggtgctcgcattcatgtaaacatttccttcatcggctaaagttttgatgttggttttgattttaaatggaacattattatgttaatattccagtggtgttttcaccccacgagcgcgctcctgggacttt

SEQ ID NO: 29215 - DNA, 1792 bp, Zea mays
  Clone ID: MRT4577_126653C.1
ccgttttgtcgccatagctctcccgcctcccacctcgtcggcgccgggattggaggccggcgtcgacaggcatggctggctacgtatccgccccctggacctccccgccgcccggaccgccatcccgcagcgaccaccccacccacgcgcccccaccggggaggtggagcttcggggcgacgaaggtgagggggaagtagcccccatggcgcttcgctagcagcgcgaactgcggcacccaggccgccgaccccggcgtccgctgcaggactgcgcgggtgccgtcgcagccggggcggagcagctggtggtcgcgtatcgggagctgggcgtcgattgtcgcggcggagactggcgggagtggttcctggccagtcgtacgatagcgcgagatctcgatggccaggcgtaggtacccaactgtcttcttccccttccttttagattccattgagattcggcagaacttttatgcgagttccttttttagccgataattatgtcagtatcttgagataagatggatgaattggattcaacatctatatatttgttgtggaagtacccaccttttttgcttcgtgaattatttgttgtggttgtaaattccaatggtaaaatatatattatggaggtaaaatataaaaaaaatacaagaaataaatgttctggaattaattacatgaggaactacattgtctagatggtcgtataaattattgcctccatataatgcgtttagtttcttctatgtcatttctgcaagctgttggtatatttgcttgtaaaatttcttcttctgaatttgagataaaaatataatacgaatgtacttttgattctgagagtggtgatgaaaacaactcgaagtcattggtgatgcaaagacatgggaaacttgatgctatgatgcagtcgtggatggaccatttcgaggctgatgctgacaacaaatgctgggcgtcttttcaagaacgggtctcaagagcaccaaatcaagtgttgaggtattgtcgagaaccaaatgctaaacctctatgggccttatctttcgggtgcccgtcagatgctgatatcccatcatgtagctactgtagaggtccattatgctatgaatttcaggtaatgccacaattgctttatttctttggtgttggaaatcaaccagactcgcttgattgggcaacaattgttgtctacacatgtcaagggtcatgtgaccaaactgttagctacaaagaggaatttgcttgggttcagttgtaccctacaacaaccacgaggcggtaataatgtttacctattcctcggagtaactactgtccaattctgcagggaattgacaggaatcataggcaagtgcatacctcctttgggtactggaattttgagataggatgtggcttcaatgtttccaggtctattggtcgtgcagggagttttaagcatcttccgaccgtggcccaatgcttggtgctcgttacagtgcctttgatccatttaggcactatccttgggcccacgaatacgtgatggcaaatagttgcatacttccatttttgtggtgggccaccattttcggtttaattgtcatcatcacatcattaaaaagctttgttgttttttgttatctaaaaggatcattggtctcagaaggtgctcgcattcatgtaaacatttccttcatcggctaaagttttgatgttggttttgattttaaatggaacattattatgttaatattccagtggtgttttcccccctcggctaaagttttgatgttggttttgat

SEQ ID NO: 29216 - DNA, 919 bp, Zea mays
  Clone ID: MRT4577_126654C.1
aaacccccacgcgtccgctgttttgtcgccacaacactcccgccgaccccctcgccgccgccgggaatggagaccagcactaagaagcttagcagccttcgtatcacctccctggatgacgatgacgaagagaccgagatcccgcaccagccccctcaagcaggcctctcccccgctggagcggattatgaggacgacgacgatgaggaggaagaagccgaagtgactcttggtgtccttagcaaaccgaagcacccaggcttcctcctccgccacttgttccccagcaaggccggcggcatcccggcgtggctagacccggtgaacttgccgtcgggaaagtccagctactgtggtttctgtggcgagcctctgcagttcgtcctccagatttatgcaccaattgaagataatgtagcagccttccaccgaacgctgttcatgttcatgtgcccatccatggcatgcttgcttcgagatcaacatgaacaatggaagcacaagtacgggaatccatgtagaaggtgatgaaaatcttgtatctgtaatggtttttgttcagatatcttctgattttgatggtttgcagtggattgttttccagcgtgaagattttccggtgccaattgccacggaataatgccttctactcagctcaacctccaaagcatgatggctctgacaaaccactctgtccaggagctcctgtatgccactggtgtggtacctggaaaggtgataaaatatgtagtagctgcaagaaagcaaggtactgttatgagaaacatcaggcactgcattggcgtactggtcataaaaatgattgcctccagataataagttctgttgcttcaaattcagttctgccagctgtaggaatagggatttgtttggcttccaaatggttttgttatcctaa

SEQ ID NO: 29217 - DNA, 592 bp, Zea mays
  Clone ID: MRT4577_126655C.1
cacagctttttttttttttttttttaactctaaatcattctattataaaaatatgtttcatagctaatctgataattttaaattaatatcataaatataaatatgtttagttcataatcgatcaaatctaagccatgcaagaatcccatccattttgttgatggagggacgtcatcaagcggtgctacctgcacccgaagcacagctgaaaacttgacaccgtcgttggatggacgacgtacccaggcaggccgggatggctccggtagctcctccgtcccgtcatcgccactgctaagcatggcgatgacctgccccatagttggccgcctcgaccgatccgactgcacacagagaagcgcgacgtgcacgcaccgcagcgcctgccatggcccgtgctcctgcccttccatgcccaagtcgcaatccacgacgtcgctcgctctcttctccgtccagtgctgccacacgtattcgacgaggccttcagagttttggccttcgaaagtgtagatcttgtggccggtgatgatctccagcaccaacaccccgtagctgtacacgtcggacttgattgaaagcagcaattttc

SEQ ID NO: 29218 - DNA, 1672 bp, Zea mays
  Clone ID: MRT4577_126656C.1
ctctcacaggtcacaggctcacagcacactgccactccgaaaccccaagcgccaccaccgaaaccccaagcgccaccaggaccaggcagcctcctccgtcctctcttctccccgcgccgccgcggccatgctcctctccgggcctccgccggtgcccaccccgccgctcctcctcccggagagcagtggcgaggacggcggccacgattcctcctcccgcgccgcggcagcggtgggatcggcgccaaagaggcgcgcagagacatgggtccgtgaggagaccctttgcctcatcgcgctgcgccgggaaatggacgcccacttcaacacctccaagtccaacaagcacctatgggaggccatctccgcccggatgcgggaccaagggttcgaccgctccccgaccatgtgcaccgacaagtggcgcaacctgctcaaggagttcaagaaggcgcgcagccactctcggaacagcggcggcggctctggctctggagggaacggcaacgccaagatggcgtactacaaggagatcgacgacctgctcaagcgccgcggaaaggctacgggaagcggcaccgccggctgcgttggcagtagtgccgggaagagccccaaatcaaattgcaagattgattcctacctgcagttcaccacagataacggctttgaggacgctaacattccctttggtcctgtggaagcaaatggtagaacgatactgagcattgatgatcgtttggaggatgacaggcatcagcttcccttgacggctgctgatgcagttgcaaccaatggtgtgaacccgtggaattggagagacacctctactgatggtggagataaccgtggcaattttggtgggagagtcattttagtgaagtggggtgattacactaaaaggattggaattgatggtactcctgaagcaattaaggaagccatcaaatcggcatttggactaagaacaaggcgcgctttctggcttgaagatgaagatgaggttgttcgaaccttggacagagacatgccagttggaacatacacacttaatcttgatgatgggatgacaatcaaactctgtgatgcaagccgcatgcagacgccagaagacaagacattttacactgaagaggactttcgagatttcctgtctcggcgtggctggacatttctcagggagtatggaggctatagaaacgttgatagccttgatgatctccggcctggtgtgatgtatcaggggctgcggtcgcttggtgactgattttgcaacatctactttggccagacatgtcgaagtggaattgctagcagtgccatttagtgtaaatttaagtaaggccatccagattccagatatatgagcggtcctctcgcatttgtggagcaaaacttgcctccacttatcttttcttcagttcacactcatgtcggagccgcctctgtgactagtatgcaggttcaggcttatgtaaaatgtagccgcgtgcaattggagtgtgcagctaatgatcctccagataactagcttgttctaccattccttgtaaaaatgtggaatgatcctccagctaatgtaaaatgtggcaagtgaagcaaatgtaccctgcaatattgtacttgtaaaaatgtgcaattggagcttgttctaccattccttgcagtaaaa

SEQ ID NO: 29219 - DNA, 498 bp, Zea mays
  unsure (1)..(498): unsure at all n locations
  Clone ID: MRT4577_126657C.1
ntactcaatcgcttccgttacgaaattccccccaaatccatcccctccccacccccgtcggatccatcgccgccgccgccgccgccgccgccgccatgtcgtcgtcggcgccgctcccgcagcagcgctacttctgccaccagtgcgaccgcgccgtcgccatcgccgcccccgcctcccgcgacgacgaggtcttctgcccgctctgcgccggggggttcgtcgaggagctcctcgacgacgaggaccccccaaaccctagcccccaaatccaccccttcttccccctcgccagcttcctcgacctccgcaaccccagcgatctcgccggggtcctcggtccgccatccccctccgcgccccgtgccggctccaccaacaaccaggccgacgtgaccgacttcctccacgggcacctcggagggcctcctctcgggtgtcgccaccatcgagatcgacctcgagggctcctccttcacgcggcgggctcccctcctt

SEQ ID NO: 29220 - DNA, 377 bp, Zea mays
  Clone ID: MRT4577_126658C.1
gttgggccaatatagataagaggggtgggccatactacaactgcaagagaaagatgcactccgtagcaacgcacgggcattcaactagtaatccagatgcccaataccgattacataggttgaaggtgcacccacacgtacgcaatttattattacaccccatatatataagcgcacggcacagctagtagtagcaagcatattaaataatcctggcgagcgttaatcaggatgacactgaagactggccgaagaggtccttgagcctcatgacctcctcctttgttacgaaggtggtcttattcaccgtttccactgtgagggtgttgccgaagagtgcatagacagcgatctgtggccggggttctggttgctgt

SEQ ID NO: 29221 - DNA, 563 bp, Zea mays
  Clone ID: MRT4577_126659C.1
tccgtgctgctggatgctgaagcgtacatggctggctggctggctttgcagaggataccgatatggtggagatggtactcgtgggcttgcccggtggcttggacactgtatgggctcgtcgcctcacagtttggagacaccacacacgtcaggctggaagacgatggggaaacggttaaaaacttcgtcaacagattctttggattcgagcatgagaacctgggttatgtagctactgctgttgttgggttcactgttctcttcgctttcgtctttgccttctccatcaaagtcttcaacttccaaagaagataagggagggcgctatggtgctgcttcagctcgcttcagtttatatgcgtttcagcaatgtaacatgatgaaagagtatatttagccttaatttgtttatttttaggaagtttgacttcattttttgttttctggccagtttggcctgttctcccaaatttatatgcccgtgtgttttatatggatctatatgccagtatggtttgggataatttgcagaaaagtcatatattcacatctggtgcttttgg

SEQ ID NO: 29222 - DNA, 1328 bp, Zea mays
  Clone ID: MRT4577_12665C.1
ccccgcgtccggccctgcaatggcccagtctggtcgtccatgttcctttgaactttctctctcttgcttctcccgagcccggacggagactcactcccgtcccccctgcctgcctgcgcgcgctctctgcctcgtggcggcgacgacgccctcctccaggtggccaggccatcgtcggatcgtattcctcggccccttctccggtgatgagcacccagaataaaaggctcaaggatgtggaggtcagtttcccaatcgtctacggaaccatttccttctggctcggcaaaaaggccagcgagtataactctcacaagtggactgtatatgtccgctcggcaaacaatgaggatctgagtgtcatagtcaagcgcgcggtgtttcagcttcacccgagtttccagaacccgacgagagtcgtggagcagccgcctttcgagctgtccgagtcggggtggggagagtttgagatagccataaccctttatttccacagcgatgtctgtgacaagcgcttggatctgttccatcagcttaagctgtatccagaagaggaagctggacctcaatcgaccaaaaagcctgttgtcgtggaaacgtacgatgagattgtcttccccgagcctacagaggcctttttcctacgcgtgcaaaatcatccagcagctaacgtgcccaggcttcctcctggtataaccttgcctcctccaggtatgtgtatgttccttaacttacaacctgcacgccttgtatttcaaaataggaaatgacaaagtagcactgtgtgacttctcgatcatctaggccctatggaaattgttccgtatgaaaagaagcgcggtgacactaaggatcatcctttgagtcagtggttctcgaatttctctgaggctgacgagcttttgaaactagctgcagctcggcaacaggttcaggttcacatagccaagctgagaaggcagttaaccatgatagaaggaatgccccagcaatcgaaagccttttctggtcagtaaaaacttgttgtttttccgatgattatgctggtgggttatctggtgacgaattgaacttttacttatcttctatgttcagtccctggacagcagtttaggcacatctaatgtagtgcacctggtttgtaaggaagatgttggaatggaacctttcagcaactgcttgacagattgggttctgtgtattcgcattgcagtcgctgccttgggcttgcaaataaaaaaaaaaaaaaaaagcggccagtaccgttaggctcataagagaacactactagcatgacctgtctttttaacttttcttatatctccatt

SEQ ID NO: 29223 - DNA, 827 bp, Zea mays
  Clone ID: MRT4577_126660C.1
ggccggccgggccggggttcattaactcggcacgaggcggctccactcctaaacccagaacccagcccgccgcaaccctagccgccgccgccggcaccacaccaccgccatagtcacctccatggccgcggcgtcggaggacgcgttgcggcgctcgctcgcggagcgccaggccgccgtggacgcgcaggccgaggccgtgcgcgcgctcaaggccggcggcggcgcgtccaaggccgacgtggacgccgcggtcgaggcgctcaagggctcaagtcgaggccggcgccgccgcgcgccggctgcagcaggcggtcggggcgggcgcgggtggcgccgcgagggaggagctgcgccaggcggtggtcaacacgctggagcggaagctgttttacataccctccttcaagatctaccgcggtgtcgcggggctctacgactacgggccgcccgggtgccgcgttaaggccaacgtgctttccttctggcgccagcactttgttttggaagagaatatgttggaggttgactgcccctgtgtgacgcctgaggttgtcttgaaggcatcgggccatgttgagaagtttactgacctcatggttaaagacgagaagacaggcacgtgctaccgtgctgaccacttgttgaaagatttttgcaaggagaagcttgataaagaccttgccttgccccaagagaaggctgatgaatttaagcgaattcttgccatttttggatgacctctcagcagaggaacttggtgcaaagattaaggaatacggccattgtttgcccctgatacaaaaaaattgcttttctgatcccta

SEQ ID NO: 29224 - DNA, 739 bp, Zea mays
  Clone ID: MRT4577_126661C.1
cattgggtacctcgaggccggccgggtacgagatcggcagtaccgcgcgtcctcagatcgccgactggagactccgtcctgggttgcctccgctccctgccgcggcgccgtcgacgccaccggtgatgactcggtccttcccatgcttctgctgggatagtattcggaagaagagaggagaacaaaaaagaagaacctcagacacccaggtatcgagatcgtggtaaggagcgacgcgatacatcaaaaccctgattatgaacctacagaacttgattcgattcatgcagtggtacctcctgggagtgatttgaggtgggcggatgcccacaggatttcaattgagaaaagcatatatcttgcagatgcgccaacagagagaaaccctaggaaaacatggcatgcactttcttgctggttatatttccatgttttcaggacagggtccttttcatacagggataacacgcgcaagcaggtcctcacctcactgtggattacctatcaaactggagtatgggcaaggccacaaggcaacacttggccattggctaccaaactgacttgatcatggaatatgcagcaacgagtgggcagcgacggcgccgaggaagtcaatgtcttggattcagtggcacatcgctatttggctgtgaacttatgatgtatgaacattgctatgagtgtaacctgtgctgatgctatgttgtgaaatttatctaagaattgcagatcagtt

SEQ ID NO: 29225 - DNA, 722 bp, Zea mays
  Clone ID: MRT4577_126662C.1
aattcggcacgaggcaatggccaaaagctcccctttgcagctgctcaaattgggcaagcttttagaaatgagatctcgccacgacaaggtcttctccgagtgcgtgaattcacattggcagagattgagcattttgtggacccagaggacaaatcacatccaaaatttgttgatgttgctgatttggagttcctgatgtttccaagagagctacaactctcaggggagtcagtcaagctaatgaagcttggggaagcagttgcaaagggaactgttaataacgagacacttggttacttcattggaagggtctatcttttcctgacatgcttgggaattgataagggtcggttgcgctccaggcagcatttacctaatgagatggctcattatgctgctgattgttgggatgctgagatagagtgctcttatgggtggatagagtgtgtgggtattgctgatagatctgcatatgatttgaaagctcacagtgagaaaagcggtgtcccactcatgaaaaattctccaaacctaggagaaacttgtcatagttccctcgagtctggcgtttaagcaacgttccttgaagctttggaggcgaatagaagaaaaaggattagattagtgtatagttgtcgatatatttgtccatcattaaaattttatgttgtctcttcagaaataatttgtgcagcattgataatgtttcttcgacatcagct

SEQ ID NO: 29226 - DNA, 233 bp, Zea mays
  Clone ID: MRT4577_126663C.1
ttttctttcaacaaaaacaaaaaaaaaatcgccaggcttaataacacatggcgccgcggccacaaatataacatattatccacaaaacccaaatcacaccgccaacgcgcacaactgcaaaactagtattttccaactaccattcccactttaatattttacacacacaatttctttttttttttctccccactatgttactaaacccagctcacattatttttttttttttt

SEQ ID NO: 29227 - DNA, 391 bp, Zea mays
  unsure (1)..(391): unsure at all n locations
  Clone ID: MRT4577_126664C.1
agcgctaaaatcatcgtcatgtgttatggaccttcacgagaaacagcanctgctttnatcatttcactacccccaaaaccaaggctaggcaactcaacaacagacttctcttggaactcttggatttgatccttttttggttccatctccatcacttctggatccttccgaaggggtgggagggtttggtaatatcaccacggattccacttggtagatccaagaatggggcacttggcatactatctttggggttcttccttcttttggtggtcgatgaaggtgaatgatctgaggtcctattatccatagaccgggggggggtgtccataggaatcatatcctctttcactactgaacaatgttttcacatagctatttctttctccat

SEQ ID NO: 29228 - DNA, 2607 bp, Zea mays
  Clone ID: MRT4577_126665C.1
ccgggtccgctccactcctaaacccagaacccagcccgccgcaaccctagccgccgccgccgcgcgccgccggcaccacaccactgccgtcgccacccccatggccgcgccgtcagaggacgcgttgcggcgcgcgctcgcggctcgcaaggctgctgtggacgcgcaagccgaggccgtgcgcgcgctcaaggccggcggcggcgcgtccaaggccgacgtggacgctgcggtcgaggcgctgaaggcgcttaaggttgaggccggcgccgccgcgcgcaggttgcagcaggcggtcggggcgggcgcgggtggcgccgcgagggaggagctgcggcaggcggtggtgaacacgctggagcggaagctgttctacataccttccttcaagatctaccgcggtgtcgcggggctctacgactacgggccgcccgggtgccgcgttaaggccaacgttccgactacgggccgccccgtgccgcgttcaggcctacgtgctttccttctggcgccagcactttgttttggaagagaatatgttggaggttgactgcccctgtgtgacgccgtcttcggcagtttactgacctcatggttaaagacgagaagacaggcacatgctaccgtgctgaccacttgttgaaagatttttgcaaggagaagcttgagaaagactttgccttgccccaagagaaggctgatgaatttaagcgtattcttgctattttggatgacctctcagcagaggaacttggtgcaaagattaaggaatacggcattgttgcccctgatacaaagaatccactttctgatccctacccattcaatcttatgttccagacatctattggccccactggtcttagcgtggggtatatgcgaccagagaccgcacagggtatttttgtaaacttcaaggatctgtactattacaatggccaaaagctcccttttgcagctgctcaaattgggcaagcttttagaaatgagatctcgccacgacaaggacttctccgagtgcgtgaattcacattggcagagattgagcattttgtggacccagaggacaaatcacatccaaaatttgttgatgttgctgatttggagttcctgatgtttccaagagagctgcaactctctggggagtcagccaatctaatgaagcttggggaagcagtttcaaagggaactgttaataatgagacacttggttacttcattggaagggtctatcttttcctgacaagcttgggaattgataagggccggttgcgcttcaggcagcatctacctaatgagatggctcattatgctgctgactgttgggatgctgagatagagtgctcgtatgggtggatagagtgtgtgggtattgctgatagatctgcatatgatttgaaagctcacactgacaaaagcggtgtcccacttgttgctcatgaaaaattctccaagcctagagaggttgagaaacttgtcatagttccctcgaagaaagacctggggctggcttttaagggcaaccaaaagatggtcctggaagcattggaggctatgagtgagaaggaagcatttgagatgaaagctgaactagagaccaagggggagacaaattttaaagtctgcacacttggaaaagatgtggtgattacaaagaagatggtatcaatcagcatggagaagaagctggaacaccagcgagtcttcaccccttcggtcgtcgagccgtcattcggcataggacggatcatctactgcttgtttgagcactcgttttacacaaggcctagcaaatcagaagaggaacagctgaatgtcttccggttccctcctcttgtggcccctatcaagtgcaccgtgttcccccttgttaagaatcaagagtttgacgatgctgccaaagtaatcgccaaggcattaacaactgctggtatctcccacattattgacactactgcaatttctattgggaggaggtacgccaggacggatgagatcggtgttccatttgctgtaacagtggattcggcaacgaacgtgacgatccgagagagggacagcaaggagcaggtccgcgtggacatcgacgaggtggcgcctgtggtgaagcagctgacggaaggccaaagcacatggacggatgtttctgcaaagtatcccgcccatgtcggcccccaaagtgagcaggagtgaagaatcgccgccctgatgtctagtctagccatcgaccgagaaggcgtcgggatgagccgtcttcgttctccaattgctgagaagattgtgtggcctaaacataactgcttttggtattgacattatccagaaaggcagtttttttccctcatacatacatgacacttgctatagcagttggatgttatgaagtctgcagatgtcaccgatgtttttgtttcttttaaatgcccctttcttgatgtattctcacccatacaaaacataccatttgaggtatttctgaactagctgtccttttgtaaggtcagactgggaattgttcagctatctacagtggaattggaaatttcagttacttgttatcacaaaaaaaaaaaaaaaaaaaaagtactctgcgttgttaccactgct

SEQ ID NO: 29229 - DNA, 367 bp, Zea mays
  Clone ID: MRT4577_126666C.1
aaaaaaaaaaaaaaataataaaaaagaaataaaagcacaacaaacacaatagaaaagggaaactaagaaaaactgtggggcgaacaaaatactacacctgaaagcacgtcggcgtacgagctacaagaataaccaacttctcgggcgcccgcccttgaagtcccaatccttaggaacgggcccagccagtacacccagtttttttttcaccccctccaaacaagcgcctggccgaagacttccaccgtgttcatccgtaaacccccgtaggtcccctcccttaatacgtttgagccaatcaccatttccacaggctgcgtatttatggagaagacctgcccccgttccctttccatcacagtggcat

SEQ ID NO: 29230 - DNA, 285 bp, Zea mays
  Clone ID: MRT4577_126667C.1
caaaaacaaaaaaagggcaaaacgcggaaccccgggaagggaaaagacgaggacaccggcggggggcgaagcagggaaaaaaaggggccacaaatgggggcagagtgaaggtaaaaccgcaacacagggggaaacgacaaaaaggccgaaagcccaaaaccaaaaagcggggggaacaaaagagggagacgccggagaaaaaaagcggagagcccacagcccgcagtcgagggaagaaaacagaccgctgaggggaggaaaaaaatagcccaccgaatggaaaaa

SEQ ID NO: 29231 - DNA, 385 bp, Zea mays
  Clone ID: MRT4577_126668C.1
ggcctccgccgcgtccaagtaatcatgctacagtggtggatcggtggagaatctgggaggactattggaagcataggacatctcaccgatggcttttagaagtataacagtgtattattctgatccatgtacttaccaaacaatgcacatcagaagaactgatgtgaggagtatttgctgaatctgcagagtttattttggcgtccgatgccaaagatttttccctatgaacttcattgcgatgatttttgtgacttcatcatatttgtgattctagaagggcagactggtacagtaatgactaatgagaggtgtatcactgaatcaccacgtcttgggtttgaagcagtctctccgcatttgcgtgaaagatttgtctcggttt

SEQ ID NO: 29232 - DNA, 988 bp, Zea mays
  unsure (1)..(988): unsure at all n locations
  Clone ID: MRT4577_126669C.1
agtgcgataaactgtgtgaaactgattctgaatgaacgcccatgcatatccaacctagtaaaatattagacatgcatacccacagatcgatctgcacttggtctagaaactggaggccggcgtgatatagtatcatatatgtgtcatttttttctttatgatgccatcctaatatgtatgatgagttagttcttttctcattctagttttgtcttaggcaaaaaaaaaaaaaatccatgatcttgttggcatgaagtgtttgaagttgtgactaaagctatgactagttggagtcttgagatgtttattttctatatgcccatacacttacatgactaggaaggttttttttctctagtatatttagttcttctgcactaggacaacaattatcatatatttggaattcgtggttcctttgtattttagtttatgttgttgcatatcagttttctgttcatattaaattatgggttcacatatataagctgcatgtttggtcgaattgttaattttgcttgtcaaggaggatgcacacctagattagacaagttggttcttatgcatgtagtcagtacagagcaatgaaatccatgttttgtaaacaaaactgcaataaactgcctgaaactgattctgaatgaacgcccatgcgactgattaagtatgttggtgactcgttgagatgtgatgattgatgacattggggtatttcttccctggacacaatatcttctgttctggatgcatcctttgcctgttcatcatggtcaggaccgcaggaggcattgaggtaagctggttgagtccacatgtacatggtgaaggaagacactgcgccccacattactctgttgtggtgcttantaacctctaatttttttgggttatannnatgtatatacagtatgttagaatagatatattaatctgagcattcagagtaactgattgaattagactgttgcttaagtaaaataaacttttg

SEQ ID NO: 29233 - DNA, 274 bp, Zea mays
  Clone ID: MRT4577_12666C.1
gacaaagaggagcgccacaggcagcgcagaaaatcagtacaccaatgatgtcaggatcaacaaggaaaaccatatctttttaaatgtgaactgaacatacgttcacggaagcaagaacttttactagagtattctgcagctgacacttggagcaaggaatttgatgctatttagaattcttcattgaaggtcttgatttggttcaataatcattttaagaaactaacctcaaaaacaggcaagctaatatctttctgagtctactgctggtgtc

SEQ ID NO: 29234 - DNA, 897 bp, Zea mays
  Clone ID: MRT4577_126670C.1
cggccgctcaggcggcgggcgggatttcgacaatcgaacctgcatccaaatctatgctttcggttcccctccacaggatgtccgaccccgccgctggaggcgccatggttcctgctgccggacgcggcatcgcatgggcgaacggcggcccccggttcggcgacatggtctgggccaaggtgaagtcccatccgtggtggcctggccatatctacagcgtcagcctcaccgacgacgaggaggtacaccgcggccaccgcgacgggctcgtcctcgtcgccttcttcggtgactcgagctatgggtggtttgaccccagcgagctcgtccccttcgaggaccacttcaccgagaaggcggcccagggcggcagctcccgcagcagctttgccgccgccgtggccgaggccgtcgacgagcgacggcaacttcttcctggtcgacgtcccggcattcgacaccgacgctgactaccaactcgaccagatccgggccgcacggcagcgattcgtgccgcggaaggcgctcaactacctgctggacgccgccgtgactcagcgagacgcggcggaaaaagccgcgcgcaccgtgcctgggatggagatggccgcgctgttcttggcgtaccgccgcgcggtgttttcgccgatagacaacacctacgcccaagctttcggggtggatcctgagctggctcttgctgccgagcagaaagccgcggcagagagagctcaacgaggcgactgattaaatatgttggtgactcgatgagatgtgatgattgatgacattgggggatttcttccctggacacaatatcttctgttctggatgcatcctttgcctgttcatcatgggcaggaccgcaggaggcattgaggtaagctggttgagtcc

SEQ ID NO: 29235 - DNA, 2354 bp, Zea mays
  Clone ID: MRT4577_126671C.1
gattgtaacctcgaggcggcgggattaaaataataaaaattacccccatgtccctccttcctccgatcccaggccacccccctccggagcccaaacccaagcccagaccaatcgaccctgcatccaaatctaggttttcggttcccctccacaggatgtccgaccccgccgctggaggcgccatggttcctgctgccggacgcggcatcgcatgggcgaacggcggcccccggttcggcgacatggtctgggccaaggtgaagtcccatccgtggtggcctggccatatctacagcgtcagcctcaccgacgacgaggaggtacaccgcggccaccgcgacgggctcgtcctcgtcgccttcttcggtgactcgagctatgggtggtttgaccccagcgagctcgtccccttcgaggaccacttcaccgagaaggcggcccagggcggcagctcccgcagcagctttgccgccgccgtggccgaggccgtcgacgaggtagcccgccgcagcgcgctggcgctgctctgcccttgcgacattcctgacgccttccgtccccaccccagcgacggcaacttcttcctggtcgacgtcccggcattcgacaccgacgctgactaccaactcgaccagatccgggccgcacggcagcgattcgtgccgcggaaggcgctcaactacctgctggacgccgccgtgactcagcgagacgcggcggaaaaagccgcgcgcaccgtgcctgggatggagatggccgcgctgttcttggcgtaccgccgcgcggtgttttcgccgatagacaacacctacgcccaagctttcggggtggatcctgagctggctcttgctgccgagcagaaagccgcggcagagagagctcaacgaggtatcaacaacactcacatgctcaattctagctgtactgttgttcttgttactgtgtacttgaaattgatgggtaaacaatgttcctactgcttttatagatcaagcaacaattattttgatgtgaataacggagtggatctgattcaaatagtttctatttcacttctgtctaactgttggttgcattttttttttatcaacgagagtgattattgaatttgggatgatattcatgcagaaacttgttgaataaattgtttgtttcacgggattcagtccatctaacctagtaaaatatgagacatgcacattcacagatcaatctgcatttgttctagaaattgaacggctgcgtgatatagtatcatatacgtgtctatatgatactatcctgatatgtatgctgagttaggtcttttctcattctagctttgccctaggaaaaaaaacaccatccatgatcttgttggcatgaaatgtttaaagttgtgactagtttgcatcatgaaggtttaaagccatgactagttagcatgagcctgttattggagtcttgagatgttttatttctatatgtccatacacttacatgactaggaagttttctctgcagtatatttggttcttttgcactatggtgacaattattatacatttggaacttgtgtttccttcctattttagtttttgttgttgcacatcagtttcctgtccatattaagttatgggttcacatataaaagctgcattttttttatcaaattgttaagtttgcttgtcaaggaggatacacctagattagacaagttgatccttacgcatgtagccagtacagagcaatgaaatccatgttttgtaaacagaagtgcgataaactgtgtgaaactgattctgaatgaacgcccatgcatatccaacctagtaaaatattagacatgcatacccacagatcgatctgcacttggtctagaaactgaaggcctttgtgatatagtatcatatatgtgtcattttttctttatgatgccatcctaatatgtatgatgagttagttcttttctcattctagttgtcttaggcgagtcaacactcgccaatcctgactgattaagtatgttggtgactcgttaagatgtgatgattgatgacattggggtatttcttccctggacacaatatcttctgttctggatgcatcctttgcctgttcatcatggtcaggaccgcaggaggcattgaggtaagctggttgagtccacatgtacatggtgaaggaagacactgcgccccacattactctgttgtggtgcttagtagcttttattttttttggtttataggcatgtatatacagtatgttagaatagatatattaatctgagcattcagagtaactgattgaattagactgttgcttaagtaaaatcctaacattttgtaaacgaggtatcatcacttcagagc

SEQ ID NO: 29236 - DNA, 231 bp, Zea mays
  Clone ID: MRT4577_126672C.1
tgagtcgtattacacgcgctcgctcaatcttgcagatctctcattctgcatgtgctccacttcgatcctctatccctagctagtagctagccatacggtcgtgtggtcagcaggcttctggtgttcacgcataggcactgcgtctgtcgaggccccggtcgtcacggtgatcgaggaagcgtcggtggtggagacgccggttccgcactctgtcgtgcccgaggaggctgt

SEQ ID NO: 29237 - DNA, 501 bp, Zea mays
  unsure (1)..(501): unsure at all n locations
  Clone ID: MRT4577_126673C.1
gacttctctgtagcaggttcacgatccttttgacaactgccagccacacgcacggcaatgcgaggtcgacggcgttgggcaagctgggcatctggccggggacacgacacgatctaggcacaacaaggcaggacccattcaagcacaaccatctagacacatcaccatcacggcacggtctattaaatcagaaccagctatgggccatactgtgcccagccagttgaccgagccattagtctacgacacaggccacaacaatctatatctatactgactattaagactgcactgccccgcctaacaactgcccgcccgatcccacagcgacccccgccaaccgcctgccgngaccctcgcccgccaccagccgcaaggcgcgaacattacagcatatttacagacatcatcacatatcaattcacttcgaacacgcactggcaattgccaaatggagaagaaaagggaaggaacgcacgaacagaggaggagatccggacg

SEQ ID NO: 29238 - DNA, 291 bp, Zea mays
  unsure (1)..(291): unsure at all n locations
  Clone ID: MRT4577_126674C.1
cctcctctggtcccgtgcgcgcgnggngtcccccntggccggcctcccttcttccctctcggcctcctctgccctnggtccggctcccctcccctcngctgcntntcgccggtgccctcccgcngcngcgtgccccgcccctttctgctcgtgcgccggnttgctggcnggttcctgccctggccgggcctgcctcctctngctcggcgccctccctgctccccttccgggcgcgcctnggcccctcccttgggcgccccccgcnggtgctcctcctcccgtggtgcctct

SEQ ID NO: 29239 - DNA, 1020 bp, Zea mays
  Clone ID: MRT4577_126675C.1
tgaccctccgctcctcaactgccaccaccccgttcgtccgcgtggccgagcgtctcaccgcatccgccgcctccctgtgcccctcaactgctgccacctcgtttgtctgcgttgtggagaagaagatgaaggttcgtgcatcggtgaagcgcatgtgccgcgttggggcatcgttttcattcacaacacctccaacgccaacacaagcaacgctagggattctccaccatcgctgaagccaccatctcgtgcaaggtcagatttgcgctagagcaaggtaaaaacatgacctcagttcgtctccccaatgcgttgtgttgaatgagccacctcagaaaatgtcagtgccatgccttccagcattcaaccaaccatccattgcttattcagagttcacatggatctagaatccaggatgcactgacaagctgcaaaagcgtttcctttttttaaaaaagcgtttcctttttttaaaaagaaaagttcaagctactagagatcacgcccatatgggttgggttgggtccctgagaacctaacaagaaattgactcctgatttcattgagctatagccatgcagtggggcatcagtttttatttgttggtttctctgcattttgcacgaatttataattttgtattgtaaactgatttacttggagatagacctattttctagtataaatcaactatatgttatgcttgccctttggagataccaggatcactatgtacctgtcgtaagtgccaactatttatttgtttttggtgtaactcttatttgtttttgatgtaactcatttacttcttttttcagattcgtagtaaatgacagattaaaacacctgagagctaccaagatcaacaactttctttcaaaatgcatttgttgattcttcttttttcttttgcatttagattaccccctgttttgtggtctgtaaataccacctgagcatgatcaaattggccttatgtttgaacgatttcacacatttttatataagtctttttcatgc

SEQ ID NO: 29240 - DNA, 141 bp, Zea mays
  Clone ID: MRT4577_126676C.1
agctctcccttgacatggcggctgcaacaacggcatgagccccgccacgggctccgccgtatccctaatcgcctgctacatcctcctccacaagaatagagccgaactctcgtggttccctacgtttagggtctcccgcgg

SEQ ID NO: 29241 - DNA, 238 bp, Zea mays
  Clone ID: MRT4577_126677C.1
ctgagcactttctcctcgtcccatatcaagtcaatcgaagccgcgatacgaccatggactgcaccggtaccggagcaaggggttaggggaagaaaggagctgtccggcgcaaggtcggctggccaaagaataaatccgtgttgagggccgttaaagccaggtttcaatttccctgttggcgcatctggcgcttatttaagaaaggccccttcgctcaacgtgataggaactgcccccc

SEQ ID NO: 29242 - DNA, 811 bp, Zea mays
  Clone ID: MRT4577_126678C.1
cattgggtacctcgaagccggccggggtttggttgcttgcacaagggaggacactctcttgctgcttggcgtcgccatcgcacagtgacacggccatcggcactcaactcactccacaggcttcgtttcatcatcatcatcatcaccgtcgtcatagccatggccgcgcgtcaccacgccccgcacctcctcgcgatgctcatgctctcggcggccggcttcttctccgtggcctccgccgcgcgcgacctcgacgcagccaacccgctcgcggtcgcggtcgcggcgcccgccgctggccgaaacaacgacaacaacaaccctcccgagcctaactactactcctaccatggcggctacggcgccgtcccggcgggctacggacctgcaggcgtctctggcgccggcgggtggggcgcgggctccggcggcggtggcgggtacgcacacggcggcgtggaagcgccgacggtgatgtgccaggacaaggggccctgctacggcaagaaggtggcgtgccccaagcgctgcttctggtcctacagccgctccggcagcggatacggagccggaggcggcggcgggtcctgcaccgtcgactgcaaggacaagtgcaccgccacctgctgatggatcgacgggtagagctaactagctatctgctcatggctctccactcgatcgatgacgatatatactactacatacagtgtgtgtgcgcttgtactatatatatatatatataaatatatacctcccgtgccctaccgtaatcggcccctgctctgcaaaaaaaaaaaaactcttcaaa

SEQ ID NO: 29243 - DNA, 1145 bp, Zea mays
  Clone ID: MRT4577_126679C.1
gttagtgccggggtgcttcagcatgtaagtttttctgcccctcattagattctattcaaggtttagattatttagttctcgccaattgttgattgattgtgggttaccattgaacccccttccctggtgcttatgttttgcttaaaccgaggttcttttgaactgaaatatctttcctattagtaaatactgtattaattgtagccagtaggtatattactgatacatttgggacaaagaaactagccagttagtaagctattgttagatgtttggtatttatttgttgcatgataatatgaagttatgttgtttgaccttcaaaatgagtatgtgtaatttttttacagtttttaacttatggttactgtacagtagaaactttctacaattttaatgcattgagtagagtttgagaacatgtttataaatttcacttgtctttgctcagaagctgttaattgtccctgctccaattccacataagattgtttttcttggtcgactacaattttaaactgacatagcaagttgtagaagacaaataaaagaagctattttttgttaagttgttgtacattattgttgaatggatattattgaattgtcttgtttgacctgcaaagtgattctgtaattctagagtttttccctgacaaggctagtgtgtagtagtaaatttctactccattccaaattctatgacattttggcttttctagattcccttttggtgtgtaattatacttaacactatgtctagatgcatagtggaagaaatgtatctaggaaagccaaacatacttaaaattcggaatggagtactagttaaggtaggatttagagttttggaaaactgtttataaatttcctcatctttggtcaggagctgatagttgtcctgtcgaattccagcaacatttgattttttcttggtcactaacaatttgattaaaatttacttggttagttgtcgtaggtaactggagaaacactcaatagattattatcacaatgatcgctttctcttcgtggactgatgtctttccatttggtatttctgaagtgtcaatgaattttccgcgcattgtgcattgtggaacgtatagttcaaggactttcgggaaaatggaggtttgttagtg

SEQ ID NO: 29244 - DNA, 865 bp, Zea mays
  unsure (1)..(865): unsure at all n locations
  Clone ID: MRT4577_12667C.1
cattgggtacctcgaggccggccgggacttcattgtcgccgaagtcaactgttccgacgcagagcgatattacgcttgtgcctgagaaccttctcaagaagagaaagtctcaagagaaggctcgcgaggagcgcgcaatcgcaactcgggaaaagcgagacaagaacaagaagaagcgtgaggtcatcttcaccagagcggagaagtatgtcaaggagtaccgtgatgccgagagggagcgcataaggctgtcacgcgaagccaagaagagcgagagtctctatgtgcccgaagagcccaagcttgcctttgtcgtgcgcatcaagggtatcaacaagattgaccccaagaagcgcaagacattgcagcttctgcggctgctccagatcaacaatggcgtcttcatcaagcttaccaaggctaccatggagatgttgaagattgtcgagccctttgttgcctatggttacccgaaccaaaagtcggtccgtgagctcatctacaagcgtggttatggcaaggttgacaagcaacggattcccttgactgacaacgagatcatcgaggagaacctgggcaagtacggcatgatctgtatggaagatctgatccacgagatctgcactgttggccccaacttcaaggcggcgtccaacttcctgtggccattcaagctcaacagcccaacgggcggcttccgcaagaggaagtttaagcactacattgagggcggtgacctgggcaaccgngaagagaagatcaacgagctgatcaggcagatgaactagtgcagngatttgggtttttgtctttgntcaagggtggcgcgcaaaagctggtcggatatacacgggatggagcattt

SEQ ID NO: 29245 - DNA, 249 bp, Zea mays
  Clone ID: MRT4577_126680C.1
cagttccaaggaacacaggcttcagaagataaatatatcctaaggcaacaacataaacaatggtttggaaacagacttcttctagggtccaacacttttagattgacaacacatgcatttaaagcatctggatgctttgtttcccacttaaactactatcacgaacccaattacgctctattcatggcctaaaatcgtaacaagctcagggcctgacgacaatctggactgccaacaatgcggggacct

SEQ ID NO: 29246 - DNA, 456 bp, Zea mays
  Clone ID: MRT4577_126681C.1
atatttgggcagaatgaaaccgagggatgccacactcctttgacacgagcctcgatgctcgacgtctgactcgagccagatagagactaggccgccgctctatgctagattgaagactagacgccgttgactgccgacaagcaagtacgtgtatggcgtatgactcgcgagcgcgatgtccaccaccgaatccggagacggtccctgcttgttgacagactatgcttgttgtcactcctatgataaccggcgattgacgccgatatagctggcctctgctggaacttgctctccgtgaacaataacccacaaaggcctagacccggccccaggccgggccaaccggggctcggactgattgagctaaaacccagtgttcgagaggcgctaaatgaccactgtgcaggcgcaccctcagttcttgcaggaggcttactgcataatggggacgtcgac

SEQ ID NO: 29247 - DNA, 1489 bp, Zea mays
  unsure (1)..(1489): unsure at all n locations
  Clone ID: MRT4577_126682C.1
agcagtggtaacaacgcagagtactttttttttttttttttttttttttttttgagaaatcctcaacatccatatcctcaaacagccatcatctcttacaaaattagaaccccaaaatttcttgctgctctggcagagctacataacacaacagcgagactaaagaaaacgataaagaataaaagaggctgcatagtttcaagttgcagctatacaagctaggtacatgtgagtgttctaccattacgtcgcatgacatgtcctagaaaagcacgacacagactcattccgctcgagtaccacgtcctgtgaagcatcacgttcttccttcacaatgttggaatctccccttcctccaagtcgtccctcggtaacccagacgttgcatctactggctcgtccctgttcaccattgcaaaatcgcagcttaagaagtcatcgacatccatgttctcgaagagctctgggtaggtatccaacatctcttgctcaaaggccaagtcgggtacctcggggaacaatccctcgtcaatgtccagcggataaactttcatgcaagatttccttttcagcgcttcaggagtcgagcttggcgtccgtttgttttgctgactgtgttccagctgaggacccgtcacgccatcagatactacaatgctggtggaagatggtactatcttggatgttgctgcacctcctgcctctgcagtgctgacaggatatgaaattccataccccttcagatctacaacgcgtccctctgaggacaacccgctttcccttgtcttctccatatccagaggacagacttccatgcgggatttagtttctgcaggcccagaggtaccatttggtgatatcttgctatattgattcagtcctttcggctgaccatgtaatgcttgagcttgacaaccggggtatgagagcacagaagaatcgacattgttaactatctttgattcacttgtaacatctgctggagaaattttgcaggcatttgaagttccatggtccttgagatctataatctcagtttcaggtgaaagttcgccttcctctatttcctcctcatgaaacttgctgccctctacaggtggctcgtcagtcatgctgccagggccttttccatctttaggaagtctgttcaccattttctccatttcaaagtcacaattgtctgacggaagaaatacattgatagttgggtactccacaacaagtatacccctcagctgtgggcgcaatggctcttctatattgagtaggcggtacggtgactctgattgcttggcacacttttgaatgaacagtttcagatcatgtaatttggtgttccgatattgtgtaagctgatctttccaagggccaggaataagatgtttttccaatagagagagcaaggttgtgtgctcatctatccccccgcgtactcggacatgttaccttggcttgaatttnccactacaagtgtnccagaatatggcac

SEQ ID NO: 29248 - DNA, 345 bp, Zea mays
  Clone ID: MRT4577_126683C.1
cccgccaggtgtcggccttcgtgggcgcgccgtcgtgcgcgcaatgcgcgtttcgagtaataatgctcacttaactaattttgtaagcctgagatcaataagaaatgttcaggagagaggaaagaacaaaaatatatgctccacaatttatatttagagagagaacacttagtcttgcctgtcaaaaagtccaacatttcataggtagtaggggccacatattacattcagttgctataggtccagcaactgaacctgccattacctgggcaaggaaagatccctttgctctaggaaagcttggcccaaattgagtttcttctttttccccctgtaggactgact

SEQ ID NO: 29249 - DNA, 587 bp, Zea mays
  Clone ID: MRT4577_126684C.1
agaaaactaaggagttgctcttatagaagaggagggaaaagaaaacatcatcaaaaccaaaaaacatttgctctctttctctactgtactttcttcaagtcaacccccttctctgtatcacaccatacggtgtacagtacaggcaccacccacccacccaccacacagtgtacaggcacaccgcgcacggtacctgcaagcttagcttggcatcgcaacgcaactgtaagggatgcagatgcatccaacacatccagtcagtcagctgatgtatgaggtcatgcatggggatggtgatggccatgtcatgtcaaccctcctctacggaaatccaagcacaaaaacagcagctcccacgcccgtgtcgctcgccgaagcccaaagaagaaaccctggcgtcgtccgcattcatcacaagcaccgaaatccatggaccatgggagtcccaggccaggcataggcaatggatggatcaggcgagcgccgtccttgttgaacccaaccagatcatcatgctacgcccgcctgccaaggggagaagccgggatcagacagacaccaacggatctgccgactgaccaccttaa

SEQ ID NO: 29250 - DNA, 224 bp, Zea mays
  Clone ID: MRT4577_126685C.1
tcgagactgcctaacattacaaagtttcaatgcctattatcgctcccacccctatcgttcagaaaatctgagcggattcgatgcgcccaagggctagaagaagccggcggcgaaaaaagtggcggaggaggagccctctgagaaggcggctccggcggagaaagcccccgcggggaagaagcccaaggcggagaagcggctacctgcgggcaagttcgccggca

SEQ ID NO: 29251 - DNA, 213 bp, Zea mays
  Clone ID: MRT4577_126686C.1
cgacgggcggacgctggcggaccgtggcttcaacatcggcctcacatcctacatcatcggcaacaccaccaacctcgtcgtccacgccgcaaccaacacattcaagatgagggacatggtgcggcgggtctcgatgttcgggagcgtcaaccggctgccgccggagctgagggagcagatgatggcgagcgcgcactctaggttcagcacagc

SEQ ID NO: 29252 - DNA, 331 bp, Zea mays
  Clone ID: MRT4577_126687C.1
ggtcaagctgctgctgctatggagtccttgctgctggaatttctgggcggctccttccctggccgcgaccaaggccgacagccagcctccccttccctgctcttgccgtggccgagccccctctgttgcagaccgaactccatctccggccagcagtcatggcgccctgcacagcgttccctcgcccctgtttttcccccctgcgcgcggaggcgccttgggtcaacctcggcgaggtccacgtccatggcgccagcagcagcccccctgtttatggatgccagcccttgctacccttttgacacactgcgcaccacctctgtgctgcacc

SEQ ID NO: 29253 - DNA, 430 bp, Zea mays
  Clone ID: MRT4577_126688C.1
cccacgcgtccgaaaaaaaaaaaggaaagaaataaaaaaaaaaattttaaaaaacaaaaattacaaagaaaattaataataaaaaaaatagaaaaaaaaaaaacaaaacaattaaggggggcccctttatgggaccccataacgtaagcctctgcgtgatttgcaaagaagctatggctttttttttggggtcccccaaattcaataaaggggccggtcgttaaaaaccagaggaaggggaaaacctcggggttgcccacataaatctgttggatacaaatccattttctgccgtttgagaaaaaagaaagagggcccatccttttaggctttccaaaaatgggctctgctttaaggggaataggtacacccttttagctggggtttaaatggcgttggaagggggggtattcccctggaagacggatca

SEQ ID NO: 29254 - DNA, 621 bp, Zea mays
  unsure (1)..(621): unsure at all n locations
  Clone ID: MRT4577_126689C.1
aaaaccagtatcacgccctaacgcgcagacctgcttgaacacaactcgccgcagccatctcaatccgccgccgctgccatggccgacgagattgacacgaaggcggatcccgaggactcccgcagccgcactgagcacgctaccgaggacgacgacagggaggagggcgagatcgccaccgacgccccctcgcccgacctccccgccgcgcacccgctcaaggcctcgtggaccttctcgatacgacaacccgcacggctacaacaacatggacgactgctggagctccatacaacccatccacaccttcatccaccgtaaacgacttctgtggcctctactgtaatatccatcaccctaacacgttgatcggagaacctgacttccattgcttcaagaactggattgacccatgatgagaagatcctatttgcgctaatggcgtgaacagcaccatcagttgtgtcagaggacaatctgactctctttgtctgcacaccctgttagctatgatcgtgcaacaattccactatggagatgatatctgtgcagcaatgctcctaatgcatatcatcagagaagcatagctatctgnacaaagatgctgctaatgaagctgct

SEQ ID NO: 29255 - DNA, 162 bp, Zea mays
  Clone ID: MRT4577_12668C.1
atgcaccgtctagctgatcttaagcggcgcacgctcgcaccccaccgcagcactgtgcgtcgctgactgccaactggcccacatgttgaggtgttcgccgtgcgcattcccgtcaccgtcggaggaaacctgccgccctgtggcagcatcggtttctaccgc

SEQ ID NO: 29256 - DNA, 312 bp, Zea mays
  Clone ID: MRT4577_126690C.1
gttattagtaagaagtggcacttgctgacagggagcgtgctcatgtttatacactcactagtgaccattttcaagatgtcccatctacacttacatagtactgatgcacacattcatagccatgatctgactctagataactctggccaagcttgcgctcactcaacacgacggcatgtcaagggagcttactcatttcattcataaaaatgctaatattctcgagagttatgaccctcctgcttctgagattactagaaaggaatatactcaaagtgcctctgttttccctcaattaacgcaagatgaaaa

SEQ ID NO: 29257 - DNA, 584 bp, Zea mays
  Clone ID: MRT4577_126691C.1
ataccgaactgctgcgcagctggaagccatctagtggagcatacctccacttcgcgctcgtgcgaaatgcaatccaatctcgccgacgtgctcccgctgctactactcgtggccccagctgcgccgccgcatgacactaccgctcctatccccacgagagtgtcatcatcgtcttgctctcctgtgtcggtctctcgatctcacccttccatctcattgaagatctctactggttggggcattgacgcagcgctgctattctgcggcaatgctgaagctgcccctcacaccatcctatcgattgctgctagatcatgtataaatcgacgcacagctctgattcccgtcgataggtactaccccgaatatagtcgaatctctgtgtcaagcactctcgactcacaggtatcattctatgctggcttttctagaactgttgctcaacgacaaaaacctcatctactgttgtcacagcaagaaggccgtgctgaccaagacctgaactgtgctactgatgatgatgcattgaaagaacctactaatggacgaagaatccactccgacagagacaagtgttaccactc

SEQ ID NO: 29258 - DNA, 759 bp, Zea mays
  Clone ID: MRT4577_126692C.1
atcgctcttggcctttcgtcgtgactcgctccctccccgactccctgcatcgctccccatcccatcttgtcctggacacctgggaagcctccttctgttctttttcgtttcattcttggccacagacttcacatgcccacaacattcggctcgagaaaccagactaggaccaatacccatcaattccttcagtgttttacgccggtcaccgtggagctccgtgtggtggggttcggcaaggaggtggtgctaaagcagtggtggcggatgcgctggagacttcgcctggccatgctactccgcctagaagcgcccacatccggtcgtcgccccattcgctggtgccgcgctccgatccaccccgcccctattccgcctaggctgagctccgcctccactgtagctccgcctcaacgtctggcccaaagtggtctttgccacgttcttgaactcccccaacaccacgacggggtaggtccttctctccaatccaaaatgctttttagctagtcctcaaagctcttgttttttaatggcgaaggaatattgttgttctttacaaaatctgtgtggcaccattctaagagttggccatttagaatagaggttggtatttgtcatcagcaacaaggattgttgttcactccttcctatgcatttcccggtcgattgttgggctctgaaggacacaataaccaaatgtgtaactaaatgaaggtgtcttttttttgtggaaaaaaaaaaaaaaaaaaagcggcc

SEQ ID NO: 29259 - DNA, 150 bp, Zea mays
  Clone ID: MRT4577_126693C.1
ccgggagccttctctccccctaataaaactctatctatcatactgtgggatgataaactcataggagtggtatgctgaaacagcacagaggcagcacacattggaaggccatgaagatgctgagactagtgcacgccctgactacaagga

SEQ ID NO: 29260 - DNA, 325 bp, Zea mays
  Clone ID: MRT4577_126694C.1
agcagtggaacaacccggactgcttttttttttttttttttttttttttttttcttttttttttttttttttttgagattttaccaaaagaaaaacatattgaccggactttcaaaatcaaacatccacctttccatcaaacaatccatactgctccacaaaaggtgggggggggggcacatgaacaacaattcccttaacccacccactccacaaccacacctcttgtcacacacaccacatagggttattaaacgccctcgccgccgatacccacgtcctgcagcagctcaaatgaaccctgtcgtactgccctcgtcctctg

SEQ ID NO: 29261 - DNA, 1158 bp, Zea mays
  Clone ID: MRT4577_126695C.1
attttccaaagaaaagaggagagaaaagccaagttgcagcaacatttcgctcagcttgcaagaatggttggacctgcgaactctatgatccccactggatatccacaagtttattttgcccatccaagtacccatatccctcaaggtcctccaagacaaggttttgtgtatccacccatgggccttagtcatgaatggagaccaagtatgttccccccagcaccaaatctccagcaaatacattcacccgtgatgccaaattcgccaaggcattacagaagcaaccgaggaaggatgggtgggaatatgatgcctcttcctcatgccagtcatacaatgaactatatgacacatccacagccagctaaagaattcatgtctttgcctcgacagcgattcaatcatccgaagtacttctcaaatgatgttatggccaacagcttgcccatccatcaaagtgacccggtttcaacaatgaatgattcttttagcaactatttggcctccgctcctcccgcggaacaaaagaacttgcttgggaacaggctctatcctcttgttgagaggcatcagcccgaactcgcgagcaaaatcactgggatgctcttggagctcgacaactctgaagtggtcacgttgctttgctcgtcggagatgttgtcggtcaaggtcgacgagtgtgtccagctgttgcaggcaaccaagcctaaggctgaggatcatgaggcgctgcacccaggattcatgctggagcctcggcctcctactgtaaatgccagttgatgaggttctgattgcgcggatgagcttctggatgcgcttgtgtttagggatatggtaacaagctagtcgctagctgctgtgttcgttctctccttctagtttgcgaagttttggtgtttggattaatctactgagccgttattgctttctatatatagaacttaatagtaataaggactatatatattcagttagaaattttttatctggacatgttatatgaatgtatgttagaacctttattcctatccaacattaggaatagttgtccatgcgtctcctatacctttcatatgatattctcatttggacatgttatattcagctagaaactttttagacgcatggacaactattcctaatgttggataggaa

SEQ ID NO: 29262 - DNA, 237 bp, Zea mays
  Clone ID: MRT4577_126696C.1
aaagatgctagtaattaatagtaataccttaggtgatgctgctggctatgttctgccggcggttctagggtttgctcatattggtgcgcctcttggagcgtgctcattacagttgcatggttggctgcctggctgggtggttgtagtagttgtggttgtagtagtagttgtggtggtagttgtagtagtggtcgtagtcgtggtagtagtagtagtggtagtagtagtctttaatgt

SEQ ID NO: 29263 - DNA, 420 bp, Zea mays
  Clone ID: MRT4577_126697C.1
tttggtttttttttttttttttttgtttttttttttttttttttttttttttttttttttttttttaaaacaaacacctgggggtgggattttttatgacaaggtgggggggccggtttcaatttccttttggcaaaagaaggaaaccttaaatggggggggtaaaaacaggaaacatttttggtaaaaaataagcaaagggggggggggtttttccaatttccttgccccaaaggaaagaaaccttaattttttggggtaaaaaggaaacagttttttttaagacttatcaaccccttaggtgccctggtacattggggttttttaggaaattttttagatcgggggctcatggaatattggttttgaacaaaggggatgaactaggggttaggggaaaaacctttttttttccttttt

SEQ ID NO: 29264 - DNA, 314 bp, Zea mays
  Clone ID: MRT4577_126698C.1
ggccgacattggttttttctatttgcaagattatgtactgttgatcaaaataacagcactacgcatcatacaacatgctctaggagtaggatacagtaacacagcagcagaacatccaacccaacattctgccaagctctgatcaaacgccaaaacctgcaacatgcgatctactgaccgtacccaagtaactcaccccacaccctaccttgatcgccagagcagcttaccctctacacacactactgcgcgaggcacgcaccgaccacacggcgagctaattatgtatgagtaagtttagggactgggcttac

SEQ ID NO: 29265 - DNA, 1020 bp, Zea mays
  Clone ID: MRT4577_126699C.1
cggagagatggcgcgcggcgtggtgactggggcgaagggttgtgcggccggcggcggcggcaagaagaagggctccgtcacgttcacgatcgactgcaccaagcccgtcgaggacaagatcatggagatcgccacgctcgagaagttcctgcaggagcgcatcaaggtcgctggaggcaaggccggccagctcggcgagggcgtcaccgtcacccgcgataagtccaaggtcaccgtcacctccgacgggcctttctctaagaggtacctgaagtacttgaccaagaagtacctgaagaagcacaatgtgcgtgactggctccgagttgtagcggcaagcaaggaccgcagtgtatatgagctacggtacttcaacattgctgagaacgaggaggaataggaggcttagaccttatagactgcaccaagccttatctgtcatgtgaactctggatggttgggacactcatactgtagccttttaagggatgagttttgatgtttaaattggtcttctgaatgtttttaagcgtgctgggacttctcatgtgatgcttacataatcgagtccaagacataacccgtgaagaagaggagaacgatcatacttgatactgcagccttcatggaggagtttggcatgccgctgaagacgaggaccaaagacgggtataatccgcttctcgacgatttcaagaacacaaagttctatctcagcgtccctacacacaacgttcctacccatagcaggaggaactagtcttctttccttttgctgatgtgtcacgagtcaggaaaagacgtctgacaggctagaatcggtctgtcattttgagtagtctgaatttgcaagttttcttaccttaaggtgctgaaaattttatagtttctcttttctgtagaacaaagtttttattatcatttttgacattgatgcatgggtaataaaaggtggaagaagactgactaacaaggagtcaaaaaacaacaaaaaaaaaaaaacaaaaaaacaaagaaaac

SEQ ID NO: 29266 - DNA, 402 bp, Zea mays
  Clone ID: MRT4577_12669C.1
ttattttcatggaacacggaaaacgctgatgttgctatggtgcatctatgcactggagagcagcaacaacagaatcttgctgaagcacaggagcacggaatggtgtttttgctggaggagctagcagaaagtggcacggactgagcgaaagaggaaagctgtgcatgatgcatacaactgaatgagatcggatcctaaagcagcacagttaagcccaagtccgagtagaggccatggcacaggctcatgctcaagcacaagcacaagcacagcctcagatcctggctcaagctcaagcacatgcagacttgcttgctgagcgagcactacttacgacatcatctgacattacggatggatgaggttcctgatcagcagatggttatggatagaatctggctt

SEQ ID NO: 29267 - DNA, 355 bp, Zea mays
  Clone ID: MRT4577_1266C.1
gccctttgtttgttatttatctcaccccacagagttacggtaactgggatgaaaagcacggaatacctagccgccgggtaagaccgatagtaccggccctgcatgtacacttgtaccacgtaaataatggggctggagctggtgctggggcttttttcacaaaggttcccatccctaagggagaggggagactaccagctgtagctggaggactaggatggggctgggctcccaacaattaacttcggagaagcaggcgggaacagaagtttataccatcccaactaaaaccaaaacgggctggggatggggatgttccggacaaacagcggagcccgagagtttttacttccct

SEQ ID NO: 29268 - DNA, 361 bp, Zea mays
  Clone ID: MRT4577_126701C.1
aactaaaaggggtttattgggaagccacaaacataaaaaaactatattgaactatactaagaaactaaagaggcccccagaggtgggtaccgggggggggggcgtggtgaggacatgtgcgtgagagggcgcgttgccacggcgaacgacactgggtggcagaaggcagctaaccactgctgctgaagggagtgtgtgtgaatacgaatcaagtgtgtgggtggaaaagtgggggcgagtgctgtgatgggtgtgtcgcaatagagcgattaagaccatgtgatggaaaagcgtgtggatgcacagttgtccagtgtgagtgtggcctgtgttggcatatgccaagtactgtgatagctgt

SEQ ID NO: 29269 - DNA, 796 bp, Zea mays
  Clone ID: MRT4577_126702C.1
tccggccggggaggccgcgcgggctcgctcgctcgctcgcaaactagggtcggtggaccgtgcttgcgcacgttttctcccctcctcctcgcccaccgctgccaccaatcacgccgctgccggctcagccgttggagccgcctcgatccggactcacccgcgttggacctctccgttcccctctactaggaattggagatcggtccagatacctctcacaattttgcctctatctatttgacttttcaaagagagattaatactatacccctactggctaaagggttacagagtattcctatggacatgatatcatcctgtcccatctgcaatatacaagttcttacggttgagctggaatggcatgccaatagccactttgatgacgatcaactccaaagggacatcgaattagcacatcagatagcagttgctgaatcaagtacagataccatgaatgacccaaaacattatagtggatcattcactagtgactctaatactataggggcctcatcgagtcatagtggatactcacaccattacagtgagctattggatgaacaaatctcttgtatggtcagagcacaaattcgaagcaaagttcaagaagtggaaggcggtattatgagcttgttgaggagctgcttggagtcagaagctggttcctcaaaaagtatgatatcaggctatattgaccatcatcagagtctttcatcagaagataagggatggggctgtggatggaggaatattcagatgctgagctctcatctattgaagcaaagacaagagc

SEQ ID NO: 29270 - DNA, 137 bp, Zea mays
  Clone ID: MRT4577_126703C.1
ctttgtgaatctttttttaagtattgttctttatttacggggcacaagcgggggcagtctaactggtcccttaagagtaggacagagtactgtagcccatagtgcataccttcctgaaagaacacgatacaggaaga

SEQ ID NO: 29271 - DNA, 253 bp, Zea mays
  Clone ID: MRT4577_126704C.1
accaggcaaaaaatatttgaattggttggaagtatccatatacaaagatagcttgctaagttgacctaccacctgcatttctcactccaattaatctaaactgacatgttgctgcctttaataactgaaaactgaacctaatgtccataactgactaatgcaaatccatttccagcctatacattgatctatgcttagggaagaaaaaaaatgcgcacatgaatggctcttctgaaaacaaaacagatcattg

SEQ ID NO: 29272 - DNA, 4871 bp, Zea mays
  Clone ID: MRT4577_126705C.1
taaggcgacgggggaaagcaacggagacgagggcaacggaccagggctgagagcctaagaccaccacacctccactgcctcacggacgagaacgcaggaaggatggcggacggcaccgacgtgtcgccggagtcggaggcgacggcggcagccgggaagagcggggagatctggggaacgctggaggagctgctcctggcgtgcgccgtgacgcggcacggcacggcgagctgggactcggtggccatggaggtgcagacacggatccccgtggcggcgcggccaggcctcacgccgcacagctgccgcctccgcttccgccacctccaccgccgcttctccaccgtcggcagcggcggggtcgaggaggccgaggaggatcccgacgcctccgctgccgagggatgggtggacgagctccggcggctgcgcgtcgccgagctccgtcgcgacgtcgagcgatgcgatctctctatcgggacgctgcagtcaaaagtgaaacggctgaaagcggagcgggagcagagagcctccggcgaggctgtgagcgaccacgatcgcctctcaagcgaggagcccgggtgctcatgcagggagtcgaactccacagatctgaagccgcccaaacatcccagccagctaggcgacgggtctaaggaggagaaggttgcgaaacaggaagcgtccgttgagtcggcggtcgattccaaagacagcagcgaagtgcggagctcggcgagcttgtgccgccgccgccgtggaagcgggaacgctgaagaggaggaggcggaggcggaggcgtccaagtcctctccgctcactttcctgctcgacgcggtcttggccaaggtcgggtgggtggtggaccgcgtaggcgagaacgacagcgaagaagccgccgggtgccggcaaaggatggggggtcatggggacttggagactcttcggcgtcggctgcacccgtaggccgcctcgcgcgccgacgagggacgcggttcctctgggcacgagctctatcgcgacctgctgctgctctgcacgaacatcgtggtcttcttcccgggtggcacccccgagaactccgcggctgtcgaggcccgcgcgctcgtcaccgggcacgcatcggcggtgctccacaagccgaagcaggagaacgtggctgtggctgcgccggcaccggcaagcgccgacatcgttggttcgctgatcgagaaggggaagccgctgattgtgtgccgcaagcggagctccatcgcgaaggccgcagcgtctgcgagaaaggaggagaacacgatgaagggtgagacggcggaagagacggaggacgagaagaaatccgtggctgcggcgaccaaggacaagacgtggggggtgaggacgaagaagagccgcggtggcaagaactccgcgggtccaggccgaaacctagcggacggtgctgacgggccgaggaagggcgccggtgctggcactgacgggctcgccaagaagcggaacgccgtagacttcctaaagcgcctgaaccagtcgccccccaggaagcgggggtcggggtcccacctgggtacgacgcgaaagcggccggcggcgatggaggagcagacgactaaacgcaagagaggaaccggacggaaggagggcaccggacgcggtggatccaggaggggcggcaaggctgccggggcgaagagaggcgtcggccggctcgcgcgccgacgatgacagccactcctctgcgcacgagctctatcgcgacctgctgctgctctgcaccaacatcgtggtcttcttcccgggtggcacccccgagaactccgcggccgtcgaggcccgcgcgctcgtcaccgggcacgcatcggcggtgctccacaagccgaagcaggagaacgtggctgtggctgtggctgcgccggcaccggcaagcgccgacatcgttggttcgctgatcgagaaggggaagccgctgattgtgtgccgcaagcggagctccatcgcgaaggccgcagcgtctgcgagaaaggaggagagcacgatgaagggtgagacggcggaagagacggaggacgagaagatatccgtggctgcggcgaccaaggacaagacgtggggggtgaggacgaagaagagccgcggtggcaagaactccgcgggtccaggccgaaacctagcggacggtgctgacgggccgaggaagggcgccggtgctggcactgacgggctcgccaagaagcggaacgccgtagacttcctaaagcgcctgaaccagtcgccccccaggaagcggggttcggggtcccacctgggtacgacgcgaaagcggccggcggcgatggacgagcagacgactaaacgcaagagaggaaccggacggaaggagggcaccggacgcggtggatccaggaggggcggcaaggctgccggggcgaagagaggcgtcgggcggccgcgcgggggaccggaggcgaccttccgggaggacgtcggtcacgccgccgccgagacgtacctcgtcacgggacttgccttcaccctgctcggatacctcggggctgattatcggtggatataaggatatcacatcttattgcactccgtgtatatgctgttttactcatgcccggtttcataaaaggtcaggttattagaagtgtagtactgtagtctatggagaacaaccaagaaatgggtcagcaaagtttaaagaaagtcacgtgctatatagcgtcctctagcacttataacagtagatccagagaaattatgtgtgttggatttgtacatgcccagagataacagcaaatcaagtccgttgtggcatttgtaactggtggagcttggatcatcggaaatttccctcgaggaacaataagtgacgtggtcagtgatggtctgaggcaatatcattcatttgtaacaatgttgttagctttgtaggggatcctaataaaatttacttgatgggtcaatcagcaggagcacatattgtggcctgggtgctcttagagcaagcagttaaagaatctaagggagagagtacctattgtaatgtggctcaaataaaagtatatttttgtttatctggaggttattatgatcagtgctgaatattgcattgagggacagccgacaaaattattcaggaagtgtgtcttcagttctgttcaacacttcaccatcaaactctctgtccaggacgccagttgtctgttgaggcctgttatcaacttatcatctttgtggtgttgttggtgcctgggttgattaggtgtcctctggtatttaaatttacttctctccaggacccttcgttgaatattggcaataacagctgctatgtcaactgttgtgttcacttgaggttcaactacagctctgatctcatcttttaagccacatacgcagttacgtacttggaagcaaagaacaaatcatcaaggtgacagcagtgcatagtgatatcaaactgtaaggactgaaactgagttgtgtagtccttcacaatgccagtctgccttggagccaataagtctgtgacagcagttctgtaatcatccttgccaaatttggcctcaatagcttcaaagagttgcttccatgatttgaaggttatttataagcttgagactatttggtagcattgccctgcaaatgcatagtggctgcttgaatccacagattttcagggatgctgaagagagcgaagtaattatgttacttgtccaaccagattcagggatcagtgccatctaatataggaaattgcattttggtaaagcatgatgggggcaaggtttctcttttgcatgtctcatgagttggacttggagtgctcggccttgtgactgtttttgctggtggcaaacacattgatgaagggtggttcttcctcatatatcagggacgcagaatcactccctgaacttctcttcatctttaaagttgcgcagtgccagatgggcgacggcttggccattggtctgaacttgcttggagatgaactgttgttcccctcaacatctgtccatcttaaggttgttccgatccatttgggttttcagctcctgttgaatcaatccaatgacattgactctgacgaagagcgtgtcgaaattctccatgacttgtcatcctccgtgctcttggacatggcggtgtccaacaagatcttgatctgcatccaaggttttaggtggagccgtggtgactgatgcaagaaacctctgcaacccataccctatttcgtgcttagcactgtcttcgcctgccgactgcctgccatgtcgcgtcggtgtcgccggacggcatgggcctgccgttctgtagctccgtggcaccctccagtacccatcgcagtgagaccatgtttggtcttgttgtgcctcctcattctgcctgtcagctgtcaccgtccttccagaattcccaccgtgctgcatgttaggtggccggcattggttgggacggccgtgctgtgccggcagccgtatcggcatgcgatgcgactatgcgaggaaaggaaattctccggcccaaaggattctgctggccgtatggctggctgcatcacgtcacatctgcacttctaccatgataggttatttcctcacctaattgtaaatacgtgtacggtgctagagagtcaaaacggtcgttgatgacacgtcatgcccatcaccagtatttatacgcaggtgtacttacccgttgatttgattttagtagagatgaatttctaggtataatttgtgtgtgtacaatgatctgtcgctgcgggagacgcagattgggatgtatcatgtacacggctaaatttgggccgttcgatcgatcgtcattgatgagtggaaggacaaggactgttggtgtactgt

SEQ ID NO: 29273 - DNA, 365 bp, Zea mays
  Clone ID: MRT4577_126706C.1
ctccgacgacgataacagacttagctgtacgtgtacattccgcgagagggttgtggagaatagtagtgatccgcaatgtccacgtatgaggatgttgttgctgaagtaccagtgaccgaggtgacaacgaaggttccggtggtgcaggtgacccaggggccctaggtgaagaacgaggacatgactgatgagtaccttatcgagacgaagttttttgttgcgaacactcacacctccacctgtccctatcctccataaaaactacgagccgacttatcgtccgcacgggacaatacaccccgctaccctgcgcataatcaacgatcaagagtcccctcaccgaggatatcccttacggaatcatc

SEQ ID NO: 29274 - DNA, 466 bp, Zea mays
  Clone ID: MRT4577_126707C.1
cgtaagctcggaattcggctcgaggcctttttttcctcttcatcctaggagaactgccacaacaccgagcaggtaactatttaaataggccaggggcctcctgccatacagaaacaacatgaacagatgtcttattcaagtttaaaaaagttgatcgccttgcctatctcctacaactatataggaatgaactatgaaaaattccaactagatcttatatccaaacaattgacaactcataattaacgcaagcaatgcattacactcgctcgaaaccttaaagaccttgggaacatccacgggaaacctgtctatctcgtgcattcacggattggagtgctgtgaccctttcaccgagcggagggcccttcacacggtgctgatgcacttgaaccatgacccgaacgcaatctgacacacccggtggcggcgcctgatcctccgcttggcctctttgtaggccaat

SEQ ID NO: 29275 - DNA, 410 bp, Zea mays
  Clone ID: MRT4577_126708C.1
aaaaaaaaactggttttcaatgaaaaaaaaaaggaaggtttttttccaccaaaacccattgggaaccaaaccccgaaagattccttgcccttccttaaaagaaagttagaaccagctacccctggttttcgtttttcttgggactggccaaagggttccctttcgggcctttctttttaatcacaggactgaaattttaggcaactttgccccaatcaacctaggggggttttccattgtttaccccccataaggcttgggattttgatccccctaatacagagggggccaatgcaaatgcaccccgggggttttgccggaaaaaacacaaaaaattttttgaaacgaaaaccatcttttatatttgggttagctagaggaaaacttcctttgccttggcttgtcggccc

SEQ ID NO: 29276 - DNA, 465 bp, Zea mays
  Clone ID: MRT4577_126709C.1
ggcgaaattcaatactggacgaatataaattcaatcctttgttttacatgtgtgatgcgtcagccaatcagaacatttttctactctacagtgagtcacaatatctatcctctaaagtgacacacttatcctcagtatatatagttatatacaccgaatactgctgaaataaccatttttttaaggacgagaaacatttgaatgaagtgacctaaatacagtgcattcagaatcttgggccgatgctgatcagcgctcccggcttttcacaggagaggcggaggcactgtgagagcctgccaagcccagcgacgggtgcaggaacaacgaccgatgcccactggaaccctgctccgctgctgcggtcgtcgacgatgaccgtgccatcagcgccgatgaggagcacgccgcgccagtgcttgacggtactggcccacgccgaggagctggccccacttgagcccc

SEQ ID NO: 29277 - DNA, 1344 bp, Zea mays
  Clone ID: MRT4577_12670C.1
ttgggacctcgagccggcgggtctccagtaccatccctcttcggagggaacctggctcaccttgcgggcttgttttgtccttcaacggcctcacaggcacgatccctgctgagattggatatctgacggcgctccaagaccttgacctgaacaacaaccggctggaaggtgagctgcctgaaaccctgtcgttgctcaaagatctctacgatctttccttgaacagcaacaacttcaccggcggtgtccccaacttccgtagtagcaagctgaccactgttcaattggacggtaacaatttctcgggaggcttccccctgtcattttgcctgttgacatcattggaggtcttggatctatcgagcaaccaactttccggtcagctccctacctgcatatgggacttgcaagacctcgtgttcatggatctgtccagcaatactctttcaggggatgtactggcttcatccacaaactccagtttgtcgttggaatctttgcatctgtcaaataacagattctcaggagagtttccacctgtgatcaagaacatgaagatgctagttgtcctagaccttggtgacaactacttctctggtgaaatcccatcgtgggtagggtcagggtcaccattgctacgaatcctccggttgcggtccaacatgttcagtggcagtagtattcccttggagctactacagctctcccacctccgatttctggacctggctagcaacaatttgcagggaccaataccacatggtctcgctagcttaacgtccatgggggtgcagccacagactgaattcgacatcagatcgggagtccatcaccagatcttaaacctagaagcagacttctcttatgccgatcgagttgacgtgagctggaagacacacacttatgaatttcaaggagcgattgcgctgatgaccggtatagacttgtcaggcaattctatcggtggtgaaattccaaccgagataacaaaccttcaaggccttcggtttctgaacttatcaagaaataatctctctggtactattccagctaacgttggagatttaaaactactcgagtcccttgacctctcatggaatgaactgtctggtctcattccttcaggcatctcagaactcacgtctcttagttcactgaatctctctaacaatatgctctcaggtgagataccaactggtaatcaactccaaacgctagccgatccttcaatttacagcaacaactatggtctttgtggctttccgttgagtatatcatgtcccaacagttcaggtgtacaagtattggacaggagtaataaagaaattgaaggtgtgtatgtct

SEQ ID NO: 29278 - DNA, 714 bp, Zea mays
  Clone ID: MRT4577_126710C.1
cattgggtacctcgaggccggccgggagctcttctacagcccaatctccgcttgcttcctctgaagccccatccgtctcttctctctctcgctacggttcctatgcctgttcaacatggaagattcgatcaccgtatcctactccggatactgggcgcataacctctgcgcgttgttgcggacaccgcttctactccgcctctgacttagaaagtcgcctgcttcgtgacgggggctgttgacacttctgaatcttcacctcctgcacatgaacccaaggagcatcgaggacgcttgagcgatcgacatgatcgaggctgatacagacacacgaatccccattgctattgctctgtggaacactcagagcatcgcatcacactactgcagctgtatttgatggcctggacatccggatcttgtcgagaagatgatctcggggatcgctcagagtgactgagctactcctataatcgactccaccactggatctctctaagtctcgatctctattgatcgtccagatcaagcgaacatgccttccttggtttctgcatagaggtcaaggagatgatttgctgctgcaagaagatgtcatgcgaccactcccaagtattccaatgcccgttacgatgagactgcgaatgaaccctacaactacctcaataatgctgcatacgaccctgacaagattgcctctgtcactatctctgg

SEQ ID NO: 29279 - DNA, 526 bp, Zea mays
  Clone ID: MRT4577_126711C.1
ctcgagtttttttttttttttttttttttttttttttttttttttttttttttttttttttttttttttttttttttttttttttttttttcccaaaaaattggccaaggaaacattaaagggggggggggcctttaaccaaacaaaaaaaacaaaacagcccccccttggggtggcccaaaaaaaaaaaaaggccccaaggggggttttccctaaacggggcaaaatgggggaccccggaaaccaccggggaacccaaacaaaaaaaccctaaaaccctaaaaaatttattttcccgggatttaacccggccaaggccgggaaaaccgggcccccccccctttgggttttttttggggggccagtttccgttccaaccccttgactttttaattaagggccgggagcccccccatttaatggtggccgaccccaaaaattttttacaaaacctttttaaggtgggggtttctttcgcccagggttttctagcacggggccttgggaccttaaggggcgggggggg

SEQ ID NO: 29280 - DNA, 184 bp, Zea mays
  Clone ID: MRT4577_126712C.1
ttatatcgagatttaggtgaatcaatatattgattatttttaggaatcacatgccactattagtgcaccattattttgtacatctcatatgtaatataaaagatggcaccaccaacaatggtttgttgccacgacatggcagggtttatcaaaaataactggtggtttggcagcaattgttgtt

SEQ ID NO: 29281 - DNA, 533 bp, Zea mays
  Clone ID: MRT4577_126713C.1
cgttgctgtcggccttcttccccatcgcgcgcagggcaccaccggtgttcgcccctgcgtgctccctgctccacgcgccctcagccatggtgcacggtctctgctcctccatcaacgttgtggcaggctccatctccagcaccggtcgccgtctgccaggaccacgtgcgagcacactcccaggacgcccggcgattctccagctcgccagcgcgccttcctcttctccatggcgcgccctgcttcgtccagcgtccgacctcctctccttccttgaagccatggtgcttggtggccttgcttgggcgctcgacaccccaatggttggaatccgacccccctgttcccctcaaatccgagctctcctggtgttttcttgctttgtcctacagaaactcccgtaggcgctggagatgcctagctcacgccggagcccagggccgcacctctgtctccatggccgtcgcagctccctcgtgcccctgcgtcggctcagtctgcgtagccgcgacgccgagctccattccccatga

SEQ ID NO: 29282 - DNA, 414 bp, Zea mays
  unsure (1)..(414): unsure at all n locations
  Clone ID: MRT4577_126714C.1
cgaagaccaaaaaaaaaaaaaaaaaaaaaaaaaaaaaaaaaaaaatttttaaaaaatttaaaaaaaaaaaaaaaaaggggaaaaagggggggacagaaaaaagaaaccccccaaacaaccccgggcaggcaacgaaaaagcccnacaaaagggccaccaaaaagcaaaccacggcccggccgaaaacaacggcgggacgggaaaaacccgggcggaacccaacaaaaacgccgggcagcacaacccccaacccccagcgggcgaaaaaacaaaaaggcccgcaccgagcgccccacccaacaagggcccaaccgaaagggcaaagggaaccccccccgaaccggcgcaaaaaacccggggggggggggggaaacccccagcggaaccggaacacnggccagggcccaaacgccc

SEQ ID NO: 29283 - DNA, 329 bp, Zea mays
  Clone ID: MRT4577_126715C.1
gggttttgttttttttttttttttttttttttttttttttttttttttttttttttttttttttttttttgtaataacgaacgctactagctgttttatttccaacgctactagctgcttatttgttgcaacatgcctgccaagaaagctggggggggcttatttgcttattatcaaaagcacgaggctaccgggggggtcggcgactgtctcgatgaccacggacgaccacgggagggcactgtcaccagcagcggcgccgttgcccgcggagcagttggcgcggacctgtccctgggagcccgggagcacgttgacctgccccatct

SEQ ID NO: 29284 - DNA, 261 bp, Zea mays
  Clone ID: MRT4577_126716C.1
ttctggacatacggaggcttcatgaccttgtgggtgttgtacaataagagtgggaatatgccgcacactaccttggcagttgataaaagcgaagagtacatcgccggatgtggcaacgggttctactcgaggtgcatgttgttagttatacaagtctaatgcagtcttctcactatcctggacttgatttatctaccacgccgatactgactacagattgctcagcattggattttacgacaattggagcacatttgttcg

SEQ ID NO: 29285 - DNA, 497 bp, Zea mays
  Clone ID: MRT4577_126717C.1
tttttttttttttttttttttttttttttttttttttttttttttttttttttttttttggcccttaccaggagacccgcaacacaagggggataaccacacccagggcagtccatttcatgggtcgaccctaggacaccctacaccaaaacacactggggccaaccctgggggctgcaaactgggtcaccctttaaaacctacctaataaaataggaaagacgagggaaaaccccactgggacactttatattagtacatattatagggcccgcaaacaggggttccaggaaactaggggggttgctgcacccccaacaaaggagggcatattacgactaacggcgccaggtggggggctctctggattctccgggggctcaccgacatttccgtccaaaccgaacaaccgggtgtttgaaccacaaaccgctgggggtttaatttggatgggggcttctttagctctagcaggggggcgtgaagtcatttcatag

SEQ ID NO: 29286 - DNA, 438 bp, Zea mays
  Clone ID: MRT4577_126718C.1
accatgatcgactactggcacgacacgcaggaacgagttttcccccgccgacgagggcaacgaccaccatgtgcatcgggtcaagcgttaggcacccctggcgccgcggtcaatgctaccaggacggatcaccatgcgccgtagcgtcacgagtattcccccgagcataggggatataccagaacgaacacagcaacttggcccgtactcctatcaaacggcgaccaacctgacagctcagtccctaggccagtatgcgttctacaactagtgactctcccgcgatccagaaactttagcgcgcaaccatgaattacagctaactcaatcccggcgccggaagctgatgccgctgatatagaggctcactgagatcccgcacaggaacgccgtttagatcggcgacgctgtgagaatcaaggacgaacccaaaataat

SEQ ID NO: 29287 - DNA, 498 bp, Zea mays
  Clone ID: MRT4577_126719C.1
aggggaaatcggtgatctccattttgactttcataaaaactctacatctttggcattgattttttatgcgttaaaaaaaaagtatttctatgctttacagaaaaaacataatacacggtaaactatggaaggatcatgatagatacgtctaatttacaacctgcaacctttcttaccatgtccataatactaactaatgggggggtatatttttaccatgggtcaaaaatctgaaaaggagcctgccaatgctaataatataaacatatcagcaaacatgttacgtcccaaaccagctgatcaatattaaaaagcgggatcgacagctgatcaatattaaaaagcgagatagaatgacatgttgcctaccttaactttggaggatgctaaacttctatatcttttaatctaaaaactcaaatacagtaacatctaccctatttaatcgaacagagtaacatgaagtaaacagactatgctcaattacaatattggatg

SEQ ID NO: 29288 - DNA, 137 bp, Zea mays
  Clone ID: MRT4577_12671C.1
tggcatcgcctgtagacgtttcgccttgcgtgagtccgtctataggacctgtcaactgacacactacctactgcatctttatataggattgcgatcgctatgtaaatgacgtacaaatacgcattacaaatacctca

SEQ ID NO: 29289 - DNA, 335 bp, Zea mays
  Clone ID: MRT4577_126720C.1
ttgggtacctcgaagccggccgggtactgacgagctcgccatggcctccctctcctctgtcgccgtcaccgccccttccttcgccgcaccagcgccagcccgcgccgtggtcagaaggaggtccttcaccgtgcgcgcctctctccgcaaggacaccgataccgacggcgcggaaatggctgccaatggcctgattgatggggaagacatgccaccaggaggtgctgcatgaaacaagatacttctacgacatgcttgacaagggccagatcatcgtcaagggaggagtaattaccacgtgtcagaacaaaagcgttttttcacacaacggtttg

SEQ ID NO: 29290 - DNA, 254 bp, Zea mays
  Clone ID: MRT4577_126721C.1
gcgtctcacacttgttatgacagctttttgactatcatctacatatttgttatcgaagatgattttcatttcaaaattcacaactaccacttcgttaaaaaattcaatgcattgtatgaacaattttatttaatgagttcaagagaagactttattcttgcacaatttgtaccacgttgtaaactctgtctcacaggtatttgctacacatgtcgtacatttaaacatcttacttatatattctcattttaact

SEQ ID NO: 29291 - DNA, 254 bp, Zea mays
  Clone ID: MRT4577_126722C.1
gattaatggactcgataccaccactcgggcggtccagtgggcatcctggagcagcgaccacagactgactatccacaacagcagtagcttctgagggctcgcggtgtagcggggatggagccgctgtacgagctgtggtggggcatgcgagcggattgaatgcatgggcacgatgagaacggttgtatgctcaaggggcaccacctaaggcggactctgaacggcttttgctacaagacccaattctgcgactg

SEQ ID NO: 29292 - DNA, 1334 bp, Zea mays
  Clone ID: MRT4577_126723C.1
cggacgcgtgggttgggggccagcctgagttcgtccaggtcgacacccgcaacgcaggcgtgttggaggaagcgctgcagggtcagtatcatactagcagtcatgtggtagctgttcgcggagttgccaaaccggaggcagctgcgacgccggcgaggcgctcgcgccccatccctctggcttccgtggccgtgtggagtctggttgccactggcgccgcaaatgctgccgagctatgggaccccttggccctgcacggatcatcaggactcgtcttggctgaccttggtattggagattggtttgggggtttgctgttttcagctgggcagcaggctaatgaggctgtccaagatcagttgtctgctcttagtttctctagcctagcagttatttttggtgctggacttgtaactagtttatctccttgtacactaagtgttctaccactaactctaggatatataggtgcatttggctctgggaaaggccgatccgaggttgttgggaattcaattgcattttcactaggactagcaacaaccttagccattcttggtgttgctgcttcttttgctggaaaggcttatggtcaggtaggacaagggctcccagtggctgcttccggtttagccattatcatgggattgaaccttctggaggtacttgaattgcaacttccctcatttttcagcgattttgaccctcgagctgctgcagctaacctcccttcaggtgtacaagcataccttgctggtcttacatttgcattggcagcatcaccttgcagcacacctgttcttgctacccttctgggatatgtcgccacttcaagagacccaattattggaggaagcttattgttgacatacacaacgggctatgttgcgcctcttcttattgcagcttcatttgctggagcactgcagagtttgttgtcattcagaagatattcggcatggataaacccaatcagtggtgcatttctacttggtggaggtgtttataccctactggacagggtgtttccagcaacatcaatggccatgtagaccatcgttggacaagaattgctaggcaccagtctgtttggcgtgcgaatgatatttggttgtgaagtagtgaaatgatggcaacaaagtttagccagatctctcagcgttgtataggcacgcaggacattttgatcgggacaagcaaagcaccttgacctaagtacagtagtctgcatcactgtatctgtatgggcctcgatacttggggccggtctaccctactaaaatgtatttctgggacagattgaaagagtatgaaatccatataagggtttgttc

SEQ ID NO: 29293 - DNA, 307 bp, Zea mays
  Clone ID: MRT4577_126724C.1
gatcgctcttcttgtcgagaccagaccaccgtatactggagagaaagatcctccctcgcctccccaccccgccccacccatggtactccgccgccagcactgacgccgccgccgaggccacgctgcgcctcctctcatcctcttccagccgtatgctcctagcacttacttaaaggatggcacagtacttgaagccgatattgatgttgtcggagttgtaggcagaccattgactactctcttcaagggtcaagctagctgacgacagcgccggtcatcaagactgacactttccattgaaagaagc

SEQ ID NO: 29294 - DNA, 158 bp, Zea mays
  Clone ID: MRT4577_126725C.1
agcagtggtaacaacgcaggtacgcggggaggaagatcacatgaaaatagagatggcttctttgattgtaacttgtagccagcaatgacaataattgatgaagttaagttaaatttgtctgaggctaactcagttgatgcttgtattgctcaattgac

SEQ ID NO: 29295 - DNA, 328 bp, Zea mays
  Clone ID: MRT4577_126726C.1
attccgggcagacacacgcgtccagaacggttgccaaattttggcgcgtatccactaatgcacagcattttaggattgcgttgacttctgtgcaccatcgcacgagacatatttatattgtacgttgagtataagacatctgggactcatcattcatcccaaacttcggtcgatggaagtcgaaacgtcttatcgttcaatatgagtataggggtttgacagcagtctgttgcatgagtacttcgtgttgataagtctctacatacgtacgtgcatgtattaggacaaaccagtggaacagtaagtttacgatgtccaggtgaccgtt

SEQ ID NO: 29296 - DNA, 207 bp, Zea mays
  unsure (1)..(207): unsure at all n locations
  Clone ID: MRT4577_126727C.1
cgttcttttttttttttttttttattaacaattatttaagctacctcncctggggggaagggaaaatcacaaacaaggggggttttaaaactaattacccaggtctttaccacagttttcaaactacttttgggaagatttaatagatagccagcaggaccacacgaaccttaatttgttgagggctaacagccacacaaggaaaaa

SEQ ID NO: 29297 - DNA, 198 bp, Zea mays
  Clone ID: MRT4577_126728C.1
tctttcttagatttagtcacgaatattttcggtagggacttatctatggtgagacttgtatttaaactttaccctacgaataatacagcctacaatgcacaccgtttttctgcaacagacagcgcatccatgccgtccatcggatcagatcgattttttccgcgctagggtttagcatttgatcctaatggcgttcta

SEQ ID NO: 29298 - DNA, 1441 bp, Zea mays
  Clone ID: MRT4577_126729C.1
cccacgcgtccgctggaccgaatcgtcagccgtgcgtgccagggaacactaacacgccatgaaaaaactggcagagctcatgctcatcctaggtggagctttgcgcgtgtgccatgtgttgctggtggtgctgctgccgctgcctggagtgcatccataacatcgtccctcccctcagcagccttcccttcctccgcttctccggcccagctctcccaggtggaggtggaggtggagcagcggcggcggtggtggcttctccacctgtagtctccatggcgtccatctcggtccccagcccggccccttccgcgaccgaagacgccgaaaacatcaggaaagcagtgcaaggatggggcacggacgagaaggcgctgatcgagatactgggccaccggacggcggcgcagcgcgcggagatcgccgtggcctacgagggcctctacaacgaacccatcatcgacagactccactccgagctctccggcgacttccggagcgcgatgatgctgtggacggtggacccggcggcgcgtgacgccaagctcgcccacaaggccatgaagaagcagggcgagcggtacgtgtgggtgctcatcgaggtcgcctgcgcgtccgcgccggaccacctcgtcgccgtcaggaaggcctaccgcgaggcctactccgcctccctggaggaggacgtcgccgcgtgcccgctctacaaggacccgctcctcaagcagttcttggtgcggctcgtgagctcgtaccggtactccggcgagctcgtcgatgacgagctggcgagggcggaggccgcggagctgcacgacgcggtggtggcccggaagcagccgctgcacggcgacgtcgtgcgcgtcgtcagctcccggagcaaggcgcagctgaaggcgacgttcgagcggtacaggctggaccacggcaaggccgtcgacgaggtcctcgaggaacgccgcagcgaccagctcgcggcggtgctcaagacagcggtgtggtgcttgacgtccccggagaagcacttcgcggaggtcatccggagctccatcgtcgggcttggtacggacgaggagtccctgacgagggcgatcgtctcgcgcgccgagatcgacatgaggaaggtgaaggaggagtacaaggccaggtaccacacgacgctgaccagcgacgtcaacggagacacgtccggatactacaatggcatcttgctcactctggtcggccctgagtgaatgaccatggatggacgatggatccatataggttgaagtcattgtttgcgacctgtagtttgcttgaacaagatcacactcgtttttgtttgattgaacgaaacgacactagtgttgtttgttcacatatgtgtacagaactgctgagtgaaatggtgatatttgtggtgatcgaattggtgaaaataaaacgccagatcgatggg

SEQ ID NO: 29299 - DNA, 311 bp, Zea mays
  Clone ID: MRT4577_12672C.1
ttgtccacgcgtacgatcttatggagacggagggggctgattttaacatggagcgccttccaaagaatggcaagccaacgataggagattcagagcacaagcttataaccgacgactgtaacgaggccgaataactactgagctccgtggacttgtcgaacgagcacagcatagtcgatctgaagaaccgagggacgagcactcggcggtcaattaggcagaagaagatgacccacatggacagcaagctgtctagggggcacaacgccaggcacgagaagatgggcatgttcaaagggctgtcagaaaac

SEQ ID NO: 29300 - DNA, 184 bp, Zea mays
  Clone ID: MRT4577_126730C.1
cccacgcgtacgcggacgcgtggactttggaaggacatctgttgactttgtgatgccaatatggtagggattagttacctagggaggaattctaccttgacattgagcctaagtggggccatttgatggacctgcacctggctgctgaatctgtgctagaaggtcctgctctagttttatacat

SEQ ID NO: 29301 - DNA, 433 bp, Zea mays
  Clone ID: MRT4577_126731C.1
attccatgtgttttgttagttttgatgttctcgccatggagtatttctaaaaatattgtgttcattcagggactagatgacagccacacaaagggcgataaggaagagggactcagtttggagggcttagcggggtagacaactttggtggctcataagtgaccaagaactacatgaagaatggggacaaatggaagaacttttgaagggcataaaccatttgaatgatgctggtcattttgctctcgtgaatgaacgggtgtgaccctagcaacagtgcgactttctcgtaccggtcttcacggagcgcatgcgcaacctcggcgtagggtagcctggcgcagtcacaacccgggtcaggcgcacgtggaccctggcctgccacaacctggtgtctgtgtggctccggcgaccctaggtaggtgcgccgatg

SEQ ID NO: 29302 - DNA, 357 bp, Zea mays
  unsure (1)..(357): unsure at all n locations
  Clone ID: MRT4577_126732C.1
gaccccgacccacgcgtacgcntgggttcgcttaccatatttcttgaatgttataagcctactttcgcgtccgtgactcgcatgattctacctaggtgggcactgatctaacgccctagaactctattaaccccctcttcaatacaaaaggcgtgcacctccagctcatactggatgcccagatcgagccctgtgcctacgttaggtgggaacaaaggaggcccacaggatccgctttatgaaatggatgcacacgatagaccgtggagatcccaccttctcaatgcgggagatccacaagagtcaactgcggatctatcaactcgattagcactctcccctgactgcgtgatctgt

SEQ ID NO: 29303 - DNA, 236 bp, Zea mays
  Clone ID: MRT4577_126733C.1
ggcggggtacctggcacggcgggctgggcataaggagcgggtgcgcctgctttaccgcacggcgctcaaggacacgctcaaatggtgcgcacaccgacacctcttctaccatgacgcgtcttatctccggaacaagatctaggccaaccgacacgtggataacctgtacgtgttggataggctcatctaccatgcgaaggctgcatacaggaacttgaagaaccaagatccctaca

SEQ ID NO: 29304 - DNA, 387 bp, Zea mays
  Clone ID: MRT4577_126734C.1
gccggccgggccgggtctcatcgcctggggtggatagatgactccataaaagaacgtgtgtttgccatactaaagcaagccaaacttcccattgcacctccagagaccatgaccgtggagaagtttaaaaacatcattgctgttgacaagaaggttgctgatggtctgttgagactcatccttctgaaaggaccactagggcgctgtgtctttaccggggattatgaccggaatgcgctcgatgaaacccttcacgcattctgcaacaactgacccatctcagttttggacttcacttctgtatgctaatactaggccatgtatatccatcaaagaaaagattgcgatgtacattatctgtaaaaaaaaaaaaaaaaaaggccccta

SEQ ID NO: 29305 - DNA, 936 bp, Zea mays
  Clone ID: MRT4577_126735C.1
cttatttcccccaggttttaaacttacccctttagggaaaatttgtaccccccaagtgtcaggggatgaaattttttcccggggtacaaggtccctaaattggggcgccccccttttttttttttttttttttgtataaaaaaaaggccccccccaatcggggggcagggccagcaggggggccgccccctcgatcctgcctgccgccccattttttgctcctccccgtggccgctctatccctttgctactgctggtttttttttatttttttttttttttttttttttttttttttttttttttttttttttttttttttttttttttttttttttttcaaggctagagcgtactgaaccattctcaccaaaaagatacatatcatacctctccaggccgtctgaaattaattcaagcatagtattatgggctaaatagttcagaagtacaattcaatcaaaaaagcctcaagttctagcgcttcttgatggcagcaagaccacacacttagttggcagcagcaacacccttctttggggcagcctcagtcccttctttgaagttgctcttgaaacggcgaggcacgtgtcgcatgtacctcatccttccggtaccagttgtcttacgcctgatggctttcacactccagttatacttgcggatgcgggcggcggggtagccgcaggaggagcaggtgctcttctggaggtggaagctgcggcggccgcagcggatgcagagcgtgtgcgtcttgttccggcgcttgccgaagctgcccgtacccttccccatttccttccttgctccgctcggctaagggtttcaggcggaggcgcggcgtggtcgtgttctgaggagtggcggcgtggtctccctgcgcccgcgggccggggggtagccgcggggcccggcccggccggcctcgaggtaccc

SEQ ID NO: 29306 - DNA, 194 bp, Zea mays
  Clone ID: MRT4577_126736C.1
ctcactcttctgtctacgtgttcgttgacgcgtgggttcgcccggcaactcctcatctctgaggccacaactgccaacaatccaatggctctcgtccgccagtgccgccagctgctgcacctgaccctccctctggatctcttctccctgcgtgtgctcaccgtagcctcagtccaccgctgcgttgtccatct

SEQ ID NO: 29307 - DNA, 1991 bp, Zea mays
  Clone ID: MRT4577_126737C.1
gacgctcaacgcctacaacgtgctggccgcccggtgcgcggcggagtacctggagatgtcggagacggtggagaaggggaacctggtgtacaagatcgacgtgttcctgtcggccagcatcttccgggcctggaaggactccatcatcgtgctgcagtcgacgaggccgctgcagcggtggacggacagcctcaaggtggtcaaccactgcgtcgacgccatcgcctcccgggcatccacggacccgtcggaggtcgactggtcgtacacgtacagccggaggaagctcccgtcggagaccgacggcgacgcgcgcggctggaacggcgtcaggaagcggcaggcggtgccgagggactggtgggtggaggatctctgcgacctcgaggtgtgcctgtacaggaaggtgatcctggcgatcaaggccaaggggaggacgggcggcgccgtcgtcggcgaggcgctgcgggcctacgcgtgccgccggctgttcgggtccctggaccacgccgtcagcgacgggctcgactgcaccaagcaccgcgcggctcttgaagccgtcgccgacctgctgccggccgagaaggggtcggtctcctgtggcctccttctcaagctgctcagggcctcgtgcctactggagtccggtcaggcctaccgcggcgagctgatcaggaggatcggcgcgcagctggaacgggcttcggtcccggaccttctgatacctgcggactccggcgacggcgacggcgacgcgatgtacaatgttggcatggtggctgcgatgctggaggagttcttgctgcatcacaaggtaaatggggccgaggcggagaagcgggaagatggcgaggacgacgtggatgttgccgctgacgacccggtcacttcttcgaagctggccgctgtcgcaaagctggtcgatggatacctctccgagatcgccaaggacccgtgccttcctctggagacgttcgtcgccctcgccgaatcgatgccgcccctgtctcgcccggtgcacgacgcgctctaccgcgccatcgacgtttacctcaaggagcatccgggcatgtcgaagggcgagaagaagcggctgtgcgcgctgatggactgcaggaagctgacggcggacgcgagcgagcacgccgtgcagaacgagcggctgcccctgcgcgtggtggtacaggtcctcttcttcgagcaggtccggcagtcggcggcggcggcggcagcctctgccgcccccgcgcgctcgctcatcctgcccagggacgacggcgcgtcgtacggcagctcgaggtcggcgaccacgacggcgacggaggacgagcagtggggcggcggcgccgtggtgggcgcgcctgtgacgacgtcgacgtcgggcggcgccggcgacgccggctcgctccggtccgtgagccagctgtcggccaacgagaacgggagaagcggcggcggcggcgacaggaagaaggccaagggcggtgcggtggcgccggcgccggtgaagagagtgctggggaagctgtggtccggcaaggcgagcagcgggtccgacgacacgtcggcgagccccgttgggtccctcaacctggagcctggaggagaccaagtcaatgtcatcacagatcacgaggcattctgtgtcatagttactatattactgtatatgttctctctttttttttgagtgattgttttgttggattggatttgacttacataattatggagggtgtttggtaattggtacaggtggtaatggagaactcgtcgcggaatagcttctcatctccatccaagcgacaaaaaatatcctcgtccagagacatttcttcctcgtatctgttaaatccccaccggcgatcctcgtccccgtttaaattgtaatttattaatttaatattatcacttattcatattgtcagatgtaagaaatcattatgtgtatatcaaaatagatatatttgtagaatgagtgatctcataac

SEQ ID NO: 29308 - DNA, 306 bp, Zea mays
  Clone ID: MRT4577_126738C.1
atggccacggtccgtgacagacccatggtggggccccaaagctcggcgagaaatcacccggtgatgaggccggcgttgcccaaatcgacgccggtgaaggactccccataccctggcgaccacccgcaaccaggtcgtgtacaccgaacgccagtgggggcttggaaccatggcggctacccattttctctctcttctctcggttgctccctttcgatctccttctcacgttcctctggctcggagttcatggagacctgtgggtatccacggccggggcttgcttttatgctggcggatggatga

SEQ ID NO: 29309 - DNA, 540 bp, Zea mays
  Clone ID: MRT4577_126739C.1
gtaaaaaactttgctaggtggtctgcttgaattcttattcatacagtccgtgctgcaatccaaagatgcatggagaacacaactagagctgctcgttgcaccagagctcatatggtcagactgacgtatcccttgcccagcaaggaacaaggccacatttaaattcttatgtaatgagaaagactgcgcgctcgcatcaatatgctatcaccatccaacacacagcggaccggctaattccaatactcccagagctcagaatgacaaagatttcttctgcggatccataccccctactgagtgaattagaaccaaaatcctatcagttatggaaaaaatctacaacaattacatcaagttttcgcttcctcgatcccacatgatgacggtggcctgaatcccccacccccacacggctctgtgggggatcaacgaacaatcaccagatgccacgtgtcggaacaaacagaaaggaacctggttgcaggtgggactcacaaaggtcgcatacaagcaattatcatggcattgatggctctg

SEQ ID NO: 29310 - DNA, 338 bp, Zea mays
  Clone ID: MRT4577_12673C.1
cgtcaactgcacttgtgttctactagtgacctcctattcatcgacggcgacgctttaccttccaggcaggggtggatgatgagtaccacgtcaccatactaatcgctgtgataagggagtacatcactcagcggtcctccaatctgtcgaccgactgaaggttttttatatgggcagaactgactactatggaggagatttctcctcactcaacattaatcagatttttactatgttcagagtggaacacaagccttctttacatctaagcgcaagcagagacaacaccgtggacatagggccaaaggttatcatagcgaatgggacattgattcaaa

SEQ ID NO: 29311 - DNA, 134 bp, Zea mays
  Clone ID: MRT4577_126740C.1
cacctgcatcgctccttcttcccttacacagtgattctgggaccatctaccccctcgttgggggatgttttttggcttccatggagaggctcattgccggcctacttggcttcctattggctgcatcggaagga

SEQ ID NO: 29312 - DNA, 211 bp, Zea mays
  Clone ID: MRT4577_126741C.1
attggttttaaacagagaccggcccttctaatgtaccaaaccttacttcccctgggggcccaggggataattatatcttaggaggacctaaattaatttacctgccgcccgttttccaccgtagggacgggaaaacccttgcggttccccacctaagtgcctttgaatgaaatcctcttttggcaacttgtcttattaccaaaaaggccgg

SEQ ID NO: 29313 - DNA, 259 bp, Zea mays
  Clone ID: MRT4577_126742C.1
gtttaccccccccactctgccctcctcccgttccccacccccttcctcctccccagccaatggagatcttcgtggacgatgagacgaagttgacgctgcatgggttgcagcagtactacgtgaaactgaaggacaacgagaagaaccggaagctctttgaccttctggatgtccttgagttcaaccaggtcagttagacgtccagtagggggatgagcattggagcataccagctgtagcagaaacctgatattaagta

SEQ ID NO: 29314 - DNA, 479 bp, Zea mays
  Clone ID: MRT4577_126743C.1
gttgtttgtgattgtcaagctcgggttggcctgggtcctgttctacctgaagccgctgctgcttgcgctcgtggggctgatcaagtcgctcgacaaggtcgttgccggtgtcttgatcctggtcaagagcctgctgtcgacggtgctgggggctgttgctgcgttgctgctcgaccttatcttttaaggggcgcgctccttcgagagagttggcgatgctggggtgagactcccaaggttaggaatgggagcggcaagtgttgttttcttttgaagaatgagtggaggagtagtaagtgatggcaagaggttgtgcatcggtctgtcgtttctgtcttgcgttgcttggagttgctgtgtgcaaggggatgtctgtgtgtcaatcatccggcaaagcagcgatgcttgtctactacctggtagcataatcggaatcctgtactctcattaactcaaaaaaagttttcctcataatattt

SEQ ID NO: 29315 - DNA, 439 bp, Zea mays
  unsure (1)..(439): unsure at all n locations
  Clone ID: MRT4577_126744C.1
acgcgtgcgtctgcttccctttctttcaccgtgtctcgatgcacacgcgtgagatctgtgcccgccnccgcggccaggtgccacacaacgacgcccggcgagcttcaccgcgatagaggtaggcccgcccgataccaaggaggatggcggcagtgggcgttggtgcagcggacgagcggtgggcttcgttgtgcaactgcgtggtgaacttcttgctggaggagcggtatcacctcacggcgctagagctattgcaggagctccaggaggacggccgctccgcgcacgccctccgcctccgcgctttcttctccgacccagcgcttttcccgcccgatctcgtcgcccgctcatcctctgcgccgcccggtgctgatccacagattttgctagaagagaaaatagcagcagaagaaaagttggcactcacggagtatga

SEQ ID NO: 29316 - DNA, 397 bp, Zea mays
  Clone ID: MRT4577_126745C.1
gcaagctatgccaagtcttggaacaacgcaatgttcttgcaatgccagcaagttcaaaaagtgtcaggttcgtcatccattaccagatttcagacagtgatgttcaatatgcattgacatgtgtcgagtcgctatttcgcaagatcgtcgtggccctattgggaaccgagatgctcttaatgaagtaggaggaccgaccaatccaacttgcaacagcaggcggggagtggatgcgcctgctagaagagtgctagctccgcgcatacgctcgctcgacaaatgtgtgttggtaactattgggtatagtggtataattactgtgctttattcccgatgtttgttttgtgtaaaaaaaaagaaaaaattagttaggctgaatttctgattaaataacttt

SEQ ID NO: 29317 - DNA, 232 bp, Zea mays
  unsure (1)..(232): unsure at all n locations
  Clone ID: MRT4577_126746C.1
agcagtgaacaacgcaaacggggcatttcaagttatgaatgtggcaccgagatataactgtgttttttccctacctctaaaactgacatggaaagtatttttgaccgaaacattgtgtagaatgtattgaaccacctgggattttgccccaacttccaatgcataaggttgttaaaaaaaaaaaaaaaanaaaaaaaaaaaaaaaaaagtactctgcgttgttaccactgct

SEQ ID NO: 29318 - DNA, 407 bp, Zea mays
  Clone ID: MRT4577_126747C.1
acctcaaccagataaaaggaatcattatatagggcaattcattcaggggccaaccacgtttaaaggggggtatggggggggggtggggagggttttacaaacaggaagggggggtatcaacaaactatacccatggtgggggggacatcacggggtttgaccgaaaggtttacccagataaatttggggggcagaacacagggatataaacttcagggggcaccaattaccaggcatttgggttctaaccttccatggaaaaggggaaccaaacagcctttttttggatgccatgggaggggaggatatgggtatgcaaattacccatccgagacaaaaacgggacatgcaacattggggaggtctttttcgttaatccaaacccacgcgtccggggacccgtgggg

SEQ ID NO: 29319 - DNA, 155 bp, Zea mays
  Clone ID: MRT4577_126748C.1
attcgtctcgagctcaaatctaaaaccctttctgatcacccccgccaacccttaccttcttggggggtcctttgaaagcccactggagaatcacccttactacctcaccctcttttcattttactcctatggaacacacagacccaccctatcca

SEQ ID NO: 29320 - DNA, 354 bp, Zea mays
  Clone ID: MRT4577_126749C.1
acttaaacaaaggcattgtttgcaaaaaaaatttccccactgacaaacgaaaggcccactctttgaccataaacttttttggggactgttttcaccacctattaggatagttcccagtgtttggagatctaattttccatccaaaacaaaatgttggaaaaatcctccctctctcatgaaatattaatttctccaatatgaaaggccaaaacttcaccaaatcctgatttgaaaagaccgtaaacacacactgtttttgtccggcatcatatttttccatttaaacaccgccggaaccatacttttttcccaaaaaaatgatcttgatctggtcaataccctaaaatacccccc

SEQ ID NO: 29321 - DNA, 219 bp, Zea mays
  Clone ID: MRT4577_12674C.1
ccacgcgtccgggcaccactccgccgcgcgcgacgtgcgatcaacgacggcaaccgccatcacgctggccgccttgacgaaaagcaaggccaacgcctactccacctactcctatccacagaagacgcgccacgcgcattgacgtcacgatggacgagtcgctgctcatgcacgccgtggcgatcatggatcacgctggccacggcagcatcgatagga

SEQ ID NO: 29322 - DNA, 145 bp, Zea mays
  Clone ID: MRT4577_126750C.1
ttctttttgatacggaggcgtagcgtatgctgtactggttctcccgcgtcggcgtctactgccgtgtccttgtcgggaagatggtaatggggggcgcgtacttacgtacctcttcctcatcacgctcaatcaactaatataccat

SEQ ID NO: 29323 - DNA, 348 bp, Zea mays
  Clone ID: MRT4577_126751C.1
aagtggtcaaagtttcaccccacggcgctcacggatagactcgggagcgcacgtcagatcaggtgcgctcgcgccgcccctcgacctaagttgcgacgacgattcatcgaacaggaaggatgtacgctgtccatggcatgctcccggccaggggcgggctcagtttcgacctgcgtcgcgcgaaagatatggtggaaaaaaaagggctacggcgtcggtgatgacagaagaccgacagaaccatcagatagcctcaacaagcgggacggacacccaagatttgagctcatccggcatgaatgacactgaaacaaaactttttttttttctccccccccccccccccga

SEQ ID NO: 29324 - DNA, 293 bp, Zea mays
  Clone ID: MRT4577_126752C.1
ccgtcccgagtagtcgatcgtcagctcatcacgcattacgacctcgtgcgcggcttctcgcattgcacgagagtctactgctgtcggctctcgtctcctatcgccgcgcgaccaggcatgcgtctccgactcggcgcacacggccgccgcgtcgaccccctctgcgtgctctccgttcatccgttgtcgcctccctccacctcatcgaacctaagctgtgcaagtgcaatccggttcctcgactaatgatcagcacactgttgcgagcagcctcctctgtagttacgcactga

SEQ ID NO: 29325 - DNA, 1816 bp, Zea mays
  unsure (1)..(1816): unsure at all n locations
  Clone ID: MRT4577_126753C.1
gagctatgatgcgcatgcacgcgtnggcgaagctcggaattcggctcgagcatcatgcatccatcgcccattgattggccccggggccggccgggagtcggggcggccgggagccagacgcagaccccctgcctgttgccctgtcgcagtctagcatcaggcatccatcggcgagagcgagagcgagagcgttcgcagcaagcctacctcacctcaccttgcctgcctgtctgtctgtctccagagctgctcttgtccggagacggagccgactgaacatggccggagatccgggggacgcgccggaggtgggaggcggcggcatacgctccgtgctcaccacggcctcgctcgtcgctccctccggggacgaggttcagtttcgggagatcgacggcaagatcatcggcctctacttcgcggcaaactggtatccgaaatgcgaggctttcaccccggtgctggccgcggcctacgagcagctcaaggagcgcggcgccggcttcgaggtcgtgctggtgtcgtgcgacgaggaccggccgtcgttcgagcggttccacggaaccatgccgtggccagcggtgcctttcggcgacctcagctgcaagaagcgcctcagcgagaggttccaggtggagggcatcccgcgcctggtggtgctcgctccggacggcggcgcggtggtacacccggacgccgccgacctcgtgcaccgctacggcgagagggcgttcccgttcacggccgcgagggtggcggagctggaggcggatgaccagcgcaagtacgcgtcccagacgctggagaagctcttctccgtcagcgggaaagagtacgtgatgaacagtggtaataatgaaaaggttccggtctcgagcctggtggggaagacggtggggctctacttctcggctaaccattgcgcgccgtgtatcaagttcacgacgaagctggcggccatctacagcagcctcaggggcaaggcggaggacttcgagatcgtgtacgtccccatggacagggaggaggacgggtacctgcgctcctgcggcgacatgccgtggctggcgctcccctacgacggcgcgccgtcgcgcgcgctggcgaggtacttcgacgtgcgggagatcccgacgctggtggtggtggggcccgacggcaggacggtgacgcgggacggccggaacctggtgaacctctacttcgacatggccttcccgttcacggacgcgcagatcaggctgctgcaggaggcggaggacgaggcggccaaggagtacccgcggtcgctgcgccaccggggccaccgccacgagctcagcatcgtgtcggagaagtccgggggagggccctacatctgctgcgagtgcgaggagcagggactcggctgggcgtaccagtgcatcgcctgcggctacgagatacacctcaggtgcggccagaatgcggagggcggcagcgcaggaactgcttagctagctaggcgacggcagcataacagcatcactggagtactggtgtctacctactagactgctgcatgcgtattggacttgtgcatggtctgtgtttgatcccaacaaacgtcagcttgctaagtctgatgctaaagtagtcaaatagatagatgagaaatgcatggccttccttgtaaggcttagtaggtggttagatgagtgaacaacaaaatgaagctgcagcaatcaatctactgtggcaggtgttatgcaaatcttgctgcactgcccaaccaaactactgcattttccagtgcgccttcttcgagcctaatttgacaccactgaaattaggtttt

SEQ ID NO: 29326 - DNA, 445 bp, Zea mays
  Clone ID: MRT4577_126754C.1
gccggccgggctccgaaatctctgtgaaacaatacctaccacatgcaagatagctatattctttcggtattcgcggacatgaatcggcgctgctgatgatcgtgatgatcgctatctcctgttctctcccctgaggtacggatgtccaagccaagaacacgatcacctcgtctggacggagaccagcaaggtcaatcggcgccggcaccggatgctgcgaatgctcgacagccacaaacaacgtgcctgtcttcgttgacgggatcttaacgaccgtagacacgcacaggtcacgacggacgatacttaagatctagcatgccagtgaccacaataagtgtttaatgtcattaggactacattaagaaacctattttttgagtggatttttattatgatcaatatgaaatggcatcccatgctatatcttaacgatacgatgata

SEQ ID NO: 29327 - DNA, 580 bp, Zea mays
  Clone ID: MRT4577_126755C.1
tcgacatggccttcccgttcacggacgcgcagatcaggctgctgcaggaggcggaggacgaggcggccaaggagtacccgcggtcgctgcgccaccggggacaccgccacgagctcagcatcgtgtcggagaagtccgggggagggccctacatctgctgcgagtgcgaggagcagggactcggctgggcgtaccagtgcatcgcctgcggctacgagatacacctcaggtgcggccagaatgcggagggcggcagcgcaggaactgcttagctagctaggcgacgtacggcagtcggcagcatgccagcataacagcatcactggagtggtgtctacctattagactgctgcatgcgtattggacttggacatggtctgtgtttgatcccaacaaacgtcagcttgctctacgtcaagcaagtctgatgctaaagtagtcaaatagatagatgagaaatgcatagccttccttgtaaggcttagtaggtggttagctgagtgaacaacaaaatgaagctgcagcaatcaatcaatctactgtggcaggtgttatgcaaatcttgctgcactgcccaacc

SEQ ID NO: 29328 - DNA, 701 bp, Zea mays
  Clone ID: MRT4577_126756C.1
gacggcgccggaattccggtgggacagggccatcctctccgcttgtcccccagttctgcatttccctcttcgcagacattcgagttgggcctgccgccagttcttcagatggccggagcgggcgacgcggccaaggagtacgtcgccggatccgccgccggcgtcgctcaggtcgtagtcggccacccgttcgacacggtcaaggttaaactgcaagctcataataccacggctcatggaaaggtgtacaagaatgccttccactgcaccagtaggatactgcttgacgaaggaattacagggctgtacaaaggtgcgtcatcttcatttattggtatagctgttgaaagctcccttttctttggcacatattcccaagccaaacagttattacagggaagctatgaggttggtaggccacatcttcaggtaattatcccttctgctgcatgcagtggagctctgattagctgcatcctcactccaactgagctgaccaagtgcagaatgcaagttcaagggaaggatgtaatccatggcgccaggtactccagccctctagattgtgctgtgaaaacattggaaagtgaaggggttaagggtatattccgtggtggtttggcaacattattcagagaggcgatcggcaatgctgtcttcttctgcacttatgagtacagtcgatactggatgcacaacta

SEQ ID NO: 29329 - DNA, 1049 bp, Zea mays
  unsure (1)..(1049): unsure at all n locations
  Clone ID: MRT4577_126757C.1
cattgggtacctcgaggccggccgggggccgtttatatctgtggcgccggccgcgggacgcgtagccagacgcagaccccctgcctgttgccctgtcgcagtctagcatcaggcatccatcggcgagagcgagagcgagagcgttcgcagcaagcctacctcaccttgcctgcctgtctgcctgtctgtctgtctccagagctgcgcttgtccggagacggagccgactgaacatggccggagatccgggggacgcgccggaggtgggaggcggcggcatacgctccgtgctcaccacggcctcgctcgtcgctccctccggggacgaggttcagtttcgggagatcgacggcaagatcatcggcctctacttcgcggcaaactggtatccgaaatgcgaggctttcaccccggtgctggccgcggcgtacgagcagctcaaggatcgcggcgccggcttcgaggtcgtgctggtgtcgtgcgacgaggaccggccgtcgttcgagcggttccacggaaccatgccgtggccagcggtgcctttcggcgacctcagctgcaagaagcgcctcagcgagaggttccaggtggagggcatcccgcgcctggtggtgctcgctccggacggcggcgcggtggtacacccggacgccgccgacctcgtgcaccgctacggcgagagggcgttcccgttcacggccgcgagggtggcggagctggaggcggatgaccagcgcaagtacgcgtcccagacgctggagaagctcttctccgtcagcgggaaagagtacgtgatgaacagtggtaataatgaaaaggtaagcgaacaacgcgcgtgttggattggatcggacgagctgtgttggcctagctagctcaccgcggctaaggccgngctgcaggttccggtctcgagcctggtggagaagacggtggggctctacttctcggctaccattgcgcgccgtgtatcaagttcacgacgaagctggcggccatctacagcagcctcaggggcaaggcggaggacttcgagatcgtgtacgtcc

SEQ ID NO: 29330 - DNA, 292 bp, Zea mays
  Clone ID: MRT4577_126758C.1
tcgagccggccgggccgggactgtttctcgcctcgcggtctcgacacctcgcacccggccctcagctaccatgagctctcgacgtcgctgacactggtgcccaaagctctcccccgcgtcagcgaccggctgctacacctcaacctcctcctccgcatgtagtatcaaatgactctagcagaccgtccccggcaacagacatcgaaagacctagtctgctgcaggaacagacctgccgggccgccgctcctccgctcgaagcgtatccggctacttggaggaaccgagtgct

SEQ ID NO: 29331 - DNA, 325 bp, Zea mays
  Clone ID: MRT4577_126759C.1
cgatgtcctggcgattccagcttctgccgataattttgaggctgcgttaagtggtgaggcaaatgtgatacataagcaatggagtacattaagtatcaaaacaattgaggctcttgtatgtacccgagattgggtaaatagaatggtaagctcttcactttggttgttatgttgattttcttgtttcagttttgtaaggaagcattgcttttttggtttgtcttagttagcatcttaattgttaactaggttagtacccatgcgttgcaacgggaacatataataccatgataacttatatacaaaatgtgtcttatattgttat

SEQ ID NO: 29332 - DNA, 256 bp, Zea mays
  unsure (1)..(256): unsure at all n locations
  Clone ID: MRT4577_12675C.1
cctcgaggccggccgggctctttttctctgaagaaatcttggggaccgcttcagccgtgcatttgaaatagctctggctgttgaaacttctggagctgttacagcagcttttgcttctccaaagatgcaccgcaatcagtttcaaccatctcctgaggcccatgatgcatatggaaatcatacaagtgatctcagcaactcagggaaaggttntgttgngagaaactgctaagtatctgctgctgtttctgctctt

SEQ ID NO: 29333 - DNA, 387 bp, Zea mays
  Clone ID: MRT4577_126760C.1
gggaccctcgaggccggccgggatgtaggtctttcagttatataattctagtaactacattgaagttcttagctctagtactgtttaacttgtttccttttagatggtaggacatattgcatcaatgtagctaatacatagattgccatttttatctcttggctcttctgcacctgcatgcaaaactatcgaacgacctgatctaagcatgcgtcagtaggtggtgtggatggttaccccaaaaaaactatatttggtgtgtacagtttaaatgtctcaattttgcaactcttggctgattgatggcattggctcttgtcttgtgcccacaagcagtgacttcctggaaccaagatgtgtttttttttccccccccccccccccgag

SEQ ID NO: 29334 - DNA, 320 bp, Zea mays
  Clone ID: MRT4577_126761C.1
acttatgatactgatgcttcctcccactataaagctccgttctcaaaaactatctacgactgagaacactgctcctgcgtgctatgaacaaagactactacctatctaatactcctatgctaaatctgtcatactaaagtatacgttctccataaaatccacacattttatatctcaagatactcctaatgatattccctaaatacaagctgaatataaacctttacagacttttaaactgaaacgtcttcttcactgaattactcaaccaagactcttattatcaccatttaacgtattaatcacattattccacaaat

SEQ ID NO: 29335 - DNA, 843 bp, Zea mays
  Clone ID: MRT4577_126762C.1
ccggacgatttctattcttcagcaagccattcgtcatctcctccctggcgttcgtcctcggctcccatggcaggctccacttccctgcttcctttccatggagcacaagtcgccgagccgagctcctcctctatggctcgcttcccctcgcggcgccctccctccatctcctctctcgtttctccctggcgctcctccctcttctctaccgtgcgctgcggcgctctggctcattcccatggcgttcgctcggccctgcccttctccagccgcgcctgctctggctcatctgcgcgcaccgcacccagttctctacgcacgcgccgccgtcaagttccacgtgtcccgagctcctccagccgcacgccgtgctctctacttcttcctgcgttgcgcgcgagctcggcatcctcctctgctcgccgaggccccttctctgcgcgctctcaggccagccaaggtctcgccagccacagctccgctcggcgttcctactgctcccaggttgacgcacgccccgacactactcttcactggattcgcccagcgccatctcctggccatggatgtcgtcgtcctccagtcccgtggacgcgtgcccctctaccccaacatcggtagcgtccctgggcttgtgtttgtcgacctattcactcctctcccatggtcgaccaacctcgccgatgttgctctttggttgtcgcctctaggcctaaccgatgatttccctcggcccaagccttgcccacgcgcctagacctcctcgacaccctcaccttgttgggtgctcgtcaccggaactgctggggatgaaccgcgtttctctccatttattgttggacg

SEQ ID NO: 29336 - DNA, 458 bp, Zea mays
  unsure (1)..(458): unsure at all n locations
  Clone ID: MRT4577_126763C.1
nccgcgcgttcgcaaaactggagcagtggtaacaacgcagagtacggggaagggccgatttatttgtttgtttgttgctcatgttgatgttctgagcatcccatttttcagatgtttatatttcatatctgataaagtttataagtttattgtcgtcattaagatgggttaagaaggatgcctgctgtgttttagggtgaggctccatttggaagtcaatagtgcaacactgctcattccaatgatatacccccactacaaacagacacttggtcataattggccttcgcacattcatattcaatgtctcaaacttgttattacgattctgcggatggtctgacaaaaccctgggcatagtgtgattattgacactaatattagttccaaagcatttcattgagtaaaaaaaaaaaaaaaaaaaaaaaaaaaaagtactctgcgttgttaccactgct

SEQ ID NO: 29337 - DNA, 461 bp, Zea mays
  Clone ID: MRT4577_126764C.1
ggaaagcccaatggattcattccttttttttaaataagggaacaaaacccggctttcgcctttttcggggggggggccaagggcagaccccaaataacaaccccaagtcctcgcaaaataaggccaaaacatttagcctaaaagacttaaacttttttttactcctcaccgattcaaccctcacttaaaaaaggaaaatgatcaatacaccgtaatcctattaaaaaatctccaaccccgataagcaaaaaagggcatggccatcgtctccaaatggcgacaagctttttttaacaaattcgctgaatcggcacttttttgcagctgcccccaaagtctgagccaaagagttcctctgaataaaaccttccatgaagtcggagtcaaggttgcgagaccccttcaacttggaagccctttccaaactggctcccggtgaagttgcagccctcctcttgcta

SEQ ID NO: 29338 - DNA, 520 bp, Zea mays
  Clone ID: MRT4577_126765C.1
accacgcgtccgatcgggtccagggcttacccgaggggttacccgcgaggcacggggcctcgcgctaggacttaacctagggatcaaccctcttatcccgttactttaccgacgaggcgatgaacgacgagttgattgacgacttgatccagggcctcctcgagggccccgggggcagcacccagggcaacgagcacgagactgacgcccagatccggagcctctgcgacaccgtcaatgaccatttcatcttccaggacatcctggtggagcttaagacctccattaatatacgcggccatgttcatgaccagcattcatacctccatcaaggatgctagccagcagactatccaccacaggcacatgatgagtatctgggtgactatgaacatagcataaaacagatcatacatacattatgcctcatcttgaagtacaaaataaagtacccacatcacatgtttcttctcaagggagaccatgacagccgcttatacaaccggatatatgagtgttt

SEQ ID NO: 29339 - DNA, 279 bp, Zea mays
  Clone ID: MRT4577_126766C.1
agccctcgagtcggcggccgcccttgtgttctttgttgtttttttatcacaaggaatggaaaaccaaacaacgtacaccacccagagacaataccagtggcaggagcgccaggatcacatgccccgggtcactcagaaaacatttaatgacaatcgaagggacaacaatgtcacgcacactacagcccgagaatgctagacaaggaccaaatgcgatatcattaaacatgatggttttacaaaaaacagtcgagatccaggacatgggggaggacaagc

SEQ ID NO: 29340 - DNA, 535 bp, Zea mays
  Clone ID: MRT4577_126767C.1
tctcccgtctcgtggtagggcttcaccagtgcgtgctgttcgaacaacctcggactccttcgacaagctgtcgctcgggtgcctgcgtcaatgatgctgcttgtagttctgaactacaccacgcttctctctctagtgggtgtcctcatacatggcaacactccatatctacatcatcgtatagtgctgcctgcacacttctagttcttgactcggatggttgcgctgggctctaagacatgacttgggattagagcgtacaaccagctggttgcaatcaggcccaaggaggctaagttagcaaacgcttgtggcactatatacatccatgttcatgggagcagtctttatgtgcgtcgtcctcatctggaggacgagcctgccaaagctgttcaatgacagcgaagatgtgaaacgagagagcttccaaggtggggcatctgctcgctctaaccgtatgcgtcagcacgatctgacctgtgctatcacgctgtggccgcaagagctgggtggctagtgcgtgtggtgttcataa

SEQ ID NO: 29341 - DNA, 305 bp, Zea mays
  Clone ID: MRT4577_126768C.1
caaaggggggtgggggcataatatacattttcacctttcatctttcttttacttttcgcagacaccgtgaattttattttactataatttccatcttttgtaaggcaaggggaaaaaactacaagatcctatctttgttgtgaataaattacccgttcaaatccacatctgagcaattatttaccatggcacataacactttttgtaataccacttttattcactagagactacacacttctctttgtccagcaccgccttttctctgattcacagactcgaatttttacaaagtgatgaattac

SEQ ID NO: 29342 - DNA, 1946 bp, Zea mays
  Clone ID: MRT4577_126769C.1
tgggtacctcgaagccggccgggccgggaaagaggcgggccgggaaacgtgtaaccacctccagcctaaacacagtcaccaccacctacacccccgttgtctcctctccttccattgccacagtcggccttctccgtggaagccggcgggccgccgcctcctttgtccctgtcgtcgtgctcttccgtaccgccattccctagcactgtccacgggcgagatctcgcgtgtacggtgtacctcgtttccctcggcgggtggatcagtgacggcttggtcgagatggacgatgtggttgatgacatcatctgtggaacggatgcggcggttgccgtcgaggatggggccagtgggacgcccgcaatgcctagcttagggtgccagggtgaggaagagcataggaagggcaatgaggacaactcaggtgagagcgaggtgattaacccgccagaagaggctggcggggaggccacctcgcccctggaaggcaggaagcctcgcctttccaaggggaatcaaagccatgtacctaaggctgtcaaatctaagagtccaaggagtggagatgaaaatcagacaaggagaaaagctcccaactcttcttttcctaaggcacccattgtccaggagtcccatggtgactctggtgtcggcagtaataaagctggcaagaatgagtctcactcatccccaattgatgcagcattgccccgatgagtccaaggagaaaaggaaaactcaaaagccaccagcacagctctcttccatcaaaagagatgaagaacagtcaaatggtgagagtgcaaagcctcgaaaagttggaagcacgccatcatatggtttcaccttcaagtgtgatgagagatctgaaaaaagacgagagttctattcgaagcttgaggagaagattcatgcaagagagttagaaataagcaatttgcaagccaagtcaaaggaaactgaagaagcagaactcaaaatgctgagaaagagtttgaatttcaaggcaacaccaatgccaagcttttataaggaaccaacccctgccaaggttgaattgaaaaagatccccccaaccagagctaaatcaccaaagcttggtcggtctaaaaacaagtccatatcagagactgaagaaaatactactacggaccaacctgcccgtctgagccttgacgaaaaggtttctcaaaacggtgtgaaaaaaccaaccccgtcgagttcagcaaagaagccccagagaaagtcactccccaggctgccatctgaagaaacttgtccgcttgatgccacctcaaggcagctgaagaacaacaaactggatgaagttaatgctcaggagacaggatcagctacagggcaggtacaaggaagtgagacggaaacagattctgttcagagcgcaactcaagctggagctaaccctgatgaacagagtgtcgctcagtgaacagagtgtcgctcagtgaagatctcggtggccaagccaagtgatttgtgatggatggtgtgccttatctttgtgtgatgttgtgcttgtctactagagtgacttgtggcctgtatcatgctgtgttatactcctgtttttgttttcctgcgattgagcctgtatgttgcttatcaatctagatagcttttgttcataatctacagatatatccaaattgtcctaagtcatttgcagctggtcgcaagtgcagcgaaaaaaaaaacaaaaaatcctgccatcacactttgctatttctgcattaactgctggctggtattatgtactaaaattagtctcatcaccaggaaggaggtgggagtttggagaatggcaagtgacccccccgtgtattgtttatgctagtttctgttgacatacgaagtgtttgtagttggcaaattttttcagattatcatgtctcctatctccagggctcggagccaattttcttgcc

SEQ ID NO: 29343 - DNA, 1611 bp, Zea mays
  Clone ID: MRT4577_12676C.1
gtcgctcgctgccgggcggacgaccccgcggtgagcatgctgctgccgggactcccggtcgccggcctcgccgtggggttctacaacgagaagtgcccgcaggcggaggacctggtgctcgccgagatgcggaccctcgtcgacaaagacgagaccatcggcccggcgctgctgcgcttcatgttccacgactgcctcgtccgggtgcgtacgttgccgcagccggccttctcatcgtctgcctactgcttgatacgagcttcctggatgtctttttttttttgttgttgttgttgcctcgcgcgcgtgcgcagggctgcgacgcgtcgatcatgctcgtctcgcggaacgggactgcggagagggacgccttcccgagctacggcctccggggctacgccgagatcgagcacatcaaggccaagctggaggacgcgtgcccgctgaccgtgtcgtgcgcggacatcatcgtcatggcggcccgggacgccgtgtacctgagcaacgggccgcggtacgccgtggagaccggccgccgcgacggcaaggtgtcggcggagtacgacgccgacaacgacctcccgccgccctcctccaaaatcgtcgacctcaagacctacttcagcttcaaggggttgggctggaaggacctcgtcgtgctgtcaggaagccacacgatcgggagggcgcagtgcaccacgttcgcgtcggaccggctgtacaactacagcggccacgtggggcaggacccgtcgctgaacaaggcgtacgcggcgcagctgcgggagatgtgcgagccggggctcgccgacgacaccaccatggtggagatggacccgcgcagcccctacaccttcgacctcagctactaccgcaacgtgcgcgccaaccggggcctcttcacctcggaccaggccctcctcgacgacccgtggaccagcgcgtacgtcgagcgcatggccgacgcggcgtcgcccgacgaattcttcgccgactacgcggccgccatcaccaacatgggccgcatcgaggtgctcacgggtgacaacggcgagatcaggagcgcctgcgctgcgtacgttgactagaaattactaaccgatcgaggtcgaggaataggatagccagcgagtggttggcttggctgctgccctgctctgggcggcggtgccgttgttgacctggtcttgtcgtgcgagcgagtgcaattggtggatggatcgtcagccgtcgcgtcatgtggccacgacaacgtgggagccaaccaggatgcagtagttgcggtattctcttctctccgccgtttgggctggggtccatctgttttgttctttacgttgcgcctccattgtttgctgaggtgtgtgtgaagagacggacggtatggttgctcattcagacattcacacgacaaccacacaatggcaggaaatttttttgtcaaattatattaattcaaacagtaattgtgcttttggcaattggatgcttctgttggaatccagcgaagagacggcagttgagtagtgatggaactggacatcgagtgtttcgttttgtaagaattaattcgtatccaataaaaattgactacgtatatttgtatattca

SEQ ID NO: 29344 - DNA, 324 bp, Zea mays
  Clone ID: MRT4577_126770C.1
tcttctccctcgcgcgctcaatatttcgggagcgtacttaagcggcggcgcaggatgactctttatatctctgattacaccatctcgtatacaatctccttcttcatccccggatggattttctatatcattcctatgtaacccattaaggctcactcttttaatgagtataatgtgctttttcaatgtaagttatactaccaaaacgttatggtctttcagttctttacgtacggtaaggtgctcttccttgatttaattattcatgttacagagagggatgagttttcgtaccaagagattatcactcacctgcccctttgt

SEQ ID NO: 29345 - DNA, 376 bp, Zea mays
  Clone ID: MRT4577_126771C.1
tggacgcgtgggcgagcgccagggtagagcctggaccaacaactcttgctataaggattgatttcgacctcggtgaggtcgaatctgcacccccaagatcatcttcaccagacatttggctctccgcggtcaagcaagccagctgctagtgaacctgatcatcagatcctaactagtttctatacatagccaccatcagtgctgcagccatttgatggtcataagtttcaccctttgacactatgctacatttttcagctgtctacatgccggtagaacttgctactcttgaactatacaataaacggtggttttaccactaatactaccgcctgtagataacaagacctgctaattccgcaccgcttgtgaaaac

SEQ ID NO: 29346 - DNA, 608 bp, Zea mays
  Clone ID: MRT4577_126772C.1
ctttattttgttgattaatcgttttaatggttcaagtttgttccaccgagtgatgctgaagaagccattttaggaacgaaattgccttcattgtttggttttggttttccgcaactaatcgaatgtggccaaaggacagatgcttgattttctggcttcaatgcataataagatggtgaattcttgtgttgtaaatagtaagtcctaatacacgtggtgactgaactggcactggatattgattttgggaactttgggatctaatactctgatagcttgttagttctaccgctgtagaatatatgctgtaccgctttcttctctttaaggagaacaattatttggcatgcatctgtgggtggcatttgaaagaggcttacctttctaccgttctgcatttgcattgtgctaacgaattattttcttttcattgatgctcctacatatttcaaagggttggcttttacaactgctcaatatcttcttttttggtgcatattttacttaaatgagttccctactggcaatcatagacatcagctttggtttaccaacatcctctttatgaatatgttctcatgtgtgctctgtgtcagctccagcttagt

SEQ ID NO: 29347 - DNA, 966 bp, Zea mays
  Clone ID: MRT4577_126773C.1
cctcgaagccggccggggccgagttctgtagctagagcttgtaacccgagcggaggattaggctgtctcccgcaacgttctctaaattccatcctttaaaagaatattctccagcatcggacaccatttttaaaaaaaaaaaaaaaaaaaaaaaaaaaaaaaaaaaagccttttttttttttccctacagactccactgcgcaagctccaccagttgctcttctcgaaaggcggatgcgcgccatgcgcgcggaggccaccgagagcagcgccttaaccgccggggctgcgcatttgctctgctttgcaggcctcgctgccgcccacaccctcgctggccgcggcgcgctcgtctcagaccccgcgctcgccctccgccttctcgtggtctgtgaagcgcccatagtcatcgccgtgttcagctacctccggcgtgatgccaaaagctgctcgattttcaaagctgttgcgagaggattgatctgcttgccctgggagcattccttaatgcatttggagcaatcgttcttggtgcgcctgttggaatcaaatactggatacctactatatattggtcactcctcatgtccctgttcacgtttgttccagcagcatgtgtctttggagcatccaagattgattggcaaaatgtgctttctcactccatttatttcatgccaactgatgttgagaactacatgatctctgcaccttgtcatggagctgtgctaggagcatggctcggtggttggcctatgccccttgactgggagaggccctggcaggaatggccaatctgtgtctcttatggtgccgttgctgggtatttggttggaatggcagtgtcagtggtcctagtagctgttcacaatagaagggttcgtgcaaaagctgactagcctgtggtcctgtggatgatgagtgcagctgtcctaatagctgttcacaagaacaatgtatttgctg

SEQ ID NO: 29348 - DNA, 463 bp, Zea mays
  unsure (1)..(463): unsure at all n locations
  Clone ID: MRT4577_126774C.1
cgcgtacgcgagcttggattcgtgtacatcagacgcgcctcgnccttttttttttataattatatttcaccacaatgtatatatgtacaaggtggcagaggattcatagtctgtccttattaacaccccacgtttgatgtgctccagtgcgtgctgcaacactggccacaaagaaagtacacctgttacaaagaacacatttgcatgcgaatcaagcctaccggtttacagccttaccgcccgttaacaataatatagctatccgtttatgtcaaaaagaaccgcttgcttaaatatactaggatttcttatctgaaggattgtccacagtctatgcttgaattgggttacccagcattggtgctggccttatatggcaccagggtgtgtttttttttcagcgagtgccttcaaacccattcgggcacattaaaaccaatttgggggaactttttcggttctt

SEQ ID NO: 29349 - DNA, 330 bp, Zea mays
  Clone ID: MRT4577_126776C.1
ggcatatcttcatcaccacagcaatccatcaattgtccactgcgatattaaaccaagcaacattctacttgatgaaaatatgactgcacatgttggtgactttggtttagcaagaattctaaacatggatgcatgtgaacataattctggtggaagtagctcggctggaattcgaggcacaattgggtaccttgcaccagagcatgccatgggactcagagttggtgtagaggccgaggtatacagctatggagtgctgctgatggagatacttactaaactaagaccaacagatcatatgtcttttgatggggccacaagccttgtaaa

SEQ ID NO: 29350 - DNA, 366 bp, Zea mays
  Clone ID: MRT4577_126777C.1
gggcacaaaagcatatatacattttgaacaaaagaataccataaaactgatttcaatttggttacagaagacacataggggaggaatcggcaaagattggctttacagaaagattgcccaagtataaaagacagctaacactggagaagggttgttcaaggattgaaacgggatggctgaaaaaacaaatcatccggggccagctttaggcaaacatcaagatagggcagggagaaacttgggcaattgtatgactcggtgccaccactcaactggaggagccaccagcctgggaggacaagccagcaccacctccaaatgagttgggaacaacgtaaccaactttgatcccattggactcatttg

SEQ ID NO: 29351 - DNA, 174 bp, Zea mays
  Clone ID: MRT4577_126778C.1
ccaatgctatgcagattttgttttggatccattcaattttaacatccaatatttatgtccaaatgggtcctttctgtttggtttctctgctttctgttctgttctcatcggacccacaaggcacactgttatggtgtgaatctaccttgcagggcactatttttttgaaaattg

SEQ ID NO: 29352 - DNA, 592 bp, Zea mays
  Clone ID: MRT4577_126779C.1
cctcgaggccggccgggagccattcctatactgcggcgcctactgacctcctgactacgagctgcccggagcctctgccatactccgtgctccacatagtgaaaaaactcctcttttcctcttcctctcccgtggtcaaggatgaggtcgagctcatgtgacggccaggtgagcactaccacaactccatgaaacctccagatctgtgtgtacaaggacctcgtccatcggaaacaatgcgaccagatgaacaccgccgtccccctgaaactgaaagactgcgccgtccgacgccgccaaaaaacctgctgtgcgccggctcatgcgaggcgctctatctgtgctgcgtcatacattctagatgaggacacataagacgatgaagtcgatacctgcctatgctggcgtaccacatgcgatcgacgtcgacgatgggtcaccacgaagctgacttccaacactaaggcgcatacgacacatcataaacggaggcatcatgacaatgccacggcactgagatcaagagcacacaggcagattatgagcagacggtcatcaagatgacccacaaccagaacatcgtgagacgtgc

SEQ ID NO: 29353 - DNA, 562 bp, Zea mays
  Clone ID: MRT4577_12677C.1
atccaacaggggaggatgtccaaatcttgcagggcttgaccccctccagttttttgggggaaaaaacttgggacccgggaaactggcggtttaaatcctgtattttaatcccaaaaaaaaacctccattttaccccagtttccgggaaaaataaaaggcccggtccaaccccctttggcggctaatggccggattttttttttttagaccccccgacccagatcctttaagttggccgccattgggggggggcctccttggtttaaaagaagaggggacccttttcctttttgggggtttggacggcccatttaacgccgggaacaccaaccagggttgtaacctttttaaggagggggattccagggggctttttcggggaaagatacaaaacatccatgttcgcttttttccgttgggttttaaaaaacacttttgaagttgaaaagcgctcaacagtagcttttttgttgttgatgacaaaccccgggagtttttttgaaaattcattgccatcaggcaaagatttccaggcctaaaaaaaaccagctcgttccatttt

SEQ ID NO: 29354 - DNA, 355 bp, Zea mays
  unsure (1)..(355): unsure at all n locations
  Clone ID: MRT4577_126780C.1
cctccttgtcgctcgccggttttttcacaccgcaaaccacgggatttttggcatcgcttccccctctctgttttnctttgttgttgtgtttttttctgatcatagccttttttttggtgtttttcgngggcggctgtttttttggttggttgtcaactagtgggttcttccttttttgggggggtggtgttttttcgggggagtgtctctcttgttgtcgagggttgcgctatttgtttttttttgggacttccggtggggctttggagcttttttctgcaggctttctgtggggcctttttttcgctttattttttgtttgtgggccgggggcgtcttattttttttttttggc

SEQ ID NO: 29355 - DNA, 351 bp, Zea mays
  Clone ID: MRT4577_126781C.1
caacctgcaaccataaaatgcgcgagctattattaatcattatacacctggaatttacagttgatgttcttattcaccaaagtacaacaactatcagtgcctgcgacccaccacttgacagactcaccccggatatgtccggatctgcgcaagttagcaggagaactatcttgttggcatccacatgacaccgaacgaatgaagagagcgctgggcccaacagacctagcatcataaaggtgaattttgcataaggattgggcaggccgggaccatgtttaaccggctcgcacatagccgattgatttgctgccactgagtgcaatgagctggtgcacaacaccggggtca

SEQ ID NO: 29356 - DNA, 418 bp, Zea mays
  Clone ID: MRT4577_126782C.1
ccgggatattcgcatctcgctgctctccgcctgtcgagtctcgtccacccgacatgctcctagatactgtactcgccagtacaccatgggcaaaacataacatcggaatcacggctcacggaaggatcggcaggctcgtgagccagggtcgccctacagagcgacggatgtcgagctcgacgacggcaacgacccaattcatcaccaccgactacatgatctacatgttgcagtacgacaccgtccacggcacactgaaagcacagcgacatcacacctcaagactgcaagacccttctcttgggagacaagccggacaccagttttggcatgatgaacgctgacgaagacccctggggtgaggctggcgcagagtatggaggggaatccagcggcgccgtcactggcaaggacaagg

SEQ ID NO: 29357 - DNA, 529 bp, Zea mays
  unsure (1)..(529): unsure at all n locations
  Clone ID: MRT4577_126783C.1
cctgtccgggaacccctctcgcatctcccctcgcttccccgcgacagcgacggccggtcgcttcaagtgacccaagcacctgcgcccctcctttctccttttctcccctcggcccccgtccctctcagcccctatgacctcttccgcttccccgaaccctagccccgtccccgtccccactccgatcaccaccgcgaacgggaccacctcatcaccgaaggatcagccgccgcctccgcctccgctgccgcagcagcagcagcagcaggggggcggccaggaggaggcagaggcggcggatgggggaggcgccgaggctgcggaggcgggagtattagctggtgttgcggccgaggctatggaagtggatgggggctctggcgcgggggatgcggaggcgggcggctcggtggggggaggagtaggcgctggggcgggtggaggagcgcagcaggcctcgccggcgaccgggttccggnttcggctcnngcagtccccttggagccttcgtccccggatggccgtgccc

SEQ ID NO: 29358 - DNA, 312 bp, Zea mays
  Clone ID: MRT4577_126784C.1
atttctgggcggcgcccctcatcacacagaagactttattattgtgctatccctcatattgaaccttacaggaggcaccaccaatgctgggttgctggttgactgtctgctgggttggtcctagccacgttggttgggtggctgccatcgttgcccttgggtgagggtgtcggcgctaggcgcagcgtgctggcagctccgccacctctggcgttgtatcctgggggcctacggttcgcaccagctggctgtttcgttggtcctagttggtgcttgctgctctgctccggattttccgctgctgccagttgg

SEQ ID NO: 29359 - DNA, 498 bp, Zea mays
  Clone ID: MRT4577_126785C.1
aacccaaacggccttgggggaaaataaataaacaaaaaaaacgggacctcacccaacaaaaaaaacaaaaggtttaacccggggaaggtttggggaaccgggcccattgaaacggggccccaccacttttaccacccgaggaaaattttttttagcccagtttttttgaagcccgaacgggacactttcacgcaaaagtttttgttttttatttccggggttttgttcaaaacccccccccccccccccagggggccccccttaaccggagggtactgaaaaaaaaaatcccgggtaatactgccatgtccccccgcaaaaaattaccccgccccgcgcgcaccccaatcccctgggggcggggccctggccccccccttttggggcccccggcctaacttggggggcttttggggctcctaaaaaagaaaaacctcccccttggggggcggttttgggggaccccggggggcgggggggggggcctccggtttttcc

SEQ ID NO: 29360 - DNA, 296 bp, Zea mays
  unsure (1)..(296): unsure at all n locations
  Clone ID: MRT4577_126786C.1
gaggggaaaaaagccgaaacacagcagaagggagaaaagaagagacagacacgcagacaacgggngaagagaagcggagaaaaaaaaccacgaacagcaaagaaaaggcacaagagggacaaggaaacgaatacaaccaggaggagccagaaaactatccgggatcaaaagcaacaccacacggacccggcagagaggaaccggtccctccagaactctatgggaaggtatccttcaacgaacgtcacaggagacccgaatggaccaggcgggagtgaaagaagcccgacaaccag

SEQ ID NO: 29361 - DNA, 344 bp, Zea mays
  Clone ID: MRT4577_126787C.1
ccacgcgtccggtatttagctagcgatggctggagcctgggcactggtgcattttactcgcggctggcggttcggtcctggccgcgcggccggcgtttgcaggcgggggagccgcggcggtggcggagatctgcatgaagactccgtcccccgacctgtgcaccaggacggcggggaagcacgccaacaagtacaaggtggtggacgcggtgacggtgctagagatccaccaccgccccttaaaaaaccacgtctaggcgtgtcgaaagctcaccaaggaggaggttaagacagtcgaagacgaccgacgcgcagagagcgctaaaactttgcaagacctacta

SEQ ID NO: 29362 - DNA, 1603 bp, Zea mays
  Clone ID: MRT4577_126788C.1
ctcgagccggcgggggagaccggacgcccttccctttccccttcccttcccttgcattcgcgcgttttccacctcccatcacgacctcttcctgacgtttccccaattcctccgcgctaagcagagcaacagcgatggcgacgaagtacgctgccgccgcggctgatctggtcacgggccgtccgcggaagcgggcgaggcttggctgggacgtggcgtcggctgccgagacaagatatacagaaaaatgggtgaaggtacttttggtcaagtactggaatgctgggaccgagaaagcaaagagatggtggctattaaaattgttcgctctgtaaagaaatacagtgatgcagcaatgatagaaattgatgtcctgcagaagcttgcaaaaaatgatgctgcaggcaaacattgtgttcaaatacggaactggtttgactatcgtagccatatttgtattgtctgcgagaagcttggcccaagcttatatgattttctgcagaaaaccggcttccatccattcccaattgatctaattcgccggatcggacagcaacttttggaatctgttgcattcatgcatcgtcttcagctaattcatactgatctgaaaccagagaacatcctcctcgtttcttcagattatgtcaagttacctgatcccaaggacggatcattctcaaggaaactgccaaaatcaagtgccattaaattgattgactttggaagtgcagcataccatcaccaggatcgcagttacattgtatctaccagacactatcgcgcccctgaagttattttgggtatgaatgtagtcgctgcctaattgcacacgtccttttcattacttgtggagcccagttgcttaatatttgtgttgctgttgtaaggacatggatggagctatccatgtgatatctggagtgttggttgtatacttgttgagctttgctcgggtgagacactgtttcagactcacgagaacttggaacaccttgcaatgatggatagagttctaggtcctcttccacggcacatgctggaaagagccgaccagcatgcggagaagtacgtcagaaaaggaggattgaactggccacaagcaataacaacagtagagagcgttagagctgttctcaaactgcctcgccttcagaacctggtgatgcagcatgtggatcactctgcgggggacttcattgaccttctgaagcgcctcttagcctatgagccctcgggaaggttgactgctcaagaagcgttgggccatgtcttctttaccagataccggcaataacaagtcgcctcgccatgacatcttcgatgatttgctatggcacatttatctgacgcagaattaacaaaatctagagacagttggcgagttctgagtattcagaggcaagagatacagccttgagagaattcagatggtcgttgaacagagagaacttggcgcgagtgcttgtagacatatctggtatatgtgtgtgtgcacgaagattgcggttggataccaatgtaaatgcaagtgtaactgaattaactgttacaaatttttctttataagctgcaagctcacacacgcagagttccgttgaac

SEQ ID NO: 29363 - DNA, 138 bp, Zea mays
  Clone ID: MRT4577_126789C.1
aagcacctctgcggggcacgagcaccttttgcgccgtcagcgctctcatctggtcaggtacgtgcgttgcgcgccgccttcaccggattctcaagtgcgcatggtatttcccgccgagctccgccgccggatgaggcc

SEQ ID NO: 29364 - DNA, 1037 bp, Zea mays
  Clone ID: MRT4577_12678C.1
gtcgctcgctgccgggcggacgaccccgcggtgagcatgctgctgccgggactcccggtcgccggcctcgccgtggggttctacaacgagaagtgcccgcaggcggaggacctggtgctcgccgagatgcggaccctcgtcgacaaagacgagaccatcggcccggcgctgctgcgcttcatgttccacgactgcctcgtccggggctgcgacgcgtcgatcatgctcgtctcgcggaacgggactgcggagagggacgccctcccgagctacggcctccggggatacgccgagatcgagcacatcaaggccaagctggaggacgcgtgcccgctgaccgtgtcgtgcgcggacatcatcgtcatggcggcccgggacgccgtgtacctggtaaataaaataattataagcagcctccgacataatttgttgctctccgatcggaccatatcaacctagctacacattaattgaattgaagaagcggcttctccttgttcccagagcaacgggccgcggtacgccgtggagaccggccgccgcgacggcaaggtgtcggcggagtacgacgccgacaacgacctcccgccgacctgctccaaaatcgtcgacctcaagacctacttcagcttaaggggttgggctggaaggacctcgtcgtgctgtcaggtacaatacaaccaatgagctgtccaactacgtacgtacgtacgtcctgcaagcaaagtagctagacgactgatcgatcgacgacggtggtacacacggaacaatccctgactgcatgcagtgcaggaagccacacgatcgggagggcgcagtgcaccacgttcgcgtcggaccggctgtacaactacagcggccacgtggggcaggacccgtcgctgaacaaggcgtacgcggcgcagctgcgggagatgtgcgagccggggctcgccgacgacaccaccatggtggagatggacccgcgcagcccctacaccttcgacctcagctactaccgcaacgtgcgcgccaaccggggccggacgcgtggg

SEQ ID NO: 29365 - DNA, 2024 bp, Zea mays
  Clone ID: MRT4577_126790C.1
ctcttttaggaccttgttttcttggatgctcctattttattttgcgtttctaacatctatgtggttcaaggttttcattgcatgttgacttatttttagctcccaatgatgttaatgttatgttgcatcttgacataagatcttttttaaaaaaaaaaatcgtgcatgtcgtctgtctgtttctgtattcctataaatgttcttagatcttaacatattgcacttcgtgggaatgatactgttctaatatatcatttttatgtatttttgcatgaaggtgatggaaaaaaaaaaatagaaaaaaaaaaatatagaccggacgcccttccactttccccttcccttcccttgcattcgcgcgttttccacctcccatcacgacctcttcctgacgtttccccaattcctccgcgctaagcagagcaacagcgatggcgacgaagtacgctgccgccgcggctgatctggtcacgggccgtccgcggaagcgggcgaggcttggctgggacgtggcgtcggctgccgaggctcagataggaacattttgtgggcaagaagttggtgatgtggccagcctgctattatcagcaaatccttccgaccatacttgttcgtctctgctcccgaagggtgtggctcgaaatgcttcccctccctggagagaagacgataaagatggccattatgtatttgctgttggagagaatttggcctctcgctacaagatatacagaaaaatgggtgaaggtacttttggtcaagtactggaatgctgggaccgagaaagcaaagagatggtggctattaaaattgttcgctctgtaaagaaatacagtgatgcagcaatgatagaaattgatgtcctgcagaagcttgcaaaaaatgatgctgcaggcaaacattgtgttcaaatacggaactggtttgactatcgtagccatatttgtattgtctgcgagaagcttggcccaagcttatatgattttctgcagaaaaccggcttccatccattcccaattgatctaattcgccggatcggacagcaacttttggaatctgttgcattcatgcatcgtcttcagctaattcatactgatctgaaaccagagaacatcctcctcgtttcttcagattatgtcaagttacctgatcccaaggacggatcattctcaaggaaactgccaaaatcaagtgccattaaattgattgactttggaagtgcagcataccatcaccaggatcgcagttacattgtatctaccagacactatcgcgcccctgaagttattttgggacatggatggagctatccatgtgatatctggagtgttggttgtatacttgttgagctttgctcgggtgagacactgtttcagactcacgataacttggaacaccttgcaatgatggatagagttctaggtcctcttccacggcacatgctggaaagagccgaccagcatgcggagaagtacgtcagaaaaggaggattgaactggccacaagcaataacaacagtagagagcgttagagctgttctcaaactgcctcgccttcagaacctggtgatgcagcatgtggatcactctgcgggggacttcattgaccttctgaagcgcctcttagcctatgagccctcgggaaggttgactgctcaagaagcgttgggccatgtcttctttaccagataccggcaataacaagtcgcctcgccatgacatcttcgatgattggctatggcacatttatctgacgaagaattaacaaaatctagagacagttggcgagttctgagtattcagaggcaagagatacagccttgagagaattcagatggtcgttgaacaaagagaacttggcgcgagtgcttgtagacatatctggtatatgtgtgtgtgcacgaagattgcggttggataccaatgtaaatgcaagtgtaactgaattaactgttacaaatttttctttataagctgcaagctcacacacgcagagttccgttgaacaataagcaaaaaaaaaaa

SEQ ID NO: 29366 - DNA, 316 bp, Zea mays
  unsure (1)..(316): unsure at all n locations
  Clone ID: MRT4577_126791C.1
gagaaaggctgcttccatatggacgaggattatctaggatccttccaagccatcgagcggtaccatgtactagagctaaatcgtcccnacacctacagttccacctacctagacctacacaaggactaacgcaagatgtaccttatgaagaagatccccctttgcaagcacaacgacaagttccatacgacctcttaccatgagatgtccctgatggcaaacctcagcaacccgtacatcgtcaaatacaaagacggatgggtataccaggggaccatcatctgcatcgtcacaagctactgctaaggaggggaca

SEQ ID NO: 29367 - DNA, 234 bp, Zea mays
  Clone ID: MRT4577_126792C.1
agagcaggggcttttttgtccaaactttttttcatttttttttttcctatatcttctttggggggtttaggtgccaactctattgtccatgcaatcttttccaaaagattttgtgtaacaaccgcttacttaaaaaaaattccttgaaccaagaccagatggcactcaaccgcccgaccttaaaccatcccatttcactccttccccaggaacctggacacctttccgacccgg

SEQ ID NO: 29368 - DNA, 368 bp, Zea mays
  Clone ID: MRT4577_126793C.1
gggggcaacaaaaaaccagggccctttgggcgattcaactttaaaggaagccccccccctcacttttaacaaaactggaagagggaaaaaaataggcaaaaggcccaattgaccaaccagggccggggacttaattcgaagcaaccaattgggggcccaaaacaggacctgtagtttttccaaccccaggttcgactactagcttttccggggaaaaaggttctgaaggggggacttaagctgggtttccttggcccgggccaacctttgcccttgaaacctaaggtttcgggttggcgattttcggctttgaaactatgggtctgggtaaaaccttggggggggcaaccccttgcaagggggttttc

SEQ ID NO: 29369 - DNA, 282 bp, Zea mays
  Clone ID: MRT4577_126794C.1
agagatagtagttaggcgacgccgaggaaatagtttgcgacgcaggttaaatctcggagatctacgggccgttcgttaattaccgcatacgccggggcaaggaggattagtagtaaggggatgacttcgcagggtaggaggtagcaacggagtagcaatcggacaccacctaaggccggcgcaaactctggcacaagggcgggcacggcggagcaccggtccattcggctgatgcggacgcaaacgcaaccataagcactgagtactaagaggtttatgggc

SEQ ID NO: 29370 - DNA, 334 bp, Zea mays
  Clone ID: MRT4577_126795C.1
acaagcctctagcgtaatggttaaggctttcgagtagcacctccaggtcctgggttcgatccccctcgggggcgaatttatggcttggttaaaaaaatcccctcgttgtgccccacccgctcccgggttacgtcctgcgcgccaccctccggctgggccgttgcagagtgggcggtgacggcccgctagtgatggggggccaaggtttggggattttctcggccgggaccatgagggcggtctttccctccccggccgagttttatataaacaatttttaaaaaaaagacctaaaaaaaaaaaaaattcaactacgcggtttacggaaaaaggg

SEQ ID NO: 29371 - DNA, 265 bp, Zea mays
  Clone ID: MRT4577_126796C.1
ggccggggaaatagtcagatccatgttccgtgtccccttccggtgggtccgtgaatccgctctccctcagtccttgaatcatcacctagaggtagcgtgagttgcgggagacgtagatgtgtgcttctgagtcggcatcggtggcggcaacaccggcgtctgcgacagaggggacttcgatcgcgttccacatcctggcaggagtggtagtatcctgattcaggaaggcaacatctccaacaagctggaggtgattgacttcacg

SEQ ID NO: 29372 - DNA, 773 bp, Zea mays
  Clone ID: MRT4577_126797C.1
cattgggtacctcgaggggccggccgggaaaaaaaaaaaaacgcagcagcagctaaagtcctattccggcaggaggggcagcacgcacaggcacagctagcagctgtctgctagcgcgcgagagaggagagcagcttggaaccgtacgtacgcggtgcgcccaccccaccggcggatgccatgacgacgtacagggtctgctgcttcctgcggcggttccgggcggcgtcgaacgagccgtcggaagcggtcggcgacgtgttccgggcgtacgccgacggcggcggcggcgtgctcggggaggaggcgctgcggaggttcctgcgggaggtgcagcgggagaccgacgctggcgccgacgcggcggccaaggaggtggtggcgttcgcggcggagcacaggctgctcagcaagggccgcggcctcaccgccgaggggttcctccggtggctcttcagcgacgccaacgccgccctcgatccgcgccgaggggtataccaggacatgggcttgccgctgtcgcactacttcatctacacgggccacaactcgtacctgacggggaaccagctgagcagcgggtgcagcgagaggcccattgtgaaggccctccacgacggcgtccgggtgatcgagctggacctctggcccaacgccgccaaggacgacgtggaggtcctccacggcaagtgggtgggttctgttgccgcgggaaacaaaagcccaaaacaaaactcggcccaacacgctgtatatcctgctccccgctactg

SEQ ID NO: 29373 - DNA, 410 bp, Zea mays
  Clone ID: MRT4577_126798C.1
tttgttttttgtgacaccatgttgagagaggcgagtcggccactcatatcttaagaaatgtttcacatgcaactatcaactaaaaacgggtgcaacggctctccattcagtacattcattcataaggaatggcacatgaagaaggtcgatatatgcatgcaggcgatatgcatttatttgtactgccaggaaccagattccttctgtaaatcgtcattagagccaagtttcttctctggatcatcagagtcaggtgtctcgagctgaatgacaacagtgaacccaaatgctgatcccggatcgaacgcgtactccatctacacttcagactgggaggtctggatctcagggttcaccttcaggtttcccttattgacaaagtcttcaatggtgacgctcagcatttcctg

SEQ ID NO: 29374 - DNA, 182 bp, Zea mays
  Clone ID: MRT4577_126799C.1
tgcaattctacgacaatgccgaatcttagttcttgatgaggccacggcatgtatcgacaacgctattgatgctatcgttcagacgacgttcaggacagcgtttacacattgcactgtcatcactgtcgcacactcgaatacgccacgttatggaatgcgatatgggacttgcaataagtgac

SEQ ID NO: 29375 - DNA, 280 bp, Zea mays
  Clone ID: MRT4577_12679C.1
gccatcgcatctggctcaccatcgtctccccgtcgctgatcatttttggctagctctcaggactcgccatctcccagtcgacgcgatctcccagtcgacgcgctctcctgcccttctgctttctgccgcactctctcgctttggttcccatggctccccgggcaagtttgttgtctcgctgtgatgagtgagctcttcccttacgccaccacctttccattaccgttgcttcttgcttgtgtcgtccctatatcttcaccacagtgacatagggaatatg

SEQ ID NO: 29376 - DNA, 368 bp, Zea mays
  Clone ID: MRT4577_1267C.1
tcgttctgaaaagatagtctcaatgaggagacctgctaatggcaagcgcatacgaggaatgctgccgaatgatgctacaaaacggtgctcaatctgatagctagattagccattcattatagttctatagccctgtgattcacaatatcacgtacatgcgttgtcaggacagagcctgggaacgacacatcgtacttatagatctacactagagatacttgcagacacgattgagatgagcgaaaacatggacaagaagagctgtctggactgatgcaggctaggaccttcaatgcctatgctcgatgcagatcgcgtactaaggtgacaatgtgtgcaggggaatacactatcgtggcagcatttcg

SEQ ID NO: 29377 - DNA, 256 bp, Zea mays
  Clone ID: MRT4577_126800C.1
gggtacctcgaggccggccgggcccgaagtccgacatactagaagcgtaaccctaagtctcggaccccaaccctcgaggaaggcgaccggagatggcggcgtcgtcggcggtggagaagctcaaggtcctctgggactcgcaggtcaacgacgaggagcagtggtccgctcaaaaactgagcactccatccactagacactactttactcaaagtctaaagctagctcttgctttgctcaccaaataaaccgcacc

SEQ ID NO: 29378 - DNA, 721 bp, Zea mays
  unsure (1)..(721): unsure at all n locations
  Clone ID: MRT4577_126801C.1
ttgncaaattctctcctcgccctcgcctccacttttgagccacagacccgagcgatcgtgccccggcccccgatcctgattcccacaaatttccgccatggcgatccgcccggactgatgcccgattctccatctgacgatcctcgattggggggaattctggtggggttcgtgtgggcgcgtagggcccctgacgacctggcctgacgcatcagcggcgagccatggctccggcttccgttccagctctacctacagccatggatactaaggacgagggcgacggtggctccaagaaccaaaacagcgtggtggtggtgaaatccgaggttgtctgcacgaatggtggccctctggtggtcgggactgaacttgtgaaatacgagggaggtgataccactgaatgctcgagctcgtttggtgacacctgctctggatttgaaggtgaggcagacaatggtgaaccagaagtgaattctagcctgtctgctcatgccaatggtgttggcccctcaaaaccccctagaaggaaaaaggtgatggctgagtggagcaattctgttcgtccaattcagtggagatgccactggttagagttgcgtatgagggagctttcatcttaaatatcgaagtatgacaaggagcttgctctaatcaagaaacagaatgaattacacaggcagaaagcaaagcaaatggtactatgtcagaatcgatgcag

SEQ ID NO: 29379 - DNA, 351 bp, Zea mays
  Clone ID: MRT4577_126802C.1
acgcatacgcctatctttaccaaagttgacgactgatgacactaaacaaacagtaggggggtctaagtttagggcctgggccgctactactactacaccacatgaaagccctaatacgcaaacaaagcatgatcctcaatcgaaatggctcgaaactactaatgcatgtgcttatcatatcactgacacaaaaagactgacatgaggcgctcgagccttttatgtcctcccatcaacaataagcccatgctgatgatacattaacgcaagcatctccactccatggaaaatttacaccgaccaatgccgacagggcgcgatgatactgttctaagcacacactttaaatgg

SEQ ID NO: 29380 - DNA, 613 bp, Zea mays
  Clone ID: MRT4577_126803C.1
aattcggcacgaggcttttgagccaagacccgagcgatcgtgccccggccccccatcctgattcccacaaactaccgccatggcgatccgtccggactgatgcccgattctccatctgacgaccctcgaattgatcttttttcttgcgaagtcttccaccactctagagcgctcctttgattctgttctacccctgcgaatttctttgctgaacgtcatctgtccgcccgcatggtcttcttctggtaggaagatcggggggaattctggcggggttcgagtgggcgcgtacggcccctgacaacctggcctgacacatcaacggcgagccatggctccggcttccgttacagctctacctacagccatggatactaatgacgaggtcgacatgtggctccaacaaccaaaacagcgtgctggaggtgaaatccgatgatgtctgcacgaatggtggacctctactggtcgacactgaacttgtgaaatacgagggaggtgataccactgaatgctcgacctcgtttggtgacacctgcatctggattagaaggtgaggcagacaatggtcaaccagaacagaattctagcctgtatgctcatgccaatggtg

SEQ ID NO: 29381 - DNA, 763 bp, Zea mays
  unsure (1)..(763): unsure at all n locations
  Clone ID: MRT4577_126804C.1
gggcggcacgaaggcagtgttcgcctctgtctaccaccttcggtccaatggcgtagtcgaccgtgccaacggcaagatcttcagcgctatcaagaaaaggctacttgatgacaaaaaggggaaatggccagacgaactacccgaagtcatatgggcgttgaacacgacagagtccagagcaaccgggttcacaccctttcgtttgatgtacggatccgaagcaatgacatcgcaagagctaaagcacggatccccacgaacaagcccaatagccatccctgacgtcgacgagccaacctccaaagatcttatcgacggagaccgtgtcctcgctctggaagccctgaacaaatatcaagcacagactaaggcatggcgcgacaacaaagtcatcccaagagagttcaaagaaggagacttagtactcacaagaaccatcagaacagagtctcggggcaggcttgaacccaagtgggaagggccctacatcgttaaaaccaaaacatcgccaaatgcttacaggctcacctcatcatccgatgaagacctagagcattcgtggaacatagataacatgcgcaaattcttcgtctaagacccaaggcccgattgcctttgtaattcttcaaacaatgtcaatcaggcccgcactctnttcctcccggnggtgaggtttttagcgaggcgaagccatgtattataatactgcaaagcccccaaacaaaagcaaatccactggcatcatgaccacgagtgtcgaaaa

SEQ ID NO: 29382 - DNA, 246 bp, Zea mays
  Clone ID: MRT4577_126805C.1
caaaagaatgttgatgaaaaggttaaggaagctggaagttctatgagaaagcgtgctaagttgatatcaactgtttccaagaaagatttcatcagtgttttgagagggatggatggaagtacaaatgagactgcttcaagcaggaagaaaccaaaagccaaacagactgaagtgacatcagatagaaggcccaggttggacgatcctacgtgatgatttcatgatgggagcatctatgaaagactg

SEQ ID NO: 29383 - DNA, 258 bp, Zea mays
  Clone ID: MRT4577_126806C.1
ccgctcggcgcctctccctgctccccaagtctcgtgccttgccgagctcgccctccactcggctcatggcgctcggcctccagctcggccctaccctctgctcggcgcccgggccgctcctctcccttccccgcgagctcctccctgtttccaagtcgtagcgcgtccctggcaccagcttggagctcgcccggccgcgtccttgaccttgctccctgttgcgctcgctggccgactgctcgacccgagcagcggctc

SEQ ID NO: 29384 - DNA, 509 bp, Zea mays
  Clone ID: MRT4577_126807C.1
gatctataactagtttgacacaaggctagacccgagtttgcttctccgtatccacggctaaaacaagcaaagcctcaagggcttcttatgtacattaagcatgtagctcgtcttcctcttacatcattgcgataggttgctgaaactcatcgcgccctgaataaagagtccgattagtgcacctattcctactgtggacaagctgtgtcgcataagtaattagctctattacatgtcatactatgaacatttaatgggcgctcgacatttctagataccttcattaaagcattctgaatagctaccatccaaggcgctcattgactgggtttaccagcaatccgcgacagctgacatgcaacatcacgaaccaaggtcccattgatagcatggctaacagttttggcattatcctagcagaagcttgatgttccgatatcttcttgcagcatgaacttggagtagtcctcatgggtgtacacaacacttgtctttgccccgaactccac

SEQ ID NO: 29385 - DNA, 276 bp, Zea mays
  Clone ID: MRT4577_126808C.1
gggaggcggagaaggaggcccttgcgcgcgcccgccggccgggtcaggagccggaggaaccaccacccatggggggcgtgcgcgaacctggggtgcgccgtaagaggaagaaggttgtggtggactacttggtgaagttccgatgggtggggggggatcttggtggggcttgctatttgagctgtggtgtgcttgaggatgttcctgggcggcatgtggggcgccatgaaggcggagaagaagcgccggaagcagggcggcgagaacgggcagaag

SEQ ID NO: 29386 - DNA, 650 bp, Zea mays
  Clone ID: MRT4577_126809C.1
agacccctcctcatcgatctacaccggacgatcgggacgagcgaagcgatagggagtgaggccagactcgcattccactcgctcgttgtccgctgccttcgttttgctcgttgcgctcgtccgtctatccctcccctcacgctcatccgttgcctgccccctgccgcgcgtaccgcgcgcgtcgaccgtccgcccaaagcatggcccaacgtccatcatcctttggccacttcctgaaggacgccgcgcctcggtgcaacaccctttatacggtgcgaatcgatcataggctcgaagacagcctgcctgagcgtacatagtatcggacagacttagcatcagcagagatgcttccgcgggactcacttcacgctatatctgctgacctagcgtacgaatactctgcagacggcctctccgacatcgaccggcgaaacacgatgtacaacgtggagtgcgaccatgttgaatacgtcctatcaaggatcagctgctatatctcatggctgctatcctccacccccgtgacaattgagatgatgaatgaaaggtacaaccatgagcggaaactgagcatcatggaagaagtgggaagctgaaagaatactgctggaggcgaaatccaaccccacgctagctgcgatgaacaa

SEQ ID NO: 29387 - DNA, 259 bp, Zea mays
  Clone ID: MRT4577_12680C.1
gactaacagctacacgggactggacgcgccgacgacgaacgggataacaaagcaaagcacagcgggttcttgattgacgaagggccctcacctgggctagacggcctgaaatcctacggcgaccctgtccttcccgcagccgccgcagatgttccccatcccgggttctctctaggttctctctcttcaccaggaggaagtcgggaagcgcccagaacaccgcgtaggagagggagatggcgaagtcaaggagaggggg

SEQ ID NO: 29388 - DNA, 390 bp, Zea mays
  Clone ID: MRT4577_126810C.1
ctgactcgttcttccacgcgttcgctcacgcttccggatccctgccggtgctgtggccatggcctaaaacttccaactgcagagcctgcacggcaagtcccgcgtacgcgtctacaccgtctggcgccgcccggccgcggccgtgggctacgctatcgctaactggaacgtcaacgacagtatcgtctacgactggctaacctgatacacctacagcgacaactacatgcaatttcaccacagattccatcatcaacaccgtgcatgtcaacagccaaagagtgcacggaagtggtgtccatggctgaattcgccacgattcttggaaggcatttcaccatcttgtaccctgacgtctcagaagccacggtgactatcgcagagcgccca

SEQ ID NO: 29389 - DNA, 400 bp, Zea mays
  Clone ID: MRT4577_126811C.1
gactctttccattgcatattctctatgactcgatcttcacttcactttattgacaccgtatagaccatcaacctcattttctggcgtctgtagtctacccaagctaactgactaaagccaacaacgtactagctcccaaactctaacgttactaatacactgctgtatgagataatgacctgaccacctatcctctatattaactcatcttgtagatacgcatagctatactttaaagaaagaacgagaaagtttacctccaccagcgcatactactaagaccccccttaactaccagtcactgcacaatccgtgcatgtattcctatactcgaatcaccctgaggacctgatcctgcggtctctctaacagtcgaagtctgtagatcttccttacacta

SEQ ID NO: 29390 - DNA, 292 bp, Zea mays
  Clone ID: MRT4577_126812C.1
cccacgcgtgcggaccaccccgttcacctgcattgttaaaagtatagatgcctatgacgaaggtgcttactcatgaatcttaaggccaacactttatgttgtccagtcaaaatgtattacatgacagtgccaactcggatagcttgtcgtctggacgcactaaatggctcaaacaagcgagagatgactgcattaagacttggcatgagcaagcggccaagccaagacactgaccgacgtgttgaggttgatttaattatggggtattgaagatgccattcatacttgaata

SEQ ID NO: 29391 - DNA, 1009 bp, Zea mays
  Clone ID: MRT4577_126813C.1
ccgcgccacgacggcggggttctggaaggcgactgggcgagacaaggccatcttcctcggcaacgcctccaggaggatcggcttgaggaagaccctggtgttctacatcggcagggcgccacacggcaagaagactgactggatcatgcacgagtaccgcctggaccaagagaacgttgagattcaggaagatggttgggtggtgtgtagggttttcaagaagaagagctatcaccagagaggcctcaatccggctgaaatggccgccgcactggacgacgacgagctccagcctttccctgttcctatccccggcagctccctgcagccaacagagcacaagaccaaccctactcacctcatgcaatatgactatccttccttcgacccttccatgcagctcccacagctgatgagcgatgaccaggaacaggaacagcccgtgcggccaaccctcctccccggccatcccggcgttgctatggcctccatgagctcactcaacattgagtgctcgcagaacctgacgaagctcacatctaacggcagcgacgagatgctccacgtcggccacggcggtggggctggaggtggtgtagtcgtcgaccgcttcgctggcacgacgacagattggtcgatcctagacaagctcctcgcctcgcaccagaacctcgaccggctcttccacggcaaggtcgtcaccacggcatctgcctccccaatggcggtaccggtataccatcagcagctcatggaactcggtggctcgtcgtcgtccttgcagaggcttccactgcagtacctcggcggcgagacggccgatctcctcaggtaccaccccaagtaattggatcgacctcaagtttagctacctctcttgttgagcagtgaccagatcagggtttttggttgactactagatcgatcgactgcttaattaattcggtctactttgtatggagagtttagggctcctaaatgtatatatatggtgcaactgttttggggc

SEQ ID NO: 29392 - DNA, 1601 bp, Zea mays
  unsure (1)..(1601): unsure at all n locations
  Clone ID: MRT4577_126814C.1
gaaaaaaaaaaaaaaaaaaaacaaagaaagtcgcggcggagcaatgtgctgcaacgcgaaggtctcgccactgccggttgagatggacacctccgcctccaaagtgctcaccaacgacgatctccttcacgacatccttctccgcctaggatgcccgagctgcctcgtcagtgccgcgctcaccagcaagtgctggctgcgtggcgcctccgatcaggtcttcgcgcgcgacttctgcgcggaccaccagccgcgcctacttgggatctacgtctccagcggcggcatctctgggtcggagttcatcccattcaggcaacctgctggtggctctaggccggaggtgagtactgtcctcaaccatgccgatttcggtttgggcgacctgccggcgccgagcgtttgggactgccggaacggcatggtcctcttccagttcggtggcgagacctttaaccccgctggtctcgctgcgcgttccccgctgctgtatcctaacatgcacgagagcgtggtgctcccgccgtcgccgcagccgtcctacttcccggagtaccctcacgcgatgctcctccctaccgacaaaggcgacgacgccttgtgctaccgcgtcgacgtccgcatctgggagtcgcacaacaaggccgcggcactggtgtgggtcctgcggtccggctcctggcacatccgctgcatagccgcgggtgttctcgccaagtcgccggcccagatcctgccgactaccgtgctcgacggcggcaagatctacatggcgacccaggcggggtacatcctgggactggacctcgccacggcgagattcttcatcgtcgatctccctcggggtgtggagcttgaccagtacccaggcaaccttgtccactgccgcggggacgactctgtcctctacctcttccatgtggacggggacaacaggctcaacgtctggctccgcaggatggaagacgaccagaaggggcacggcggccctggtgctgctggcggcagcgccggcgccaccaaggggtgggtgctcagggacaccatttccgtgcgtgagacctgtggccatctcgtggagcagggttgggagaaggcaggcgacggngacgaggacgctgctgcagtgatgatagtgggcgccggggacaacgccgagttcgtgttcttggagctcggtgtgactggcgtcgttgcgtacatgcacgtcaagaccagagaggtgaagcaggtgtaccagaggcagccagacgacgaccacttcatcagtgttcgtccgttcatgctcgtcaagcctcctgttttcccagtactggaggatgctcatgaaggcgaggccgcagccgcactgcatcaggagtaatcatcccagcagtgccagcagtatcttctctagtatttatttacttatattaaactgcataaggtttgttaaatgttatagattccaggagacagaaatcgagcgttcgatcggcgcgtcctgtgatttctgtcattctgagctatgaacatgtttgctttaatcatgttatcggattcagatgcattaattaaaaaaaaaaaaaaaaaaaagggcggcgcaccggtaataaggacgg

SEQ ID NO: 29393 - DNA, 407 bp, Zea mays
  Clone ID: MRT4577_126815C.1
atacgtcaaatattctttcttatattaataatagtcatatttgggggcgggagaacccttcatttcgaaattggaagtggttctcttttaatggacaaaaataaagaaaccgccacccatggcattatttttaaacaatcgggaaaacctggggattattaccatcggggacaaagggcatttaggcgttccagtccagaatttttttcccgcccccctttgtgccccagcgtcattaatcctccgtcctcacccttaaataacgacacaaattttgaaaaaatttttcagatttggggccacaattttttttttttatccgcccttattttggaagtgaaccaccgctcttaaccccgccttaacgaaaaaggacttttctataaacggccccaaacggtggtccc

SEQ ID NO: 29394 - DNA, 109 bp, Zea mays
  Clone ID: MRT4577_126816C.1
gagctgcgacagacatttgccaggtacggccaatccatgatctaagtcagggaacgacttattatgtctctccatgttgaagtgcactgctccatagatgaatgcctag

SEQ ID NO: 29395 - DNA, 355 bp, Zea mays
  Clone ID: MRT4577_126817C.1
gggtgtgtttaaacacacacggcgtggacaccctgccaacagatcaacgtcagctactcaattgactccacgaggagcacgtaggagcaccaaccacctgcacgaagctccacgactgtccacacaccatggacacaacagatgctcacactacacacgtctacatagcatccacgcatgtaccaggtgacgggttcagtctctaacgacaccccttgaacaaagagccggtggaacactcacaggagcggcgactgtcaagcatcaccggcgagtaaagccaaatcctttttccgattgtggcacccccatgccaagtggctgcaaatgccgcactcgaagcacctgctattcg

SEQ ID NO: 29396 - DNA, 154 bp, Zea mays
  Clone ID: MRT4577_126818C.1
gtggacgccacccttccgaaaaaagtgttggggccgccgttctggaggattaaaaaagaaggttccaccaaccgggggtggcaagaagccgccaacccctttggccacccccggaattgccccgaaccacccaaaaaactcgggggttggggcc

SEQ ID NO: 29397 - DNA, 473 bp, Zea mays
  Clone ID: MRT4577_126819C.1
cggacgcgtgggccgctgttgtccttgtcgaaatactggaatgctgtgtaaaggtgctcttctctatccagtttgttcatatgcactgttgcggtgacgaattcgtcgtagtcaattaacccgttgccgtcagcgtcagcttggaaatgtataaagcatttcagcagggatgttttcagattacttcttcattttgaaaagaatcacaattccttttttttaaaagattgtactctgaaaactcactgcttccaaaaaaaaaaaaaaaaaagataaaattaaagaataatcgttaattttatatttttttttaaagatattattaaaataattataaaaaaaaataaaagagggggggcctttttaaaggacccaattttaacaaccggggcttccagagtattatctttttttttgggtcccctaaattagaataacgggccggggttttaacacggcgaagatggaaaaac

SEQ ID NO: 29398 - DNA, 288 bp, Zea mays
  Clone ID: MRT4577_12681C.1
aaaacagccatacagggtttccgttccgttccgacaaaacgtggaattttttgaaacagaacagttctttcgggggagcccgggggggtttacaggtttcctcccggtttttttcccaatcatttgaatggttaaggggggtttttactggcttcatgggggaacaaaaaaaaaaacaactttcacaggggtgattttgctgacccaacagggttgaagcttgggatcccggggatttttttggcagcccccaggcttttaatggcataggggcccccgtcccaaaaa

SEQ ID NO: 29399 - DNA, 363 bp, Zea mays
  Clone ID: MRT4577_126820C.1
atgtgatgtggttgtggtatgggtatacatttttttttttgtctagggggaaaccaagaagcttcataatcaagcaaagtaattaggcataatgttttcgctccaacgcaataaaaccataatgggggaagaaagaacattaacctccactccaagatagaacgaccaaggtggaaggtgcgcggggcccaccaaatgaccaaaccctaacaaatttttttttaccttcaccttttttatgcttgaggcgacccccggaaattccttccttttgctggggggcgcatctcaaatggttttttctctttactcccaatgcaacaaggtatcggcggccgtggccccgaaaactcaatggcggct

SEQ ID NO: 29400 - DNA, 207 bp, Zea mays
  Clone ID: MRT4577_126821C.1
gggcgcggggggagactacgtacaccggacacggaccaacagggtgggcgagggctaggaggctacaagaacacagggaggagaagaatttcttaccaccacaccacggacggaccaggtactggggtacaaatcggcaaggcctttatttatctaccatggttcgatggctttcatcttggcttggtccgggggtgggcaccgatc

SEQ ID NO: 29401 - DNA, 1371 bp, Zea mays
  Clone ID: MRT4577_126822C.1
gcacgaggcagatagtctcaagtccgcttcctgtgctggtccgccgtcgctctctgttcgccgtccgccgtgccgtccatccgccccgctccacgcagcttgggaataacggatcgccgctcgctatccctcgacctcggtagaaagttccaaacgaccacgacgtcctcttggtctcccgctgtcatcagtccgcaattccgcatttctattgtcctttttccgtcgcatccgtttcgtctctttgctcgcatctggcctcaagcccctcaggcctcagctcaccaccacgaaccaaccgacagaaagagggacgaatggcgagctctcagtgctgcgataacccgccggccctgaacccggcctgcggggagggcaaggtcgtcgacagcttcggcgggctcaaggcctacgtcgccggccccgaggactccaaggccgccgtcgtcctcgttgccgacgtcttcggattcgaagcgccgattctgaggaacatagccgacaaagttgcttcgtcagggtactttgttgtggtaccagatttctttcatggggatccttatgtacctgagaatgctgagaagctcatacctgtgtggctgaagtcacatactccggaaaaagggtttgaagaggcaaaaccagttattgcggctctaaaggagaagggagtgtctgccgttggagctgcagggtattgctggggtgcaaaggtcgttgtggagttggcaaaagcaaatgagctcctcaaggctgctgtactgttgcacccttcttttgttaccgtctacgatatcaaagaggtcaaatgctcaatctctatacttggagctgagatggatgtgaggtccccaccagagttagtcaagcaattcgagcaagccctttctgtgaactcaggggttggtcacttcgtcaaggtcttccctggcgtggcgcatgggtggagcgtgagatacagcctcgatgatgcagctgccgtgaagagcgctgaggaagcctttgcggacatgctcgactggttcaacaagaacctaaaatgaactctgcagttgccatcatgccttgtaataataatgcgtattccattgtcctggaatcgggtctgctgtggtagggctgccattcagagttgaacaaatcatttagaaatcattatgttgctcggcaacagattaagaccctatattgtacaactcaacttcactagtaaatctttttttttagattctagctttatgagaatctttcttagtgaagctgagtcattttcatgtccccatttggcaaaataacatcacataatgaagcgaaagaattaaataactagaaaaaaaaaaaaaaaaaaaaaaaaaaaaaaaaaaaaaaaaa

SEQ ID NO: 29402 - DNA, 255 bp, Zea mays
  unsure (1)..(255): unsure at all n locations
  Clone ID: MRT4577_126823C.1
nataatnttttttctatttatttttttctttgtgggttttttttttttttttttcacccataaaacaaaaggtaattttggttggaaataaaacgatccatccgggtacaaaactgcaattaaggtcctcccatttaacatattttttaaaaaacaaaaaacctgaaacctttttacatcccaaaacccaaggggcgatttgagacgggcctaaaagcccgtaaccgaacaactgttttccccctgagcgaaacg

SEQ ID NO: 29403 - DNA, 1151 bp, Zea mays
  Clone ID: MRT4577_126824C.1
gacccccgggttcggccgggctcggtccgcatttccttgtgctttctccgttgcatgcagcctcgcgtctcttctcgcatctagcctccgccctcagctcaccaccacgacccgagggaaagggagaggggagtaggggacgaatggcgagctctcagtgctgcgataacccgccagccctgaacccggcctgcgggaagggcaaggtcgtcgacagcttcggcgggctcaaggcctacgtcgccggccccgaggactccaaggccgccgtcgtcctcgttgccgacgtcttcggattcgaagcgccgattctgaggaacatagccgacaaagttgcttcgtcagggtactttgttgtggtaccagatttctttcatggggatccttatgtacctgagaatgctgagaagctcatacctgtgtggctgaagtcacatactccggaaaaagggtttgaagaggcaaaaccagttattgcggctctaaaggagaagggagtgtctgccgttggagctgcagggtattgctggggtgcaaaggtcgttgtggagttggcaaaagcaaatgagctcctccaggctgctgtactgttgcacccttcttttgttaccgttgacgatatcaaggaaatcaaatgctcaatttctatcctcggagctgagattgacaaaatgtccccaccggagctaatcaagcagttcgagcaggtcctttctttgaactcaggggttggccacttcgtcaagatcttccctggtgtggcgcatggatggagcgtgagatacaaccacgacgacgcagctgccgtgaagagtgctgaggaagcctttgcggacatgctcgactggttcaacaagaatctgaaataaactctgcaattgcatcctgccttgtaataatgcgtgttccagtgccctgggatcgaatctgctgtgtttgggcttttgcatggtcaggctattcagagttgtcatggacttagggttgtgttagtagattggttgcgctgaatctataataaaaacgaggtaaactaggacaatgatgatgtggccgtgtgtatttaatgtattctgttcacaattaaaaaaaaaaaaaaaaaaaaaaaaaaaaaaaaaaaaaagaaagctataatacagtatagataaaaa

SEQ ID NO: 29404 - DNA, 1360 bp, Zea mays
  Clone ID: MRT4577_126825C.1
atatagtctcaagtccgcttcctgtgctggtccgccgtcgctctctgttcgccgtccgccgtgccgtccatccgccccgctccacgcagcttgggaataacggatcgccgctcgctatccctcgacctcggtagaaagttccaaacgaccacgacgtcctcttggtctcccgctgtcatcagtccgcaattccgcatttctattgtcctttttccgtcgcatccgtttcgtctctttgctcgcatctggcctcaagcccctcaggcctcagctcaccaccacgaaccaaccgacagaaagagggacgaatggcgagctctcagtgctgcgataacccgccggccctgaacccggcctgcggggagggcaaggtcgtcgacagcttcggcgggctcaaggcctacgtcgccggccccgaggactccaaggccgccgtcgtcctcgtcgccgacgtcttcggattcgaagcgccgattatgaggaagatagccgacaaggttgcttcgtcagggtactttgttgtggtaccagatttgtttcatggggatccttatgcacctgagaatgttgagaagccctttcctgtgtggataaagtcacatactccggaaaaagggtttgaagagacaaaacaagttattggggctctaaaggagaagggagtgtctgctgttggagctgcagggtattgctggggtgcaaaggttgttgtggagttggcaaaagctcatgagatccaggctgctgtgctgttgcacccttcttttgttaccgttgacgatatcaaagaggtcaagtgcgcaatttctatcctcggagctgagattgacaaaatgtccccaccggagctaatcaagcagttcgagcaggtcctttctttgaactcaggggttggccacttcgtcaagatcttccctggtgtggcgcatggatggagcgtgagatacaaccacgacgacgcagctgccgtgaagagtgctgaggaagcctttgcggacatgctcgactggttcaacaagaatctgaaataaactctgcaattgcatcctgccttgtaataatgcgtgttccagtgccctgggatcgaatctgctgtgtttgggcttttgcatggtcaggctattcagagttgtcatggacttagggttgtgttagtagattggttgcgctgaatctataataaaaacgaggtaaactaggacaatgatgatgtggccgtgtgtatttaatgtattctgttcacaattatgtttcgtgctctttttttttactccaattctctcctaccatttttttaaaaaaaaaaaaaaaaaggcccctaacctgggatatttgagtttatttacatcaatcaccctct

SEQ ID NO: 29405 - DNA, 306 bp, Zea mays
  Clone ID: MRT4577_126826C.1
tcggttacccaacagtggcattctcgctgaccaaagggtcgccggcaaaggcgtccccatcggcgggatcgaccggcttagcttaaaggcggggatgttccacgtggaataccggccgtggcaggaagaacactacccgctgatttaccaactttgggccgggcttcaacagcacctggccgagggggaactgcatatgtacgtggagaacctgctggcgcaacaagaacaaaatgttggcattaaagaaggcgccattaaaggccaactttttcaccttattttctgcgtcttgcggaacccccc

SEQ ID NO: 29406 - DNA, 1137 bp, Zea mays
  Clone ID: MRT4577_126827C.1
cgccgtcgaccggccggccactcgctatcactctacctcgctagaaagttccaaacgactacggcatcctctgactcccccgctctcggtccgcatttccattgtgctttctccgttgcatgcagcctcgcgtctcttctcgcatctagcctccgccctcagctcaccaccacgagtccacgacccgagggaaagggagaggggacgaatggcgagctctcagtgctgcgataacccgccagccctgaacccggcctgcgggaagggcaaggtcgtcgacagcttcggcgggctcaaggcctacgtcgccggccccgaggactccaaggccgccgtcgtcctcgttgccgacgtcttcggattcgaagcgccgattctgaggaacatagccgacaaagttgcttcgtcagggtactttgttgtggtaccagatttctttcatggggatccttatgtacctgagaatgctgagaagctcatacctgtgtggctgaagtcacatactccggaaaaagggtttgaagaggcaaaaccagttatcgcggctctaaaggagaagggagtgtctgccgttggagctgcagggtattgctggggtgcaaaggtcgttgtggagttggcaaaagcaaatgagctcctccaggctgctgtactattttttttttccaatataacaccagaggtcaaatgctcaatctctatacttggagctgagatggatgtgaggtccccaccagagttagtcaagcaattcgagcaagccctttctgtgaactcaggggttggtcacttcgtcaaggtcttccctggcgtggcgcatgggtggagcgtgagatacagcctcgatgatgcagctgccgtgaagagcgctgaggaagcctttgcggacatgctcgactggttcaacaagaacctaaaatgaactctgcagttgccatcatgccttgtaataataatgcgtattccattgtcctggaatcgggtctgctgtggtagggctgccattcagagttgaacaaatcatttagaaatcattatgttgctcggcaacagattaagaccctatattgtacaactcaacttcactagtaaggccccgtttcaatctcataaaaaaaaaaaaaaaaaaaaaaaaaa

SEQ ID NO: 29407 - DNA, 306 bp, Zea mays
  Clone ID: MRT4577_126828C.1
aaaccatcacagcacatcatatacaccaactacctctaactgtgatcaaccaagtagctcttgcaaacctttctccctactctcaacaacaacaattgcttccatttaaccaactatctacattgaaccgcgctgcttattttcagcaacatttattaccattcatgcacctatctatttcctactctcaacaacaacaactacttccatttaaccaattagtcgcactgaaccctgctccttattttcttcatctaatactaataccatttatgcagctaacttaaacaagccttgcttactttt

SEQ ID NO: 29408 - DNA, 406 bp, Zea mays
  Clone ID: MRT4577_126829C.1
aagagctattacgcggcatgcagcgcgcgcgcatgctcggagtcctctagagagggcgcgctcttttttttttttttggtcaaaacaaagacatgacactgggggttcttgatcatacatcacccaaaccgcccactggacatgggctgcctgtgtcgccaccgcttgacccaggctcataagaccactctggcgcctaccatgggtcataggcgggaccacacacccacatatgcaacagctggaccacccaagggcgaaaccagctaggttacctatccattatagcacgacgtatggatgaacctgcacaacagcgaggggcgaaccgggatagatacagtacatggccccgggggactcctactgatcagcatggatccgtgagcaacccctccatggatgg

SEQ ID NO: 29409 - DNA, 325 bp, Zea mays
  Clone ID: MRT4577_12682C.1
cccccgggggccttttttttttttttttgcattccgatcacacttctatgccaccataacccacggggccccagggcattgaagagatccacgactcggtctcaagggatccgacctcacacacttcttcctagcttatacggaacgccctagtagcacaatcttgaggggggcgaggggaccccgaaacataagctaggcagactccaattcttggcacaactctacctaaacagtactgcccagtatagcccttgtaactatgaactggagtgtccagggaacctacttgcgagaccctgaccacgtacaaacccaaagagag

SEQ ID NO: 29410 - DNA, 643 bp, Zea mays
  Clone ID: MRT4577_126830C.1
agtcgcaggtcgcccacgttccccttctcctccccactcgccgcacgactgcaccgagacgagaggggaatggcgatggcggcggcgaggagagccctcctgaaccacctccgcgtgccggtggcgcgccccgcggtcgcagcggcagcgggaagcgtccccgtcgccaggctcctgtcttccacctcggaggtggagaaggggtcgttcctcgacaagggcgaggtcgccgaccgcgtcgtctccgtcatcaagaacttccagaagatcgagccctccaaggtgacgcctaatgcgcatttccagaaggacctcgggctggacagcctggacaccgtcgagatcgtcatggcctttgaggaagaatttagcttcgagatccccgacaatgaggcagagaagatcgattccatcaagtcggcagttgacttcatcgcctcgcatcctcaagcaaagtaagatttgcttgcagcggtttcttggttcgcccctttgacacgcattgtttccagaacgaacgctccccgaaaaggacctgtcttttcccagtaggtgaatgatcctagtttgctccgttgattattgtgttctccgatagcaagtctttcttctctccctccatctgttgcaataaataatgata

SEQ ID NO: 29411 - DNA, 373 bp, Zea mays
  Clone ID: MRT4577_126831C.1
cctcgtcggacttgatttctttgttcgcaaaaaaggaacgcggggggaacttccaccccccccgagaattttttatcgaggcacaatgggttttttaggaagaaggggctgaaactgtaaaaaaaaggggggagggtcgggttgacaaccaagagaaggatggtcccccgctgcaaaaaaagaaagaacgggagggaagcaacgcccggggggaggttgaaggtcattttttcagggggcaaaagaaacatctatgcctgctgggggggggaatcccaacctttatgtgattggggggggggggagcaatctttctcttgggggaagaagtcaccataccaccgatttgtaaggaagaacgggaggaagttga

SEQ ID NO: 29412 - DNA, 332 bp, Zea mays
  Clone ID: MRT4577_126832C.1
tcagtaagtattcactcgcctcttgcctttttttttttttttttttttttttttttgttctgaaggctgtgatttcaatagagggaaggtgcttggaggggacactcttcttccccaagaagaacaagaaattttgcatatggtacacacccggcctggaagaaacaaatccagaacttcaaatggacttggtgttggccaacatttccaccccgaaggacagcgatgagaaaaatgccctagaaaccatacaaaagacttcccataagctcccaattgtgcccagaagcgttttagcaatcatacattgtgaaccatagcctaaagccctg

SEQ ID NO: 29413 - DNA, 337 bp, Zea mays
  Clone ID: MRT4577_126833C.1
ctgacgcgtgcgcccgtagctctagactatgtagaccatgtgccatatactggagtcctgggtgcgaatcccgtggcaattgatgacctggctggacgagcggattgaagacagaagctgggaggcggcaggccgtgactgctgtatactggagcgcgtgtggaagctgctcgcggacgaagagcacctacaccagctgatagacccagactagctactacggctcaagaaccagatagccgtaccatcaccgctgtgacgtgagttcgcgttattatgtgttccatacacagcgcttctacacgttggtagctccactaaggacctgaggaatcgt

SEQ ID NO: 29414 - DNA, 382 bp, Zea mays
  unsure (1)..(382): unsure at all n locations
  Clone ID: MRT4577_126834C.1
acctaagcttggattctcttacacggccgccatttgttttttttttaaaaacacaatactgaaccgatgtgtatatatttaactcacataaagtttctacaagcaatctaataacacacttatctacacctcaacctgaatgacatccataaaatcaaatatacacagggctacacaaatggttagttatgataataatttcttcntttccaccaaatacttatctacactatattttattcaaaataacatnacangaaaaaaaaaaaaataccaatttccaacaaaaatccaacacttcactccctcaaactaatactncacccttctntctcaccaacacaanaaccatgcaataaaaaccttatgttgaacctatcct

SEQ ID NO: 29415 - DNA, 599 bp, Zea mays
  Clone ID: MRT4577_126835C.1
gcatgtccaacatatttgtttcattgttatgggattaaaccagcatacatgacaatgtgtctgttattggtatccatatccaatagcacaaggcagacattcattcttattcatcatcaaatggtcatttctaactcgtggatttattgaatccctgcaactgtggcaatcaaatattacctttggagcacacaaaactgattgcaacctatgaacagaagtaaagggcttccttgcaacttactacacgcttaaaatggaacacaagttaatcttcaaaattagagcattctgaaaccagattccaatgcttgccaggttcacctcagctcataattccacagaagcctcatcggtttcttcaataatgtgaagctgttgcagcatgcaagcaggaaaacccagcaactacatggctggtgagtggtgggctgttttggaagtgctgctgctgctgattctgtattgtcacaaacagaagttactacgttcattttccagtttgaagcttcattgacatctcctgttgccacccacgcgtccggaatggtataagcagtctatttcattagagctaccccattaccatcatgatcagc

SEQ ID NO: 29416 - DNA, 667 bp, Zea mays
  Clone ID: MRT4577_126836C.1
acggaggccattgtcgctgccgcccttccgcctcatcccgtcacggcccactactcttgccccctcccacgacctcaactctgccatggcacctcttcgcgaagtattcctcctccacgacgcccttgccctccagtggtcgacgcctccacctcgagcacacctgcctcatgcccgcggcctaatctgctcaactgagggagagcgaggtggtggtagcacgtcgacaattcggtcgggagtcgacactcgggcttggggtatcgtctcgcttgcccgtagcccctttgcttcttgccatccggcttctcggcggcggagaagaggaggggaatggcgcaccgactgttgtgggacgtgcaggcgaacgggtgggagcgatcaaatttcaccatcgtctgcgagtcatgcctcggcgacaaaccctacgtccagatgtaacacatcaaaccctagcccttcctgaatgatttgtgtgtttctctttggcgttgtaatgtgattgaaggcgtgccagttctcttgatttggttttcgtctatgatttcttatgctcgacaggaaccgggtctaggtttcgcttctattcagttgtttaagtgtcgaattatgtgccatgtttttaatatattgccttttggaaaaaaaaaaaaaaaaaagcggccct

SEQ ID NO: 29417 - DNA, 143 bp, Zea mays
  Clone ID: MRT4577_126837C.1
ggatccttagcgtacttttaattgctacgttatctgatgaacgggaaaagacaccacacccgcagccaaaaaggcggggccggtgccatggtgtatccacaatcccgttgatagccgacaaaacagccgggcgttccagaata

SEQ ID NO: 29418 - DNA, 504 bp, Zea mays
  Clone ID: MRT4577_126838C.1
gcagcagaaatcttattaccaaattttacaagttacatcaagtttacgttatatatgattggagtgattacaaaagtgatcaaaaaataactttgaactgttataaattatttgtagttttaaaatatatgctagctcaaggaccatcctcaataagaagtatagaagagtacttagacttataagaaggtcgagcccaccggcacttaacaccatcatcagcagcacaaaattttagtcctggaagaaacactaggttagtgtttgttagacgtcgatcacatgacgatcagcctttgttctggtacttgcttcgtctgtccatcttcaggttcgtccatcagcatcaccttgtggagaagctcacgcttggggtcgacttggctcgtcttccacatcgtgcgatcaattatcgtaccatgactaaaatgattcaactacacgcggatgacaacgaatccgaggtcaagtaatacgtcgaacacttggcaaacgttgcacgaa

SEQ ID NO: 29419 - DNA, 1851 bp, Zea mays
  Clone ID: MRT4577_126839C.1
ccacgcgtccggaggtccatcaggacccaacactccaaattttgtcagagctgaggtgcttcctagtggctatctaattcgaccctgtgagggaggtggctccatgattcacattgtggatcatgttgatttagatgcttggagtgtgcctgaggtccttagaccactttatgaatccccgaagattcttgcacagaaaacaactattgctgcactgcgtcacattaggcaaattgcgcatgaatctagtggggaaatgccctatggaaggggacgccagccagcagttttaagaacatttagccagaggcttagcaggggtttcaatgatgctgtcaatgggtttccagatgatggttggtcactgatgagcagtgacggtgctgaggatgttactattgctatcaactcttctccaaacaaacttattggtcctcatgtcaactcctcccagctgtttactgcaattggaggaggtatcctgtgtgctaaggcatcaatgctgcttcagaatgtgccacctgccctactagtacgatttctgagggagcatcgctccgaatgggctgatcctggtgttgatgcttattctgccgctgctttgagggctagtccatatgcagttcctggtttgcgtgctagtgggtttacgggcagccaggttattctgccgcttgcacataccttagagcatgaggagttcttagaggttattaggcttgagggacacagcctctgccatgatgaagttgttctgtcacgagatatgtatcttctgcagctgtgcagtggcgtggatgaaaatgcagctggtgcatgtgcacagcttgtctttgcacccatcgatgaatcttttgctgacgatgcaccactgctgccctcaggcttccgtgtcattccactagatgcaaagacggatccaccgtcaggcacacgcacgcttgacctagcatctactctcgaggttggatctggtgggactactcgcacttcaagcgatgcctccagcacctgcaacacaagatcagtgctgaccattgctttccagttctcatatgaaaatcacctacgagagagcgtcgcagccatggccaggcaatacgtcaggactgtggtggcatcggtgcagagggtagccatggcaatagctccttcgcgcattggtggacagcttgaaatgaagcaaactccaggatctcctgaggcacacacgctggcaaggtggatcggcaggagctacaggtttcacactggagcagaactgcttcgcacagacacccaatgcacggatgcttccttgaaagcactgtggcagcactcggactcgatcatgtgctgttccctgaaggctgctccggtgttcaccttcgccaaccaagccggcctcgacatgctcgagacgacgctgatcgctctccaggacatctccctcgagaagatccttgacgacgatggcaagaaggcgctctgcaccgagtaccctaagttgatgcagcagggtttcgcgtacctccccggcggtgtgtgcgtgtcgagcatggggcggccggtgtcgtacgagcaggccgtggcgtggaaggtcctgagcgacgacgacacgccgcactgcctcgccttcatgttcgtcaactggtccttcgtgtgagtgaggaccggccccctagcatttgcagctgttatttgttgaactctgtatccaagtactggtcgctcttgcctttgcccaggcaaccctgtgaaacgcacctgccccccagttcatcccgtggccgtggaacaaacaccttttgtagttgcttgcttgctatgttatgatggatcctggtctgctgcgtctcctaaaaaaaaaaa

SEQ ID NO: 29420 - DNA, 335 bp, Zea mays
  unsure (1)..(335): unsure at all n locations
  Clone ID: MRT4577_12683C.1
cgctcgtccttaanctttgatcctatatatcggtctccctttttttttttttcttctgcatttggacccaaactggggtacatgagagtagaggggcagaggacatgatgcaaaacatttacccatgctgcagcggaatacatggggcaccgggcccctttaccagcatcagaccagacgacggatattttaatgtgcccatggcattcgggggcatgctcctgctagggcatgctacagccattgttatagctacaacacactgggacacacacagagatggagggaaaccggcacgttcgcgtggtactgaacagaaagcccgggccatggag

SEQ ID NO: 29421 - DNA, 2264 bp, Zea mays
  Clone ID: MRT4577_126840C.1
cgtctctcgccgctagctttccctttcccttgcgctcctccttcactcctcaccctccccgcaggccgcggctcggcaagcaagcaacaacccccgccactcccctccctcaccaccatggcgtcgggcggctgcgctctcgcgccgaggccatgacttggcgccgcccgtggccgtggctctccgtcttctccctctccccgcgacgacaacccctcctcctccctgggcggcggcggcggctctagctagctagctagatggcgtcggcgatggtggtgttcgggggcggcaaggaccggccgtcgcctggcggcggtggggcgccgcaggtggacgcgggcaagtacgtgcgctacacccccgagcaggtcgaggcgctcgagcgagtctacggcgagtgccccaagcccagcagttttaagaacatttagccagaggcttagcaggggtttcaatgatgctgtcaatgggtttccagatgatggttggtcactgatgagcagtgacggtgctgaggatgttactattgctatcaactcttctccaaacaaacttattggtcctcatgtcaactcctcccagctgtttaccgcaattggaggaggcatcctgtgtgctaaggcatcaatgctgcttcagaatgtgccacctgccctactagtacggtttctgagggagcatcgctccgaatgggctgatcctggtgttgatgcttattccgctgctgctttgagggctagtccatatgcagttcctggtttgcgtgctagtgggtttacgggcagccaggttattctgccgcttgcacataccttagagcacgaggagttcttagaggttattaggcttgagggacacagcctctgccatgatgaagttgttctgtcacgagatatgtatcttctgcagctgtgcagtggcgtggatgaaaatgcagctggtgcatgtgcacagcttgtctttgcacccatcgatgaatcttttgctgacgatgcaccgctgctgccctcaggcttccgtgtcattccactagatgcaaagacggatccaccgtcaggcacacgcacgcttgacctagcatctgctctcgaggttggatctggtgggactactcgcgcttcaagcgacgcctccagcacctgcaacacaagatcggtgctgaccatcgctttccagttctcatacgagaatcacctacgagaaagcgtcgcagcgatggccaggcaatatgtcaggactgtggtggcatcggtgcagagggtggccatggcaatagctccttcccgtcttggtggacaggttgagatgaagcaaacacctggttctcctgaggcgcacacgcttgcgaggtggatcggcaggagctacaggtttcacactggagcagaactgcttcgcacagacacccaatgcacggatgcttccttgaaagcactgtggcagcactcggactcgatcatgtgctgttccctgaaggctgctcccgtgttcaccttcgcgaaccaagccggcctcgacatgctcgagacgacgctgatcgctctccaggacatctccctcgagaagatccttgacgacgatggcaggaaggcgctctgcaccgagtaccctaagttgatgcagcagggtttcgcgtacctccccggcggtgtgtgcgtgtcgagcatggggcggccggtgtcgtacgagcaggccgtggcgtggaaggtcctgagcgacgacgacacgccgcactgcctcgccttcatgttcgtcaactggtccttcgtgtgagtgaggaccgtccccctagcagagccagtcgcgcgcgcccgcctagcatttgcagctgttatttgttgaactctgtatccaagtactggtcgctcttgcctttgtccaggcaatcctgtgaaacgcacctgcccatcgtggaacaaacaccttttcttgcttgctatgttatgatggatcctggtctgctgcatctcctaaaaattggcttggaacattgcgtctgatgctcctccgctcttgacgttcacagcctcgatgcctcactcggcagcgtcagatcggttgccgcctttatcctatcctactacgtattactagttgctttccgttgcacctgtgtactacaactgctcgagacaatgcccccctgctgtctgtttatggcctaagtctactgtggtggatcgggagttggagaacaatgcccctgctgtctgtttatgtgtgagacttaaccctattacccctgctgttatcattgaatc

SEQ ID NO: 29422 - DNA, 3495 bp, Zea mays
  Clone ID: MRT4577_126841C.1
cccgggtcgcccagcgtccgccccgcgtccgcggacgcgtgggcgacccagcgtcgccagcgtccgcacgggtaccccgggtttccctttcccttgcgctcctccttcactcctcatcctcagcctccccgcaggccgcggctcggcaagcaagcaacaacccccgccactcccctccctcctgtgctgcctcctgcggaaaggtgtgcgaaaaacccaccatgcccacccccaaggcgtcgggcggcttcgctctcgccccgaggccatgacttggcgccgcccgtggccgtggctctccgtcttctccctctccccgcgacgacaaccccctcctcctccctgggcggcggcgggctagctagatggcgtcggcgatggtggtgttcgggggcggcaaggaccggccgtcgcctggcggcggtggggcgccgcaggtggacgcgggcaagtacgtgcgctacacccccgagcaggtcgaggcgctcgagcgggtctacggcgagtgccccaagcccagctcgctgcgcaggcagcagctcatcagggactgccccatactcagcaacatcgagcccaagcagatcaaggtctggttccagaaccgcagatgccgcgagaagcagcggaaggaggcctcgcgcctgcagactgtgaaccggaagctgactgcgatgaacaagctgttgatggaggagaatgacaggctgcagaagcaggtctcccgactcgtctacgacaatgggtacatgaagaagcagctccacagtccttctgctgcgaccacagacacgagctgcgagtctgtggtgacaagtggtcagcaccaccaacagcaaaacccagcagctctgcagtccacaaagggatgcgaacaacccagctggtctactcgctattgctgaggagaccttggcagagttcatgtccaaagcgacaggaactgctgtcgactgggtgcaaatggttgggatgaagcctggtccggattccattggaatcatcgctgtttcgcacaattgtagtggcgtagcagcccgagcttgcggcctagtgagccttgagcccacaaaggtcgcggagatcctcaaggatcgcccttcttggtaccgcgattgtcggtgtgtggatattctccatgttatccctacgggtaatggtggaactatcgagcttatctacatgcagacttacgcaccgagcactttggcggcaccgcgcgacttttggactctccgatacactagtggtcttgaggatggcagtcttgtgatctgtgagagatcactgacacaatcgactggaggcccatcaggacccaacactccaaattttgtaagagccgaagtgcttcctagtggctatctaattcgaccctgtgagggaggtggctccatgattcacattgtggatcatgttgatttagatgcttggagtgtgcctgaggtccttagaccactttatgaatccccaaagattcttgcacagaaaacaactattgctgcactgcgtcacattaggcaaattgcgcatgaatcgagtggggaaatgccctatggagggggccgacagccagcagttttgagaacatttagccagaggcttagcaggggtttcaatgatgctgtcaatgggtttccagatgacggttggtcactgatgagcagtgacggtgctgaggatgttactattgctatcaactcttctccaaacaaacttattggtcctcatgtcaactcttcccagctgtttactgcgatcggaggtggcatcctgtgtgctaaggcatcaatgctgcttcagaatgtgccacctgccctactagtacgatttctgagggagcatcgctccgaatgggctgatcctggtgttgatgcttattctgccgctgctctgagggctagtccatatgcagttcctggcttgcgtgctagtgggtttatgggcagccaggttattctgccgcttgcacataccttagagcatgaagagttcttggaggttattaggcttgagggacacagcctctgccatgacgaagttgttctgtcacgagatatgtatcttctgcagttgtgcagcggtgtggatgaaaatgcagctggtgcatgtgcacagcttgtgtttgcacccatcgatgaatcttttgccgacgatgcgccactgctaccctcaggcttccgtgtcattccactggatgcaaagacggatccaccatcaggcacacgcacacttgaccttgcatctaccctcgaggttggatctggtgggacaacgcgtgcttcgagtgacgcctccagcacctgcaacacaagatcagtgctgaccattgctttccagttctcatatgaaaatcacctacgagagagcgtcgcagccatggccaggcaatacgtcaggaccgtggtggcatcggtgcagagggtagccatggcaatagctccttcgcgcattggtggacagcttgaaatgaagcaaactccaggatctcctgaggcacacacgctggcaaggtggatcggcaggagctacaggttccacactggagccgaactcctccgcacggacacccaatgcacggatgcttccttgaaagcgctgtggcaacactcggactcgatcatgtgctgttccctgaaggctgctcccgtgttcacctttgccaaccaagccggcctggacatgctggagacgacgctgattgctctccaggacatctcccttgagaagatccttgacgacgatggcaggaaggcgctctgcaccgagtaccctaagattatgcaacagggcttcgcgtacctccccggtggcgtgtgtgtgtcgagcatggggcggccggtgtcgtacgagcaggcggtggcgtggaaggtcctgagcgacgacgacaccccgcactgccttgccttcatgttcgtgaactggtccttcgtgtgagaacccggtccccctagtagtagagccaagttgcctagcgtttgcggctctgttgtttgaactctgtaccccatgtaccgtcgcttttgcctgtgtccaggcaacctatgaaacacacctttgtagttgttcatcacccccgtggaacaaacagctttgtactagttgttcgtcttcgcttgcttgctatcttatgatggatcctggtttgctcctgaaaaggaaaaaaaaaaaaaaaaaaaaaaactgaggctcgcaacatcgctcggcagcgccagaccggatgccgccttttgccctactacgtatcattagttgcttttccgttgtgccgcctgtgttaagaatttgtgtactgtgtggatgatcgagaactgactctgtttgtttgtgtgtgtgtgtgtgcgtgacaaacaactacaacagctgtatgcgtgcctggtcgtggtctcgtctccccggcctgtcgccggcgacattgatcactgttgcaggttgcagtattactatttgctagttctgcttaaaaaaaaaaaaaaaaaactcgagagggggccc

SEQ ID NO: 29423 - DNA, 550 bp, Zea mays
  Clone ID: MRT4577_126842C.1
gggtacccgcggccccccctcgagttttttttttttttttttttttttttttttttttttttttttttttttttttttttttttttttttttttttttttttttttttttttaagcgggaagcgggcaacttttgttttatgattccaaagggcccaagccccctttttggggggggcggtaggtccctcccgcggataacacaacacagttccaatcacagggcaaaatttgccgcccaaaaaaaaggggggcaaaaaaacattgtttttttgctcaaccagtacccagtaaacaggggccgaaaatccttcaaatttttttaaaaatccaagccaggggaacaaaatgggcttctactcggggggaagggattactttggtgagggcccacaatttttttaaaccttgaacccacgggtgttcctcctgccacgagccttttaaaacttccttcctttggagcgcacatatggctgggggggggtgggcgggactccaagagccttgccaaaaggccccaccccctcacgggcttttttggggcccct

SEQ ID NO: 29424 - DNA, 1116 bp, Zea mays
  Clone ID: MRT4577_126843C.1
atcttcatctagatgatccttgtctacgatgtcaggaaggcgctctgcaccaagtacccgaagttggtgcaggaggtacccaataatctaggttgtaccaatgccatccatttgtgaaaaagacgcattggcggacgcgtggggtgtcgacgactccagggtttcgcgtacctccccggcggtgtgtgcgtgtcgagcatggggcggccggtgtcgtacgagcaggccgtggcgtggaaggtcctgagcgacgacgacacgccgcactgcctcgccttcatgttcgtcaactggtccttcgtgtgagtgaggaccggccccctagcagagccagccagtcgcgcgcgcccgcccgcctagcatttgcagctgttatttgttgaactctgtatccaagtactggtcgctcttgcctttgtccaggcaatcctgtgaaacgcacctgccccccagttcatccgtggaacaaacgccttttgtagttgcttgcttgctatgttatgatggatcctggtctgctgcatctcctaaaaattggcttggaacattgcgtgcgtccccttctgctgaattcgttgcttctcgcttgattaaggaaagcgcggtacatgatgtggccgacctcggacgcagacgtggggacgtggtgggaggatggcagccgctgcggtggttggactcgcaaccgaactgattttgttaggtcaggtcaggtgcgcgtggtcttctggcagaggccacctgagctggcgatggacgtgaaggaaggagaggtggcagaagctacggctgagggcacctgaggacggcgacgggccgcctaatccccccggacccgtcgtcgtcgctgcgtgcgctggcgacggtcgtggcgccaaactcgctgcgtttcggcaaaggattagcgcaaccgcggcgctgtcgaaggtgtacgtgagcgctggatgatctcagattctcagtgatgggactttgttagatcaatccaaggaatggacagggagcgtttgtggttggttttgttccagccatgacatggaattcgctacgtgtcgtggcgcaactgcaaggaccgtgtgtgtgtgatgtgcatcgaagcttcaaatataactgatg

SEQ ID NO: 29425 - DNA, 124 bp, Zea mays
  Clone ID: MRT4577_126844C.1
tcaaatttatatgttacactctgcaaccttcatgggctcacagtaaagatctgtcatccgtgcttctaagtttctataaatatggctacaaacatgaaaggagtactgaatttctacaaccgag

SEQ ID NO: 29426 - DNA, 3336 bp, Zea mays
  Clone ID: MRT4577_126845C.1
aattcggcacgaggtcgccgctagctttccggttccccctgctgctcctcccctccgtcctcctcctcaccctccccgcgggccgcgcgactcggcagccaagcaagcaacagcacaacacccccgcaccgccgccactcctctctctctctctctctctctctctctctctctctctctcgcaccaccaccatggcgtcgggcggctgcgctctcgccccgaggctatgactcggcgccgcccgtggccgtggctctccgtattctccgtctccccgcgacgacgacaacccctcctcctccgactccgactcctccctgggcggcggtgctagccagatgtcgacggcgctggcggtggtcgggggcggcaaggaccggccgtcgcccggcggcggcggggcgccgcaggtggacacgggcaagtacgtgcgctacacccccgagcaggtcgaggcgctcgagcgcgtctacagcgagtgccccaaacccagctcgctgcgcaggcagcagctcatcagggagtgccccatactcagcaacatcgagcccaagcagatcaagggtctggttccaacccgctctgccagatgaatgccttcttcctgttcattcttggtttatgccaatcaagaactacaagggaatccccggaatccactgtttgctagctgtttgcttttttaggcgtgcctgccactaaatcgtgtttccatcgtcgttggtagatgccgggagaagcagcgcaaggagtcctctcgtctacaaaccgtgaaccggaagctgagtgcgatgaacaagctgttgatggaggagaatgaccggctacagaagcaggtttcccgtctcgtctttgacaacgggtatatgaagaatcgactccacagtccttctgtagccaccaccgacacaagctgtgagtccgtggtgacaagtggtcagcacaaccaacagcaaaacccagcagttctgcatcctccacaaagggatgcgaacaacccagcaggtctactcgctattgctgaggagacattggcggagttcatgtccaaggcgaccggaactgctgtcaactgggtgcagatggttgggatgaagcctggtccggattccgttggaatcatcgctgtttcgcacaactgcagcggcgtagcagcacgagcttgcggccttgtgagcctcgagcccacaaaggttgccgagatccttaaggatcgcgcatcgtggtatcgcgattgtcggcgtgttgatatcctccatgttatccctacgggtaacggtggaacgattgagctgatctatatgcagacttatgcactgacaactctggcggaaccgcgcgacttttggacactacgatacactagtggtcttgacgatggcagtcttgtgatctgcgaaaggtcattgacccactccactggaggtccttctggacctaaaactccagattttataagagctgaggtgcttcctagtggttatctgattcgaccttgtgatgggggaggttccatgatttacattgtggatcatgttgatctgaatgcttgtagtgtccctgaggttcttcgaccgctctatgaatctcctaagatactggcacaaaagatgactgctgcggcgttgcgtcacattaggcaaattgcacacgaatcaagtggtgaaacgccctatggtgctgggcgacagccagctgttctcagaactttcagtcaaaggctcagcagaggcttcaatgatgctgtgagtggctttccagacgatggctggtcttctttgttgagcagtgatggtgctgaggatatttcaattacaatcaactcatctccaaacaaacttattgggtctgatgtcagcccttccccattcttttctgccatggggggcggcatcatgtgcgcaaaagcgtcaatgctactgcagaatgtgccacctgctctacttgtgcgatttttgagggagcatcgctctgaatgggctgaccctggtgttgatgcttattccgctgcctctctgagggccaacccatataatgttccgggtttaagggctggtgggtttatgggcaaccaggttatactaccccttgcacgcaccgtggagcatgaagagtgcttggaggttattcgacttcaaggacatggctttagccatgacgaggttcttatgtccccggatatgtttcttctgcagttgtgcagcggcatcgatgaggatgcgccgggtgcttgtgcacagcttgtcttcgctcctatcgatgaatcttttgctgacgatgcaccgttgctaccctctggcttccgtgtgataccgcttgatgctaagacggatgtgccatctgccacacgtacccttgaccttgcttctgcgctcgaggtcggatcaggcggaggtctgtgtgctttaagcgatagcgggtcaggcacgcgcagcacgaggtcggtcctgaccatcgccttccagttctcgttcgagaaccacctccgcgagagcgtggcagcgatggccaggcagtatgtcagggcagtgatggcgatcgtgcagagggtggccatggcgatttctccctctcgccttggcccgcatgtcgaactgaagcatccgccaggctctcccgaggcactcgcactagcttcgtggattggcaggagctacagggcgcacactggaacggagatccgctggtcggacactgaagacgcggcgggctctcccctgacgctgttctggaagcacagcgacgccataatctgctgctctctaaagccggctttcacactcaagttcgccaacagcgccggcttcgacatactggagacgacggtcgcgaacgtccaggacctgcagctggaggcggtccttgatgacgggggacagaaggccctggtcgcacagctccccaagatcatgctgcagggcctggcgtacctccccggcggcgtgtgcaggtcgagcatggggcggcaggcgtcgtacgagcaggcggtggcgtggaaggtggtgggcgacgacggcgcgccgcagtgcctggcgctcatgttcgtcaactggaccttcatctgatcctcctccgctcttgacgttcacagcctcgatgcctcactcggcagcgtcagatcggttgccgcctttatcctatcctactacgtattactagttgctttccgttgcacctgtgtactacaactgctcgagacaatgcccccctgctgtctgtttatggcctaagtctactgtggtggatcgggagttggagaacaatgcccctgctgtctgtttatgtgtgagacttaaccctattactactgctgttatcattgaatctttgtgatc

SEQ ID NO: 29427 - DNA, 298 bp, Zea mays
  Clone ID: MRT4577_126846C.1
aaataaaaataaataaaaaaacaaacaatataaaaaaataacaaaaaaacaaacacacgcgggcggaggtctaaactattatgtacgggcaccccacttcatttctctgttctacggtcaccaacatccaatctcactaccaccctttttacaacccaactgactaaaaaaaccccaccttcccccatcttaaactcctttaataacaaaaaccttttttcagcatactttatataacagatacccaatcccatttccctttccaacactttttcaaactgaacattaaacgcgaccc

SEQ ID NO: 29428 - DNA, 856 bp, Zea mays
  unsure (1)..(856): unsure at all n locations
  Clone ID: MRT4577_126847C.1
agcccggaattcggctcgagctcgccgctagctttccctttccccctgctgctctatccctccgtcctcctcctcacgctcccggtggcgccgcgcggctcggcaggcagccaagcaagcaacagctgcacaaccccccagcaccgccgccactcctctctctctctctctctctctctgtctctctctctctctctcgcaccaccaccatggcgtcgggcggctgcgctctcgccccgaggctatgactcggcgccgcccgtggccgtggctctccgtcttctccgtctccccgcgacgaagacaacccctcctcctccaactccgactcctccctgggcggcggtgctagccagatgtcgacggcgctggcggtggtcgggggcggcaaggaccggccgtcgcccggcggcggcggggcgccgcaggtggacacgggcaagtacgtgcgctacacccccgagcaggtcgaggcgctcgagcgcgtctacagcgagtgccccaaacccagctcgctgcgcaggcagcagctcatcagggagtgccccatactcagcaacatcgagcccaagcagatcaaggtctggttccagaaccgcagatgccgcgagaagcagcggaaggaggcctcgcgcctgcagactgtgaaccggaagctgactgcgatgaacaagctgttgatggaggaagatgacaggctgcagaagcaggtctcccgactcgtgtacgagaatggatacatgcgacagcagcttcacaatccttctgctgcgactacagacacgangctgtgagtctgtggtcacaagtggtcagcaccaccaacagcaaaacacagcagctcccgcgtcctcac

SEQ ID NO: 29429 - DNA, 520 bp, Zea mays
  Clone ID: MRT4577_126848C.1
ccaatcatctttcatccttatatattattcctttccatttcaatggcacattaagggcatagctaacactgccacccatcgggctgggagacactacgttgctaatccccgcctaatgagcaaacaatcaagctacggggggggggggcggctccattacatcattactacagtacatcgtcacctcataagtagacaccgccggcagacgcgctgcaggggcagggaccgggctgctgcatgtgtaggccgcacatcggcctcagatgctgcgctacctgggccgccatcagcgccgcaagctcgccctgaggttgctgctgcaggaaggactgcaggaccacaccataagcacactggtaccggtgcagcacctccacctgcctgatctggtggcagcactgctgctgcaccgcctgtcactgtggcgagccttagggcatccccaccgggctgcactggtgctctcagaactcctcacactggcccaggaacggcctgccaacgctgtcgacgccct

SEQ ID NO: 29430 - DNA, 386 bp, Zea mays
  Clone ID: MRT4577_126849C.1
gaagaagataaaggctagcttcgccaacgtgggcgcctattcaaacgaagataacttcatacgaggtgaccctgagggtgttatcgagtggatcagcggtgaagccgaagcttttgaggaaattttaagtgatcgtggggatgtctgcgtgttctctggtgcgagaggagtttcagccatcttggagatggcaggttgcaatcatgttaaaaccttggcccaggccgaagctgccctctccgtggatgacacaaaagatccctcggccgaagcaagtttaatgggcggaaaatttttcactgacatctgagaaaatggcggccgagaaatggcctaggaaataatgaagaaaagtgaaaaggtattcatgatgctcgagaagcggc

SEQ ID NO: 29431 - DNA, 384 bp, Zea mays
  Clone ID: MRT4577_12684C.1
taaaaaaaaaaaaaaaaaaaaaaaaaaaaaaaaaaaaaaaaaaaaaaaaaaaaaaaaaaaaaaaaaaaaaaaaaaaaaaaaaaaaaaaaaaggaaaaagggttggaacgttttaaaggtttccggccttccttcctccgtgcttggcaactttttttctttttttttggggacccctttaatttagtccgttgtgccgcagttttacaccttgggaactgggaaacccttgccgttccccccctttttcgccttgtcccccttccccttttggccggctggggtaatagctcagaggccttcccctttcccccttccgaacagttctcaatcctaattggcacttgccctgccccttgtattggggctttaagcgcggggggtt

SEQ ID NO: 29432 - DNA, 303 bp, Zea mays
  Clone ID: MRT4577_126850C.1
aacataagtaccacgagtcactgcactgcttgcatagagaagggactggaaggtgatgaagtacaagcgctgtgcactgatgtgcatgctgtcatgtgtaccgattctttcataggtacatgaacatactgtcaccaatatgaactgttacatgcatgcagatgaagcttacatatgatccatgtacggtcatactaattgaaaggctgactttattcaagtcctccctcagatctaactactgacatacggactactaattctactgactgccattgaacaatcagtatctcaagacactga

SEQ ID NO: 29433 - DNA, 270 bp, Zea mays
  Clone ID: MRT4577_126851C.1
ctcactcgtccagccacgcgtccggactaggtttagagagcggcggatagcggccaggcgggggacgcaaagaagatccaggacgacttctgctcgacgctgcgcgacgccaagaagggtacggacctgctcgtgttcaatgagtcctgcacgctatcccaacatttcaacctgcagctgtacggtagtatccatcgcaaggtcaagtgctccgaacagaaagtcataactgctccactcatgaacgttttccatgacgaatactacaag

SEQ ID NO: 29434 - DNA, 257 bp, Zea mays
  Clone ID: MRT4577_126852C.1
tttcttatttctgttatttttctttctttttctttaattcatttcattcgttcattctccccatgacaaattttatcagttcttatttcccacaacattggctggacatcgctgtgatgttcaaattaaaaaaatggcgcacggtggggaattcccttgggtgtgtgacgagcacccctttttggaggtggttcttgctaatgttgccattgcagctgttttgaccattcggaaaacctgaccggaggtacgttcat

SEQ ID NO: 29435 - DNA, 736 bp, Zea mays
  unsure (1)..(736): unsure at all n locations
  Clone ID: MRT4577_126853C.1
aggccggccggggttatctgctccaccaaatcagcatcatacatcccgctgcattgatattcttgctcccatccacaaagatgcgctcttccaccttcatcgccgccgcctcggctcttgccggcctcgtgtccgcgcaaaacagcaccttcaacacccccatccagtgctgcaccgttcccgccaactcggtcgaccaggacgacaggcagtcatggtgccaggccaaccaaaacacctgtgttgagctttgcggcggtcgcggctcgcttgccagcaacggcaaccagtgcgattcttccactctcgagttctcttgcaagtgccgcaacggtaccgatgtcagcagcgtcatggaccagtaccagcagactgtccccggccagatgtgccttgtctggtacagcaactgtatctctgcctctggcactgacgcgactgctcaattcgagtgcgaacaggctcgcaacagcctgtgcggcaacaagaccatcgagcaggctaccgaagccggtaactctggctctggttccggttcctcgtccgcctcgtcgagcccttctgccaccagcagcggctcgcccgcctcgactggatcttctccctccggcggcgctgcctccagcacccctatccctgacgctgctgncaccttgncttgtacggcaccactgctctcgccggtggcctctttgacatcttcggaatggccttgtatatcaacaacaggacacta

SEQ ID NO: 29436 - DNA, 310 bp, Zea mays
  Clone ID: MRT4577_126854C.1
ccacgccgcaacccaagggtttaaatctttccaaatttttttttttaagcaacatgacaaaacctgccattggccaatgttttttttacccgagcctttttttttttttaaagaaccttggtctgaaaaaaaaactcttaaaattggggttggtaaaaccccttttaacaatgaataaataaaaaatcgtgttttccatttcccacatttaacaattaaccccttgtaatattgagccccttttttttccaccgctcctcgtttggttttaacaaaagccacaaaaaaaaatttctcccccccaacaaaa

SEQ ID NO: 29437 - DNA, 370 bp, Zea mays
  Clone ID: MRT4577_126855C.1
atccaaatgctcaaccatacattactttaacaataactttttttaaccaataaaaaaaaaaaggggggggggatttaaacaaacttcggtcccttttatttcacaaaacaatttttaaaaaaaaaaagtggaaaggcatgcaacaaaaaaccttgcctaacaacgacccccgaaatttttacattttccttgggccgcttgtcttttgaatgtaatcatgcttgaggaggttggcacccaaaaacatggacttgacatttttttaaaagtcattgccggtttaaaagacaccctgaaaagtttcatttttttggtcaaaatgccttgcgtaaaggattttgttgtgggaatttatccgggcctttatttt

SEQ ID NO: 29438 - DNA, 673 bp, Zea mays
  Clone ID: MRT4577_126856C.1
gggcgagtctgtggtcgccgggcgccgcccgtccgccgctgggtgctcgtgggtgcacatatacgtcaggggccactaccgcccctccaactgggccgccgccgccgccgaccccgccgacctccgcgccgcgcacctcgcccccacctacgcccgggcctgaacggcccccgctccctcaccccgctccgcctcgcctcgtgtcgtctcgtatgacatacagtaccgtacctgagtgaaggcgaagagagaggccggtgggggccggggttcgtctggcgaatggcgtcgtcgcgccgcgcgcgcgcgctctgtgacgcccggcccggcgtgttcttggagagcgggaggtgttctgtcgtcttggttggtcgctgtgcgatgcgatccgatgaccaacgggagatgctgttattacaaacaagaagagcggtctgtggtcgccacccgtgtgtggtgtgggtgggctggaatggatgtcctgctctagactccagtgcactcccagctcctacatatatatcagattcagagcagagcagagcagggttttgcactgccgttttacgtttggtgctcgcgacagctagagtatttcggatttatctacgtataataaagttgcatcttttatcgaacacgaacggacggaacgagttttatcaaaaaaaaa

SEQ ID NO: 29439 - DNA, 444 bp, Zea mays
  unsure (1)..(444): unsure at all n locations
  Clone ID: MRT4577_126857C.1
ctcntttttttttttttttttttaacctattcggtctggaccggatacatttattaaaaacattttctaaatcacatcacataggcttgccaaaattgaccgctcgcctcaagagtagccaccttcagatcagaaccatcaaaatcttgttgatactcgctggggcttcctctacacgcaaagtaataagtcgtgtctctgaaaaatatgaggtagaaatccatcaagggcccaaagccttcgtctaaaacatctagaataaagcctccttaatctccccaactttgcagacatcaccttcgttggtactgcggacagccatgtgattagcctactagctaaccaaccatagcaaatttttagttagatcaactactaaacttggcctgtgtatcaaacatggccacaggttgaggggcattcacataatgatttttttatgat

SEQ ID NO: 29440 - DNA, 249 bp, Zea mays
  unsure (1)..(249): unsure at all n locations
  Clone ID: MRT4577_126858C.1
acatacacctccccaaaatccctttctcggcacacgcgccaaaaataattntaaaataaaaaacaaaaaaattaaaaatataaaaaaataaaaaaataaaaaattgcggcgccttttaaaaaatccaaccttacttacaacttacttccaacttactattttttttatattttcacctaaattaaattcactacaactaatttttacaacttcttaactctaaaaactttgccattaccaaacttaatc

SEQ ID NO: 29441 - DNA, 329 bp, Zea mays
  Clone ID: MRT4577_126859C.1
cattgtgttagccattttgatccggagaagagagattatcacaaatgtgatgccaatagtgcagcgttcctatgacagcgacccaagataaggcaggcagccttaatagcaacaacaggctgaacaatatgtttttagtgaaccataacggctgaactcccactgcaaattttttcatgcataggaaatcatggacaatggttttttgcctgcctcaacgccggctgccgcaagggagcaggaggcgagaaactgccctttcatgaccatccaaggtcttcttaggatggcttgacttcctggctgtaaaactttcttaactctggcga

SEQ ID NO: 29442 - DNA, 612 bp, Zea mays
  Clone ID: MRT4577_126860C.1
ttaaatattaatagagctacctgcagagatctgggggggggggggggggggcctctgttgctgctgcatgcctagttgaaccgattgcacgtgggcaggtacatacccacgcgttctgttgctgttgcaataagtaagtcactgttatatctatctagtaacatagctaggtaactgtggcgaatgtgcagcttcgacccgatcatgcatgacaccaccgcacgttacagatagccacgcggcttagcctattagccgacgactgttaagttaaaaaatatttatacagatgattctcgcgattatctgcgagatggacaatattattatcgtgatgatcaatcattatcactaattacagatgaagaacgaggtcttagtctttctgcaccttaacttgttgattattgttgttgacatggtcttgttctacattgtcttaatcttacagtactataacaacaacgaagactactagtaatattaataatataatatctacaaggacatggttatgttagagaataactttcacaagatcgtgattaacataagataatatagaaatatactaataataataataacagagtcgataataattctaactat

SEQ ID NO: 29443 - DNA, 443 bp, Zea mays
  Clone ID: MRT4577_126861C.1
cttacgagcccaaggcgaatgtaaaaaaatggataagggccagcggggctgaacaacgtcattggccctacagcctttttttgctggaaatgttgggtttaaaatagaagcaaaaatgcctggaaatggaaacgggtaaacaattcggtttgtacaaaaaaaacataactcgggtggtccatgctctttaaagggccttcagctcaaccttgacaaattttgttttgggtgccacacccctctttggggagcattgttggactctgttagcggctctaggactccccatgctgtgacaatttggcccggtaaatgttgcgttggttttttccccccccggggtcaatggggtatcactgcagccccttctccttgaacttgtaaactttggcgatttggcacgggtaggagggaccttcttcatttcaacctttggggggggg

SEQ ID NO: 29444 - DNA, 430 bp, Zea mays
  Clone ID: MRT4577_126862C.1
gacattcactacaaaaaataataaaaaaaattaaaaaaaaaaaaaaaaaaaggtaaaaaaatggaaaaaatataaaaaaaaaaaaaaaaaaaaaaataataaaaaaaaaaaaaaaaataaaaaaaaaacgggggtgctgtttttaaggatcaaagttttcttccccttgcttgcaacgtaatattttttttttagtgccacttaaattaaatttattggccgtttttttaaaactcaggaattggaaaaactttgaggttaccaaatttattggttttgaagaaaattctctttttcccagttgggtttttactaaaaaggccttaactaatcaccttttcaaacatttgcaaaccttaaatggtaaatggaaccccccttttatcggtcttttaagcttggaggttgtggtttttccccacattgtgac

SEQ ID NO: 29445 - DNA, 288 bp, Zea mays
  Clone ID: MRT4577_126863C.1
aaagagagacggtggaggcatgtggggagtacggcgccgaggcgaccggaggtgcctctagaaccggggtagtgcagaaggggaagtcatgccaagggtggttcaactactggggagtgctcaagtaccgcggatacaacccaatctgcgttgggatacctctatgcatacccaaacatcctaactgcccggcgtataaacccaaggagggggcgactgagcaccggcatgacctcacacggaacaagtacgggtgcgcgggttactccatgtactgtggtcaacagg

SEQ ID NO: 29446 - DNA, 237 bp, Zea mays
  Clone ID: MRT4577_126864C.1
ctcgtgcccaccagcttgtaatggagggatacaattggtgtcatgatcggaatgtggttaccattttcagtgcacccaattactgttatcgttgtgggaaccaggctgctatcatggaattagatgacactttaaaatattccttccttcaatttgacccagcgcctcgtcgtggtgagcctcatgttacacggcgcaccccagactacttcctaaaatttctccctgggaaacctg

SEQ ID NO: 29447 - DNA, 614 bp, Zea mays
  unsure (1)..(614): unsure at all n locations
  Clone ID: MRT4577_126865C.1
cgcacgggntgcgcccacgcgttccacggaccacgcccggccacggccgtcacgtgccccggaacgggacccttgctcggcgagcttgagatggcccagcaccgggacttcctagccaagctctgcatacgggagcagggtgagcagtcagagcccacctgcacaccattggatcattgggagcccgagcccacctgttcccaattggctcagtgcgcgccccgcgcatgcgtcgaggttggttgggcttaagtgaggcaaggaggtcctgaggaggctcgcatggattcaacccaacacattttggagtagtactgccttgtatattaccaacacattttgtgatcgatctgtgttgataccaatcgaatggagctcggagtttatatgcgtcaaatcactgtggttggaaacacagggactactacaaaaatcttggtggtcccaaggatgcagactacgacgacattatggaggcatctaatgctgttgcaaaagaggacatccagacgcaattagtggctatactgatgcaaataggatgttacaagaaataagagatgcttatgagacactgctggaccctgaaaagagggaggaatatgacatgctat

SEQ ID NO: 29448 - DNA, 213 bp, Zea mays
  unsure (1)..(213): unsure at all n locations
  Clone ID: MRT4577_126866C.1
cgctgatnntttctttgaaaaacctgtgtttattgtttccttaaccccaagaaatgggtgtactcctaaaatcataaattgcctctccaaacaaaaattagggcaaggggttaaaattggtattggaagttaaacctttaaaaattctttacttggcttccttaccattttcctgggttttatgaccaaaattccaatttttcccaaattggg

SEQ ID NO: 29449 - DNA, 298 bp, Zea mays
  Clone ID: MRT4577_126867C.1
cctgcagcctccaatggaacggagaagagtgcacggcctggtacagtgacatggtgagcccactcagagctggccctttccggaggctcggggtctatatcgacttcccgggagggatcctttccttctatggcgtatagtatgatacgatgactctggttcacaagtttgcctgcaaattttcagaaccagtctatgctgccttctggctttccaagaactgagaacgccatccggattgtagatctgggagaggatgtcgagaatccagtaccgtcacttggtgcggactgctccc

SEQ ID NO: 29450 - DNA, 151 bp, Zea mays
  Clone ID: MRT4577_126868C.1
gactatgcccttcgatcccataatacatgattacttaatggatcgcactaccttcgcgccaatgactcaccatacaaatacatgccctatccacttccgatagtacaatacgtccctaccctggaggacactcgtaacgcctaattataat

SEQ ID NO: 29451 - DNA, 124 bp, Zea mays
  Clone ID: MRT4577_126869C.1
tccacgcgtccggcgacggtggcacagcatgattggctggacgagttggcctctgcaattatgcctgagacgagcaaattgtcctaccgggttacggcacgagattgtaaccgcgcaagtaatc

SEQ ID NO: 29452 - DNA, 298 bp, Zea mays
  Clone ID: MRT4577_12686C.1
tcctcaagtccaacccggtgcacaagaagatacccgtgctcatccacaatggcgccccggtctgcgagtccatgatcatcgtgcaatacatcgacgaagtgttcgccggcaccggcccgtcccttctcccagcggacccctacgagcgcgccgttgctcgcttttgggtgccctacgttgacgacaaggtttaaattttcctcaattggttgaactagtagtatatgttcttttccatttagatattagtaaggcatcgaacaaaggatctgtgaccattattttctatgcacatatt

SEQ ID NO: 29453 - DNA, 229 bp, Zea mays
  Clone ID: MRT4577_126870C.1
gatattataaaggtcaccttgatatggttttctgcatcgcactatgctctggagaacagggttatctctcatgtgggctggatcgtaccattctcttatgggaccatccttctgaaaaaccgcatttcttactgctcgctcaaaggacgcctacagtttcttactacgcccattgcattctatttgctctctcctatggatgccgtatacacatgtatgatattcccaa

SEQ ID NO: 29454 - DNA, 417 bp, Zea mays
  Clone ID: MRT4577_126871C.1
ggcctcccaaaaccccccaaaaaatttggggggggggagggcacaatgttccctcaacccataaaaaaaattgcccattgggcccacccaattttaaagggttccttaaccacaaacggggggaaaaaatgtttcttttgcaggacccctgggaaaaaaaacccttgttggtggaaaaaaaaaaaattgcctactgggcccctgggagctaaaaagaaccaaaacttttttttttttttaaaggggccctcataatcccaaaattttttatggggggcctaaaccccatgtatcacctttatcatggcccttaaaatggtctattcacccctataaaaaaaaagaaaagggaaaaaaaaatttgcccctattttttaacccccccaaaaaaagggggaaaaaaaatttttaaagggg

SEQ ID NO: 29455 - DNA, 422 bp, Zea mays
  Clone ID: MRT4577_126872C.1
gcgctgctactaccactactctctccgacaccgatcgatccgtcgagcgatggagagagacctgcaggtgatgccgccgtgggggagggaggtagcggcgccgtgcggcggcggtgcaacggagagctcgccgtcgtcgcgcagcaccagcgggtgccagtccggctggacggtctacctggaccactccaacgggatgcgttaccatccctgcgacgaccccgccgccgccgccgcccagaggtggggtgtcggcgctgcaggcggcggacgacgacggcggcgacgtggaggactccatggcctccgacgcgtcctcgggctcccggccgcgcccgcgcgaccaagacggcgagcagacgcggcgagacttcgacttggagcagcagggcccgcgaggatacatccgccagcacagccac

SEQ ID NO: 29456 - DNA, 699 bp, Zea mays
  Clone ID: MRT4577_126873C.1
acacaaaatgccagcatacccatgttgtgaaatgtaaccacacaacaacatccggtcacggtaccaaaaaggccccgctatcctttttttttttttttttttttttttttttttttttttttttttttttttttagttgctccttgccctatcttggtaacatgaagatatgcagggggcattccgagttcatggaacttaaaatataaaaggacccggatgaaaagcattttgggtcataagtaactaagcatacatgagtgaatggtaaaccatcaacagtcacccatttcataattaacttaaaatgcaaagctcatctaaaacaaaccattttgagcaataacagatgtaggctgcaaaatgatcctgggggttaggctttcttgtcagcaagcaacatcgggaactgagcctcaaccttgatccactcctgcttggcgtcacccttgacagcctttctcatggccatgaaaacctcccttgcgtgcttggccttcctgctcttgagcaaaccctgaaccaaacctttaacagcttggaatggcggcgcccacttgttgcgcaggcactccttgcagatctccagcgcaggatcaaacaaaattcttcttgacaagagcctcgagcagcataatgtaggtctcaaagttgggggagacccctttgccgtgctgcctgggcacctccggcatcctc

SEQ ID NO: 29457 - DNA, 177 bp, Zea mays
  Clone ID: MRT4577_126874C.1
tactcacgcgcggaaggcacgcacaacagggggggattttagaaagaaagggcgcgttcacaccaacacaggcagaacggaccgggaattacgaagaaacgccaccacagacggcgggcctacaaagaagaacgaataagacaccaatatcgagcacggagaggccaagcccatcga

SEQ ID NO: 29458 - DNA, 325 bp, Zea mays
  Clone ID: MRT4577_126875C.1
gttatagatcgcgagcgccgtccttttcatgaacctgtagaaagtttgtgtgtatttggtaaaggtagccaaggataagcatctgatggttaagctgcctgtcgggatccctactaatgttctccacatgaccacccgcaaatctcgaagcagtttatgaacaaacacatgggaccggtacgagttacgtatacataagacggtgatcgacctgatcagctaccaagacaattttaagcagatcagctctattaccattgacccacttgaagaacaaaacgtgactgtcaactacatgtaatgacgatctatatattcttaccgc

SEQ ID NO: 29459 - DNA, 528 bp, Zea mays
  Clone ID: MRT4577_126876C.1
ctgcggtgcaactctactttgaaccacctactttcttccctagcaattgtgttgttttactcaactatcacgtatctctctggaatatgaagttctctactctattcttcacgctaagcaccttatccttgatagctgcctataatcctaggcacgttgagggactaaagcgcgttgaggcttttaagcgctcatcgccgctccagagcgttaatattcagaagagatggaattgcgctagatgtttctttaccgcctgccctgctaatcacgaatgttgccattgtggctattgcgctgaactcagcgatgcttgtacgaatggaactggcaattgattacgataatcctaaatgttacacggggttgggctatacttgcctagtcggtccgggttagggcgagacgggtcgatgcttgtaagccgtgcgattgttgtctggcgattcgtagtagaatgaagttaccaaggtttaaccaatagtataagaacaatcaattctatgtgcgatagaataactaagtatc

SEQ ID NO: 29460 - DNA, 776 bp, Zea mays
  Clone ID: MRT4577_126877C.1
attgggacctcgaggcggcgggacaaccgtctcgtttcctctccacggcgaccatcgatgctcacgcggagacagcgatagccttcactgctggtgctctcaggcacagcaacaactgcttcctttaccgcctcgtggcagaagcctcaaggcctcctttgctcctccgcgcgggtgacatacatagactcgatggacacactgaaagatgaagcaccaacggaagcctatactggccacaatccgtccttgagatcccaaacgacgcaaacagtactgcacctccaattggtacagtacttggcctctatctgctgaattagatggcccattactacgatatcaatgtcaggatccaaaaatacaacgtagaaactcctatgcgaggcaccctaactgtcctaccaggatagtactcctcgaacaccaagctgagtcgccctcagtatcatggctcctcaataagcacaaggaatccaaactcgccacgcactcatcccaagccacgagaatgtatcggccctcaccctccggcaggtatacgagattgccaagttgagacatgctgaccccttctgaaaggacatatctcttgaggagctgtgcaaatccagtcattagcacaggcaactctatgggtactgcgattgttaaggatctatgatcagcaatgccagccttttactgatgaagaaatctgagaatatgggaatgagacatttctatgatcctagtctgtagttgccgatggagaggatacaactattctgtgtcac

SEQ ID NO: 29461 - DNA, 361 bp, Zea mays
  Clone ID: MRT4577_126878C.1
tttcgttatttacaaagtgtggtggaggaattttgtgggtgttggtatacactgatcatgaggatgacactgacaaaaaatccccagaggttggactccccaagatggaaagaaaagcggagggggtggagacctaggccgtgaagggccgttaaaaatagccagcgggaccgaaaagcgcgaagacaaaccatgaagggctggccagaatcaccggttggaataagatctgaaaggatggttgttagaaccgtgcaaccgactaattttccaaccaagggtttgtggcgaaaaattaccaggtgttaagcatgttcctgagtccatgtggtgagaggtatccccttccaaaggcccgggg

SEQ ID NO: 29462 - DNA, 456 bp, Zea mays
  unsure (1)..(456): unsure at all n locations
  Clone ID: MRT4577_126879C.1
gtttcatttattactgcacacgcgcggggaaccaacacaagcccagcgtgcgtaatctatcgcccacatgccggcgccgacggaccttaaccagaaccgctgctacctggactatcggacggtgcggcgagagcctgatagcacacctgaacagggctgcactacaacacaaaatgaactggagagtcggaccgacacacacgatgaaggcattcatgatggtgcacttgcagctccccccaggacaagcaatcactcgtacgcaccatgatgttacttctgcatattagcgacctgcttgcacgtttcgcgcttcgagagcttcttggaccacttggccacgttcttcttgatagtgaagagcttactttctttatcggtggtcacgatgtagtgcgaggattggaggtcggagaggtcgatcagggtgaactcgttntcaggcaggtacttgtt

SEQ ID NO: 29463 - DNA, 579 bp, Zea mays
  Clone ID: MRT4577_12687C.1
ttttttttttttttttttttttttttttttttttttttttttttttttttttttttttttttttttttttttgggggcccggaaaatttattttattccatctcgacggggaagggacccccatttaaactttcaaaaaaacaacaagagctagttttttgggggggctgcctgcttgaaacaagggggccggacggggaaacatggaaggatccattggttgtgccctttgggcccccggccatgggggaattggataaatttttaggggatcttgcacccccatttttcggggagaaaatcggggcacctgtatttgatggcccctttgtccggggacacggggacccattttttggaggggggggcccacttggggaggagggcgtccaaggtccacacccccaaccagttggggcactccccgaaccaaaattgtttttttgtgggcggccctgaaggtcctttggccacgggcgaaaaaaccaaaagggcctggaaaactaagatccccaaaaaaggggtgtttttaatttttttaaactttggttttacaaccgtttggtggcgacctttatt

SEQ ID NO: 29464 - DNA, 352 bp, Zea mays
  unsure (1)..(352): unsure at all n locations
  Clone ID: MRT4577_126880C.1
cgtccgcacatgctcacagctcctatagcttcccttcttcccccgtacctctcaccaacggtgtcttcggtatgtgaaaacccaattcttcaaccctacaggatccaaagggaactggtggctgggggctgatgattgttggcggatcggggtgataatggtaagatgcctgctggggggggggggggggtcctgtcgggtcgctggattgggctgtccgctccgccgactccgtggtggtgtggtcggggggtggcgggcngcctctggcggccgggttgcctgggcggccgcgggggtcgggcggggttgtccggtccgggcccgggcggcgtccctgccttgcgttttg

SEQ ID NO: 29465 - DNA, 237 bp, Zea mays
  unsure (1)..(237): unsure at all n locations
  Clone ID: MRT4577_126881C.1
nnnnaagtgcccggggcctctgccccagcacctccgttcttccatcagtctcaaagcacaaagaagctgggcccaggaggaatgcctgctctagtggcgggaacacttgtcttacccaaccagcctcctggtgatgctggccttgtcccccaggagctgctggagatggcaagagctatcttatggctgttggatccacacccaggagagatccacagaccgacacgatctcatgtt

SEQ ID NO: 29466 - DNA, 274 bp, Zea mays
  Clone ID: MRT4577_126882C.1
gtgatgggcagtgtgttgtgatgctccagacaaaatttgagaagttctttgaaaaaattgatctgactctgttgaacaggcttctgcggttagtcttggatcataacatagctgactatgtcactgcaaagaacaatgtagtgctgtcttacaaggacatgagtcacacaaattcttatggtctcattcgagggcttcaatttgcatcttttgttgttcagtattatggccttgtgctggatctcctgattcttggccttactcgtgcaagtga

SEQ ID NO: 29467 - DNA, 296 bp, Zea mays
  Clone ID: MRT4577_126883C.1
ggtccggacttcctcgacccaccctttcgtccacgcgtccgccaacccttccgaatgccccttccgaaggccgccttcaaaaaccggtagaaccatactttatcttccaccccctactaccacctgaagaagacgtccgcttgctacctctgcactgtcactgtccccgtctacagcacgctgtacctgaccaacctgaacgtcgccttctgcaacgacctgccgatctccttcgccgcgccgtctggccagaccgtctggagctactacaaagttatgatcccccttggcaagat

SEQ ID NO: 29468 - DNA, 479 bp, Zea mays
  unsure (1)..(479): unsure at all n locations
  Clone ID: MRT4577_126884C.1
atcaatcggggggttgggcctaaccaaaggtagctccttgcgatctgcgtcaacgactgctacaccgtatgtgggatggtccgcaggcacttgtagagggagaggatgatgtcgaggaaggccacctctctgcttacaaggtgttcggacgcgctatgctttcgactctatcacggtgggggttcgctacgtatgcagttcctctcacctgaacagactattgttgtctgctttacgtcgttctagttgtgtgagagacctactctaggtggcttgagtccttataacaacacatgtgtccttatgtctgtcctngtaacctggggtggatccgatcatcactggcgatcaaacagcttactccctctcgacttatatacttctagcgggggtaagcctgcccaatacagctcgaacgcggatccacgtgtgctagggaccatatatggcgagcggaccctttcacaggcgagtgctga

SEQ ID NO: 29469 - DNA, 313 bp, Zea mays
  Clone ID: MRT4577_126885C.1
ttggaactttgggctgatttatgtgcttgtttactctggtcagggccaggctgctctgttaagctgttacgacgtagtagtttttggtgtagtagttgtagttgggtacggtgttgttcttgttcttgtaggtcgtcggtgggtagttattgtagcggggcgggactttgttgttgacggtgtagtagcatggtgtattgctcttgtagtagttcttggtgacgcggggttagttcttgatgtaggtgtatcatgggtaggtattaattttctagtagcatcatgttgtgttgttggcgttggcgtaagtgtt

SEQ ID NO: 29470 - DNA, 570 bp, Zea mays
  Clone ID: MRT4577_126886C.1
gccgatgaagacaagaaggttgttgccgcggcagacgtggagaaggctgatgcggcaggcggtacccgttaattattagcccatccatcggcgtcggcggccttgaatgtcccatgccgcgcggctgctgacaattgcggttggagacgagagtcttcgccgctgtacgtgttcatatacgaacgtacacctattccacacacacgcacgtctcactcataccacacacaaacagctctacagctccacattgttaggaaatagaatcatggaatgtattctgttagggtaatccctacaatctcgggcggccattgtgccgcctcattgtaatcctctctatatataaatacatggctgtccctaaaaaaaaaaaaaaaaaaaagggcggccgcccttttttttttttttttttaagcatatttcctttttcttattcatgcccggaaaaagggcattgcaataaccttcttacaaaaaaaatcaatgatccactaatgacggggtggaaatacctaccatagcgacttctacattacttacacgcgtgggaaccgcgcaacatgccca

SEQ ID NO: 29471 - DNA, 282 bp, Zea mays
  unsure (1)..(282): unsure at all n locations
  Clone ID: MRT4577_126887C.1
tacgtcggatcggacggcgtgagcgtgaagctgcgggagattgcgngctgcggagtcgaagatgtgttgcgtatgctgtgctggttgtgtgagtgaatgtgtgtgtgtgaatgatgggaactggagctgagctagcgggtgtatgtcctgcctgggggcgtgagggaggcgtgtctagcctgggctttttgtttaggagggtatgcttgccctgcaggtggctgcgctgtgtgaatgtttgtgggaagccctggtgatggagctgaatgcgnagggagggag

SEQ ID NO: 29472 - DNA, 495 bp, Zea mays
  Clone ID: MRT4577_126888C.1
ctatagtgtcacctaaatcttttttttttttttttttcttttttttttttttttttttttttttttttttttttttttttttttttttttttttttttggggacaaagggtcaaaataaaaattctggacagggctccccgattggcggcaaatccagcaaaaaacccagggagcaaaaaattttcttcaccccacaaaggcctggggaaagggattaaaggggggtaaaaaaagaattaacgaaacccccgagtcccccctccaacaacacaaagggggtacaaacaacccaaccggccaacccatgcatccggatccgaggaccatcacccttacaaagggtacccaaaggccgggggcggggggggcccatcgtcaacagccatggaaaccggctcgctggccctggaagccaaggcgttggtccgggcggcagcggttgacggcccgccaattagggggagccccccggcccccgggggcttgagggcccg

SEQ ID NO: 29473 - DNA, 759 bp, Zea mays
  Clone ID: MRT4577_126889C.1
ggccgcaaattttttttttttttttttctaaccttttttgaacatacacctctaccgaggaagcgaggcagggcagcactataaggcctttccaaagttccactagtttgagaaaacccgctacagattcaggacgaaggaagcatagaaatacctcgtccgaaaagctttacagacagttcgacccgagggcctccctatactctagcagcgacgcctcctcgcttgccccttccgggtaaggtaatctctccctagctttcctaattacttagccaagggcgtcacattccacccttgtggtagcactgttttctcaggtggtcgctccatgttccaattaacataatgatcttatcatgaacagtaaataacaaactaataataaaagtgtaatcatgaataatgtatatctctatacccaaaaccaagcaaaccaatagcgagtactacccaaaaatacagtggtaaacaaggtataaagatagccaaactagggtaacctatttggtcccatcaaaattaacctatgtggatcattatgattaataagaacatgattggataaaaagaagtgatcaagggcacaacttgcctgggacttgagattccaggtaccaggatgattcttcagatcctcgtgacttcacgcgacgatgggcccaccacgcttccactgcgcagcgttccggtagcggcggttgtcggctggctgttcaatttgatctgttctatagcacccccctgggtgaagttatt

SEQ ID NO: 29474 - DNA, 697 bp, Zea mays
  Clone ID: MRT4577_12688C.1
gctgttgcgatgtagtagtactactgaagcacacgtccgcgcgcacaggcttagcccgcacggagcgaaccacacgggaaaagctgatgggaagaaccagaaatccgcagaaacgtcagttcctgcagcttcaaaatcaagtccggcttccaagaagagcaaggatgacgatgattctgatgaggacgagactgatgattctaacgaggacgagacagacgattctgatgagggtgagggtttgtctcctgaagaaggcgatgatgatgattcaagtgatgaagatgataccagtgacgatgaggaggaagacacttcaactcctaagaagcatgaggcaggcaagaagagagctgctgaaagtttcgtgctgaaaactcctctatctgataagaaagcaaaagttgccacgccgtcagctcagaagacaggtgtgccattgaacggactaacaaaactgtcgtcgaagattgtataggtgtgactctgttcaaggatagtcttgaggttctagaacagaagagtagtggtgtgcatcagtgtatctgtttacaggataatagtggttggttaggtgtgtgcagaaaaagtttagcgttatggtttgtatgtgatacatattaactgtgccttggaatgttcatgtgttgtcctgatttcgtgtgatatctcttgttcagttcaagttgcgttttct

SEQ ID NO: 29475 - DNA, 648 bp, Zea mays
  Clone ID: MRT4577_126891C.1
cggactcgtggggacaaagtatacattagatagtttaggtttgataatggatccaaaatatgttagcctatgcatcttcgtattacttgtattgcatggagatactactttggcagaaacttgcagggagtttgctaaatggcatccattctgctttagtgcaatgtgcaaggcaaattgttttatagaaggaaaaagctccgatggttcctatgcaaagggatatagatgtgattcacatggatttcattctatgtgtatttgccttttgtgtaaaagttagttatcttaagacaagcggggatatattctatgttcatatccgtcatttagggtgttgttcaaataattttatgggataataattaactagtttgtttacttctagatatatgtaatactacttaaataatccttatttctttaatttcttagctctatagctagaaacatgtttttagttgccaaccactttagtaatatatgtttcttctcctttattataaacctcaatacttgttgtgagcttctcattcatagtcttgtttacttgagaggtatatatatatatatatatatatcaatgtattcattaatagtatatagggttgtaatcggattgaatatggacagatatttcttgtgctc

SEQ ID NO: 29476 - DNA, 238 bp, Zea mays
  Clone ID: MRT4577_126892C.1
gcgaacagcaccaagcaacacacggagagccctataccagcacaaacactggcgcgggggtttagaagcagccagcgcggactaatcctcgcagcacgacatcacgctgtccatgctccctgcatccaacgccagtgctgcgacgatccgcgtgccggcataccacaatccatacgacccgttacagagctgcccatggatcataacacgacccaacaggaaaaatacaccgcaagca

SEQ ID NO: 29477 - DNA, 259 bp, Zea mays
  unsure (1)..(259): unsure at all n locations
  Clone ID: MRT4577_126893C.1
tactacaaccaacancaagcnanccagcggtgggccaccagcggcactaggccccctaccccggagcagcaccgaagcagcccgaccaccccgaaaagcctacgctatcaacttccaacctgcaagccaagctaccatggggcgaaggaccaagcagtcttcttcttcgttgtcgttgctccggcactcgcggagccgttcaaccaccgcgcccaccacgccgaggccggaaccagcagcagagccccccgccgggcgc

SEQ ID NO: 29478 - DNA, 558 bp, Zea mays
  Clone ID: MRT4577_126894C.1
acaacaaaggtcttacattattttagatagagttacgtcgaacaacaaactgcatgcgacaatacaacagttttgaaggcaatatatgccgtgaattgaaggcagctatattgttccgcgttaaccttgtctgccgcgtcagcttcaggatggcacaatcatcactacacaacacggtgttggtgttctctcttacagcctcgatatctgaaagggaaccatgacttcattcatctcctccctcatgacaaccttcgcgacctggaacaggtcggagatgcctagctgcgtcgacagacgccttcggcagtcctctgcagcggcaatgcctgacgaataagctccatgcaccgacccggagtggtcaatgcaggcggcctccccagcgaagaacaggttgccaaccggagcacagaatctttcatacaggtcagccggtttccccaccaggtcgcacgagtaggagccaagtgagtttgggtcactgccccaacgtgaaaccaaatactgaaccggttcagttgcctgcggtagcattttcctgagctgggacataac

SEQ ID NO: 29479 - DNA, 514 bp, Zea mays
  Clone ID: MRT4577_126895C.1
ataaaaaaaaaaaaaaaaaaagaaaaaagaaaaaaaaaaaaaaaaaaaaaaaaaaaaaaaaaaaaaaaaaaaaaaaaaaaaaaaaatgaaggtttttatttggggggggccctcgctgggggggttttttggggatttccctctccctgggggcggttggtccttcttttgggggggccctttggggttttttgggattttttttacagtggggttggccggtcctttgtcagcttgggggggtggaaaatccttggggttgcccttatttttccgctttggggccccttttctttttgcccgttgggggattaccgggggggccccaaccgttcgcccttccaaacattttccctttttgaggggggagtggcccccccttgggggggccctttaggggggggggtcttggggcccaccccctgggtaaccccccctctcgcgatcgccttaccggccgcttttttgggtttgtttctttccttgggggtccctttcggggggttccccgggg

SEQ ID NO: 29480 - DNA, 342 bp, Zea mays
  Clone ID: MRT4577_126896C.1
acctttttatttttgttttttctttttcagactgaaacctccttgattattgttcaacaactcacaaaaaatctaaaactgggcaccaccatacaggacggcgggagataatgctgcacaaagagacagcgcgtgcaaaaccaatgtggatccatggtgcaggggcaccggtcacatttattctcacgctacacactcagaaaacatggtctgtcgccaaaggccattgaggacgacccacgttaggcaggcagaaatctatctgtctactagcctacggtgctcttgaacatgaggagaatcaagaccacgacgcggttgctgtggcccacactcgttgtc

SEQ ID NO: 29481 - DNA, 1002 bp, Zea mays
  Clone ID: MRT4577_126897C.1
cattgggtccctcgaggccggccgggagttcccatctcagactcagggagagacgagagaagtggacacctcgcctgcctggactcgtctactctagtatacagaaaaaagcagaagagatacggggatgtctaagacggcgggcgtcggcagactcggaggagccggggcggcggacgcggcgcagcagcagcagctggcggcgggtgatgctgcggtggcgcgggcggcgcggcccatcgagacgctgctgcgcgcggcgccgctggtgctgtgcgtggccgccatgaccctcatgctccgtgaccagcagagcaatgagtacggcaccgtcgcctactccgacctggggggcttcaaatacctcgtctacgccaacggcctgtgcgccgcctactcgctggcgtccgcgttctacacggccgtgccgaggcccgccaccgtgtcgcgctcctgggtcgtcttcctcctcgaccaggtgttcacgtacctgatcctggcggcaggtgctgcggcggcggagctgctgtacctcgcctacaacggcgacaaggaggtgacgtggagcgaggcgtgtggtgttttcggcagcttctgccgccaggcgcgcacatccgtggccatcaccttcggcgccgtgctctgtttcatcctcctctccctcctctcctcctaccgcctcttcagcgcctacgaggcgcccccgccgtcggcgctcggcagcaagggcgtcgagatcgccgcgtacccacgctgaagccgccggccattcatcggaggctctggagggcgatcaagtaacgaagggagtaacgaaggctgaattgtgcttgactgcatcgttcttgcgtgtactgggtggattgaccttgaacttcttactacagccgtaaattctgtgtatgtttcgttatggcaacatctttctgtggaaagaatgtttgtaacaagcagacgagaagttgtgtgggtaggaaattgtagcaaaattgtttgccagcg

SEQ ID NO: 29482 - DNA, 1072 bp, Zea mays
  Clone ID: MRT4577_126898C.1
ccagtaggcggagcagaagcggcggccgtagacggactcggaggagccggggcggcggacgctgcgccggcgggggaggccgcggcggcgcgtgtgcggcccgttgagacgctcctgcgcgcggcgccgctggggctgtgcgtggccgccatgaccgtcatgctccgtgaccagcagagcaacgagtacggcaccgtcgcctactccgaccttgggggctttaagtacctcgtctacgccaacggcctctgcgccgcctactcgctggtgtccgcgttctacacggccgtgccgaggcccgccaccgtatcgcgctcctgggtcgtcttcctcctcgaccaggtgttcacgtacctgatcctggcggccggtgccgcggcggcggagctgctgtacctcgcctacaacggcgacaaggaggtgacgtggagcgaggcgtgcggcgttttcggcagcttctgccgtcaggcgcgcacatccgtagccatcaccttcggcaccgtgctctgtttcatcctcctctccctcatctcctcgtaccgcctcttcagcgcctacgaggcgcccccgtcgtcggcgctcggcagcaagggcgtcgagattgccgcatacccacgctgaagccgcgcgccggccttccatcgggggctctggagggagacgtggttgcagatctctattatatgtgtaggcgatcaagtaataagggcttatatttatatatataatacttcgttcatatagtagttgtttgctgctacatatgattagtacagtgctgctgctgctgctgctgctaaattgtgcttgactcggtaattatatggtttgaaacgttcttgtgtgtactggatggatcgatcctaaaattcttacttgtttctgtgcatgcattggttatggcaacatctttctgtttgtaacaaacaaacgagaagttgtttgggtacgacgaaggccttcttttcttgcaaattttttttttgcaaaatataaatagtagcacttttgtttgtatttgataaatattatttaattatagactaactaggcctaaaatattcgtttcgtc

SEQ ID NO: 29483 - DNA, 432 bp, Zea mays
  Clone ID: MRT4577_126899C.1
aaaaccgccccacctttagggggggatcaggacccagcccacgggtttatactttaatggacaaaatttcctttccaagcccgattggggggggtttttttttaaagctaaaagttccaaggcgaaccctgtcctttcaaaaaaaggggaacaaactccccccggtttccatgtttcgttttatttggcttaaagaaggaaggggtggccaaactatacaaagggattgttttccaccccgggggttcctacaaatgggtaactaaaaaaaaacgctggaatttcctcacagaagcttataatcccttgggaacaaaaaaaaaagaccccccgaggcatataagggccccatccttaatttgttttccaggttattttgttgaggcaatttcgggggccccagacggggaaaacttttgaatcaaggaattt

SEQ ID NO: 29484 - DNA, 805 bp, Zea mays
  unsure (1)..(805): unsure at all n locations
  Clone ID: MRT4577_12689C.1
ccatctcccgatcgatctcctgttcgtggacgagagcgccgccactgccgcaccaaaccccgcgtgattcgcgcgaccccttgctccttttccatctgaggccgccgtgtggttcctctcgaatccttcaatcagtcctcgcaggctccactttgttttcccctaggaatcgagcgtaaggacctcaccaagctctgccgactccggcgattctgacgaacgatttcggccacacaagaccgcaccacatcgagctcttcaacaaatccggatctcgccgaagtattgcccttgccggagcttccccgaatagttccattgcctctgaacacgggataccgagctcccgatcacgcccaaaatcgccaacaccatcgagcgacggtgcgccaggaaaggacgctcccatctccgttgaagctaccatcgtctccgtcatcgcaagccgcatccgctcttcacctcatcttcactggagagccaccggaggagcgccgccagccacgtccgaagccgtcgctgttttcccctgcttcgattgctcggagcgtgacgagtagaattatcaggattgtgagtacgatgatcttcatccgacttacagattttatacgacgagtgagtgatacgatgtagggttacgatgtctatactcgacatttgcctgtggtgttgatggacttcatgaagattttatttgctttttcgctgtattttatttgtatgctagcttgagctatgaaggtatgtattatattanattctggatctatgatgtaatggtatgacatgtggtttattcata

SEQ ID NO: 29485 - DNA, 741 bp, Zea mays
  Clone ID: MRT4577_1268C.1
gagatctgggcgggagtgcgcagcgacaccgcgtgagcgccttccccaccacctcccccgtcgtgctttccgccgacccccatcatctcgctctcacgcacaccgacaccgccaccgccaccgccgacgccgccattttctccatttattgacgggaaaccccctctccgctctccctcatccaccgacgccaccgcccctcctcctcctcctcctccccgccgcgtgctgcgcacggatttcagaaattacagtccaatatggcgacaccctacacacctaagagcatcctcattacaggagctgctggtttcatcgcttcccatgtcacaaaccgcattgtacggaactaccctgattacaagattgtcgtccttgacaagcttgattactgctccaatctgaagaaccttctccctgccagctcgtcaccaaacttcaagtttgtcaagggcgatattgccagtgctgatcttgtcaacttcctcctggtcacagagaacattgacacaataatgcactttgcagcccagacacatgttgacaattcttttggtaactcctttgaattcaccaagaacaacatttatggtactcatgttcttctcgaagcttgcaaggtcactggtcagatcaggaggttcatccacgttagcactgatgaggtctatggtgagactgatgaggatgcagtggttggtaaccatgaggcctcacagctgctcccaacaaatccttatt

SEQ ID NO: 29486 - DNA, 314 bp, Zea mays
  Clone ID: MRT4577_126900C.1
tgggggcccactcatcctttgttcttttactattattccccgatctgtttcttcatactactgtgcacccggggaggggtctcacgatatgcggtgtcttacctttatatcttatctcaatctcttatttctctataacctgagatcttttactcttatctcattgatagtatccattcaattattctttcaattcatactataatccctactccttaggcttaattttaattactcttccctattaaaccatcttctatataccctttcatcctcatcccaatacttattatgcttcatctattgtgccctta

SEQ ID NO: 29487 - DNA, 444 bp, Zea mays
  Clone ID: MRT4577_126901C.1
acgaaaacctcctggggaacgggggggccgataaaaaaatttgatcccgggggggggcaaaggaaaattgggttcatacccccccaagggaaattctcaacagggaaggggtgaagggacctgggttgtcttaacccggggagaaatcaacaaagctttaatgggggggggggggggagcagtagcaaagggaagcgacgtgggaaggggggggacaggggcaaaccaacaaaacgggccggccgggggggtgggacgtttatacaaaggggggcttttccagaaggttgaggacgtcatcctggttggtgagcttggccacctcgatgggggttttcccgtccagggtttggaaggtaacgggggggccgtttttgaaaaggggggggacgcaatccttgggggcgtatccgggggggtaatgcaacgcggggtttttgtttt

SEQ ID NO: 29488 - DNA, 266 bp, Zea mays
  Clone ID: MRT4577_126902C.1
ggcggttgctgaccagtgaatatgtgcatttcagacagaaccagcctgtacactggctagaccgatgggtctatcacggtttggaagatctacaggtactgggtcgcacgctatatataaaaataacattggtactcgcgagtgttcagtggaaaacatggtaacgctcgccaaggtaaaaatgtcgggagctatattgacaattcgataattggcggacgcctgaccattaccaacttactatggatgaaactagtgttgcacat

SEQ ID NO: 29489 - DNA, 394 bp, Zea mays
  Clone ID: MRT4577_126903C.1
gggaaaagccaaccaaaccgacaggctggtggtcacttgataacagccggcttttgggtcaaaggcacacaacccccccaccctagggggggggctggcccacaaaaaaaggtaaccggggctatgggggcaatagagggcccacgatccctttgggccagctactttttaccgggggatggggacgttccaatcggacaccttcacattgaaggggggggacttttaaagcgcccggcgaaactttttggggcaactcgggtttttgggaagcagaaacgcgaaaccaccgccaccagcttcgaccagtttgtacccccaacaataaggggcggggaaggggaacagcttgtccacgggcctgttgctgcaaaaagggtccaacttctggggc

SEQ ID NO: 29490 - DNA, 154 bp, Zea mays
  Clone ID: MRT4577_126904C.1
ccggaagaaggcgagtctctttccgttatcagcgcaccatggctagtggtcccaagatgcatctgaagcgcgtagggctcacgtaacactggatgctcgctaagctacctggcgtgtccgcacctcgtctatccactggtccacgcagactgaa

SEQ ID NO: 29491 - DNA, 658 bp, Zea mays
  Clone ID: MRT4577_126905C.1
cattgggtacctcgaggccggccgggaccgcctccagcaagaaccggcaaatggttcgctaaaatatagcggcagctcgacgaccggtaaatgtggagtgttgttgttcatccgctatccgtccgcacagagctgttgcctggttcttatcgtcttcgccaacagcgtgccacaacacaactctgctacgccaccagctctgctgctgcgccaacccgttgagcaccacgccatggccgtcagggcggaggttccacgacgtggcgccgtgcgtggtctcgtccgcgacattcgtgtccagagcgtgccgattcggtccagcacatggaaggagcatcatgggcatggagtccatggtggcctccggcggcgcggtgctgttgtaggcagccctatccgccgggtatgatctgggcaacctgtatgctccaaagccacagccatacaggtgggtggaggacatgcactaggtgctcgatgatatgctgaaccggccacccagaaatcagttgtcgctgttaagccaaaacaaacgatgcttattgtgttttttgccatttttattaattgcaatcgttgaagcaccgctcagaacatgaaagggaaggaatagaatgctcggtctctcttgtagaaaaaaaaaaaaaaaaaagcggcc

SEQ ID NO: 29492 - DNA, 483 bp, Zea mays
  Clone ID: MRT4577_126906C.1
tgatatttattatgttttgttcgcccccacttgctggtgtcgtgccttccgctttttcattctcctacccggggcgatttcgttgtctttgcttttttccgcgggttcaactatctggccgggcaggcggcgtctgtcagcctgcggtcgtgctcgtggttctggtcgtctttgcaactgccggcggtgctctcctgtgtctctagatatggctttattgtgcctggcctgttaaaactgacaccaatgatgggggggcggtctgttccttccaggctttcgcacccgtcccttcccagtagtagttttcagtgagagagacttttgtcccttttccgtcgcgccgttgaactgcgtgttgtctgtgtcacccctttcattgccctctttaatctcctcgcgtcacgttggtctttcgccacgtggcttcttggttgaatggcccctactggtctgccttccaccaatgtgttcctgtcgagt

SEQ ID NO: 29493 - DNA, 384 bp, Zea mays
  Clone ID: MRT4577_126907C.1
ataatgttccgtttctatttccttggaccataacattcggagacaattttcccggaactaagaaagctgccacgattatatgaagcaggaaaggccaaccggtaaagggaagggcggcaattaaggactgggacggggaaacccaatacacaaggatttgttgggaaaggaaacaaccacgaggaatgaacgcgtgcgggaaaaataaagacaaagggtcccactgaaggcaaatggatccattgctaaccaaacaagccataaggagtggcggctgacaaaagaacccaaaaaaggatccttgggaaaaaaaaaaactccatcagtgcctgtggccacaaaagaaaatgaggatatctcgaggacctcataaaaaacggggga

SEQ ID NO: 29494 - DNA, 705 bp, Zea mays
  unsure (1)..(705): unsure at all n locations
  Clone ID: MRT4577_126908C.1
gccggccgggcctgggactccgcttcctcgaggaccttcacgaaaacagccgccctctactttccgttgcccttttcctggtaaataagtcgccgcgccggggctgagttccattccattccatctcatcgcaacgttacgcaagcatcctccacctcctgccttgcctgcctgcctgcgtcgtagtttgcacaccgcaaccgtgttcttctctctctctctctctccctctcgtccctgagaaagcgccgccgctctacgttcccctcgcttgcgctcggtccggcaaaggcccgtccttccatggccatcgcctcccgtgcaacgaagcgcgcgctgtccaccttcgacaggcagctgctccggtacggtcatcaggagtttcatctgctgtagaatatgtgaatcaatcttccattaatatgaactgtgatctgattcttcggtgcaggaaggagttggtgaggagggtcaaggccacggtggcgggacgtgagtgaagtgagcttgtcgagcatgtggaggtcggccgtgaagctgngactgcgacaagggcgagctgaaggccagaagctgtaaatacaccctccaacagtcttcagacattgatgtatcgaggctttcttgaataataatcgaatgaatggaacagtgtttgtggtactanaaaanaaagaaaaaaaaaaaaaaaaaggcccctagggc

SEQ ID NO: 29495 - DNA, 382 bp, Zea mays
  Clone ID: MRT4577_126909C.1
atttggctcttgatggagccgcttttctttatggaccagacctgatctggtataggacgcagtctttcgatttgtatgcatgcaccaagtgttactataccgatctaaaggaacacttgaactccgtgcgaaagtattgtactattacttgccgccacagtattcgataatggagggtgaagtacactgtactaccatactggaaggactactgactggcacagtcctgtgtgagcctcatgtccgtgcaaatgtaatgacacctgatattacaacataaaaaaaaaagggcggtactcgactagagaggtcgtataccgcttaataaccaggagaccgttacctgcaagcctaccaacttttcttatatagagtctaatta

SEQ ID NO: 29496 - DNA, 301 bp, Zea mays
  Clone ID: MRT4577_12690C.1
gttggttagtggaaccctcgagggggcgcttgttggttttatggaattggatggggaatttttccgggacatcgcgttatatcattatatgtgggtagattcctcactttctgcattggggttcacacattatatatagagctcctatgcccggaatgaatatggctgcccctctggtatgtattattgggactacccctggaatagtgctcctgtctgtactttcatcaaccgtgccgtgcccgttgaaaattttgcctctagagaaaaagctagccttttgcctgaaaattgttttgcg

SEQ ID NO: 29497 - DNA, 626 bp, Zea mays
  Clone ID: MRT4577_126910C.1
ccctctctctctctcccgcacgcgcacccggaagcctcgcttccgccgccgccgtcgctgccgctccgcgccgcgacgcagactcgccccgtgctacgctacgcccggagctcccggctctcgtcggcgcagggatttgttcaccatggcccgcttgtatgttggcaacttggatgcccgggtgactgctggggaacttgaagacgagttccgtgtgtttggagttttgcgaagtgtctgggttgcacgtaagccacctggttttgcgtttatcgattttgatgacaagcgggatgctgaggatgcacttcgtgatctagatggcaagaatggatggagggttgagctgtctcgcaatgaccgtggtgaccgtggaggtcgtggtggtggtgctggtggcggcggcggcggtcgtgatcgtggtgggtctgatatgaaatgctatgaatgtggtgaatctgggcattttgctcgtgaatgtcgtctgcgtattggttctggtggtctgggcagtggaaggcgtcgcagcaggagccgcagtcgcagccgcagtcctaggtaccgtaggagtccgagctatggcagaagaagttacagccctcgtgatcgctctccaagacgccgca

SEQ ID NO: 29498 - DNA, 394 bp, Zea mays
  unsure (1)..(394): unsure at all n locations
  Clone ID: MRT4577_126911C.1
gttgggggggtttgttgtaaaaagggctttcttatttctggggagccacaaacatcacgacaaaaaactttattattgagctataactcataagaaatctaaaagaggggccaccaatgagggggtgtggggataacactgctaggggggtcgagggggtggnngttcattgggggcaattgnggcgngtgnaaaagggggccagcgtgangggcancgtgctgggaaaaccgcaacaactgtgggggtgtgaagaaggtggcaggggtcacaccagctagctggctgaatggggntagtgggtgctgcgtggaataagcaggagaggtcaatgcggccagtggggtgaatggaaaaaattgcgtggggggggcgacaggganctggctgaatg

SEQ ID NO: 29499 - DNA, 1700 bp, Zea mays
  Clone ID: MRT4577_126912C.1
ccggccgggcgcagcaacaagaccgcgcccaatccaatctgcgctgcgctgcgaaaggccagaagagcacacacaacacaggtacagctagcgcgcgcgggcggtgcggggctgtctggcaattacgcagccttggcagcttgcaccaccgcgcaagctagcgctgacggagggaacaagggcttgcgcgcgcacgcagggaggggagggaacgcctgccgccgatcgcctggtggatctcccggcggcgggggaagcagcagagaggggacggccagcagcgcaaccaatggcgccgccggacgcgggtgcggcagcagcgtgcggcgctagcggtggcggagggaacaagggcctcgcgctgggccagttcgtctcgctgctcatcaccgccaccggcttcgcctcctccgaactcgcccgccgagggatcaacgcgcccacctcgcagtcgctcctgaactacgtcctcctcgccgtggcctacggcggcgttctcctctaccggcggcagccactcacgataaaatggtactactacttaatacttggaattatcgacgtggaagccaactacattgtggtcaagtcgtaccagtacacgtcgttgacgagcgtgatgctgctggactgctggtcgatcccgtgcgtcatcctgctcacctgggtgttcctcaagaccaagtacggggcgaggaagttcctgggcgtcggggtctgcgtgcttggcctcatcctggtcgtgttctcggacgtccacgcctccgaccgagccaaagggcctaacccgctgaagggcgacctgttcgtgatccttggttcgatgctctacgcctgcagcaatgtcaccgaggagttcgtcatcaagaaaagcaacagggtggagctgatggcgatgctggggcttttcggagcgcttatcagcgccatacaaattagtgtacttgagcgagaagagcttcactccattacatggactagtggtgctgtgctcccttttctcgggttcgcggtagcaatgttcctgttctactcggctgtgccagtaatattgaagttatgcggcgcgaccatgctgaacctctcgctcctgacctcggacatgtgggctgtcctcatccgcatcttcgcttaccatgagaaggtcgactggatctacttcgttgctttcgccgccactgcgggcggcatcgtcttgtactcgtacaagggctccaatgaagtggaggagacggcacaggtggccggggccagcgacgagcacggcaagggccgggacgaggaggctgggacgcggaacccagcgtgaagctctggcgccagccagcaatggaggtgggttgccccctgccaggcatccaggagtgacgagttgttgttgcatgccttgacggcgagtgtagcagagaacttggtcaagtgtcgcaggagactgcttcaagatttgacgacggagatagtattggtttttatgtaaaacaagaacagttggtaacataccgacaccgaaccgtcgtcagaaatgattagatctaagaatcgaagattttacaggtgtttttggtaggtgtgtttggttgagaaatagagcggtttcatttttattttctgatgtttgatttccaataaaagataagcagagcacagttttcgtaaaaaaaaaaaaaaaaaaaaggaaaaaaaaaaaaaaaaaagcggcc

SEQ ID NO: 29500 - DNA, 466 bp, Zea mays
  Clone ID: MRT4577_126913C.1
tcgaccaagcctctagagtgagtcatactacatccgatccacgaacacccaggactgcacgtattcggcccaacgtctgcacttctgaccgcgactgggcagatgtccaggctgtctgtcgacagatcgggatccctgcgaggcgtctcgacttttcacggcagtactggaaccaggtctttgaggtgatgttgcacgagtatgagcggggcaggacaccgaatccagatgtgacatgcaatcgcgaaatcaagtttggagagctgatcgagtggtgcaaccgcaacggcggactgggcaaggatcggttctcagacgcagacgggcgccgccaccagcacgatcgcctgttacctgaggatggcatgaacgatacgtctagctcagagcaggaaaaggatacgcctcttggatgggactaccttgcgacgggacattacgcgcgggtcgagcgtgatcccgagac

SEQ ID NO: 29501 - DNA, 326 bp, Zea mays
  Clone ID: MRT4577_126914C.1
aacacgcccagggggccaatcaaaaggcaagatcaaaaacacaggcggccgaaaccaggaggaccgaggcgggagccacaggtggggagaataaaggcaaaaccaaacccccggggaaaaaagatacccgggcaaaaggccaaaaaaaaaacaatcggaaacaaaaaagggaaaaaccgggggggccaaaaaaggaaccaaactcaaacaaaatgggaggcacgaacgggccctaaacgaaagagaaaacccgtcgggaaactggcaaaaaaaaatcgcccaacccccaggaaaagggaatcttgaaagggggccctattccgttt

SEQ ID NO: 29502 - DNA, 439 bp, Zea mays
  unsure (1)..(439): unsure at all n locations
  Clone ID: MRT4577_126915C.1
tgggtaccctcggagccggccggatctctagtcttgtcacaagcgacggcagcagaaacgccccgcagcaacaaggccgcgcccaatccaatctgcgctgcgctgcgaaaggccagaagagcacacacaacacaggtacagctagcgcgcgcgggcggtgcggggctgtctggcaattacgcagccttggcagcttgcaccaccgcgcaagctagcgctgacggagggaacaagggcttgcgcgcgcacacagggaggggaggggacgcctgccgccgatcgcctggtggatctcccggcggcgggcgaggcagcagagaggggaccaatggcgccgccggacgcgggtgcggcagcagcgtgcggcgcgcgggaggtgaggcgggacacgctggcctcgcgctgggccagttcgtgtcgctgttaatacccgncaccg

SEQ ID NO: 29503 - DNA, 382 bp, Zea mays
  Clone ID: MRT4577_126916C.1
gttcgagcctcatacactttgcttctttacacatcgggatacgaaggcagagtcctgttcactagacagaatgaatcgaaacgccagagctcctgctgcaggacactataggtccaacaccaaatcacgaatcacccacacaaaaaactgcacacatattacacagacaggaaaaaaggcgccaccacgctaggtgccctacttccatggctggatgactgcgacgacaatgaccacgactatcaccagcagtatgacgatggcgtagcacattcactttctcgaattcctctgcagattcttcgtgttctggagcgcgctcacaccacgctgtatgtggctggcggcgtccccgacatgggtatggaaggtgcagcacatt

SEQ ID NO: 29504 - DNA, 302 bp, Zea mays
  Clone ID: MRT4577_126917C.1
gggggggaaacttttgaacattgggtaattttcagaggttttggacccaatgcaagacttttaaacatgccctgatcaggtatctaaaccctcttcttcggagcagcaagtacaggcgatggacctgccgccggtgtaacctgtgctgagcgggagcagaggccacgcgcaactgaagctacagcaaagacaaggaacagaacgtacaacccgagcagcttcggcgttgctttccctgaacccagcatcttcccaaacattgcggacaggtaggtgagcatgtggacaccggccattaggga

SEQ ID NO: 29505 - DNA, 312 bp, Zea mays
  unsure (1)..(312): unsure at all n locations
  Clone ID: MRT4577_126918C.1
agtcgatctatcaccaccttattcctcatagttagttagttagcactaacattagaaatgaagtcatcttatcaaatttaaggaatgagcttatgatgtaccaccttaatttggatgaagtgattcatcaaacaaacaccctattgatataatatagcattcttgttttgtgataattagagatttaaaaaaaaaaaaaaaaaaaaaaaaaaaaaaaaaaaaaaaaaaaaaaaaaaaaaaaaaaaaaaaaaatttagaaaaaaaaaaaaaaaaaaaanttanntaaaaataaaaggtggggggggccttttt

SEQ ID NO: 29506 - DNA, 291 bp, Zea mays
  unsure (1)..(291): unsure at all n locations
  Clone ID: MRT4577_126919C.1
cncaaacaaatctaggagagtatgtggccaatccaagcatgctggcacatattactatacaacaagcataaccgcacaagcacatattattaccacgtctcaaacatctcataccagcaattatataaatagcaaggttcttataaacagagcgggagagagggattcatggggcctaaacatctggctaaaagatataatctatatatagggaacctaagctagatgcataataataatgaacattcatcgaaaggacccaacacactcttataaaaacttcattcacaa

SEQ ID NO: 29507 - DNA, 1246 bp, Zea mays
  Clone ID: MRT4577_12691C.1
cggcgctcggagcgggcgggcgggagcaacaacaagacaccagtcgcggcggcaagcgcacttgtccaaccgcgcctcggccaaaaccaaacccatcgccgaccgccttctcctcgctacgccgcggcggcggcagcctgccggtctttgacttaaggagagatgaggcgcgtcgctcagcggccagcgaagtgagtttccctttcctaggggagagagagagagagatcgatggtgcggggctcggcggcggcggcggcactgctgctcctgccgtggctgctgctgctgctgctgctgcatgcggcagccgcgggcaacgggagctgcgcgcggagctgcgggggcttgacggtgcagtacccgttcggcttctcccccggctgcgagatacggctcgggtgcgacccggcggacggcaccgcgtggctcgggaagacgcgcgagctgggcctgctcgtgtccaacgtcacggcgcgcgcgctcttcctcaccctgcgcccgaactgctcgcgccggctcaacgcctccgtcgaggcgctcttcaccaaggcgtacgcgcccggcagccagaacgggctcgtcgtgagctcgtgcagctccgcctcccaggccgaccacatcagtaactgcagcgtcccccctagcgcttacctcgacaactcgtcccagtgcggccgcgccgccgcggactccatccgctgccccgtgctgacacggccgaccagcgtccccgaccgtttccctcacagaaccaggatgcaagcgctcgccgcggaatgcaccgggctggtgtcggcggtgagctacttggacgcgccggcgccggcgctgctgctagccacgatggagctggagtggtggatgctggggccgtgccgatgctcgagccacgctaactgcacccaggtcaccacgccggtcgcagggcaggaggcgttccggtgcgactgccccaagggctcggagggcgacggcttcgccgagggcgtcggttgccgggaaggtccaaaatgcaatccttcaaaatacctacaaggagattgtggcaagacgatccaaatcgtccttctcgtggcagggatcatgtttggcgccatggtgacgggcgtgacctgcctggcgtaccaactgctgaagcgccggtccgcgtccatccgtatgaagcgcagcacgaagcagttcctatccgaggccttctgcacggtgcccctgtactcgtaccgcgagatcgaacgcgccaccg

SEQ ID NO: 29508 - DNA, 2538 bp, Zea mays
  Clone ID: MRT4577_126920C.1
taccgtcgctcgctcccctctcgttgtccgccccacccccagcctccgcccgtcgcgtcgtaacagacgctgccccagcctccgccccgttctccccgtcgtcggcaccccgcttgacgccccccctgtgctccaagactccccctccgcctccgtcctctcgccggccttggcgcctgctctctccgctgtgggtgtcagttggaggggtcccgcaccatgcagaagctcctcggtcaggcaccgccacacgccagattcgagctcctccccacatgccgcaagatgattcaccgtgcactccgccgctttctgtcacgacgttgaaccgtccaacctcgccatcggcggcggcctcctctctcttgccttcctccccctgtgcaccgaatcatccctctctgtttttgtgctggatttttggagttttaccagagttgtttcctggggtttagcgggaatcctagatgtgtacccccttggactttaggtccctgtaatttcgtaatactgccaaagattgggggttttagtgttagtaggatcattatctctgtcgtgtttggttgtacttgtgctgctaatttggggacaatttagttaggaatagggagcacgaatgccttgccagtttcattgtcttacttgctgtatgtggtgaatctaatgcctactttaggccagcatgactattggtttgataaaagcttgcaatcaagtttggaaatgcattttttgttttaatggtactaattgataagctataattttcagaagtaacgtttcttccttacaggttgctctggtcagtggacattacatatgtattcttgctgcaaaactgtagaaaatttgctatgaagtctatgcgttggttcctggacttctacgtgaagagttcacattgatcttcggtccaacagtcattttgcccccaaaagagccgacatatattttctactcgttgaggggtttacgaatttctccaagactgcaagagaacttgtgcaccggatgcagaagattgatagcgacattatcccgagtggatttaagtggatctagaacagcatgaagggcttccttgacccaaaaacttcatccaagattcatgtgcttggttcgaactaccagagcatgcttcttgaagtaatagattcgagtgagctgccagaattccttggcggttcatgcacatgtagtgacaagggtggtccgctaggaagttgctgatgcggtggacaatgctgtcatcagatctgttggtgttcttcccagctgttttgtggtttgtgtgggcgtacatcaaacttggagtcggtattagtggagaggagagatgggaggggtggaggtggctgctagccatggtcctgagcagtccttgcttggtattgatcgatcatggccattttcagtgtaattgcgttagccttggacttgcgcttggagcaattgctggtgttctgtcgaggaatgagctcgtcgctgcagatctcttcactcttgcaatcaatcacaaacagttcatatgggcgcaacagcggttggtgcagtggcgcccgtgtgagtggtggctgtcggggccaccagtgcaagctctgtccaggaggaacgggtacatccgaatagactactacgacgtttagatatgattattgattagcataattaaaaatagcatgttaaatgcatcttcagggtcaaaggaaaatacaaattacgacctgcaatattagaaaccaacatcatcttttgtgttgtgagtttaaattcttgctttgatggttttcattttcttaacactaaatccaagtcggcgcttctgttcttatcaaggtaacacatggaataccggctgcatttgtaaatcaaagctaggacaaaagcgaaaaagttggctgggcactaaccaaagaagcattttttattttaggcatcaccattggatttgtgtcgttctgattgtagaaataacatggctttaggattggaatatttaccctgtattatcatttatgaaacatagtcttatgattgttgcttttggaatttgtacaggagttgttgtttaaaataaaaaaaaaaatgttttgtttataggccatttagccgagttgagccccaccaaatcccaggaaccatgccatttgggtggtcattaaccaacaaacttttaaacttacgtggaaaactcccaccaaccggaggggaaccccccttttttcctggccggggcccccccctttgtaagccccccgaggaggatgaaccacccccccccaaaaaggaaaaaaaaaccgtagcccccatgtcgtttccttttattcccccccgtttttgtaacccccgcccggttgtagttgtacccccccctccggggaacccgttttttgattggggaaatttttgccccggccggcccccaagccccctgccaaaaaaaaaaaaaaaaaaaaaaaaaaaaaaaaaaaaaaaaaaaaaaaaaaaaaaaaaaaaaaaaaaaaaaaaaaaaaaaaaaaaaaaaaaactcgagaa

SEQ ID NO: 29509 - DNA, 373 bp, Zea mays
  Clone ID: MRT4577_126921C.1
gtcccgttccagaacactcgcgctctcgcacgacggcacgagcgcgctactgccatagtgccatggcgagcggcggcggtgctgcggcgcggatggacccggaggtagcaacagagctggtgcggaagggtgccaccctcctcctcctcgatgtcccccagcgcaccctcttcggaatcgatacccagatgttctctgttggacccaagttcaaagggatgaagatggtgccaccgggagcccatttcgtctactactgctccccaaacaggcatgggaatgagtttgcacctactgtcgggttctttcttactacacaccaatctgaggtgattgttcgaaagtgggatgtgcaagaggaacgattaatcaa

SEQ ID NO: 29510 - DNA, 308 bp, Zea mays
  Clone ID: MRT4577_126922C.1
ccggggcggccacgcgtccgtcgccacggtcttactacccgttagccctggggaggcacaccttgtcgggggcagagacagcgaccactccggcgcacaagcgggatcctcttcttcctcggcaagtgccccatcatgtggcagtcggtcaagcagcacgcggtggccatgtccagctgcgaggccgagtacatagcggcctccaccgctataactcaggcgctctggcttgctagcctgctcggtgatctacttgtgagagccgttgaaacaatggaactgcgcttggacagccagtccggcctggc

SEQ ID NO: 29511 - DNA, 666 bp, Zea mays
  Clone ID: MRT4577_126923C.1
agcaacaatcataagactatgtttcataaatgataatacagggtaaatattccaatcctaaagccttgttatttctacaatcagaacgacacaaatccaatggtgatgcctaaaataaaaaagcttgtttggttagtgcccagccagctttttcgcttttgtcctagctttgatttacaaatgcagctggtacagaggaattccatgtgttaccttgataagaacagaaagcgccgacttggatttagtgttcagaaaatgaaaaccatcaaaacaggaatttaaactcacaacacaaaagatgatgttggtttctaatattgcaggtcgtaatttgtattttcctttgaccctgatgatgcatttaacatgctatttttaattatgctaatcaataatcatatctaaacgtcgtagtagtttattcggatgtacccgttcctcctggacggagctgcacatggagggcaggcattaatcatcaatacttccaggtctagaatccaaatcccaccccaaaatagtgaggcctgaccttgcactggtggccccgacagccaccactcacacgggcgccactgcaccaaccgctgttgcgcccatatgaactttgctatctgttcaacagtcttgaagcaacttcctcccctgtttgtgattgaatgc

SEQ ID NO: 29512 - DNA, 992 bp, Zea mays
  Clone ID: MRT4577_126924C.1
ctacggcttcccggcggtgtacagctacctgacgcggtcgcgggagagcttcgtgggcgcgttcgacgacccaggcccgcacggccggggccggtaccgcgccgggctgggccccgaggtgaccgccgggcagttccgcaagggcgcgcagtggttcgagctggaccgcgacctcgccgtcggcgtcgtcgccgacggccgctactaccccaagttccgggaccactgccggccgccgtgctacgtggacgagcactacctgcccacggtgctgtccatcgaggcccccgcgcggatcgccaaccggagcgtcacatgggtggactggtcccgcggcggcgcgcacccggccacgttcggggaggaggacgtgcacgaggcgttcctcagacggctcacggcgcccgggaaggaccagggcaactgcacctacaacggccagccggcggaggtgtgcttcctgttcgccaggaagttcgcgcccagcacgctgcgcccgctgctcagcctcgcacccaagttgctcggatacggctgacactgctctgctctgctctcaacctgaaatctgaatcttctccagtgattgataattgatggtataaatatgtactctagactggacgatcgtcatccatcatcgatgtatagatgtagcgaaacatcatttttgggctcaactggtgttaacaccgatagcagcaaagaggagaagagacacgggaaactggacagccggaagaacgaacgaatgttattcagtaaactgttgtcccacaaacgaacggaacacaactatttagactacctctagcaagcttactcattttatttttatcttctattttaaattttactatgttaacagcgtagtttactgtataaaattgtgttttgtgtttatcttctattttcaattttactctgcgaccagtataatttacagtgtaaaacagtgttttgtgtaatcatgtgagtaacctgctgaacat

SEQ ID NO: 29513 - DNA, 391 bp, Zea mays
  Clone ID: MRT4577_126926C.1
ggggcaagaagaccgggatacaggggacccatctttgaaaactctgaaacaaaacagttttaaggggggggggggcatggaacaaaccaaaaaccccatgctcggggctggaaactttccggtaaactatgcggggaaccacccatcgggattggcccccctcctatggaaaccgggggggtttaatgaaacaagcaacagcaacaggggctcatgccgggtggagcaaacaactcattacaaaagatagcaggatacgaaaaacccttccaaatgaatgaaaaacaagtcagtttacaaataatctgcacagcatgtttgaaactgaaacgaacaagcataacttaaccaccggccaccagccattagggttccagagttccaagggaac

SEQ ID NO: 29514 - DNA, 117 bp, Zea mays
  Clone ID: MRT4577_126927C.1
gcaacacccaacgatcaagcagtttgttctggaatcatacttgccgtggatgctgcgtgtgcttatacctctactatccagagataatggaggactatgacaggtaacacaggtcta

SEQ ID NO: 29515 - DNA, 138 bp, Zea mays
  Clone ID: MRT4577_126928C.1
cgcgcgtacaaagcaggcagtgagactggttggcggctgggcacggcctgcgctcgcgtgcgggcgagctcttcagcgcgagccttcgcgcaagaagtgctacatcttggtgatcattgagctgcggatgtacaagat

SEQ ID NO: 29516 - DNA, 381 bp, Zea mays
  unsure (1)..(381): unsure at all n locations
  Clone ID: MRT4577_126929C.1
agaaatcctaacctcctaatatcncanaaaccgtcgggtatacatgtttttttcgagcacaaacctactcccattctacctcntcatgattctcatctccataatacaccaattacagaggcagtacctccttctttttctccactatcatataaaacactccttttaatctgcccatcttcacttccattaacatcaacaacaccatttcatccttatactctaataaactatccattcattcaccttacctttatctccatacattccattcatccttcatacgctaacaatattttaagatctacctctccatttatttctttttattcatcccttcacaatcctaaaaaaaacttatatttaccaccactttatttc

SEQ ID NO: 29517 - DNA, 355 bp, Zea mays
  unsure (1)..(355): unsure at all n locations
  Clone ID: MRT4577_12692C.1
ggccgcttttttttttttttttttaacacagtctcacaccccatacttaagctaatcttaataggcactgctttattctgcattcatggctctaaatacaaccaccangattacgagcccccaactccaaaaaactcaagctcacagaactggcctgagaaacatgaccactgacatccaacgaaagcagggcgtaagattacaaatattcccatgtccaagccatgtattaatatacttgcgctcaccaacacaaaaagatttgagctctgcctacacaataacatacatgacaaatcgcccactcaggcacaatctagttcaatcttattgcaaaagctgcaccttgcacaac

SEQ ID NO: 29518 - DNA, 269 bp, Zea mays
  Clone ID: MRT4577_126930C.1
attcgagccacgaccacgcgtgcgatacgcgttgcctgacatcactatcaccttcctaagcctggccaacgacacgggggtgtccatttctctgacggcgaaacatctcatgaacctgcaatctcgtcatataagcaatgtgcgtctgatacatccatttcgtctcatgcagcaagggcccgttcgaaaatatgcttatccacttgattagacaattcaacaacaacatacgttctttccttgacaactgcatacacgtcctcatatat

SEQ ID NO: 29519 - DNA, 263 bp, Zea mays
  Clone ID: MRT4577_126931C.1
aactttcattttctaagcgatccaactgaaggattggcggggttccatgaaagggtcactgtgtaacctaacgaacgactgggggctggcagacatactacatacccggctatgctgactgctagtggtggttgactgctgcttagaaagccgaggatgaacacgtcgtcatggcgtatgatgacaagggtgaccagtctggggagaacaccacgactatggccaagcccggtaacacctggaaactgattgggatgcacgcg

SEQ ID NO: 29520 - DNA, 234 bp, Zea mays
  Clone ID: MRT4577_126932C.1
caccactccagtccctccatttccctcagctcgcgcagcagctagccggcagccaacaaccgaaccaacgagccaacccacaggccacagcgagcgagtaaagcgtccaatggtagcgatggcggccgggcagcagcagcagcagcagcagcgccgctacgcgaggcggactcaacctgcccccgtgcttccggttccacccgacggacgaggagctggtggctcactagctct

SEQ ID NO: 29521 - DNA, 501 bp, Zea mays
  unsure (1)..(501): unsure at all n locations
  Clone ID: MRT4577_126933C.1
aacctggcactcacatggtaccataaccatattatatagtataatcctatacacaacaatatcaccacgtactgcctcacaaatgtaacctatacacaacaatatcaccactgcctcacaaatgtaatcaccactagttcattcgtactttttcatttgtcgtgttttagttcaaaactgaactagagcgacaaatatttgagaacggagatagttaaacggatgtccaagaaaaagcaagaaggatggagataatagaaaagacagagagagacttactgctcaactcctcaatctaccttgactgacatatccatcatccactccgtacgtcctcatctctaactcaaattggatcgtctcaccacctcacatatcccaactgcttctttgatcaacaacgcatcggccacgtacgtngncgncggcgatctcgcgatctggcgcatagcttgatgcgatgccaaaaggaaaggaccggccggagaggcatgtcggtcg

SEQ ID NO: 29522 - DNA, 123 bp, Zea mays
  Clone ID: MRT4577_126934C.1
cgcgcacagtactatggctatgttggtctaggaccggcacgctactggggagcagtaaagggctacccacggactctggtgccctagtcgaaaattgggcaacctcgtggtctctgactacaa

SEQ ID NO: 29523 - DNA, 418 bp, Zea mays
  Clone ID: MRT4577_126935C.1
agggcaaaacggcaaaccactcttacctttttaaaaagaaagaagtaaaaatttcctacccgccaccacccaacaaaaattgggacaagggttataactttaaataccccaggattaccccccaaaaattcctactaaaacacctttgaccacctgcagggccctccaaaggccctcctcccccatccaaggcccctaacccaagggagccctggttaggtttctttgaaaattttgttcccctccaaaaaaaaagaaacccacctcacataacttgacaagtccccgttttaccaacccccatttaggcccctccccaaattttccacccccttaaaattggccaaggaaaggcccaacccaagggaacctttttgccttttaaccctcttgccttttgcaaaaaaaacacccctgg

SEQ ID NO: 29524 - DNA, 787 bp, Zea mays
  unsure (1)..(787): unsure at all n locations
  Clone ID: MRT4577_126936C.1
ctcgaggccggccgggatatggaccgcgagtattttaaacgctaaaatgtgacagtcgcccccccggcgacggagtccggcgaggcggggagctcaccgtcggcgagcgggggcagatcgcgcggcgcggaagtccgggcgagcgaagccaacagaaggtcctccggcaagcgatcgatctcgcagcaagcgggctccgtggctgccgtcgattccatcggttcccccgccttctcggctcctcgattttcacgattcttccgctgtcggtcttggggtgggggatgacggagggggagagcggggtgcggcggtggctcgtagacatcagccgctggcgcccttcccccgcccagttcgacgctgcagccgccctcctaccgcggcacgagcgccccgccatctccaggttcgtgaaggaggacgacaggaagcgggcgctcgtcagtcgtctgctgcagtactcgctcgtgcaccacctcctccgcatcccgtttcacctgatcaacatacgccgcacaaccgaggggaaaccgtacctacagaataattcttcaggcttcccgaacttcaacttcagcacctcgcaccatggggactacgtcggtattgcatccgagccactttgccttgtcggcctggacatcgtgtccgtttccgagccccatggagaaaccgccgccgagttcgtcagcaacttctcttcgtgccttactgaccatgagtggagctgcatcgttcgtgctggcactcncagggacgtgctgacagagttntacaggtattg

SEQ ID NO: 29525 - DNA, 1173 bp, Zea mays
  unsure (1)..(1173): unsure at all n locations
  Clone ID: MRT4577_126937C.1
aattcggcacgaggcacagttatggcaggagaagataagttcgctgtgtgagctatttcgccctgagccttttggcagggcaatgcttctctctattaaccgcctaacaaatgagattagcgtttaacacagcttgatggacaattgcctctagcaccctagtctgaaaataagacaattctaccactggtcatgggagatagcaatgccttgagaaggagctgctggtactggtagctccttggccccagttccccatttgggatgctccattcaattcttcctccctctcattgtactcaaggatcctccgcttgatgctctgcttctcctcaagctcagcagcttcctgctgcttcgtgctttgcacaattgaactatcggccggaattaacatttgtcttgtctgttgcttgtgtcctttcttcattagcaccttcacacgcaccttgctgctacccccagcattcccaccctcttcgtctactgtttcttctccactctcagattctgtggcccttgagtcttttgaaccctcgaggacgttcatcggcaccatcatattcaaagggagccttgaacgggcctctgatttacgagactccaagctctcctgaagaagggctttgagctctcgatcgaagtcttcttgctccttaggatcaacattcatgactttctgtctaacctcaacattttcatcttcatcagaaacaacaggaatgccatcatcttcatcgtcgccttcgttatctgagccatcatttgacttatcctcagataatatatcctcctcttcttcccgtccatcaatgctgccagtatctgaatagctctcactatctgctacttcatgagccttgccattttcctcggttccatttgcagcgctttcaccattcacagatggaccagcatctcgcgagtgtcttttctgagattcattgtcggagtgtctttcattttcaaccttttctactggggctgaacgttcattttcttcaaactcaactaacgcggcaacaagttcctcaattgacgaatacctagacatggttggtcgtagctcaccaaataaatcctgaatgtcaaactctatgtcgagtggtaagggccctttactaataatgtatntttgaaagtgtnagcaagaatttgtcgagcttccttttg

SEQ ID NO: 29526 - DNA, 402 bp, Zea mays
  Clone ID: MRT4577_126938C.1
ttgtttcacgggcgccacgaaaaagatcgaggttggaacacaggctatagatgcgcgagtataatctttcaccatcattgatgtatggagccacacgccattcagggttgcgctcagcgtgtcatgcgactggatgacaggagactatctcgtcacagactaacctaagtatcccatgactgcaaacgtcctagataaatatatagaatcctatacaaatatacggtatgattttaaccatgtacaaaaggcatgaaggctatgcttattctaaatcaatgcccgggacgtattcggatgagtctgggtgacagaatgggtaccgataagctttaatttctcaccttgccgttctgctacacatatacctatttacgtaatttggtcaagttaaaggtgcac

SEQ ID NO: 29527 - DNA, 343 bp, Zea mays
  Clone ID: MRT4577_12693C.1
aaaagtgaatgcgcctgcttttatcatctatgttgatcactcaacaaaaggtggtcaacatgctactcgggctggaaattgccggctgttctaaaagtgggttctgctgctcataagccttgagagcatctcccctcttgtagactaaccagctcaactattatttcgcctcctgcgcacagagtattagaagcaagaaaactgttgcatatatcttgtgctcaggacgaggaatatgaaactctctggttctttaactgtggggagatgcaatattcgctctcgttatggggaacaccgtttaactctgccaggtactcccaagattcatgattgccatcac

SEQ ID NO: 29528 - DNA, 261 bp, Zea mays
  Clone ID: MRT4577_126940C.1
gtcagcttcagcaccacgagcaagattgtcctcgcgctcgccacgaccccacgggggcattttgcattatccccgaccacgatcaactgcacctaatactcgatgctcttcgcttgccgctttgcttttccagagaaaagctacaaagttcacaagtagataaatctttatctagaaactaaagtacgctaactgttatctgagcgcatgcaactcttgttttggatagaaaagctccaaattgcccaaatacccgtatct

SEQ ID NO: 29529 - DNA, 148 bp, Zea mays
  unsure (1)..(148): unsure at all n locations
  Clone ID: MRT4577_126941C.1
ctttgttgctcaaaaaaccgttttgaaatttcagtatggtacagatgcatggtttttttctncatctcagcatgttgccgtgatatatatgctgcaagctacagatactctttatacaggtacatgctgtgctggtgctgtccaccat

SEQ ID NO: 29530 - DNA, 149 bp, Zea mays
  Clone ID: MRT4577_126942C.1
tggcacgcctgcaagttcccttcccgaatttccttgtcgacccactcatcctctaactatagatcaccagccgccggcctttttcaataatcagtcaggaccccttattcctacttcttcccctccccagttcttaaacaaacaacctt

SEQ ID NO: 29531 - DNA, 279 bp, Zea mays
  Clone ID: MRT4577_126943C.1
ttgggtacctcgaggccggccgggaaagctaactgggaggaacttcagactgtagttcatgctgttgatcagatgactacaagcactcctgctgaacagccgcaaagtgataaaggatcatgagaacatacattgactacttatttatgggggtgaactaggagtgtttgtgctcttcataaatttttgtattgctgtttttctatgaatgaattcctaattttaaactaccctttcagtatgttgttcacttgcaaaaaaaaaaaaaaaaaagcggcc

SEQ ID NO: 29532 - DNA, 1527 bp, Zea mays
  Clone ID: MRT4577_126944C.1
atggatcctaagggtaaggggatggtgattaacgataaggagaaggaatccctcttcaatgagccaagagacgacaagcctaccgactcaggctcgagtcacaagaagagggacgggaagaagaagaggcgcatcaagaagatcatctactacgacagcgatgcctcatcttcttcaccaagggacgacgacgatgactcctcgtcaaagaaaaagacgtatatgggaattgtagaaaatgggatgcattttgataataccgataatcctgtgtttattaatgagcaaatccataaaaatgccaaagccactactattttgctagcatctctgtgcagggatgaatacaacaaggttagcggcttggacaatgctaagcaaatctgggacaccctcaagatatctcatgagggaaacgacgccactatgatcaccaagagggagctagtggaaggcgagctggggagattcgtgatgatcaggggagaggagccaacacagacgtacaacaggctcaagaccctggtcaacaaaatccgaagctacaggagcacaagatggacggatcatgacgtcgtccgactcatgccaaggtcatttactgtaattgacccccatcttgtcaaccttattcgtgaaaaccccaggtacaccaagatgacgcctgaggagatccttggaaaattcatgagcgggcgcatgatggtgaatgaggcgcgatacgtggacgatgcgctaaatagtccactgcccatctatgagccgccgcccattgccctcaaagcaacaagcagcaaggaggcgctaccaagcaaggtagcacaagtggaggctgccgggctcaatgaggaagaaatggcgcttatcaccaagcgcttcaagactgcgctaaaaggatgcaaggagtaccccaacaagaataaaacaaagggaaagcgctcctgcttcaaatgccccgataatgataatgaccagggacaagaaaagagcgggaagatggaaaagaagaagaactataggaaggcgaagggcgaggcgcaccttggaaaggaatgggattctgactgctcttcatccgactccgatgatgaaggattggctgcctcgaccttcgacaagtcttcactcttccccaacgaacgccatacttgcctcatggctaaggagaagaaggtacatattcgagattcccctaagtactcttcttctagcgatgaggaatcttccgatgatgaagtagattacactgacttgtttaaaggactagatagaattaaggtaggcaaaattaatgaattaattgatgctctaaatgaaaaggatagattgctagaaaagcaagaggacattttgtatgagtgtaaggaaaatggaccccaggccttttggctaattgagttttggtgtttgatgattaacacaacctgtggactaatatgtttgctagtgtttataattatagttcacaggatgcaaagagaattggaccaaggcaataaggatgcaacacctcaaaagaagacataa

SEQ ID NO: 29533 - DNA, 343 bp, Zea mays
  Clone ID: MRT4577_126945C.1
aaccccggggggaagctggtaaataatgtggggggtgaaggggtccccaaacgcgggacaaaatttttttgaattacacaaggttaagcccaatggtccaacaaataacctttgaaatgacccccccagttttaagttcgggggcccttctttgatgaaaaaaacaacttttccaacacgaggggggggaaaaacacattttttgggggttttctagttcggggatacacaacaagggttggggattacggatgttattgttttttccaaacaacgggcgcattagtgaaagggaaatggtcaagcttccaagatcggtataaaaaaagtaatgaccatgggg

SEQ ID NO: 29534 - DNA, 201 bp, Zea mays
  unsure (1)..(201): unsure at all n locations
  Clone ID: MRT4577_126946C.1
tttngnctagnnntaacactagcctatttagtttgcttgaggctaaaatactcttgatccaacttgatccagactaagaccgtattcaacaattcacccatatagttatctaaaatattgttactttttccgcagaatgggttttgaatattggaatgaggataagtaaggtgatggagatagcctaaaaggctctcggcg

SEQ ID NO: 29535 - DNA, 355 bp, Zea mays
  unsure (1)..(355): unsure at all n locations
  Clone ID: MRT4577_126947C.1
ctcatacagccgccccccctttttttttttttttttttttcattttttttcgggggttttnncgggaatgaacgaaataatataaccttgtttgcttttcaccgtcgccataaaaggcaaacaattccccaacttttttcttaaatcccccaccccccccagctttcaaattgaaaaaaaacctttttgccctcccccagggtggaattcgcaagacgttaaattaaaccccccccctttgggggcccctggtgctcccaaaaaaattaaaaccagcccaagtttctcgacccttttctcttttctatgggccaactagctttttaaccttcaaaggtctttcaagcttttccac

SEQ ID NO: 29536 - DNA, 2048 bp, Zea mays
  Clone ID: MRT4577_126948C.1
gggaagggcctggccgcggaggccatcgccgaggagctgtttcggctataccagctcggcgaggagctggggggcggggggttctgtgtgacgcggcggtgcacggacacgtccacgggcgaggtgctcgcgtgcaagtccatcagcaagcggaagctgcgcagcagcgtcgacatcgaggacgtccggcgtgaggtggccatcatgaggtcgctgcccgagcaccccaacgtcgtacgcttgcgagaggcgttcgagcacgaggacaccgtgcacctcgtcatggaggtctgcgagggcggcgagctttttgaccgcattgtctcgcgcgggcactacaccgagcgcgcggccgccggcgtcatgcgcaccatcatggaagttgtcctgcattgccacaagcatggcgtcatgcaccgggacctcaagcctgagaacttcctgtatgccaacacatctgagaactcggctctcaaggtcatcgactttggtctctctgtgtgcttcaaaccaggtgacaggttcagtgagatcgttggatccccctactacatggctcctgaagtcctcaagaggaactatggtaaagaaatagatatatggagtgcaggagtcatactctacatcttgctatgtggcgtcccaccattctgggcagagactgatgagggcatagcgcaggctatcatccggtccaacatcgacttccgcagagagccttggtcaaaggtgtcggaaaatgcaaaagatcttgtgaggaagatgcttgatccaagcccctactctcggctgactgcccagcaggttctagaacatccctggatacagaatgccagtgcagctcccaacatcccactcggagaagcagtgaggtccaggctgaagcaattcactgtcatgaacaagttcaagaagaaggccctgcttgtggtggcagagtacctaccagccgaagagctggaagcaatcagggagttgtttcagttgctggacacaaacaaggatgggcatcttacaatcgaagaactcaggaagggaatgcgattgataggccacaatgtccatgacactgacgtcgatatgctcatggaagctgccgacatcgacgggaacgggaccctggactgcaaggagttcgtgacagtctccattcacctgaagaaaatccgtagcgaggatcacctgcccaaggtgttcagctacttcgacaagaacgggagcgggtacatcgagatcgaagagttgaaggaggccctctctccgagaggtgaccagaaggcaatcgacgacataatcctagacgtcgacaaggacaaggacgggaagataagctacgaggagttcgagctgatgatgaaagctggaatggactggaggaacacgtcgcggcagtactcgagagcggtttacaacaccctcagccgcaagatgttcaaggatgtctccctgaagcttgacgctaacaatggcccacttgctgcagcagccgtcgttgtcaaagaacaagcggttgactgagtcatgtcgtctctactacctgcaaactcaactaaaacagagaatgcgagaactgtacccagttttcagtgttttgtgtataggtcgccacattttggcaagcaaatgtatcagggcgggtcaattgacttagtttcaggtgcaaaatgccaatgctctccgagaactacacgcttactctttctaataaaacaacaaaacaagatgctgttatgggaattgtggctctggtgaaaataaagaaacgactacatcttcagtgtctactgcctgcaaactcgactaaaacagagaacacgagaactgtacccagttttccatgttttgtgtataggtcgccacattttggcaaggaaatgtatcaggggcggtcaattgactcaggttcaggtgcattgtgcatatgtcaagacactcccaattacaccctttatttttctcataaaaaaaaacaatgttgttatctaccaacatcagcaagctgtgttgtaaaacatatctttaatcgttattatctttctctttcgatc

SEQ ID NO: 29537 - DNA, 1293 bp, Zea mays
  Clone ID: MRT4577_126949C.1
cggccggggttggattgtcttgcctcggctgctcctctccctccccctgcttggcttcgctcgccttctcagccacgccgccggtcagccacgccgccgcttccctcggtgggcacccccctcccccatctggaacccactcccgccaacgggtatctccattcccccctgcctaccttcgaaccgacgtgctcggattggctgacccgccgcgggcgctccctccgtcgatcaaattgaccgccgcggcgcgcccgtccccatctccgccaatctccggtttcattatgattaataaattgtgtattaatgtagtggaggagccaggccatctagtgacaagtaagtagcattatcggcgaagaaaacatccacagctgagttgccaaagaaaggcggataaatatgtctcaaggaacttctccgctgccaaaagataaacctaccgcagaacctggaaaggctattggcatcaaacggctgcagactgatactccctcaggtcttgcatatcataatgtttatgtacgaaggaaagtagaatctgagcatagtaaagtgaacccttctcaggagttgaaaggtaatggaagagacaaatcaaaagatctggaggcatgccaagatgttcaacatgaggaggccaacaagcctcaagtggcatctccttttgctgaatctgtagaactagtatcttccaaatcttctcaagaaccaaatgcggaaactgtggcggagaaaactgagccaccagttgcttctagcactggcattcaagaggaggtgaaacggtcaagcatagaatactggaatgagagatttaatcggttacagacatatttggagaactgtgatcattcaacccaggagggttatttgcgaaagcttaggtccctttcggctgctgggagaaacatgcatgcaattgagctggagaaaagggcaatacatctcctaatggaggaagggaaagagctccagcgaatgaaggctttgaatgttcttgggaaggtttccccaaatgcttcgtcgaagctgacaccttcgcagcggtagtctctacaatgagatgactgtataacatcaagagggctgtaatactcaaatacattgcagaaaagacatgttgttcctgtgtaacacctttccttttatttcctttgatgccctgcccttttgatgtaagattgttgtaatgctatgtaaccagccgtacatataaacctgccattcttagtcctaaacctgactattatttgtttgttccataaaaaaaagattgtgatttatgtg

SEQ ID NO: 29538 - DNA, 275 bp, Zea mays
  unsure (1)..(275): unsure at all n locations
  Clone ID: MRT4577_12694C.1
cggacgcgngggnangganaccaactagcaacanacanagngaagnacacgagcaacancnnagcaccaangggagccaagannnnngcccnccnngcccnccnggcncnnncagcaagcgcngcnaccncgacnnnnannccacaaggcncacaacaanaccncncnccggcgacagccgngggannncaanacccaacnanacaanccnacanggnacaagaggccanccaagcaagcancnnacggncannagcannaacccnccaacaacc

SEQ ID NO: 29539 - DNA, 130 bp, Zea mays
  Clone ID: MRT4577_126950C.1
ggccgggccgagattctccaatccgcatcgaactgtgagttcattgcccgcctttggcgcatacgtaactagcgagtgcatgtctcacgtcactgcctcgccaacgagtgcttcgagaacgccgtggtgc

SEQ ID NO: 29540 - DNA, 621 bp, Zea mays
  Clone ID: MRT4577_126951C.1
gggtacctcgaggccggccgggctcttgcctccgctgctcctctccctccccctgcttgtcttcgctcgccttctcagccacgccgccggtcagccacgccgccgcttccctcggtgggcacccccctcccccatctggaacccactcccgccaacgggtatctccattcccccctgcctaccttcgaaccgacgtgctcggattggctgacccgccgcgggcgctccctccgtcgatcaaattgaccgccgcggcgcgcccgtccccatctccgccaatctccggcagatctggtgcagcggtgagagttgtctcgctgagtcaccatgcctctctgcatttgcaaaggaaagtggaggagccaggccatctagtgacaagtaagtagcattatcggcgaagaaaacatccacagctgagttgccaaagaaaggcggataaatatgtctcaaggaacttctccgctgccaaaagataaacctaccgcagaacctggaaaggctattggcatcaaacggctgcagactgatactccctcaggtcttgcatatcataatgtttatgcacgaaagaaagtagaatccgagcatagtaaagtgaacccctctcaggaggttgaa

SEQ ID NO: 29541 - DNA, 778 bp, Zea mays
  Clone ID: MRT4577_126952C.1
aggcagttccgtacttccgttggattctcttgcctcggctgctcctctccctccccctgcttggcttcgctcgccttctcagccacgccgccggtcagccacgccgccgcttccctcggtgggcacccccctcccccatctggaacccactcccgccaacgggtatctccattcccccctgcctaccttcgaaccgacgtgctcggattggctgacccgccgcgggcgctccctccgtcgatcaaattgaccgccgcggcgcgcccgtccccatctccgccaatctccggcagatctggtgcagcggtgagagttgtctcgctgagtcaccatgcctctctgcatttgcaaaggaaaggtttcattatgattaataaattgtgtattaatgtagtggaggagccaggccatctagtgacaagtaagtagcattatcggcgaagaaaacatccacagctgagttgccaaagaaaggcggataaatatgtctcaaggaacttctccgctgccaaaagataaacctaccgcagaacctggaaaggctattggcatcaaacggctgcagactgatactccctcaggtcttgcatatcataatgtttatgtacgaaggaaagtagaatctgagcatagtaaagtgaacccttctcaggagttgaaaggtaatggaagagacaaatcaaaagatctggaggcatgccaagatgttcaacatgaggaggccaacaagcctcaagtggcatctccttttgctgaatctgtagaactagtatcttcc

SEQ ID NO: 29542 - DNA, 810 bp, Zea mays
  Clone ID: MRT4577_126953C.1
gtcgtctcagttacaaatttccactcgctgcgaaccaataaacaaacaagccaagtctcagtgctggaccgcaagcctccagaactgaaccaaacaagtttcaaaataaggaagagagcaagctgcattctaaaggcgcagcactgacctttttccgttaggtctgtaatgcacccatgatttgggttacatacacaatttccatgaaagctacacatcaagcaggatgaatatcagctcaatccagattctaactagcatgaagctcgtgaaacgaacttttttaccgggtgtacagagtcatcgtcgcaggctatacagcagcagatagtagtccacaccattagctacatgagtggatttagctcgatgactttctttgtctgctgctccataataatatcttgttcatcagattgtgcaaatcgcattgacaattaggccatgtagtcaaaatccaactgacttcacatccataactgttgcctgagaagagctcttgagaaagatagacacttctttgtctgctgctccataataatatcttgttcatcagattgtgcatatctcattgacaattaggccatgtagtcaaaatccaactgacttcacatccataactgttgcctgagaagagctcgcatagaactatatccattgctgaatccagtggcaccagctgtgccacaactagcaagcacggtaggtaaagcagcagctgaaaggcttgccagttttgacaaggaaagatgtcttcttggttgtcctcgcaccacaatgatcttcactataagaaactacacttcgcat

SEQ ID NO: 29543 - DNA, 486 bp, Zea mays
  Clone ID: MRT4577_126954C.1
atggaaactaattttgccttggaaactgatttttcctcgctgctggcggagctagcagcgtgcgagaagcgtctcacagctagcatcgaaggtgcgcctgccaagtgttcggtggaatgctcgaacaccttcggcatcttcacggcaactgcagctcctgttccaacacctaccgacgacaaagcggtcttcgatatgtggcctatcttcggcgaggaacgcgtctttgatggagagcctattttcgacaaggagcccaacgaccacatcatcgacgacgtcgacgtcttctcaccctgcaaaggaaaaaagattcagatcccaaaatcagccttggattctcttgttggtgcattggcaaggcatgatgagaccatcattggtactgccctggagttgcttgaatatttgagaattgagagaatggagtttattgtggaacaaactgacatggcatgtgattcatgggagaattcatggagctga

SEQ ID NO: 29544 - DNA, 195 bp, Zea mays
  Clone ID: MRT4577_126955C.1
cccggaaaaacctgtccattggaccaaaaaaccaggacccggaaaataaacgggttacgggggaaaacaagcgggaaacgggaaaaactgggggttacccggggaaccatcccatccaggaacaaaaataaaggcaacagcaggcagggccccaatcctccgggtaaaaaccgggggggatcttttgaaaccggt

SEQ ID NO: 29545 - DNA, 476 bp, Zea mays
  Clone ID: MRT4577_126956C.1
agcccttaagacaagaaactttattgcccaaaacctcatgacccgaagagtaacatgaccggaaaacccactttgggaaaaacaacggctgcgaaaactgcaatgggcaaataagaggttgcgacttcctgcatggccttcttggacctgccccttcaacgagggggcttcctggcgtgcacatgctaacgggccccgtccatcccctccctaaggcacctttccacctccttcctcaccaagaaacccttccgcatgcgcaccccaaaccaggaacccctctccacatactcggccgtccccggctggccctccacatgtgggatcgccaccattgggacccccctagggggggattcaaccgttgggacccacccgcagagggttacgaagcaacctgtggccccgtgtgccagcacctagcagccaggacacaaggggacaatgaggcccctcttcttgcaccagggaacaag

SEQ ID NO: 29546 - DNA, 927 bp, Zea mays
  unsure (1)..(927): unsure at all n locations
  Clone ID: MRT4577_126957C.1
gctgcagccgaccgcaacgcccctcatctccctcggccccgcacatccccgtacccgctggcgcccaaggcgtacaagaagccagcggcgaagaagccgtcggccgaggagaaggcggagaagacgaccacagggaaaaagcccaaggccgagaagcggctgcccgcgtccaacacctccgccaaggagggcggaaagaagaaggggaagaagaaggccaagaagagcgaggagacctacaagatctacatcttcaaggcgctgaagcaggtgcaccccgacatccgcatatcctccaaggccatgtcccatcatgaactccttcatcaaccacatcttctcacaagcttggcccgcgaggccgcccagcctggcgccgnacaacaagaaacccaccatcacgtcccgacgagatcccaaacctccctacctcctactcccttcccccgtagaagctcgacaaaacacgccccactcccgacacaaccaagggcccgccaacccaagtcccacccaccaaacctaaactcgcttcccgggcatcccctccgcttcctgttactaaacgttccttttgttttgcttatctttttcccccaccccccccctccctaacccccccccacccccctcaccctcgcncttcctccccacaccccccccccccccccccgtcgcggcacaccgctanctttcccctatctcgccctcccccccccgccccccaacccccccccccccccccctcccnnccccccttcaaccccccccaccccacccaaaacacccccccccccnccccacccccctccccccctacccatcactaccctcccccctcccacacccccccccctcccttccccccccctcccccctcccccccccnctcccgccccttcccccccccccccctccccctccccc

SEQ ID NO: 29547 - DNA, 144 bp, Zea mays
  Clone ID: MRT4577_126958C.1
ctatcaataacacacgtacgtgagctacaaatacaacacaagctcgaacgtacaactccatctccgacgactccctaaccaccgacgtcataatacactacaataatccaccatcgcgtgaggcgagacagtgcacaaggggag

SEQ ID NO: 29548 - DNA, 388 bp, Zea mays
  unsure (1)..(388): unsure at all n locations
  Clone ID: MRT4577_12695C.1
aaagcccacaggnnagacancggnncccgacggcggaaaaaccgaccccagccgcaaaagaaccncnncaggggagnngncnccacangcgcgncagaanncnccngnngaaaggaaaagacggagagagncncgccanggngaagggncaccgggggagagancngcnncnccccgaagaagaacnacacccccncgaagaagaacnananccccncgaaganccccacacangaggagggaancaccaagaaggggagacncaccnaggaggaggcccccaccnaggaggagggagncaccaaggaagagagacccaccaaggaggagngacgcaccaaggaggaggggnncaccanngaggaggagggcccccccaaggaggagg

SEQ ID NO: 29549 - DNA, 445 bp, Zea mays
  Clone ID: MRT4577_126960C.1
ataggcaaaaagtgtacaccctctctagggcaaaaatgagtgtatgtgtgttctgtactggacatgcatatgatgaacgcatactgattgtctacagcatgccacacccaacacaggctgcgggcacatcccacacaaggacctactatgagtacagacaaccactcatcggccaagattttgaaaactaccattctatacatgatggtcatgttactatctgccaacgacatggtacctcccgatgccgttcatcacgcacctaccaacaccttcttgacgatctaatacactgacgaggtcacctggacgttcagcgccttaacagcctccttcttgtgcgccgtccgggtgccgagcgcctttacaacctcggcctccacaccgattgtgccctctcgttcagcctctggcctatcacctccagtggaggtctttctatact

SEQ ID NO: 29550 - DNA, 818 bp, Zea mays
  Clone ID: MRT4577_126961C.1
atgctttcgactaggaatctccgtgcgtcatctcttctttccagatttttgctttacgccgacttgaacccgacccatttccgctccaggccgccctcacctcgtcctgctccctcctcgcctcacctcacctccagccgtcaccagcaccaagcgcctcccttttctcgcgctgcgcccgcgaggccgccctgctcccaccagtcgtcgcgccctcgtgctcgtccaggtggtgtcgtcccaggcgccgaactccctgcgctcggcctcctcagtcttcaccagcgcgtcgccgcccctggtaccggtaccgaccgccggcgtcgttttccagccaccggccttcaacccgaagagtccctccaccagcgctcggacctcgccgtccctgctcgcctccttccccaacgtcgccggtgaaggtccgcccccaacggctccagccgcgtcctgcgccaggcgcgcgtcttcttcgatcccgacaacgccatcgacttcctctccggtgaaagctgcgtctctccctgttcctcgtcgcctcacccacatccggccgttccagcatcaacccgccggtgtcaccagcgccagtcgccgttgcctcgctcgctctcgtcgccgtgcagtcaccagatcgccgagccgctgtcgcctctgtttcggtgcaccgtcgcctcctgtctactcgcgcgttcttctctgtcgatatcgatatccgccgacttctgtggtgcgcaggtacttctctagcaccgaggaggtttttgatttgagtgcacaagaaactgttaaggaacacttcactagccatgtctgat

SEQ ID NO: 29551 - DNA, 685 bp, Zea mays
  unsure (1)..(685): unsure at all n locations
  Clone ID: MRT4577_126962C.1
atcccactctcatcttttcatttgaacccccctcgtctcctcgcctactcccccatttgatgagtctccgtgcccgtgcccgcgctcgccgtctgcacctcgtctccgaaccgcgcgctcgtgtccatcgttgggcagcccaaaagaaagttggctacattgttcgctcagtgcgcggtgcctttgccattcgcatagcagcgggagctatctgtctatgaccagaacgctctgcgcgtggcacctgcaacactgttccaccatcaacgacaggcgtgaagtacactcacccccaaggccatggctgtgctcgcactgctggggcaccacaatgacatagaccccatcatccggcagaacttcatcctcgagacactgactacgattgggctggaaaagttgtgtctgcgacttgcagccggcatgaaggcagagtcccttttctacagtcctagtcccttgcaataaaagcaaatacagacaggatttttttgtgatttttacttgatctgtgagcgaacactgggtctttcaccttgtcatccaatgagatctgctccttggagaaatctcccaccagtcagtaaggaactgggctagantcataatatatgcttttgctacgcaacctctgctgttgtaaggaattgcattgttatcttatatcactggtatggtgatgttt

SEQ ID NO: 29552 - DNA, 566 bp, Zea mays
  unsure (1)..(566): unsure at all n locations
  Clone ID: MRT4577_126963C.1
cagnacttggtaaaggtgattcaatgacaaatctaatgattaacatgtgcgatgtggttcacatgtaaatgcatgcaactgaagtgcattaccaatgtcccaagagggcaagggggaaatcttcttatagatctgttccgtcactgtgacaatcatttgggagagaaacaaaaaactccatctggaatgccacagttgctgctactgagtaccatccttatatccttatttcctaattgttgtggtgcatgtacagttttttttaaaacgaattccgaattggttattgctgttagaactcatttgagtgctatcttctcatatgctccttttttctctctggctgttatgttaaaggaccagatacaagtcaatcttccctttaaattacagttcaattattttatatctggcttctgcaagacacttcaaaaaaaatataacagcatgtggtccctgtgttatctactagcatgagccattgttccatgcaatttggtacatagtggggcatatttcgttacatttactttctatattcttagtatatttatagcctatatccc

SEQ ID NO: 29553 - DNA, 1270 bp, Zea mays
  Clone ID: MRT4577_126964C.1
aaacaatcgcccggcctcctccccttccattctaggctccgcgtctcgctgtccccactccgtctcatcccgctgccgctccttctcatcgtcgtcgtcccagtcccggagtcgctccgctcctctggctaagcgcaggtttgagggatgccgaggggttgtacctcgccagcgattcggacaagcggctattgatctacttcccctttatgcaggtcaagctacattccgtgctattcaaaggccccaaggatgacgcaatggcaatgactatctaccaatggacatcgtggagctatcttccgatcatttgatagagaataaacctttgctgctataggatgtcaagttccaaaacgtacacgggcttaccagtgcttatagacctttgtatgttcgggacactacctttgctaatggggaacaggcaagggggaaatcttcttattgatctggactatcactaaaaatctcatttgtagttttgaactgtactgaacttttcttgcagaaaactccatctggaagtgcacgacagccactacagttgactaacgatgtaaccaagatgatgcaaaagcatcagctggaaacgccacagttccatcagacccgattttccgttttactgaatgtaccgaggagcacagagaagtgtgtgacataactaatacatgccttccttattcctctgcttctccctttccctttcttaacagtttattttcacgttgttgctggaatccatctaagagatgtctcctttttaattcctcattcttggctgcctgctatgttggatgatcaggtatgtggtctgccttctctaataacattattgtttgttcacttttctttgttcttccaaaaacacattgcactacattacctcatttatacacatttgcataatacagtatgtcaaagtgtagctttttagaacatatgcaagcatatacctctcaactataacctcttaactatgggcacatatcctgatgaatggtctaaattttttaatatgaaaaacttacaatctgtttggtattagtttcgtgtggtgtgagtaactaatcatcatccacaataacaaaccaaacttctcatatgtattactattttccactacaaaaattgaaactcatgcatgtcttttccccctccttttccatctccctttcttatcgttgcatgtttcgttgctgctactgggtaccatccttatatccttatttcctaattggtgtgggggctgtccgggttttttttt

SEQ ID NO: 29554 - DNA, 1142 bp, Zea mays
  unsure (1)..(1142): unsure at all n locations
  Clone ID: MRT4577_126965C.1
aacttggcttggggttgggccgatatccctacggaggtgtcttccaaagagccaaaaattgccccatggaatcttcccacatgggccgccggcacagggnaaaacgccggtaacccggcgaggaatcaggctgccaaactaagccgtagaggattttaaagatgcattgggtgtgagacggcctccggcgacggcgatttttggggttcggagtccatgattattgggcggcggcggtcgttcccgagggaggcattgggtgtgtatggtgagaaggcgtcgcgggatggaaacaaaatgatagtgatttgtatatatcatcaactcaaggtcaagctacattctgtgctattcaaaggccccaaggatgacgcaatggcaatgactatctaccaatggacatcgtggagctatcttccgatcatttgatagagaataaacctttgctgctaaaggatgtcaagttccaaaacgtacacgggcttaccagtgcttatggacctttgtttgtttgggacactacctttgctaatggggaacaggcaaggggngaaatcttcttatagatctgttccgtcactgtgacaatcatttggngagagaaacaagtaaacaacccttttttccataaaactccatctggaatgccacagttgctgctactgagtaccatccttatatccttatttcctaattgttgtggtgcatgtacagttttttttaaaacgaattccgaattggttattgctgttagaactcatttgagtgctatcttctcatatgctccttttttctctctggctgttatgttaaaggaccagatacaagtcaatcttccctttaaattacagttcaattattttatatctggcttctgcaagacactntcaaaaaaaatataacagcatgtggtccctgtgttatctactagcatgagccattgttccatgcaatttggtacatagtggggcatatttcgttacatttactttctatattcttagtatatttatagcctatatccccaaactatatcatatacttagcacacacccaattgttataatccacgcgctcatggcgcgcacactttactagtatataacattgttggcaacatgagctgatctctttattacacg

SEQ ID NO: 29555 - DNA, 1084 bp, Zea mays
  Clone ID: MRT4577_126966C.1
aattcggcacgaggcctccccttccatctaggctccgcgtctcgctgtccccacctccgtctcctccggctccgtctcatcccgatgccgctccttctcatcgtcgtcgtcccagtcccggagtcgctcccctcctctggctaagcgcaggtcaagctacattctgtgctattcaaaggccccaaggatgacggtaagatttgcaactccctgtctgtctgggtctgtgagctaacggacttgtgccaaattgttagtttatatgttcaaagtagatagaagtactactttcctatgagttagtttcagcaacaaggatgtggaagtaaaccaactgctgctctaacggttacatgcagaattgcagaccatgagttcaaccccatcttttcacatggcactcatcagactctttatggaatagttaacattagtgttattaagaacaaaagttagattcataattaagtgagtctataattttcatggccatataaaggggcactcatgtactagcgttgaatagatatttagctgaaatgcatatttatgtaataaatgtcagcaatggcaatgactatctaccaatggacatcgtggagctatcttccgatcatttgatagagaataaacctttgctgctaaaggatgtcaagttccaaaaagtacacgggcttaccagtgcttatagacctttgtttgttcgggacactacctttgctaatggggaacaggcaagggggaaatctccttatagatatgtttcgtcactgtgacaatcatttgggagagaaacaagtaaacaacccttttttccataaaactccatctggaagtgcatgacagccactacagttgactaacgatgtaaccaagatgatgcaaaagcatcagctggaaacgccacagttccatcagacccgattttccgttttactgaatgtaccgaggagcacagagaagtgtgtgacataactaatacatgccttccttattcctctgcttctccctttccctttcttaacagtttattttcacgttggttgctggaatccatctaagagatgtctccttttaattcctc

SEQ ID NO: 29556 - DNA, 193 bp, Zea mays
  Clone ID: MRT4577_126967C.1
aagtctaaaacgcgcctattgttgcagagggacagatgtactatacaactggacatatgggtcgttctatttgaccagcccccctcggatgggatagttgtacaaccccgcgatagaggtgcttgcactaaggcctgctgcagacggatcatacggtgatcctgatgtcgacaccccggaagggactcccggc

SEQ ID NO: 29557 - DNA, 496 bp, Zea mays
  Clone ID: MRT4577_126968C.1
gccggcagcgcggagctgcccaagggctgtccgtccgcctctgcctgtctcgccggcgactgctctgtctctcttcctcctccccgttgagctatcgcacacagtcctcggtggccgcatgagctgctccatttgtccggcgattcgtgtgttcaacgtccccgacgagtgtcaatcccagacgacggcgacgctcttcctctcttcgggagtgggctggaggattcgatggatagaggatgcacaggaaatcggtaaatgtagcgggcgaaggacgagcgctatattttagcggagacaatagcgaacgttgctggacggtttccggacgactggaagcctatatttagcgtacatgatcgtttaccgtctcctgctggagacagccttagcccaaatactctggatgtactggtttatagtgctttgaattaaagtcagacgccctggtggtttgatgtttcttcttttaattatttggtaccacagtttgatc

SEQ ID NO: 29558 - DNA, 264 bp, Zea mays
  Clone ID: MRT4577_126969C.1
gcagttgcgagcgtctgctgtggaggatcattgcttgatcacgcctgggttcgacattatcagattcgggcatcatctctaggcatgcagttcattaccagcttcagcggtccacattgctgaggaaaagagattcacagggagatggcaatgggtacctgatacccgatgggtatttactgcattagggtctgtatgtgggctaaatatcgtacccgcgggtctgtgatcgggcagaaatgttcatgcaacacacactgtatc

SEQ ID NO: 29559 - DNA, 253 bp, Zea mays
  Clone ID: MRT4577_12696C.1
ataaaacctctcttagtttaaattcacttcacactgcctcatacatttgtgctacagggggatgctcaaccgagacgcggtgcctcaatctattcaattgcgagatacataactgcatcaatagccataggcctttaatacattctccaactgtaaaccacactattgtcctccagtatacgatactcatacgagtgctaaatcttgatctatcgattatctgtatattactattactagcttactccttttg

SEQ ID NO: 29560 - DNA, 414 bp, Zea mays
  Clone ID: MRT4577_126970C.1
aaaaaaaaaaaacagactttggtggccccgaaaacccgggccgcgcgctaagctaaaaaaacccagggggagccgccgggaccaaacaaaagatggccaccagcacaagcaggaaaaaagcagaaaccaccgcggattatgacacccgtgcccaaaaaaaacccgaaaaaccccgttgggccctaattgggcgccccataatttggcctggcccggcgggagggccctatacccgggccaaggaacaccgtaccccccggggtgggacgggaagggacttccccaggaagccaccggagtcgggaatttaggaaaaagggccccggggcccacaaacaaaaaaaataggaggggctgccccataaaccaaggggggtttaaaccccccggatgaggggcacggcttccgaaaac

SEQ ID NO: 29561 - DNA, 138 bp, Zea mays
  Clone ID: MRT4577_126971C.1
ttcccggtcacccacctccgactagtttagatcgtatgattggccttcatcctttatgagaataacggtccaaaaggcggcaatcctttaggtagcacagtatttccaaggacagtcatcctcactggtaatatctca

SEQ ID NO: 29562 - DNA, 590 bp, Zea mays
  Clone ID: MRT4577_126972C.1
tattttgatgtgcgcgcgttccttttctctatctcgagctccgctaatgccggatgtgccgatgaccgaccgccggcctccgctcctggacgtgaatggcttcctcctcacgggatggagacgcttcccggggcggaagaactcctcctactggactccgaggggaagggcggccgcgcgacagactaccgcgatgcgtgtcctactctctctcgcgaaggtgccttcgagaagtcgcgtcttcaccagaagccacaaagtacacatgctggaacggcatgcagaacactgtactgtgagatgctgaaattgtgcgataccagtgtattcgacacctgcacttttttgtactgccaggacaagagatgatgagcttattttaccatcaggacttcaggaattcgctgatggaggggaacgacttctccagaacatggttgaccaaaggacagcactccataattgtgcaccagaacctattgtgacgtgatcaaattggtgatggaggaagtgtacttgaccacagaaggaagacagatacctcgagaggtgtatggtcacggatgcggatgccgactgtcatcatgtga

SEQ ID NO: 29563 - DNA, 417 bp, Zea mays
  Clone ID: MRT4577_126973C.1
tttttccgctagtgtacctaaacgaggggaaccaattgatgcgtctgacgggtttgcatcaaactcaattccatggagccctggtacaggatctaagatcggattgactgcattagtgatcacatgacgcattatgaaaaggggtctttattacaatgctgagtgttgacgatcagtaccaactggtggcaacacaatcgttgcactgtgtctttatcgctgatgcaaatggctgctaacttacactaacaatggctgcctacattagcctgggcaggaggatcatctagaagggttttgctgctgaatttgatcttactgacccactccatgagaatgataaggaggctgtcatagaaagtctgaagatatactagcaaatatacccaactcttacatacttcaacaattagaaaa

SEQ ID NO: 29564 - DNA, 641 bp, Zea mays
  unsure (1)..(641): unsure at all n locations
  Clone ID: MRT4577_126974C.1
gttagggttccacctgagctcttccttcttccccctctgctcgtctaccatttgattcctcgccgcctgtggcttcttccccgttgtcatggagtcgggcaaaggtcctgttgtcgcggacgattaagcgatttgctggctgcagccaggcgtgcaagggtcgtcgttgcacgcaaagccgccttcgttgctagtgctgccgccgaagctgccaatgatgctagtgcgacggctttggagatgattgttcaaattgagaaggcgaacgccgaggctaccaagaaagctcctagacctctgcgtcgtgatgagacactcgtgttggtgtcgctcatcgacgacgagaagaagcttgacgactgccagttcgacatctagaagcagtcctacatgcccgtttgcgctgctgtgtacggcaagtttcagcgcagccaccgcttggacgcggtccagagcagctgcatcgctctgtccatcgtcaaacaggggtacctcatggtcgtcgccaacgccggcgactctcggattgtttgggcaccacattcgacaacgatgccatcacgccgtcgagctcatcatccacctgaagcccaacctgccacgcaagtcgctactgaccggncatgaattcttgtgcgctg

SEQ ID NO: 29565 - DNA, 533 bp, Zea mays
  Clone ID: MRT4577_126975C.1
aaatacatctttttttttttctttgttaaaaaggcaacctcacattgatacaattccttgcacacacaagctacagacgcttagatatctctcacactaggggtttacattattcgaaatcgaagagtaagtacttagtagtgtatatggatataaaaatgggagtctacatttgattcgttatagctagagacgacactcctgttttctcggctactttgcttcgattcgtttgagtgcagtgctgtcccggccgagctggaggttgcggcggtatatggagtcatgaggcgagatgggtggtggtggatgcaagcgccaccgcctgcgcccacaccttgagccgagccttcacgtccatcggatccgctcctcctcctgctgcatcagggcaggagtcggcgccgtcgcacggtgagtcggggccgctgccggggctgccggcgcctccggacagcccgtagcactggatctccacggtgcagtcggagggcagctccagcccgaggtcccggcacgcgcgaacctcctcc

SEQ ID NO: 29566 - DNA, 1637 bp, Zea mays
  Clone ID: MRT4577_126976C.1
cattgggtacctcgaggccggccgggccctgctcctttgcgcccacgccaacccagttaccagagccgccattgccgccggccctgcgtatcggcaacaccacacgaccgcagccattgtatcacctattcggtccgagacgcttcgattcagctcgctgttggtgttcccggactcgctgcgcgggattgatggcaggtgacgcgtgaatttgtcgtcggagttgaagctccgccgtgaccgcgctcactgccgtggcccggaacatttgcgctactaacctcggtggaggtggttctcaaatctcaagtccatccacgcggaatcggacttgacctttatttaaggcgcagggctgcaggcccgttccctcagctgaccatacgcaaccgcacaggaaacaggaccgtcgccgcgaaccgccgtactctataccgacttctccgaacctcctgtcctccataccggcgctcctaccctcgctgcaatggagttgaggaggcctgcgccctctcctctcgtcgacaactacgtggtaactggtgatgtcgtcctggacctctccgagatgaacaaccagaccattaaactcggcgcgggcctgcgtcaggagtgtgacaccatcgaggcgactagtgctgggaagttgcggcagttgaaacccaacaagtattgtattgaaaactcccagaagcggtataaaccttctgtagaagataccgttcttggtattgtggtcgacaccaaaccagacaactttttggtagacataaagggtcctaatttggcctttctaccagtactttcatttgaaggcggtacaaggagaaacatacccaagttcgagattggtacattaatatatgctcgagtggtgaaagcaaatagtatcatgaatcccgagctctcatgcatggatgctactgggaaagctgccgaatttggacagctgaaagatggttatatgttcgacacaatcaaacttgctgtcacgaatgttgttaagttccccaacgtgtccagttttggaggtccttgggaaaaaactgtcgtttgagattgctgttggactcaatggtcgagtctgggtgaatgctcctgcagcaagtactgtcattcttgtatcaaatgcaataatgaggtcagaatctttgagcggcataaaacaaagagctatggtagaaaatctattggagagattgtcatgatgataagtcagcaagcattagtctaaagtaaaatggaggagtttccattgtgtcagttcaaagtaaaagtaggaaagtttgagatcaaagtgactatccccatcaaaagattattatgtatcacgtgtcgtagtatacagtacactatactcttttttatattaaattatcaatgtatttatcaaaaaaaaaaaaaaaaaaaaaaaaaaaaaaaaaaaaaaattcgagcagttctaggtaagtgtgggatcgttggggctctccccgtctatccccttctatggatcacgtggcgtcgcgtgccgtactctacactcctctttgctcttttctgtgattactttgttaatttagtgtatagtggactgtagtctacggcacgcgacgccttgtgatccttgtttaatattcgaagggcgggtctagtgc

SEQ ID NO: 29567 - DNA, 1187 bp, Zea mays
  Clone ID: MRT4577_126977C.1
gactccatagggcgattgggatcatacgagccggccgggtcagagtccatccgtccctatgggtacaaaaattccacagggatcgggagtctaagcaagctggaagaaatggcgtggttttgtgtggaaccaaacactgcagctgagttagggaagctaacagaaatgagggttctccgcgtagtggttggcaaccagactgtctaccaggcttttctccagagcctgtccaacctaagcaacctcttgcatttatccatggccggcttcaatccgtttgccttagatgacttgactgatcctagacgggccccagcacgtctccgtttctttcgtggaacccaaacaacaaccttccagcagatgccacgttggttctcttggctctccgagctatcaagcttaaccatcaccgtgaataagctcacgcaggatgacctcgaaatgcttggagccttgcctgtgctatgtcgtcttcagctggaagttcctgagatgggcaccatcgcccaagaacggttgtcgatcggtagcgatcaacccttccagtcattggaagggttcaaatttaagcactacgcaagatgttggctggttctctctataggagccatggcaaaacttgaaaagcttgagttgtccttccgagtgagcaagagagatgatggtgccattgatgtcggtctagagaacctgacttccctgaaacatgtcatcattgaagttgattgctttggagccaattttgagcaagtggaggatgtggagaccaaactcagggatgcatttgacgcccatccaaagaatcccactcttgagatgtcacgaacacatgacagtgagttccgcttccagctggttccggccgggtgtgagagtgatcgaagctataatgacagcgacaatgacagcgatgcttccatataaagttgaaggtctgtcggaggaggcgctccacgcttgttagttcccatcgttcgtcaatctgttcttcagtttagtggtggcttggtgcctgtcggtgtgcaggacgttgttagcctctatggctgtcactatcatgtgatcttcacttttgctgcccattctagggcctgtcggttgtatcttagtttcctcccatgaataagagcgcctcaatttctgcatcaaaaaaaaaagaaaaaaaaaaaaaaaaaggggcggcc

SEQ ID NO: 29568 - DNA, 168 bp, Zea mays
  Clone ID: MRT4577_126978C.1
gtaactacgggcccgactccaatggttcggagtacttaatgaccaccgtagacgataaccggttgcccaagacgctggacggacgccacgtggtgttcggtacggtcgtgaaagggatggacgtcgtgcccaagatccaatcctagggtcaggttaaccgcgttccca

SEQ ID NO: 29569 - DNA, 349 bp, Zea mays
  unsure (1)..(349): unsure at all n locations
  Clone ID: MRT4577_126979C.1
ctctagccaaaccngagggggggtgtaatcgaatcttggcggtatancaaggaaggaagggaaagctaaaaaggctgcctggtggaagggcgccatcaaaacagcatatgtataagggtctttagattctgatctacccaacaagaacagaggcaagtgacaacctacgcttgatgcctacaggattggtggctagcttaaacagaccgattcaatcaaggaacaagcgacgctaagaagtaccaggacgctcattgtcagggctactaaagatatctggggtggtatatggttggccaagccctctatgtgctgacgctgaactacactccaggcttcggcagagtac

SEQ ID NO: 29570 - DNA, 134 bp, Zea mays
  Clone ID: MRT4577_12697C.1
cctatgtacagggacaggaaggcagcagcagcagccgtgtagagactctgaaggtgagctactagcatagcacagcatagcatctcgtatgatagacatgatctaccggacaaagcgtgagaccgcgaaacatc

SEQ ID NO: 29571 - DNA, 351 bp, Zea mays
  unsure (1)..(351): unsure at all n locations
  Clone ID: MRT4577_126980C.1
gntctaaatcgctagcggccttcttttttttttttttttttttatctagggggtaatttagaacaatacttgtgttcttttcattacaattgatcactcaagccattgcccacactgatccttccccccatggctaaccccacacattattactcaaacatagactccaaatcacttatgtagcttgctcacctcccaccatccctgaaccaacatgccacctcctctacccacgcccccttctgcctatttgccatcacccgttcatggacctttgctctaaaatcactcgtcgcgagccatacactactctactaaaccgaaccgacattaaaccaatacccactcaca

SEQ ID NO: 29572 - DNA, 460 bp, Zea mays
  unsure (1)..(460): unsure at all n locations
  Clone ID: MRT4577_126981C.1
cgggaatcggtcggggccctcctccaaccttcctcctggcaccgcaccggggtgtcgcngctcctaagaccctactcaccgcgcgcgcggcttcacgagaggctgtgggcagcgcgcgtcgcgcacactgtaagggtgcagacacacagagtcgcaatggaactgatcaacgaggacctcgatcaaggtgatggcgcatgtgctggaaggggctttgaaggtgtggactggcacccaatcggtacatctgcttgatctggagccctaatgtggcaaactgggtctcgtatgtcagtcaccatcctaaatgggaaaactgccgcaccgtgcaaactggttgggagttattgccacacattgtccacaagtctgaggacttgactagctgcggcaagataccttgatgacatctctttgggcgactttataatctgctagatggtcatttttacaagaatgg

SEQ ID NO: 29573 - DNA, 255 bp, Zea mays
  Clone ID: MRT4577_126982C.1
gactagatctagatcgaaagcgatcgacctagataataaaacgtatttaaaaaggaccggagccaatgtatgtgccaggttggccttagcctgtaacccgctggtcaaagtgcagataatcgcgcctgaatttgcggccccctggtgggcttgggtgggttggagtcaccaccaaggggttggcacccttggtctgtactcccaataatataaaggggggggaatgtggtttccaaaaataaaaaaaattatttt

SEQ ID NO: 29574 - DNA, 699 bp, Zea mays
  Clone ID: MRT4577_126983C.1
tcgggctaatactagccgtcctctgttgatcgtaccaccaccgctcacctctgtgttggctttctcacctcttccaacacgattctcactccgggttgcgattgccctcggctctgtccctaacgaatgtagcgtggcggggataggaaggcgatcgattcacgcgccgacgagaaagccacggacagcagctccaagtctgatcttcgagtgccccgcgataaggatcgccagtctactcaagggccgcaagtatagacacagagagtgcaagccggcgcccctgtgtacctccctgccgtgctccagtatcttgctgctgagggtcttgaactgtgcgggaatggcacactggacaacaagaagacccgccatcgtaccgacgtcctactttctctatctacgtactaaactagcataataagatctcccacttgatgagcaccgtgagcatcgctatcgtcgatgcaatgcccaacatccataacctgttttgtcccgaagaatgacgatggcttgcatctatcaaggtctcgtcttcgtcgacgaatactatgtccttgactacgcctggtggcacctccagaatagctgccgcatacgacatgtgctccgtgtactacgctaggcgtgccctgtacctgcctatgtgggtttctgctacactgcataactaagttactcttgcgcttgctaacg

SEQ ID NO: 29575 - DNA, 450 bp, Zea mays
  unsure (1)..(450): unsure at all n locations
  Clone ID: MRT4577_126984C.1
cggggtgacgggttcttggcttggctcccctgcccctggtcaggacgcggaggggaactggcacgcgggcgccatcgcggcggcggcggacgacgtgtgcgccgcggccatcatgtccgtggagggcgtcatcaaggtctccgtccactacgacatctcctacttcacaccggccaagctccatgtgcgtacacacgacaccgctctcctctccagtttctcgcataagtctgcgtctttaacactggagtgagcgagaaaaagaaacaagaaaggggtttgctacgtgtggtgtggncactccacacgctcacctcacgttgcctaccaggcgtgtcgtcgtcttcagtattcaaatcggcgggcgacgagtggcgcgtcactgcctagcantangtagagggcatcatggatggataccagtcagcagagcagagtattgtggggggg

SEQ ID NO: 29576 - DNA, 221 bp, Zea mays
  Clone ID: MRT4577_126985C.1
cccacgcgtccgcgaacgaagatgttggcggtgttcagcgggcaagtggtggaggtgccagctgagctggtggcggcgggcatccggactccgtctgccaagacgaaagcgtcgcagctggtggggcgctttctggccgcctccgagccaggcgtgttcgtgcagcttggcgaccacggccacctttgcttcttccacaccaaccatgcgcttcttcgccc

SEQ ID NO: 29577 - DNA, 252 bp, Zea mays
  Clone ID: MRT4577_126986C.1
gtcaaacgaacattataatatcgtataaattatttctaaaaatcaatatagaattttgaataatagacaaatatatcgatagatatgcaataggcccaaactaaacaggcgcatagcatcttcagttcaggtcctcaatcttggtatctcttccctaggttgctgcaggcgaagagcagagggtcagcgaggagctgaggagcgactcttcttccttcgtcggcaaggagctgaggagccaagcctcgtgcc

SEQ ID NO: 29578 - DNA, 356 bp, Zea mays
  unsure (1)..(356): unsure at all n locations
  Clone ID: MRT4577_126987C.1
aggcgnncggaaaagctatacgnggcttaccaagaaaagttccataagactgctgtcgggcactactggactgcaatagcagaactcatcccccgtgaggtccctaacattgagaaaagaggcaagaaggatgcagaaaagaaaccatcagtatttgtcgtccaaggaccgaaacctggaaaaccgaccgatctttcaagaatgcgacacattcttgtgaagctgaagcattcacctccacctcacatgattcctcctccacccgctccagcaaaggacactaaagatggaaaggatgctaaagatggaaaagactcgaaaaacgttgacaaggctgcatcgaacggaactgcaga

SEQ ID NO: 29579 - DNA, 1249 bp, Zea mays
  Clone ID: MRT4577_126988C.1
ccggccgggaggcaatcgacgggagcacagagctagctagccagccagcagccagcttgctcgccgcgcccgtccttcttcctcgcctccgttccgtcccgtcccgtcccgtcccgcccgccgccgccgcattcagggatggagatgaagaagatcgcctgcgccgtcctcgtcgccgcctcagcggccaccgaggagctcgccggcatttttttttttttttccttcctcctccctgcctcgctcgctagatagatagatagatagatagatagatagatataacaggccaagcttgttcttcttggccttctctgcttcgctgttcttgttcttgagatcgtgctttctgccggtgcagtgccgtgccggagatcctgaaaagagacacacaccgaacaccgcgccggcgcgccaggagtccgggacgtgggcagggagcggaggagcatggccatgctccaccaaggacgaatcttcagaccacaggtacgcgagcggcaccggttataacacgcccagaagcagctgatgaggcagcaggcgcagacggttcctgctccggcggtcgtcgacgccgagccgagaccgagaccgacgcagctggatatctggtgcggcgagagggcgacagcaagtcctcagcagcacatcatcagcttccacgaggccgcagcacgcggcgcggcgctggccaaggaatgcaaccttgagctgacactggcgaccggccgggcaagcagcagcagcagctgcgacgcggaaaggcgacagggaataataaagcggctcaaggcgccgtccaactcggactccggcgcgaccgcggtgtcgtccacgtcgaccgactccgagctggcgccgttccgggaggtggtggaggacgtggcgacgccggtgaggtttcgcggcgaggttagcgggaggaggaggatggacgaggtggggcagggtccgtggttgtaccagcagtgcctcagcctgaggacggcgtgatgatgctgtacagatctacgtcgtaggatctggggttagagttgagagggagacaacactgtttgtgtttttacatgcacaactgtacatcacataggtgtttcacaaggcaaagaagagattaaaaaagtgttaatttatggcaccaaaaaaaaaaaaaaaaaagcggccagactccacctgtcagcctctggcagtcaactgcgcgactgccgagtttcagaagatcaaaaagagagaaaggaacaaaggt

SEQ ID NO: 29580 - DNA, 906 bp, Zea mays
  unsure (1)..(906): unsure at all n locations
  Clone ID: MRT4577_126989C.1
ggatgccggccggctagcctcccagtcccagcagagaccagagcttcttcttcttggccttctctgcttcgctgttcttgttcttgagatcgcgctttctgaccggggagtgccgtgccggagatcctgaaaagagattgcgcgcgagaaggggggaaacatcggcttgaaccttcaccgacaacaggtactaaccgaggcatggacagggagcagatgaggatggccatcctgaaccaagaacggatcttcagacaacaggtacacgagctgcaccggctgtaccacgcccagaagcagctgatgatgcagcaggcgcagacggttcctgctccggcggtcgtcgacgccgagccgagaccgagaccgccgcagctggatatctggtgcggcgagagggcgacagcaagtcctcagcagcacatcatcagcttccacgaggccgcagcacctgcggctgcctggccaaggaatgcaaccttgagctgacactggcgaccggccgggcaagcagcagcagcagcagcnnnnnnnnnnnngacgcggaaaggcgacagggaataataaagcggctcaaggcgccgtccaactcggactccggcgcgaccgcggtgtcgtccacgtcgaccgactccgagctggcgccgttccgggaggtggtggaggacgtggcgacgccggtgaggtttcgcggcgaggttagcgnnnnnnnnnnnnnnnnnnnnnnggggcagggtccgtggttgtaccagcctcagcctgagtacggcgtgatgacgatgctgtactctacgtcgtaggatctggggannnnnnnnnnnnnnnnnnnnnnnnncagcactgtttgtgttttacatgcacaactgtacatcacagattcacagaggtgtttgacaaggcaacgaa

SEQ ID NO: 29581 - DNA, 402 bp, Zea mays
  Clone ID: MRT4577_12698C.1
gccccgaaacgggttcgcaacacaccagaccttacgcgcgggaaatttaaattttgtccaaacgcggcctgaactgtcgggataggggagcgctatgagcagcgcggctacaaaactcgccgccatcaagctcgtgaccgcctccaaagagcaccctctagacccactacgaagaccttgtcggtgagcccttctttcccgggctcggtgcctacaaggcctccggtcccatatgtgacatggcctgggagggccctgacttcgtcaagaccgggcgtgtcctacttggcgccaccaaccccctcgtctctgacccggcacaatccgaggtgacaacgacattcacctcggccggaacgtaggacacggcttctactccgttcaaatctgcccagaaggaga

SEQ ID NO: 29582 - DNA, 804 bp, Zea mays
  unsure (1)..(804): unsure at all n locations
  Clone ID: MRT4577_126990C.1
ccctcgaggccggccgggagcttgtttctgttggcatgcctacacgaatgcagagagaggtgtgaggagaggaccccacacatggggggtgagtgagaagagaagcatgcaagctcatgacaacagggttggggaatctccttccttttccttcctcctccactgcttcgctcgctcgctagatagatagatataacaggccatgccggccggcttgcctcccagcagagaccagagcttcttcttcttggccttctctgcttcgctgttcttgttcttgagatcgcgctttctgacccacgtacggccggggagtgccgtgccggagatcctgaaaagagacacacaccaccacggttgttgcgcgcgagaagtgggggaaaaaaatcggcttgaaccttcaccgacgaccgagagtccaagacatggacagggagcagatgaggatggccatcctgaaccaagaacggatcttcagacaacaggtacacgagctgcaccggctgtaccacgcccagaagcagctgatgatgcagcaggcgcagacggttcctgccccggcggtcgtcgacgccgagcccagaccgagaccgccgcagctggatatctggtgcggcgagagggcgacagcaagtcctcagcagcacatcatcagcttccacgaggccgcagcacctgcgctggccaaggaatgcaaccttgagctgacattggcgaccggccgggcaagcagcagcagctgctgcgacgcgnaaaggcgacagggaataataaagcggctcaagcgccgtccaactcggactc

SEQ ID NO: 29583 - DNA, 579 bp, Zea mays
  unsure (1)..(579): unsure at all n locations
  Clone ID: MRT4577_126991C.1
agcttcttcttcttggccttctctgcttcgctgttcttgttcttgagatcgcgctttctgaccggggagtgccgtgccggagatcctgaaaagagattgcgcgcgagaaggggggaaacatcggcttgaaccttcaccgacaacaggtactaaccgaggcatggacagggagcagatgaggatggccatcctgaaccaagaacggatcttcagacaacaggtactactaaccgaggccacatttcatatccgcggtttatgtatcgcgactaaaaacgcgctgaacaatctctctgcatcttctctcgcctctgctgcgaggttacctactaccgttaccccccagtttcttctcaccgtactctctgtctgcctgcgttcctaccgatcgaatcgaccaggtacacgagctgcaccggctgtaccacgcccagaagcagctgatgatgcagcaggcgcagacggctcctgctccggcggtcgtcgacgccgagccgagaccgagaccgncgcagctggatatctggtgcggcgagagggcgacagcaagtcctcagcagcacatcatcagctttcacg

SEQ ID NO: 29584 - DNA, 522 bp, Zea mays
  Clone ID: MRT4577_126992C.1
aattcggcacgaggccgtgcagttacagttatcacactacacgcaccgccacttccacctctcttctcttccttgctcgacgcgagcgcggcaagaatcggtgcatgtgagccttgttcggagaagagctaaccgatgcagctgaggctgtgagagctgtggttacagaggatgggggaagcagctggtgaggaagaatcctcggccgcgccggcggaggtgagccggcaagcggagctggatgagcagcggtgcctggcggaggcgctgcaggccatcaattcgttggtatctgcctccttgtccgcgacgctgttcccgctcaagtggcagctcatcagggaccggctcaaccggctccacgcgggcctcgccgacatcaccgtctccgcgggcgacgagaacaggtgcgacgcgttggcgaacctcctgcgggacgtcgcggcggccgcccgggaggcgatggagctggtgccgcggagccaggggcggcactacggcggcggcaagctgcggctgcgc

SEQ ID NO: 29585 - DNA, 884 bp, Zea mays
  Clone ID: MRT4577_126993C.1
atctcctctctctctcctcatctcccccctttctcgctagcgatataacaacccatgtcagcctgcttgccagctcccaccagagatcagagcctcttggctaagctagagtgggagggagggagggagagctcgccgtttccgacacatcggcagcgccggagatcctgaaaagagaaagtttgcagatgaggacgacagggaccatcatgaaccttcaccgagacatggacggcagggagcagatgaggacgaccatccagaaccaagaacaggtcttctgtcaacaggcgctttctgaccaccgacggccgcacgtagccgtgccgctgatgcccggacggcagacacacaccacacaccacggttgcgcgcgagaagtccgagacagggacagggagcagatgaggatggccatcctgaaccaagaacggatcttcagacaacaggtactactaaccgaggccacatttcatatccgcggtttatgtatcgcgactaaaaacgcgctgaacaatctctctgcatcatctcgactctgctgcgaggttacctactaccgtagtaccgtcccagtttcttctcaccgtactctgcctgtctacgttcctaccgatcgaatcgaccaggtacacgagctgcaccggctgtaccacgcccagaagcagctgatgacgcagcagttgcagacggttcctgctccggcggtcgtcgacgccgagcccagaccgagaccgcagctggatatctggtgcggcgagagggcgacagcaagtcctcagcagcacatcatcagcttccacgaggccgcagcacctgcgctggccaaggaatgcaaccttgagctgacactggcgaccggccgggcaagcagcatcagcagc

SEQ ID NO: 29586 - DNA, 264 bp, Zea mays
  Clone ID: MRT4577_126994C.1
aaaatgttgtgctgtaaataattgaaagcgaggtacttaagatgcaaacggaaaacggagggggtgggcatcttagagagggggtgatgggaagaagggggccacctaatactggcatcgaatgcagggacatgtgagcagacatgcgtacactaaggaggatactaacacgctcgccatcgcatggggggacgaccggccgacccaggaacttgggaagagctccggttcatggggggaacgcgcccgacagcatgagccccg

SEQ ID NO: 29587 - DNA, 177 bp, Zea mays
  Clone ID: MRT4577_126995C.1
ctaacacacatggaaccggttgcacattagcatcatgtattgctgctgaattagcaaaaggtgcaaaatgctgcacgctgttcaggttgcaagcatttgtggagtctgctctttatcacagcaaagatcttgtgattggacatggacctacagggaccttttgaccaccacttcgaa

SEQ ID NO: 29588 - DNA, 388 bp, Zea mays
  Clone ID: MRT4577_126996C.1
aaagcaactcaaaaaattgtacaaccttgctgaccccagacttcccaataaaacttgcgacttaaaataactgcctttcacccaaaaaaagctatcgagaataactgacgactctgatttccccgaacacaacctttcttctgggaaaaaacccagggaaaatttgcggggaagctgaaccttggaaacaaattgatgggaagggcttccttttgacccttgttggccttcaaccttaactttttatcatccttcttatcacgggatgcaggagcctcttctttttctgcattttcctccttgatgggctcggccactgttaacttctgggccaaatcagaagcggcagagggaactctatcattttctttctcctcgctctttcctt

SEQ ID NO: 29589 - DNA, 501 bp, Zea mays
  Clone ID: MRT4577_126997C.1
tcggactcgtgggcggacgcgtgggcggacgcgtgggtttactaaccaccgttcaactgctataaaactcactaaaaactgtcttccactttgggtctttattagcaagcatacaaaagtagtgcacacagaatatgggaaattagaacaaacaaaagcaatttatgttggaaaaggacctattgataaacaagcaccgaatatctgagaccaagctccaaagagaattactaaaaatcatgtgagtttcatgtacaccatgatattagcttggtgaagaatcattctcgagctttaaatcagcttgatcttatcatattcctggttcaagcggaactaactccataagatctcaacttgtgcttactgctttagagcttctttctgataactaaaattgaccaggaaatttaagttagctacttaggaagttccatattcttgtttgcaggccaccattatattattggcaccataacatatgtacaaagcatgactggt

SEQ ID NO: 29590 - DNA, 232 bp, Zea mays
  Clone ID: MRT4577_126998C.1
agcgacggcggggttggattcaccacctgctagctgtgtgaacaaggggagacaagacgacaccttgctgcctcttgatatgaatctccgcaactgacacgatggtgttagcttgctgctctcaaacgagtggcaaaagtgtaataactataatatgctcagacacatacacacaggatagtgtaaaatcacactatctacagtctcggatattatgcagaataaaaatgag

SEQ ID NO: 29591 - DNA, 366 bp, Zea mays
  Clone ID: MRT4577_126999C.1
gaaaaattgaattcgaaatgaatataacatcgttgttcaatgtgaaaggaaaagttggacttgttactggaggaggaagaggaattgggtttatgattgtacaaggatttgttgaaaatggtgcaacagtaatcatatcttccagaaacgcaaaagaatgcaacaagattgcggaagaacttaacaataaaggactgggaacatgttatgcaatttcagcagatttgtctaaaatggaagaatgcgagagacttgcataagaaatcgcgaaagaagaatcatatttgtacattttagtcaataatagtggtgcaggatggcgagaagaatatgaaacttatccagaatgtgcatttgataaactct

SEQ ID NO: 29592 - DNA, 109 bp, Zea mays
  Clone ID: MRT4577_12699C.1
cgctccaccgtacgaggctcggaatcggctcaatgcagtgatgcaaaagatcccgagccactgtgatctctgttgacatatatttaaaactcattttgggttaggttat

SEQ ID NO: 29593 - DNA, 1377 bp, Zea mays
  Clone ID: MRT4577_1269C.1
ccggccggggagtcgttgacagccgtagcccccacccccagcacgccgtccccgctttcctctcgccatcttccccagaattccgacccgctagatccgcaccctgttctttcgcctcgctcctcggcacctgcccgtctcccatgggctcttgccgccgctgacactggggcccaacgctctcctccgcgtccgcacccgcctccgcctccgcctcctctccctccccttcctcctcctcctattgcctccactaaacctagccgaccgcctccgcccgccgacatcggaagccctagttgctgcgggaaccgccctgccggcccgccgctcctccgccccaagtgtccctggtttcttggatgcaccgactgctccgatggatgcccctgcgcccgccgtggagatccgcgaagtctgggcgagcaacctggaggaggagttcgaggtgatccgcgacgtcgtcgacgcgtacccgtacgtcggcatggacacggagttccccggcttcgtggtgcagccgatcgccgagtaccggttcacctgcgaccgcatctacgccggcctcgagggcaacgtcaacgtgctcaagctcattcagcttggcctcaccttctccaacgaggcaggcacactcccaccgtgtggcacggggggacagtgctgcatctggcagttcaatttccggggcttcaacccgcacacagacccttacagccccgactccatcgacctgctccgccgcagcggcatcgacttcgacctctttgcggtggagggggtcgattccacccgcttcgccgagctgatgatgtcgtctgggatcgtgctgaacgacgatgtccagtgggtgaccttccacggtagccacgacttcggctacctcctcaggttgctcaccggacgggaaatgcccaacaccttggatgagttcttgaagctcaccaagatcttctttccggtgatgtacgacgtcaagcatctcatgaagttctgtggccctggcctatatggtgggctgagcagacttgggaagctgctcaaggtcgagcgtgttgggaccggccatcaggctggttctgattgtctgctgaccctgcagtgcttcatgaagctcaagcagttgtacttaaaggagtctgtcaagttgtatgatggtttgttgtttgggcttattcctggggaagtggagatcaaaactgctcccccgcccattggatgagtaatggtagttaaataacaagattctgattgagaaaaatagggaacaaaatctatcatcggcgaatatatgactgatctgaggatttcctgtggcttgtatgatatatgccttctctccttgctattcttcccattagtcacttcaatccatgc

SEQ ID NO: 29594 - DNA, 265 bp, Zea mays
  Clone ID: MRT4577_126C.1
cccacgcgtccgggctcatggaaaaggtttttgcaaatatgcatcaggagcatgttacattggtacatgggacagaggacttaaggatggacatggtatgttttatcaaccaggaagtaaaatgccttgtaaccttgaagtgtctgagtgtgtaacagaccacgatgtttcaagttcttcaagctctggtaatgaaaatatcaatagtagcttattgtttttattccaaaaactttgcaacacatggagactacacagcattttc

SEQ ID NO: 29595 - DNA, 741 bp, Zea mays
  unsure (1)..(741): unsure at all n locations
  Clone ID: MRT4577_127000C.1
ggtacacctccgnggtctcggccgggnccgggnaaaaaaaaaaaaaaaaaaaaaaaaaaaaaaaaaaaaaaaaaaaaaaaaaaaaaaaaaaaaaaaaaaaaaaaaaaaaaaaaaaaaaaggcccgcgcaaagccaccaactggttttaattttcgtctccagcccaagcaagcgaagagcccccttggagatttttccttccccgcgccgccatggacgcagttgactcggtagtcgacccgttccgggagttcgccaaggacagcatccgcctcgtaaagcgctgccacaagccggaccgaagggagttcaccaaggtcgccgcgcggactgggatcggtttcgtcgtcatgggattcgtcggtttttttgtcaagctaattttaatccttataaacaacataatcgtgggttccggttgatccgtaaacctaaggtttactttccaatcacgttatacccctgctttggcttccactggatgggtgtaattcggtagatcttttgtatcgagccacatgcttaggacaattcgttactgttacatttttttgggaaaattgttctgccgagtttggtttgggtggaaattaaaatttggggattggagattcgctgaatgagaattcagcataggggtttatctgctgtctttaatggtatactgactattagtagggcttgggagatccaatatcctctaggattctcatactactataatgggtgatcagatttttt

SEQ ID NO: 29596 - DNA, 815 bp, Zea mays
  unsure (1)..(815): unsure at all n locations
  Clone ID: MRT4577_127001C.1
ccnggccggggaaaaaaaaaaaaaaaaaaaaaaaaaagctctttctcctcaccaggcatcaagagaggacgagagggggcgtccggaatttcctctgcttccttttaccgcgaaacctttgccttgaaggaagaatccgttcctctgcttgatctgtgttgtagatgagacgagaagcggaggattaacagagcaggaaggtgaattgggcgcagagactctcagacgcgcagtttttgaagctcgtcgcgaaatgaaggaggcgaggaatcactaccacacccggggctcctcgcgcggcggcggcggcaccactgccgagcgcgacctggtgttacagtggggcaaccggaagcgcctgcgctgcgtcaaggtgcagcgccgtgacgtcgaggccgccgctaccgtggccgccgagaaagccgccatcagccagcgccgcgccgcggccacagctgcccagcaccacccagacggccacacccaccaccgtgttttcaggaacacagaagagtttgcgatcatgaaatcgccagcacggcaacaacagaacagcaggatcgacgcagttgcttcaccggacagggagtgccctggtagaggtaacaacaacaacaacggaggtccacagacctgtccagatgacaagaaaggctcttcatcgggggagtgaggggtccatctggccgaagtttgcagtcaccctgtcgaacagggaaaaggaagagaatttcctggntgttcagaggatccaagctgcctcaaagacccaagaaaagagccaaggtcatccagagaactgtcaatttcgtatg

SEQ ID NO: 29597 - DNA, 394 bp, Zea mays
  Clone ID: MRT4577_127002C.1
tcgtgcggccgacagccggagcatcggcgggggggactattataaccagtgcggcgacacaaccgccgggcgcgaatccgaacacgctatcttcaactccagcctgaggggacaggtcgactgcacaagccacccgtgaccacccattgaggcgagcgcaaaggaccgagccaggaggaggctgacaactgaccccacgaagaggagcacctcgcctaccacgtccacaaccatcctcggagcaaggaagacatgagaagccgagggacactccacacagacaacgctgccatgaacaggcttacacagtccacggcaacgaaccaggtgaagaaggccgcgctgagggcaatcgccggctgccagacacatgaggaggacaggccccttaatg

SEQ ID NO: 29598 - DNA, 704 bp, Zea mays
  Clone ID: MRT4577_127003C.1
cgggataccctgcaaccacgactgcagaatcccctcacccggcctgccccaccacgcctcgaatccgcgatctccaaccacggacgccatcagcgccccaatcccatgtcccagaagccctttcgcggctgcctcataatcccttccgcagatgccgcagaatccaatccaacgccatcagcgcccaccatggaaacccgtccgcggttgccgctccaatcccttccgcggatgccgcataatcccaactgacgtaatcagcgccccgtctgcggttggttgccgcagattcaccatcaacgttcatcgttccatcctcccgttcgcggttggttgccgcagaatcgcatctgaagtaatcatgctctcgaccatgccctgcctcgaatctgggatctccaatcccggacgccatcagcgtccgccaccggcgcccgccatcaccaatttggaaacaccggtggaggggattttgcggcaaccaaccacggacgggagatccacaccattttgccaatgacaccgcagatccagtcacaccaatattaaaatgatggcagcccctatcatcatccgctcatcctcttctcaccctcctaaacgtccagttcctgtgttcgcgacatccctttcatctggtagttcccgtgtgcgctccttccctttcatccgtctgcacgccttcactctcatctggctatgat

SEQ ID NO: 29599 - DNA, 662 bp, Zea mays
  Clone ID: MRT4577_127004C.1
gattattttctcaaaccattcccccgctgtcctcccgtccgcctgccggagatggagatggagaacgggcacgccaagtaccgggtggccgtcattggcagcggcaactggggcagcgtcgcctcccgcctcatcgcctccaacaccgccaagctgccctccttctatgatgaagtgaggatgtgggtgtttgaggaaatactgcctacaggcaggaagctatctgagtccattaacgaacagaatgagaactgcaaatacttgccaggtataaagcttggaacgaatgttattgccgaccctgacttggagagcgcaggtaatcaattaatcgcagtgtcacccagctattctgatggtttagagggtagatgctactcgtaaacaacagttgagtatgtcatataatctctctcataaaacgcaaaagacaacgaacgagcatgcattagcaaacgatgacttgtcgttatcataaaaaaaacttacagcataaagctgcttgcatattgtcacataaattttatggaataaagcttttatttcccttccgcagtcaaagacgcgaatatgctggtgtttgtgacgccccatcaatttgtggagggtatatgtaagaagcttgtagggagctaacaccaggagctgaggctatctccctc

SEQ ID NO: 29600 - DNA, 1486 bp, Zea mays
  Clone ID: MRT4577_127005C.1
cattgggtacctcgaggccggccgggggtgggctcctcctcttcgtctccgtctccgtcttcctcaatcccaaggacgaaatggcagcgactgtcgcctcgtttttttgccaacaaacaaaaacaaagcagcggtgaagggaggggaggaaaggaaacagcaaccacatgcgattatttcttggggattccgcccctccgacctatctaagcggaccataaccacgggcagcaggacattatattcttctgcctgcccttccgttcaatttcaatttcactttccttctctcctctcctcctgctgctactaggttcgggccgtccgtccttgctcttgatctgcattatttaattcggaccattcccccgccgtcctcccgcccgcctgccggagatggagatggagaacgggcacgccaagtaccgggtggccgtcattggcagcggcaactggggcagcgtcgcctcccgcctcatcgcctccaacaccgccaagctgccctccttctatgatgaagtaaggatgtgggtgtttgaggaaatactgcctacaggcaggaagctatctgagtccattaacgaacagaatgagaactgcaaatacttgccaggtataaagcttggaacgaatgttattgccgaccctgacttggagagcgcagtcaaagacgcgaatatgctggtttttgtgacgccccatcaatttgtggagggtatatgtaagaagcttgtagggaagctaacaccaggagctgaggctatctccctcatcaagggcatggaggtcaagatggaagggccgtgcatgatatccaagttaatcgcggatacacttggaatcaattgctgtgtgctcatgggtgctaacattgcaaacgagattgctgtcgaagagttcagtgaagcaacaattgggtataggaaagataaggaagtggcaaatcgatgggctaaactttttaccacaccctacttcctagtttctgtcgcagaagatattgaaggagtagagctgtgtggaactctgaaaatatcgtggctattgcagcaggccttgtggatggcttggatatgggaaacaatacaaaggctgcaataatgaggattggtttgcgagaaatgcgtgctttctctaagcttctgttcccttcagtcagagacaacacgttcttcgagagctgtggtgtcgccgacctaataaccacgtgccttggtgggaggaacagaagagtggctgaggcctttgcacgaaatggtggcaaaaggtcttttgatgaactggaggcagagatgttgcgtggccaaaaactccagggagtgtccacagcaagggaagtctatgaagtgttgacttatcgaggatggcaggagctgtttcctctgttatcaacagtgcatgagatctgtattgggcagttgcctcctacatcgatagttgaatacagtgagcacacgccaaatctctccatcatcggtggtcatac

SEQ ID NO: 29601 - DNA, 2468 bp, Zea mays
  Clone ID: MRT4577_127006C.1
gcaactgggggcagcgggcgcctcccaggctgcatcgcctccaacaccgggcaagcctgccctgccttctatgaatgaagtgagcgagggggggcgctctgcaggaaatactggcctacagggcgaggaagcgtatcctgaggccacgcaacgaaccggaatggagaacgtgcaaatacttagccaggtagtaaagctctgcaacgaatgttatgtgccgaccctgcacatggagagcgcaggtaatcaattaatcgcagtgtcacccagctattctgatggcttagagggtagatgctactcgtaaacaacagctgagtatgtcgtataatctctctcctaaaacgcaaaagacgacgaacgagcatgcattagcaaacgatgacttgtcgttatcatagaaaaaactgacagcataaagctgccggccgagtgtcacataaattttacccacgtgtccggacgggatcttctccctctcctgctcctccgcttcgtctccgtctccgtcttcctcaatcccaaggacgaaatggcagcgactgtcgcctcgtttttttgccaacaaacaaaaacaaagcagcggtgaagggaggggaggaaaggaaacagcaaccacatgcgattatttcttggggattccgcccctccgacctatctaagcgaaccataaccacgggcagcaggacattatattcttctgcctgcccttccgttcaatttcaatttcacattccttctctcctctcctcctgctgctactaggttcgggccgtccgtcattgctcttgatttgcccgattattgcatctcctctagctgttgccgccggccgggcggcggtgtggttggcttcttgatctgcattatttaattcggaccactcccccgccgtcctcccgcccgcctgccggagatggagatggagaacgggcacgccaagtaccgggtggccgtcattggcagcggcaactggggcagcgtcgcctcccgcctcatcgcctccaacaccgccaagctgccctccttctatgatgaagtaaggatgtgggtgtttgaggaaatactgcctacaggcaggaagctatctgagtccattaacgaacagaatgagaactgcaaatacttgccaggtataaagcttggaacgaatgttattgccgaccctgacttggagagcgcagtcaaagacgcgaatatgctggtttttgtgacgccccatcaatttgtggagggtatatgtaagaagcttgtagggaagctaacaccaggagctgaggctatctccctcatcaagggcatggaggtcaagatggaagggccatgcatgatatccaagttaatcgcggatacacttggaatcaattgctgtgtgctcatgggtgctaacattgcaaacgagattgctgtcgaagagttcagtgaagcaacaattgggtataggaaagataaggaagtggcaaatcgatgggctaaactttttaccacaccctacttcctagttgctgtcccagaagatattgaaggggtagagctctgtggaactctgaaaaatatcgtggctaatgcaccgggcgttcaggggggctaacattggaaacaaaatagaaaggctgcagttatgtgaaggggttttagagtaaagactagattcgctaagggtaagtccctggagcaaaaattggacataggcttggtaaggagttgtgtcgccgacctaataaccacgtgcctagctgggaggaacagaagagtggctgaggcctttgcacgaaatggtggcaaaaggtcttttgatgaactggaggcagagatgtagcgtggccaaaaactccagggagtgtccacagcaaggcaatactaaggctgcaataatgaggattggtttgcgagaaatgcgtgctttctctaagcttctgttcccttcagtcagagacaacacgttcttcgagagctgtggtgtcgccgacctaataaccacgtgccttggtgggaggaacagaagagtggctgaggcctttgcacgaaatggtggcaaaaggtcttttgatgaactggaggcagagatgttgcgtggccaaaaactccagggagtgtccacagcaagggaagtctatgaagtgttgacttatcgaggatggcaggagctgtttcctctgttatcaacagtgcatgagatctgtattgggcagttgcctcctacatcgatagttgaatacagtgagcacacgccaaatctctccatcatcggtggtcatactccattctactgagctagatactgctgtttggactagtgctccagtatcacttgttataaactaagaaatatgagatatgttgaatatctgaatatgttttgcatataaatatgatttcagtcatgtcaccttattaggtgcatatgaatctgtggtcgtgtatccagtattaatactaattgcaaatcggtgaatgcggatcagctt

SEQ ID NO: 29602 - DNA, 362 bp, Zea mays
  unsure (1)..(362): unsure at all n locations
  Clone ID: MRT4577_127007C.1
cccccctttttccttttaaaaaagccgncggaagcggggcaccgggagggcngtgcgaaaccaatggaccccacccacgggcaaagcaaggacgagagaaaaaatataaccagagagatgggtcagccgacggagggtctaaaaacaagcaagctccttgaggcaacccttggagctgccctaggcgtacgagcatatagccatggaccagccgatggtgccgctaaactcgacgatgacgtcaaccatggtgacgccggtgcaagggaccatggcagtgcaaagcaagctaacggcctccggggaggaggaggagcccgagacgcccatgaaggagaccgccctagaccgcgacctaggag

SEQ ID NO: 29603 - DNA, 296 bp, Zea mays
  Clone ID: MRT4577_127008C.1
cccacgcgtccgcggctccccggtccgcctctttctccagcgtggcgcggggtctcccctcccttcggctggccccgccccgccgccgccgcggggacctcgccaggccccgcgccgcggccgaggccgcggcggagagctacgcgtccgcgctgtcggaggtggccgacgagaacggcaccctctagcaaacggtctccgacctcgagaagctggagaagatcttctccgacgaggccgtcccctagttctttaacaaccccaccgttccgtactaggaagaagggcgagctcat

SEQ ID NO: 29604 - DNA, 1244 bp, Zea mays
  Clone ID: MRT4577_12700C.1
gccggcctggccgggcttttcccacataatgagcatacctacaagccatattcccatccacattcatccgccatcactgggtcgtccacccaccgttttccttatcttcactttcctcacgcaattcacccaccccctcaccatttctcccatcgaccatcgctgccacataccaaacccacttcctgtggtcttcggtgtcttccccgccgccgccgtcgctgccgtcgtgcatcacactgtccctcttgttgtgatatctatgagagagagaaacagctcgatcgatcaagaacaccaacgaggctctagctccagatcgacaatgccgttcgcagcctcaaggacgtcacagcagcagcacagccgtgtggccaccaacgggagggccgtggcggtgtgcgcgggtcacgcgggcgtgcccgacgaggtggcgcggcaccacgagcacgcggtggcagcggggcaatgctgcgccgccatggtgcagtccatcgcagcgccggtggacgcggtgtggtcgctggtgcgtcgcttcgaccagccgcagcggtacaagcgcttcatcaggagctgccacctcgtggacggcgacggcgccgaggtggggtccgtgcgggagctcctggtcgtgtccgggctgcccgccgagagcagccgcgagcggcttgagatccgggacgacgagcggcgggtgatcagcttccgggtcctgggcggcgaccaccgcctggccaactaccgctccgtgaccaccgtgcacgaggcggcgccgtcgcaggacgggcgcccgctcaccatggtcgtcgagtcctacgtggtggacgtgccgccggggaacaccgtcgaggagacgcgcatcttcgtggacaccatcgttcggtgcaacctccagtccctcgagggcacggtcatcaggcagctggagatcgcggcaatgccgcacgacgacaaccagaactgattgccgtcggcccggccggctgcacaccgtcgtcgcagttgggctgccggtttctttggacgaggcttcatcgaccatttatgatatattttctttcgtcgttggtactgtatactctcgcgaaaataagaagttggtactgtgaactgcttaaagtttgaggttgtttgtcttccctttcttaaactctgtcaataatgaagtattgtaagatacagcatcaataatattaagaccagtaaagtagtatagttaatatatatgtgtaagtttgtgtata

SEQ ID NO: 29605 - DNA, 1191 bp, Zea mays
  Clone ID: MRT4577_127010C.1
aaaaaatcctgccgcccctccttcagatttttcacgccgcgcgctgcttcttccttatcttcttcccctctgctggcactccttccacacgcgcgtagcttcttggcgctttctccatcacgctctctccagcgcccatctccctcctctactcggtcctcctctctgcgcgcaggagcttctcccatggccacggcgccctggctcctgctctccacgtcgtgcgcgcctgggcacttccccaagtggccgtctgccctcctgcatcgcgcccagccgagcctgctccctgagctccttccctgccgcaccggagctccctccatggcgcccgagcgccctgccctcggcttcctgcttgcatcgcgcgccctcgtcttcagcccggtgctcatctctctgctcgtcttcttcaatcgtcgcgcgctctccctgacgcgctcgcccatgctgcggtgcccctcctcggacagcgcccggccggatctcccttgtgccgcgcccctgctcctccctgttccagctcggtgcccagagccccagcgccggtcgcccgtctactcttcgccatggcacgcctcaagcttcaccctgcgcgcgcgaagctctcagctcgcccagtctgcgcgccgcggtttctctccccatggtgctcctccttgcccctgctccgatttcccttccgtgctgcagcccctcagctcactccctcaacctcgctgactcgccaagcttcctgctcgcctctgcgcagcgccccgctccctatgtccgttcccagccgtgatgctcccttgcactcggcctgctctggatccgaggctggtcgctatgtgtgctcaactttgtcttgtcgcaaaaccctgatgccgtagtcccctaccgtgccctggatgtcgtgcttgttgtggccggctctggtggtcggcatcatcgaccgttgattctatcattagccacgctcattcattattattccgtacgccgcaagaaagagatctagagaatctggataaagaaaaagcgaacccctccgtcgcttccatgttgtgctgaggaatgctcccaccggacattgtcgtcaatctcacggattcaaattgggtttagataatgataagccaatttattgttccagataatgtttgattgagggtttggatatataaaaaaaaaaaaaaaaaagcggcc

SEQ ID NO: 29606 - DNA, 127 bp, Zea mays
  Clone ID: MRT4577_127011C.1
ctggatcgccgctgtcgcctcctgcgcctctgggaggtgccgcatgagcgccgtggacaattcctccgagcccacgcatcatcgatacgatccgtggtcattggcggcagctcgggcttctgcggca

SEQ ID NO: 29607 - DNA, 621 bp, Zea mays
  Clone ID: MRT4577_127012C.1
ccggccggcgaacgaaactgaagttgcctttatggataatgagacatgtctcctcctacttccctgtgtgtctcctgtgagtgtgatgaaccttgtcatatatgatatgtcctgtgcatgtacaccacctcgacacaaatgcaaaggatggactaccactcggacgaacctgatgtgatgagcttatactactctgttccaatcatacgcgggtgcgactccctactcacgcgacgactgcttgattgcatatcacaaaattatccatgcgctcttccagctctccctgggcagtgcattctgccatgacatgtgtgtcgcaatctgatggactgctcgtgtattataatgaaatgagtggactgtatctatgccacgatgcacctcagagagaagagccaacaacaaatttgcccgccctcagatccatcttttatctctccagacgacgcctgttccgcgattaattaattacatggcccatagctcatgcctgcgtgacataagctacctcccatttctttgcttctactatcgatgcgtgaacatattagttaatcctcatcgagcataatgaacgaactaactctacgtactagctgtagcacttactgaccgatt

SEQ ID NO: 29608 - DNA, 303 bp, Zea mays
  Clone ID: MRT4577_127013C.1
cccacgcgtcagcagttcccctctcctgatcgtcctgttccgcacagctgcaacgatggcggccgtaacccgagaatcatgcggctcccgcgggacaggagaacgccgtgcgcatcgtgtacgttgacccccccgaggacaccgacccttacgatgtccgtatcggcaccctcacactcgtgctcagcagggagtaaaatccgctggacacactgctctacctcgaaagaacacggcaccagcagcatcttcgccacactcagcctgagtacgtcaagcatttcaaggatcaaccacctgttc

SEQ ID NO: 29609 - DNA, 338 bp, Zea mays
  unsure (1)..(338): unsure at all n locations
  Clone ID: MRT4577_127014C.1
ggcctagaggggccgccctgtgtgtcgtggcgctccgcggggggcgggaccacctcaccagcctcctgggccccgctctcctcccgcccgcntccatgggcttcgttctcgaccgtgcggtgcgagccggtggacaggtcatggcggcggcgcggctcctgagatccgggctgcccctcctgcgcgcccacctcgcatgctgcgaatgcgcggccgctgctcatgttccgaggggcttcgcgtcgctggccgccgggccaccgggagggtggtcaaggttccaagggctaggcttggcggggccggcctctctgcctgtgcactgtttcttacagcag

SEQ ID NO: 29610 - DNA, 489 bp, Zea mays
  Clone ID: MRT4577_127015C.1
ctgctgccacgcgtccggagccaacacacacagagagaggacaactcctcacaactctcccttccctcctgtaggggccaaaagggttagagagtaagagaagtagttcattcccttgcccaacacaagaaaacaagctctcctcatcaccctaatccaagcaactgcttgtgtgttgggaaattcttgtgacccctgttatattattatccgtgtagctactagcttcattcccccctttgtacccatcaaatggctggcatgtctctgcaacacccctgggcgtttgctttcggtctactagaccgacgttctaccgcatctacaagagcaagtcgacggaaggctatcagtcggttccctacgtggttgcgctgttcagcgccatgctgtggatcttctacgcactgatcaagtccaacgagacctttcttatcaccatcaacgccgccggctgcgtcatcgagaccatctacgtcgtcatgtact

SEQ ID NO: 29611 - DNA, 945 bp, Zea mays
  unsure (1)..(945): unsure at all n locations
  Clone ID: MRT4577_127016C.1
gccggccgggttgggatcaagctttcacgcgggcgagcaactcgagtagtagttgccagccacacctcctgtcttcctttttccttctcgcattgtggaggagaaggatcaagtgctcataagcaagctagcttgacgaagtataggaaattaggaatacaaataaactcatcctcctcatatataaacgctcgatctccagatatggccggcctgtccctgctgcatcccatggccttcgccttcggcctcctcggcaacatcatctccttcatgacctacctggccccactgccgacgttctaccggatctacaagaacaagtcgacggaggggttccagtcggtgccgtacgtggtggccctcttcagcgccatgctgtggatctactacgcgctgctcaagtccaacgagctcctgctcatcaccatcaactccgccggctgcgtcatcgagaccctctacatcgccatgtacctcctctacgcgcccaagaaggcaaagctgttcacggccaagatcctcctcctcctcaacgtgggcgtgttcgggctcatcctcctcctcacgctgctgctctccgccggacagcgccgcgtcgtcgtcctcggctgggtctgcgtcgccttctccgtcagcgtcttcgtcgcgccgctcagcatcatccgccaggtggtgaggacaaggagcgtcgagttcatgcccttctcgctctccctctccctcaccgtcagcgccgtcgtctggttcctctacggcctcctcatcaaggacaaatacgtcgctctgccaaacgtcatcggcttcagcttcggcgtggtccagatgggtctctacgcgctctaccgcaacgcgacgcccagggtgccattcaaggacgtggccgacgacggcaaggaccaggcgcccggcgaacatgtggngggtaccattgccaagctgacc

SEQ ID NO: 29612 - DNA, 340 bp, Zea mays
  Clone ID: MRT4577_127017C.1
gggggcaactagtaatacattgggggattcaacctcatcacaaaccgttgctacatactggcgctcgtgataattcactaaaaagacacccacggtccgcgctggaattgactacacaacctaaaagacttacacagacacacattcccataccagaccacgtatcagatcccttttatctacaactccctccctctgcttccctctgggcccgctaaagctaggtgttggcggttcaccagcaccagtgtacccacccatgcttacgcagtcacaagcatccacacctaggctgctcacaagccgttctctacgggatcgccggtaagtgccttcttcg

SEQ ID NO: 29613 - DNA, 1703 bp, Zea mays
  Clone ID: MRT4577_127018C.1
ccggccgggattttccccggccatggttcctttgctttcagcagttctctgctggatgtgatgtatccattgttgcaatcatggccttgcattggctaaaaaaaaaaaaaaaaaaaaaaaaaaaaaaaaaaaaaaaaaaaaaaaaaaaaaaaaaaaagagtttgagccaacacacacagacggccggaaaaaaaaaaaaaaaaaaaaaaaaaaaaaaaaaaaaaaaaaaaaaaaaaaaaaaaaaaaaaaaaaggtttgagccaacacacacagagagaggacaactcctcacaactctcccttccctcctgtaggggccaaaagggttagagagtaggagaagtagttccctagcccaacacaagaaaaacaagctcgatctcctcatcaccctaatccaagcaactgctttgtgtgttgggaaattcttgtgacccctgttatattattatccgtgtagctactagcttcattcccccctttgtacccatcaaatggctggcatgtctctgcaacacccctgggcgtttgctttcggtctactaggtaacgtcatctccttcatgaccttcctggccccgataccgacgttctaccgcatctacaagagcaagtcgacggaaggcttccagtcggttccctacgtggttgccctgttcagcgccatgctgtggatcttctacgcactgatcaagtccaacgagaccttcctcatcaccatcaacgccgccggctgcgtcatcgagaccatctacgtcgtcatgtacttcgtctacgcgcccaagaaagccaagctgttcacggccaagatcatggccctcctcaatggcggcgtctttggggtcatcctcctgctcacccttctcctcttcaagggcagtaagcgcgttgtgctgcttggctggatctgcgtcggcttctccgtcagtgtcttcgtcgcgccactaagcatcatgaggcgcgtgatccagacgaagagcgtagagtacatgcccttctccctctccctctcgctcaccctcagcgccgtcgtctggttcctctacggcctcctcatcaaggacaaatacgtcgcgcttccaaacgtcctggggttcatcttcggcgtggtccagatggtgctctacgtgttctacatgaacaagacgccggtggcggcgactgccgtgggcaaggatgccggcaagcttccctcagctgcagacgagcacgtcctcgtcaacattgccaagctcaaccccgccctcccggagaggacctccgggatgcacccagtcacccagatggcggccgttcctgccaggagctgcgctgctgaagcaatcgcgccggcgatgctgcccaacagggacgtggtcgacgtcttcgtcagccgacacagccccgctgtccacgtggtctagcttctccatcatcgcaagcaagcatgaatcgagtcgagtccgaacgcataattaagcacccaatctattggatatataaatacgcgcgccccaacatgtgcgccatatagccgtttattccaacccttagctttgtttaattctcaaatatgcatttgaagtaatgtactttcatgcaaataaaaaaataataaaaccctccaaaataaccataagaattttctatagcacgttaatgtactgtaccttgtcttatttttcttctgtctacaaagttagtaacagatatgtgttagattc

SEQ ID NO: 29614 - DNA, 522 bp, Zea mays
  unsure (1)..(522): unsure at all n locations
  Clone ID: MRT4577_127019C.1
cgcaccccatctctgatgtgatctgatctctccccctggatctagacctccagctggctgctccgctctgcgtcgctagccatggcgccctccacggggagctaggagcacgtgcgggtccactgtnnnnnnnnnnnncctgtaatcacctcctttacagagctgctgtctggggcaccagcggacatggtaagagcagcgggcgcagatcatcaggagcggtngnngagggggttgttccaccgcggcgccaccacaagcggctgactaggcaagcccaagttcaagatcgcgcaggcgctcagactgaccatctggccgccggcgatgacgacctccttctacttgtacatcccgcccgggctcagccgcgacgagctgctggactcgcccgagctgctgcactcttgcttgaacttcttcacggaggacaccaccggcgccatccaggcgcacaggttctactggaagcaggacggcgacctgaacagcgtccactctcagcaagacgacagtcaggct

SEQ ID NO: 29615 - DNA, 1069 bp, Zea mays
  unsure (1)..(1069): unsure at all n locations
  Clone ID: MRT4577_12701C.1
gtcggcgacgacgagcttgctgagccgctcctccgcgagggtgtcgttgtcccgcaagaccctgtgttgttgtcatcaactgagagagaaacaactcgatcgatcgatcaagaagaccggcgaggctctagctccagaccgacaatgccgtacgcagccacaaggacgtcgccgcagcagcacagccgcgtggccagcaacgggagggccgtggcggcgtgcgcaggccacgcgggcgtgccggacgaggtggcgcggcaccacgagcacgcggtggccgcggggcagtgctgctctgtgatggtgcagtccatcgcggcgccggcggacgcggtgtggtcgctggtgcgccgcttcgaccagccgcaggggtacaagcgcttcatcaggagctgccacctggtggacggcgacggcgtcgaggtggggtccgtgcgggagctcctggtcgtgtccgggctgcccgccgagaacagccgcgagcggcttgagatccgggacgacgagcnggcgggtgatcagcttccggatcctgggcggcgaccaccgcctcgccaactaccgctccgtgaccaccgtgcacgaggcggcctcagagggcgggccgctcaccatggtcgtcgagtcctatgtggtggacgtgccgccggggaacaccgtggaggagacgcgcatcttcgtggacaccatcgttcggtgcaacctccaatccctcgaggacacggttatcaggcagcaggcgatggcggcaccggcagcgccgcacaacgaccacaaccacagctgatcgccgccgggcccggccggctggacaccctcgcagtgggggctgccggtttcttcggaggcttcatctgccatttatgatgttttctttcgccgttggtattctatcgtttcaccaataagaagaataggtactgtgaactttttaaaggttgaggttgttcgtcttccctttcttaaactctaaaaacgacaataaagtattgtatgatacaccaccaataatattaagaccagtaaagtagtatagttctaatatatatgtgtaagtttgtgtatagat

SEQ ID NO: 29616 - DNA, 1360 bp, Zea mays
  Clone ID: MRT4577_127020C.1
ggcattgggttcctcgaggccggccgggagcaagagtttgagacagcagaggacactcctcctcagaactctcccttccctcttgtaggggccaaaagggtcagagatctaggaagaagagaactagtccccaagcctaacaagaaagcaagctcttctgcaactgttggcattcgccttaatttgtatccatatcccaatggcaggcctatctctgcaacacccctgggcattcactttcggcctcctaggcaacgtcatctccttcatgaccttcctggccccgataccgacgttctaccgcatctacaagagcaagtcgacggagggcttccagtcggttccgtacgtggtggccctgttcagcgccatgctgtggatcttctacgcgctgatcaagtccaacgagacgttcctcatcaccatcaacgcggccggctgcgtgatcgagaccgtctacgtggtcatgtacttcgtctacgcgaccaagaagggcaggatgttcaccgccaaaatcatgctcctcctcaacgtcggcgccttcgggtccatcctcctcctcacccttctcctcttcaagggtgacaagcgcgtcgtcatgcttggctggatctgcgtcggcttctccgtcagcgtcttcgtcgcgccgctcagcatcatgaggcgggtgatccagaccaagagcgtggagtacatgcccttctccctctccctctcgctcaccctcagcgccgtcgtctggttcctctacggcctcctcatcaaggacaaatacgtcgcgcttccaaacatccttggcttcaccttcggcgtggtccagatggtgctgtacgtggtgtacatgaacaagacgccgctgccggttgccgacggcaaggctgccggcaagcttccctcagctgcagatgagcacgtcgtcgtcaacgtcaccaagctcagcccgggccgactcccaccagtaacacagatggcggcggttcccaccaagagctgcgctacagaagcagccgcgccggcgacgctgcccagcagggacgtggtcgacgtcttggtcaaccgccacagccccgccgtccatgtgacctagctagatctcatgcccgtgcagcatgcgcccgccatatatacggactggtcatgagcatatgatggaattataagtaattaattgccatgtaagctagctaatgatgcatggagacataggtcagaggtagagggccaagcgcgcgctctctctctctatctatctatatctatttttatatctatatagagagtctatattcatgtttaaaaaaaaaaaataaattgcagatatgtattaatttgcatagggaaataggttattcgcttgttc

SEQ ID NO: 29617 - DNA, 2885 bp, Zea mays
  unsure (1)..(2885): unsure at all n locations
  Clone ID: MRT4577_127021C.1
ctcgacattgcgggcctcgcgggtggccgggaaaccgcaaatatcttcttaccccaacgccggcacgccgcccaaaaacccttgcggcgtcgcactcacactagcgaccaacccccaaccccagaccttcctctccggcggcggccggcgcgcgcgcgcgagggagatggaccgcccttccggcacatcgtaccagcgctttccccgcgttcggatccgcgagctcaaggacgactacgccaagttcgaactccgcgacaccgacgctagcatggccaacgccctccgccgcgtcatgatcgccgaagtcccaactgtcgccatcgatctcgtagagatcgaggttaactcctccgtcctcaacgacgagttcatcgcccaccgtctggggctcatcccgctcacctccgccgccgccatgcaaatgcgcttctctcgggactgcgacgcttgcgacggcgacggctcctgcgagtactgctccgtcgagtttcacctctccgtgcacgccaccgactctgaccagacgctcgaggtcacatccaacgacctgagatccatgggaccccaaggtctgcccagtcgaccaagcacgcgcctaccagcacgcgctcggaggcaccgacccctttggagccaatgcctcgaacgaaaacaggggcatacttattgtaaagctgcgtcggggacaagaactaaggcttcgtgccatagctaggaaaggaattggcaaggaccatgccaaatggtcaccagctgctaccgtgactttcatgtatgagcctgacatacgtatcaatgaagaactaatggaaacattgacggtggaagagagaataagcttgattgaaagcagccctacaaaagtatttgagcttgattctgccaatcaggtggtggtgaaaaacgcggaggcatacacctacgacgacgaggtgatcaagcacgccgaggccatcgggaagccaggcttggtggagatcaccgccaaggaggacagcttcgtcttcaccgtagaaacaaccggtgccatcacagcctacgagctgatcatgaacgcgatcacggtgctgaggcagaagctggatgccgtccgccttcaggacgacgacggcgaccttggcgagctcggcgcccaccttggtgggccttaggagctttgagcaagaaggaatcgccctgtggcctccctccctcccactgcctacgtaggcctatctaactgccgtgcgtgctagtcgatcgatcgaaaccgaacggttctgataaaccttatggtgtctaaagctccagatttatggattgccaaacacccagcaccgaattccagtttaatttccttgcccgccttgttttcgtgcgggtgacatctgcgccgtgaatttgcatgcttgcgcgtcttgttattgctctgtggtgtgtgtactatctaacttttgtgtgtgtgaggtgaatgcagagttatttgcaggttccccaggccgggcccagattgatatgctgaatgcaaggcagcatttgatgaggtacatgtagtacgtagtacatggatgtaccgatattgcctgcagggattaaaccccaaaacagttcagctgtaactttatgtgagaatcttttgtgttttctgagcatcaaggcagccgccacctgaccatcactcctgctataaattataaggctcatccggggtggcagatcggcagcgggaacttacctgatataatttcttgctgccgtttttgcgcagcaatggattgagagttggtagctgtaaatacatctagcttccattctgtacgtagggatccaggaactgtaaatacgttttatggaattgtatcggaaagttcctagtacgccagccagatctagaataagccagagcttgtttctggcagtggttttcttgccatcaatgctctcttctgaactcgaacctgctcgtcatcagcgcctgaataaactacacgggtggaaccanccatgctggaagtgggaagacctgagggctgatggcgtggagactggtggtaggaattactcgtcgtgctgcagttcgccgaagacgtcggattccacttcgaaggaggtgtgccctgatctaccagcgttatgatttgagtattctgttgcttaattgctgtagaggacttcagattgtttgcatgttatggcatatacctgcatgctaacagatgctttcacctcgccagcttatggaggactattcggtctatgtcagcgaagaagaggaagaggaggaagctgacgacccttgtgatgctgaaactgatgaagatctatccgatgaagaaagagacatgcacgaggtacggacgatctatctcaaatgttcgacaacctggtttggttttgttttgctttccttgtctagagaaggcactgaatgttcttccgcgtcacggggatacttgcagatagatgcaggctctgtggacgagcactcgaccaagtcagacgaggagtatgaggacctagccatgcgcgatgtgatggagagtggcgactggtccgacgatgagcagcaaggcgtcagcaaaaccaagaactcacctaccctggagtgcagcattcatgggaacacactgccttgggcccggcggataatacgtcggtagggctggtgctgtaaagtggtggctgtctttgtagcgtgtacctgtgcaaactacaaaatgccctcccctggatgtaaaaaaagaccctgatgctttgtccaggcacccatgttcatccatcccatgtagtagtaggagtattatcttcggcaataatgttccggccaagggcaaatatgtattctatccctgtgggggaaaaaaataaaatccctgctgtcaataaagtcccctctcgtggct

SEQ ID NO: 29618 - DNA, 260 bp, Zea mays
  Clone ID: MRT4577_127022C.1
tcggcggctcgacccattcttcccccctgccgttgcgccagtcaacaggctgtctttctttttcctcggcacccatgggcaccgtagcgcgcacccttgtcggcgcatgtgcggcacgggctcttcttcaccttcggtctcggggccttccgttgttcttttgtattcgtcccgcgcgggaacgtgccggcgtcgggtctggccgctggatggctcggcgaccggattccttctatttccccgttcgttcggggcaaggc

SEQ ID NO: 29619 - DNA, 856 bp, Zea mays
  Clone ID: MRT4577_127023C.1
gtagcgtgtgatccagaccaagagcgtggagtacatgcccttctcgctctctctctctctcaccctcagcgccgtcgtctggttcctctacggcctcctcatcaaggacaaatatgttgcgcttccaaacatccttgggttcacctttggcgtggtccagatggtgctgtacgtgttgtacatgaacaagacgccggtagcggttgccgagggcaaggatgccggcggcaagcttccctcagctgcagacgagcacgtcctcgtcaacatcgccaagctcagccccgcactccccgagaggagctccggggtgcacccagtcgtcgcccagatggcggcggttcccaacaggagctgcgctgctgaagcagccgcgccgccggcgatgctgcccaacagagacgtggtcgacgtcttcgtgagccgacacagcccggccgtccacgtggtgtagactcgatcgatcgcgtgcatccatgcatgtgaatgaagggatgtatctttctcgatcgatcgcgtgcatggcccatgcatgcgcccgccacacgtacgctagcttttatatattcgaaggacgacttgctgctggtcgtgagcatatatatgatggagaaaatgattaagtagtatatatataagtaattaactgccatgcatggaagctagctaatggatggaggcagaggccagaacgatgaagggggaagctatacatatatgtgtgtaattaatatagatatatgggctttgtgttcatctttgcagctatgtattaatttgcatggatatctgttattcctttttatgtgtaacgtcttctaataaaatgtaattgaacccgcgaattattaaaatt

SEQ ID NO: 29620 - DNA, 1141 bp, Zea mays
  Clone ID: MRT4577_127024C.1
ctcgaggccggccgggccgggacaggaattagaaaaaacattctgagtatatgaaggccgagagagagatattgacaaaagtcgaccaccctttcatagtgcagctgaggtactcatttcagacgaaatatcgactttaccttgtcctggacttcataaacggggggcatcttttctttcagctctacaagcaaggattatttagggaggagcttgcaagaatctatacagctgaaattgtatctgctgtagcgcatcttcatgctaatggaattatgcatagggatctcaaacccgaaaacatccttctggatgctgatggccatgccatgctcacagactttggccttgctaaggaattctgtgaaaataccagatcaaactcgatgtgtggcactctcgagtacatggccccggaaattgttcttggccgggggcatgataaggctgctgactggtggagcgtgggaatcctgctgtttgaaatgcttacagcccccatttgttgggaatagggagaaagttcagcagaagattataaaagacaaactgaagcttccttcatttctgtctagtgaagctcattccctcctgagaggcctgctacacaaggaacccaacaagcggctgggcagctgccccggaggcagcaacgagataaaaaaccacaagtggttcaagccaatcaactggaggaagctggaggcccggcagatccagccgagctttcggccaaacgtcgccgggcttacctgtattgccaacttcgacgagtgctggacgaagacgcccgtgctggactctccggtaagcacccccgctggtggcgggcacagcaacttcgcggggttcacctacgtcaggcccgcgccgatccttgaggaggtgaacgcatccggctctaggctcaaggactaaggatgtttagcccattgaagatgtgcttaaaattttgatcgagtgacatgttctggaaacttatgtgcacaagagacgctgattaaacatgtaacgtaccattagccttggtacaggatagggacagtaagctctggttctatcttgtactcttaaaatatgttcataaggtggcatatggtcatggtaaatgttaaggcgatggtggcactgtttggttggg

SEQ ID NO: 29621 - DNA, 2436 bp, Zea mays
  Clone ID: MRT4577_127025C.1
tcttctccttgcgagggggcggaggggaggtggtagtggtagggtatacacgagtgctccacccatggataagaggacgtaggcagacaacagccatgctatcccaacacaacaaaaacaagctccactctagtagttgccagccacacctcctgtcttcctttttccttctcgcattgtggaggagaaggatcaagtgctcataagcaagctagcttgacgaagtataggaaattaggaatacaaataaactcatcctcctcatatataaacgctcgatctccagctgtgtgattgaagagccctgcgcttgtacacgatgacacaacacatgtacaccaaagcatgcgtgtgcatgtgccacctcgcgtgcataaagccacccacagccctgcctatcattttttacgccggcgaggggggggttccgagaagcagacgggtggggcaagagtttgagccaacacacacagagagaggacaactcctcacaactctcccttccctcctgtaggggccaaaagggttagagagtaagagaagtagttcattcccttgcccaacacaagaaaacaagctctcctcatcaccctaatccaagcaactgcttgtgtgttgggaaattcttgtgacccctgttatattattatccgtgtagctactagcttcattcccccctttgtacccatcaaatggctggcatgtctctgcaacacccctgggcgtttgctttcggtctactaggtaacgtcatctcattcatgaccttcctggccccgataccgacgttctaccgcatctacaagagcaagtcgacggaaggcttccagtcggttccctacgtggttgccctgttcagcgccatgctgtggatcttctacgcactgatcaagtccaacgagaccttcctcatcaccatcaacgccgccggctgcgtcatcgagaccatctacgtcgtcatgtacttcgtctacgcgcccaagaaagccaagctgttcacggccaagatcatggtcctcctcaatggcggcgtctttggggtcatcctcctgctcacccttctcctcttcaagggcagtaagcgcgttgtgctgcttggctggatctgcgtcggcttctccgtcagtgtcttcgtcgcgccactcagcatcatgagacgagtgatccagacgaagagcgtggagtacatgcccttctccctctccctctcgctcaccctcagcgccgtcgtctggttcctctacggcctgctcatcaaggacaaatacgtcgcgcttccaaacatccttgggttcaccttcggcgtggtccagatggtgctctacgtgttgtacatgaacaagacgccggtggcggcgactgccgagggcaaggatgccggcaagctttcctcagctgcagacgagcacgtcctcgtcaacatcgccaagctcagcccagccctcccggagaggagctccggggtgcacccagtcacccagatggcgggcgttcccgtcaggagctgcgctgctgaagcaaccgcgccggcgatgctgcccaacagggacgtggtcgacgtcttcgtcagccgacacagccccgccgtccacgtggcatagattctcgatcgatcgcgtgcatggcccatgcatgcgcccgccacacgtacgctagcttttatatattcgaaggacttgctgctggtcgtgagcatatatatgatggagaaaatgattaagtagtatatatgtaagtaattaactgccatggaagctagctaatggatggaggcagaggccagaacgatgaaggggggaagctatacatatatgtgtgtaatatagatatatggggtttgtgttcatctttgcagctatgtattaatttgcatggatatctgttattcctttttatgtgtaacgtcttctaataaaatgtaattgaacctgttagaatataatataagtgaattcaccatcgagtccagtccgcacgcataattaagcacccaatctaaagatataaacgcgcgccccaacatgtgcaagtttattccaaccctaagctttgtttaattctcaaatatcaattcaagtaatgtttcatgcacaggaatttcattttcccctccaaaataagaattttgacgttaatctcttgtcttatttttcttctgtcaaagtttagatctcatgcccgtgcagcatgcgcccgccatatatacggcctggtcatgagcatatgatggaattataagtaattaattgccatgtaagctagctaatgatgcatggagacataggtcagaggtagagggccaagcgcgcgctctctctctctatctatctatatctatttttatatctaattagagagtctatattcatgtttttaatttggcattatattgcagatatgtattaatttgcatggaaatatgttattcgcttgttc

SEQ ID NO: 29622 - DNA, 3109 bp, Zea mays
  Clone ID: MRT4577_127026C.1
actcgagccggccggcaggcacgccccactccccgccaccattaccaaccaaccaaccaacccgcgcacccccgaaggagaagagctggggtcggaggccccaggtcggagctgaacgcgcccccatctcccgtcggcgagaagagctttgtctgtttcagcttcatgagttctgggaaagcactggcatccaacatctcttattcaacagtgaacagcagcatcatctttctctgccttttcgcgggatacttgggaattcctggtggaaggttcgctggaggaagcctaatttagtcttcactgtagtagaaatttgacctaaagagtttgtaggctttcaagcttcagaaatggtttcttctcagccatcctctctgactgcaatcctcgcacagggccccaaccactgcccagtcaagatactcctcccaatggggcccccagatgtcgtctcctcagataatgttgagtacgatttctctgatgtttttggttccaccccggtccaaacaccaacaaacctttgtggttttggtccggagagtcctgcacctactgttgagtccaatgaagaattttacagtgatcctgttgtcatcatcaaccgatcccattctcttgtcggtccaacatcacttgtcagtcgctccttgcgacttagcaagcttagtcttggaaaaaacgagggatcatcggaacttgtcaagtgcctctcagaagaaaaggaaggggaccaagggcagctcagtgatgaagatctgggtaatgctatgacaggggatgggggcattgggcttgatgacttagaaatcttgaagcttgttggccaaggggcattcggtaaagtatttcaggtgagaaagaaaaacacctcagagatatatgcaatgaaagttatgaggaaggacaggatattagaaaaaaaccattctgaatatatgaaggccgagagagagatattgacaaaagtcgaccaccctttcatagtgcagctgaggtactcatttcagacgaaatatcgactttaccttgttctggacttcataaacggggggcatcttttctttcagctctacaagcaaggattatttaggagcttgcaagaatctatacagctgaaattgtatctgctgtagcgcatcttcatgctaatggaattatgcatagggatctcaagcccgaaaacatccttctggatgctgatggccatgccatgctcacagactttggccttgcgaaggagttctgtgaaaataccagatcaaactcgatgtgtggcactctcgagtacatggccccggaaattgttcttggccgggggcatgataaggctgctgactggtggagcgtgggaatcctgctgtttgaaatgcttacaggcaagcccccatttgttgggaatagggagaaagttcagcagaagattataaaagacaaactgaagcttccttcatttctgtctagtgaagctcattccctcctgagaggcctgctacacaaggaacccaacaagcggctgggcagctgccccggaggcagcaacgagataaaaaaccacaagtggttcaagccaatcaactggaggaagctggaggcccggcagatccagccgagctttcggccgaacgtcgccgggcttacctgtatcgccaacttcgacgagtgctggacgaagacgcccgtgctggactctccggtaagcacccccgctggtggcgggcacagcaacttcgcggggttcacctacgtcaggcccgcgccggtccttgagcctagagccggatgcgttcacctcctcaaggatccaacccccaaccccagaccttcctctccggcggcggccggcgcgcgcgcgagggagatggaccgcccttccggcacatcgtaccagcgcttcccccgcgttcggatccgcgagctcaaggacgactacgccaagttcgaactccgcgacaccgacgctagcatggccaacgccctccgccgcgtcatgatcgccgaagtcccaactgtcgccatcgatctcgtagagatcgaggttaactcctccgtcctcaacgacgagttcatcgcccaccgtctggggctcatcccgctcacctccgccgccgccatgcaaatgcgcttctctcgggactgcgacgcttgcgacggcgacggctcctgcgagtactgctccgtcgagtttcacctctccgtgcacgccaccgactccgaccagacgctcgaggtcacatccaacgacctgagatccatggaccccaaggtctgcccagtcgaccaagcacgcgcctaccagcacgcgctcggaggcaccgacccctttggagccaatgcctcgaacgaaaacaggggcatacttattgtaaagctgcgtcgggggcaagaactaaggcttcgtgccatagctaggaaaggaattggcaaggaccatgccaaatggtcaccagctgctaccgtgactttcatgtatgagcctgacatacgtatcaatgaagaactaatggaaacattgacggtggaagagagaataagcttgattgaaagcagccctacaaaagtatttgagcttgattctgccaatcaggtggtggtgaaaaacgcggaggcatacacctacgacgacgaggtgatcaagcacgccgaggccatcgggaagccaggcttggtggagatcaccgccaaggaggacagcttcgtcttcaccgtagaaacaaccggcgccatcacagcctacgagctgatcatgaacgccatcacggtgctgaggcagaagctggatgccgtccgccttcaggacgacgacggcgaccttggcgagctcggcgcccaccttggtgggccttaggagctttgagcaagaaggaatcgccctgtggccttcctccctcccacctgcctacgtaggcctatctaactgctgtgcgtgctagtcgatcgatcgaaaccgaacggttctgataaaccttatggtgtctaaagctccagatttatggattgccaaacacccagcaccgaattccagtttgatttccttgcccgccttgttttcgtgcgggtgacatctgcgccgtgaatttgcatgcttgcgcgtcttgttattgct

SEQ ID NO: 29623 - DNA, 1415 bp, Zea mays
  Clone ID: MRT4577_127027C.1
cctcgcattgggtacctcgaggccggctcgaggccggccggggggccagaaacaacgcagagaactcagagctcttcgtgccctcctgcaagcgccaaggaggaagagaagtgtgcgtaagttccatagacccctgacaaatcagcgccatcatacaacaccagcaactgttggtttagttgtaaatctgccttgcagccgtattatctgtatcaccctttttgtgtcgcgatggctggcctatctttggaacatccttgggcgttcgccttcggcctcctaggcaacgtcatctccttcatgaccttcctggccccgataccgacgttctaccgcatctacaagagcaagtcgacggaaggtttccagtcggttccctacgtggttgcgctgttcagcgccatgctgtggatcttctacgcactgatcaagtccaacgagaccttcctcatcaccatcaacgccgccggctgcgtcatcgagaccatctacatcgtcatgtacttcgtctacgcgcccaagaaagccaagctgttcacggccaagatcatggccctcctcaatggcggcgtctttggggtcatcctcctgctcacccttctcctcttcaagggtagtaagcgcgttgtgctgcttggctggatctgcgtcggcttctccgtcagtgtcttcgtcgcgccactaagcatcatgaggcgcgtgatccagacgaagagcgtagagtacatgcccttctccctctccctctcgctcaccctcagcgccgtcgtctggttcctctacggcctcctcatcaaggacaaatacgtcgcgctaccaaacgtccttgggttcatcttcggcgtggtccagatggtgctctacgtgttctacatgaacaagacgccggtggcggctgccgtgggcaaggatgccggcaagcttccctcagctgcagacgagcacgtcctcgtcaacattgccaagctcaaccccgccctcccggagaggacctccgggaatgcacccagtcacccagatggcggccgttcctgccaggagctgcgctgctgaagcaaccgcgccggcgatgctgcccaacagggacgtggtcgacgtcttcgtcagccgacacagccccgctgtccacgtggtctagcctctccatcatcgcaagcaagcatgaatcgagtcgagtccgaacgcataattaagcacccaatctattggatatataaatacgcgcgccccaacatgtgcgccatatagccgtttattccaacccttagctttgtttaattctcaaatatgcaattcaagtaatgtactttcatgcaaccaggaatttcattttcccctccaaaataaccataagaattttctataataaaaaaaaaaaaaaaaaagcggcacgttaatgtactgtaccttgtctt

SEQ ID NO: 29624 - DNA, 2826 bp, Zea mays
  Clone ID: MRT4577_127028C.1
gtggcgtgctcccaacgtgcgccgtttcggaaaccacacgcccacggccccacccttccgctctccccttcctccatccttcctcctccccggcacgccccactccccgccaccattaccaacccgcgcacccccgaaggagaagagcgggggtcggaggcccgaggtcggagctgagcgcgcccccatcttccgtcggcgataagagctttgtctgtttcagcttcatgagttctgggatagcactggcatccaacatctcttattcaacagtgaacagcagcatcatctttctctgccttttcgcgggatacttgggaattcctggtggaagcttcgctggaggaagcctaatttagtcttcactgtagtagaaatttgacctaaagagtttgtaggctttcaagcttcagaaatggtttcttctcagccatcctctctgactgcaatcctcgcacagggccccaaccactgcccagtcaagatactcctcccaatggggcccccagatgtcgtctcctcagataatgttgagtacgatttctctgatgtttttggttccaccccggtccaaacaccaacaaacctttgtggttttggtccggagagtcctgcacctactgttgagtccaatgaagaattttacagtgatcctgttgtcatcatcaaccgatcccattctcttgtcggtccaacatcacttgtcagtcgctccttgcgacttagcaagcttagtcttggaaaaaacgagggatcatcggaacttgtcaagtgcctctcagaagaaaaggaaaggggaccaagggcagctcagtgatgaagatctgggtaatgctatgacaggggatgggggcattgggcttgatgacttagaaatcttgaagcttgttggccaaggggcattcggtaaagtatttcaggtcagaaagaaaaacacctcagagatatatgcaatgaaagttatgaggaaggacaggatattagaaaaaaatcattctgagtatatgaaggccgagagagagatattgacaaaagtcgaccaccctttcatagtgcagctgaggtactcatttcagacgaaatatcgactttaccttgttctggacttcataaacggggggcatcttttctttcagctctacaagcaaggattatttagggaggagcttgcaagaatctatacagctgaaattgtatctgctgtagcgcatcttcatgctaatggaattatgcatagggatctcaagcccgaaaacatccttctggatgctgatggccatgccatgctcacagactttggccttgcgaaggagttctgtgaaaataccagatcaaactcaatgtgtggcactctcgagtacatggccccggaaattgttcttggccgggggcatgataaggctgctgactggtggagcgtgggaatcctgctgtttgaaatgcttacaggcaagcccccatttgttgggaatagggagaaagttcagcagaagattataaaagacaaactgaagcttccttcatttctgtctagtgaagctcattccctcctgagaggcctgctacacaaggaacccaacaagcggctgggcagctgccccggaggcagcaacgagataaaaaaccacaagtggttcaagccaatcaactggaggaagctggaggcccggcagatccagccgagctttcggccgaacgtcgccgggcttacctgtatcgccaacttcgacgagtgctggacgaagacgcccgtgctggactctccggtaagcacccccgctggtggcgggcacagcaacttcgcggggttcacctacgtcaggcccgcgccgatccttgaggaggtgaacgcatccggctctaggctcaaggactaaggatgtttagcccattgaagatgtgcttaaaattttgatcgagtgacatgtatggaaacttagggggtgtttgggaacaaagtttttctgcagttttggaagaatactgcagtattctcaaatactgcagtattatatacataatggtgtttggcaagctgggtaaaatctctgttttcaaaactgaagtattgcaaatactatagttgttttaaggcattctaaacttagctctggaccttagttttcaaaactgcggtattataaactacggtattgttataactaaagtatagtatagtatttcaaaaactgtagttttcaaaaactttgttcccaaacagggccttatgtgcacaagagacgctgattaaacatgtaacgtaccattagccttggtacaggataggaacagtaagctctggttctatcttgtactcttaaaatatgttcataaggtggcatatggtaatggcaagtattaagcagccctggagagcatccatgggagtggggcagctgaagatgatggcataaagagccggtaccaccacaacctggacctgttcctgaaaatgtccaaggaggtagctggcaccagaatgccttgcgcgtcatagtgccaccagggtggagagaaggccggcgacacgctgctctggtcccagtgggtggtatgtttcttgggcacctgcttttgtgatgctgtgagcttgtgctgttgagtgtacaccggtggctgtggctttgtagcatgtacctgtccaaactacaaaatgctctcacctggttgtaaagagaggacctgatgctttgtcatatcatgtagtaggagtattatgtttgacaataatgtcctggccctgctgttgatgaagtcacctcacgtgaactatgtgccatatcatgcatgtcctttggttgatcaatgtttacaaagatgtgtcgt

SEQ ID NO: 29625 - DNA, 2932 bp, Zea mays
  Clone ID: MRT4577_127029C.1
aagaaaagcaattcccgttcccgtccttcctgagacgagaaggctaggctagctagagaaagggggggagggggcgacaccgaggcgggacactagcgaccaacccccaaccccagaccttcctctccggcggcggccggcgcgcgcgcgagggagatggaccgcccttccggcacatcgtaccagcgcttcccccgcgttcggatccgcgagctcaaggacgactacgccaagttcgaactccgcgacaccgacgccagcatggccaacgccctccgccgcgtcatgatcgccgaagtcccaactgtcgccatcgatctcgtagagatcgaggttaactcctccgtcctcaacgacgagttcatcgcccaccgtctggggctcatcccgctcacctccgccgccgccatgcaaatgcgcttctctcgggactgcgacgcttgcgacggcgacggctcctgcgagtactgctccgtcgagtttcacctctccgtgcacgccaccgactccgaccagacgctcgaggtcacatccaacgacctgagatccatggaccccaaggtctgcccagtcgaccaagcacgcgcctaccagcacgcgctcggaggcaccgacccctttggagccaatgccgtcgaacgaaaacaggggcatacttattgtaaagctgcgtcgggggcaagaactaaggcttcgtgccatagctaggaaaggaattggcaaggaccatgccaaatggtcaccagctgctaccgtgactttcatttatgagccgtgacatgaagtatccatgaataactattggagaaattaactcaggaagagagtggaaggtggaatagagaataagcttgattgaaagcagccctacaaaagtatttgagcttgattctgcgcaactcaggtggtggtgaaaaacgcggaggcatacacctacgacgacgaggtgatcaagcacgccgaggccatcgggaagccaggcttggtggagatcaccgccaaggaggacagcttcgtcttcaccgtagaaacaaccggtgccatcacagcctacgagctgatcatgaacgcgatcacggtgctgaggcagaagctggatgccgtccgccttcaggacgacgacggcgaccttggcgagctcggcgcccaccttggtgggccttaggagctttgagcaagaaggaatcgccctgtggccttcctccctcccactgcctacgtaggcctatctaactgccgtgcgtgctagtcgatcgatcgaaaccgaacggttctgataaaccttatggtgtctaaaactccagatttatggattggacaaacgaagaggcatccttccaaattaccattcattgtatgcatcgcattcgtggaggtgcacatggaacgattttctaagcgtgcaaaatacaagacactagacacagcggagaatttgtacctctagaagatcacaaacgccagagagctcacaaacatcctgttccccaagatcgacaagacccatgttccgcagatcgtcaccactaacgatgccaagagcgtggccgccatacacgccacggccttcagctgcctccgccggcgagcggccggggagcagctgtacgacctcaacacgaacactgctgccgtagtggacgaggagtacaggaaccagcgtgcggccaacaccttgggttccaagggcatgttccagctgatccagaggcaggggtcttcgaggaaccttatggcgctcctcaacaccgacggctcagtcaccaaagcctggcatgtaggtgccactgacggcggtggggaaaatcttggtggtaatacaagcagcggcaagaagcccgatgaaaatcgtgtgctggatgccaagcagattgggaaggcagaggcggtcaacctcccgttcggtgctttcggggtcagcgcatccatgagcggcacgggtggaaccagccatgctggaagtgtggaagacctgagggctgatggcgtggagactggtggtaggaattactcgtcgtgctgcagttcgccgaagacgtcggattccacttcgaaggagcttatggaggactattcggtctatgtcatggtactgaaacaaatgaagacatcagacgacccttgtgatgctgaaactgatgaagatctatccgatgaagaaagagacatgcacgagatagatgcaggctctgtggacgagcactcgaccaagtcagacgaggagtatgaggacctagccatgcgcgatgtgatggagagtggcgactggtccgacgatgagcagcaaggcgtcagcaaaaccaagaactcacctaccctggagtgcagcattcatgggagtggggcagctgaagatgatggcataaatggccggtaccaccacaacctggacctgttcctgaagatgtccaaggaggtggtagccagcaacagaatgccttgcgcgtcgtcatagccccaccggccggcgacacgctgccctggtcccggcgggtgatacgtttcttgggctggtgctgtagagtggtggctgtgtctttgtagcgtgtacctgtgcaaactacaagatgccctcacctggatgtaaagagagaccctgatgctttgtccaggcaaccatgttcatccataccatgtagtagtaggagtattagggggtgtttgggaacaaagtttttctgcagttttggaagaatactgcagtattctcaaatactgcagtattatatacataatggtgtttggtaagctgggtaaaatctctgttttcaaaactgaagtattgcaaatactatagttgttttaaggcattctaaacttaactctggacctcagtttttaaaactgcggtattataaactacggtattgtcataactaaagtatagtataggatttctaacactgtgggtttgcgtaacgcaaattccttc

SEQ ID NO: 29626 - DNA, 424 bp, Zea mays
  Clone ID: MRT4577_12702C.1
gcggcagtagagacggaggcggaggcggtgctgctgcagcaggagcacgacggccaagagcgcgcgaagcggaagcgctcgaggcgccgccgcgaccgcgacggcctgcagcccaaggaggcgaccacccaggaggagtacctggcgctgtgcctcgtcatgctggcgaccggccgccgcgacgccgacgccgcggctccgccgcaggaccacgcgtgctccgtctgcggcaaggcgttcccgtcgtaccaggcgctgggcggccacaaggccagccaccgcgccaagccctcgccctcgccttctccggcggcggcggcggcgctggcgccggagccgggcgcaggacacggtgaccgccacgacgagaagaagccggcgccgtcgttctcgttgtcggctggctccagacccgcggtggcgt

SEQ ID NO: 29627 - DNA, 235 bp, Zea mays
  Clone ID: MRT4577_127030C.1
ccggccgggccgggattgtggctcctcacttccgcgccgaccacccccttcaggtaaggaagaggaggagggcaggatgtcgcaccgtaagttcgagcaaccgaggtacgtttccctcggtttccttcccaggaagcgctcctcccgccaccgcggcaaggcgcagtcattccccagggatgaccccaacaacccttgccatctcactgccttccttggttacacggctggcatg

SEQ ID NO: 29628 - DNA, 448 bp, Zea mays
  Clone ID: MRT4577_127031C.1
gactccggtcggaatgagcgttcaccgtcacaatcactgaatcacacaagcacgaccacgcacacgcggtaaacacgcgcgcgctcaaacagttcgaaatggcgctcgccgccgccatcatcgtcgtcttcctgcttcctggccttctcctcacggcgatggcggccacgccgtaccctcacggctagggctgggcattcggtctattagggtaattcggttcggtctattcgggtttgtgaaatttcgggttctgaaaaatgagaaccgaaatttccaaaaatattttaggaaccgaacccgaatagactcacatttttcggttcggtctattcggtccaccgaatagacccgaattgtagagagactagtatattttgttaaaatatagacaatgaataattaattgaaagtactaaaaaaaaaaaaaaaaaaggcccctagggcc

SEQ ID NO: 29629 - DNA, 379 bp, Zea mays
  Clone ID: MRT4577_127032C.1
gttcgagccacgacgtacgcgcttcgcatggagacacgcgatcccggataggttcactgctgctgctgaggcatgctccagaagaaatgcaggctctgggcgccctgcacatcattgcactcattccacgcacaaaagctttgcatattcctttctaacgcgcaacgatgcacatgccgactcatcagataaaacgcgcatctcgtgccggtgagggagctcgtcaaaaatgcccgcagctgcgtccacccgtgcgacctcttcaggggactgcagtgaccataacacgcggtgggtctccggcagaagtggcagcagtgggcgcccgttcctcgcgcagaggctccaccagtcgggaggcgccgagaacagcatgtcg

SEQ ID NO: 29630 - DNA, 360 bp, Zea mays
  Clone ID: MRT4577_127033C.1
tttgggttcttttattattattatgctaaatcatctttatcatatgccactaataccataccaggttacaagcagagtttcaccgacagacgcaggaacaaggccccccagtccgaggggcccaaaaccaatactaagcccgacatacacaggggagccaccgaggaaaaaaaaagggggatacctaagcaggagacataaccaagagttttgacaaaccgaaccaatcatggggcccacaggtggggccccgtcacattcaccagggggaaaaagcaggcgggggcaaccccgaccgggacccatgaggcgacacggacaccggcctgggtgacctatgatgaccaggcctaggctgcg

SEQ ID NO: 29631 - DNA, 101 bp, Zea mays
  Clone ID: MRT4577_127034C.1
gtacattaggagtttggtcatgttatttgcatggaattctggggctttgatttaaatcataccttgtattgtgaattccatttagatgtattgtactaagt

SEQ ID NO: 29632 - DNA, 560 bp, Zea mays
  unsure (1)..(560): unsure at all n locations
  Clone ID: MRT4577_127035C.1
cctgccgctcgcctgctggctgctgcgaggagtgaattcccttcaaggcgctggttcgcgacggggttcttggttggttgggggccttcaatgctggccattcatggaggcggggctgctgccatggtgtcgcccgcttggggttcacctgccgctgttgctgcgccgtccgatcacccatgatcattcagctctctctctctctctctcttcccgccactcatgcatgcatgatagcttttcctcttgctctagcatctaggtttcccgttcctgttacaggatttgaagcttgctcgcgaggctttgcatgaaacggaggagtcaagaacgcaccatgctcgtctcattcctcttgctgccgtcacgctcggttgttaattaattccattgctcttttannanaaaaaaaaaaaaaaaaaaaaaaaaaaaaaaaaaaaaaaaaaaaaaaaaaaaaaaaaaaaaaaaaaaaaaaaaaaaaaaaaaaaaaaaaaaaaaaaaaaaaaaaaaaaaaaaaaaaaaaaaaaattttagggggggggtccctgaaaaacaaaaag

SEQ ID NO: 29633 - DNA, 233 bp, Zea mays
  unsure (1)..(233): unsure at all n locations
  Clone ID: MRT4577_127036C.1
gtnggagatctcatggcggtaaacaactgtggactgcaggctggactccctccgtattccactgtggataagtcctgtagccactgctggaagtacttgagtgtgcagggctagctcttccgtggctctagcctgctattccgccgggtgtcatcagggtcgtgctttgcccttgagtaacctaagtctcccgaccatacatatacggtgtcaaagcctactcctgttgagga

SEQ ID NO: 29634 - DNA, 173 bp, Zea mays
  Clone ID: MRT4577_127037C.1
tttttgtctccatcatgcaacaggggagccccatagactttgcgttcctatgctccggggtctacttacatatggtgctaacaagacaccgatgcgtcagcgcttacaggcgcccatttcttacatggaggctggcaacctttcatcatttatgtgtcataatgtgtgaaaac

SEQ ID NO: 29635 - DNA, 237 bp, Zea mays
  Clone ID: MRT4577_127038C.1
gatgggcatatggtgttcattttttttttgacttgtgcctcgagttcaacggatgtcctcgaagtctcatgtcgtgaaaaggatccagggtctatgactgttaactttaagctcgcttccagcactcctaaacatcatcttgcctgcatagtatatcacccttttcagatcttcctcgttcgacaaactatacacatatatcctatgttctgctagatatgcatctattgtgccagt

SEQ ID NO: 29636 - DNA, 3817 bp, Zea mays
  Clone ID: MRT4577_127039C.1
aaatcgcagcacggaaaaagagagtccccctccccaccaccacatcccggtctagggtttgcgccatcccgaaccatccgctcgccgccggccgctgctgccgccatgggctccggtgacgacgagcgctccacctccaagcaccatcaccgcgataaggacaaggaccgtgaccgctcctcgtctcgccaccatcgcgacaaggaccgggaccgcgagcgctcctcgcggcaccaccgcgacgatggcgaccgggaccgggaccgccatcaccgggacaaggaccgggatcgagaggagcggaaggagagggagcgggaggagcgtaaagcacgggagcgggaggagcggaaggcacgggagcgggaggagcgggaggagcgggacagggagaaggagaaggagaaagagaaggagcgggcgcggcggcgcgaggagagggaccgcgaggagcgggagagttccaggcggcgcggggatgcggatggagaggaggacgacgaccgggaccgcaagcggcgccgccggtcctcgcaccaccaccaccgggacccagagccggagccggagcctgcatcccgggaagaggaggaggtggacgccgaggaggctgagcgccggcgccagcggaagaaggaggaggacatggaggccgagcagcagcgcctcgacgacgagatggagcgccggcgccggcgcgtcaaggagtggcaggagaagcgccgcgagcagcagcagcaggacggcagtgttgccagtggcgcttctgctgctgtggcggccgaggctgatggcgccaaagcggggaagaagtggaccttggatggcgaggagtctgacgaggaagaggacaaggaggacggcaagaaggctgaggggaatggtggtgctggtgacatggacgtgggtttgcccagtggaaatggtgatgccaacggtggtgctgagatggaggaggacgaaattgatccgctcgatgccttcatgaattccatggtgctgccagaggttgccaagctggagagtgctgcagtagcaatggatacagcccctgctgcaggtgcagatggcaagaatggtaagagctcaaaggatgtcattagtaatggggataagaaagggtcaaggaaagctacggggagaattatgcaaggggatgattcagactcggactacgatgatgctgatgatgatggggctggagaggatgatgaggatgatgaggaattcataaagcgtgtcaagaagacgaaggctgagaagttggcgatcgttgaccattcgaagattgactaccaaccgttccggaagaatttctatattgaggtgaaggacatcaccaagatgacatccgaggaagtggtagactaccggaagcacttggagctcaaggtgcatgggaaagatgtgcccaagccaataaagacatgggtgcagagtgggctgacaagcaaactccttgataccatcaagaagcttggttttgagaaaccgatgcctatacagacacaggctttgccgatcataatgagtggtcgtgattgtataggcatcgcaaaaactggatctggcaagactctagcatttgtcctcccaatgctgaggcatgttaaagatcagccccctgttgtccctggagatggccctattgggcttattatggctcctactagagagcttgtggtccagatacattcagacatcaagaagttctctaaggtgcttggcatcaactgtgttgcaatctatggtggttcgggagttgcacagcagatcagcgaattgaagaggggtgccgaaattgttgtttgtacaccgggaaggatgatcgatatcctttgcactagcagtggaaaaataactaaccttcgcagagtgactttcttggtgatggatgaagctgatagaatgtttgacatgggttttgagcctcagattactcgtatagttcagaatacccggccagatcggcagacagtacttttctctgccacatttccacggcaggtggagatactggcacgcaaggtgcttaccaagcctgttgaaattcaggtgggtgggaggagtgtcgtgaacaaagatatcacacaactggttgaggtccgaccagacaccgagaggttcttcaggctattagagttgcttggtgaatggtatgttaaggggaaaatccttgtttttgttcactcacaagataagtgtgattctctactcaaagacttgttccagcatgggtatccatgtctgtcccttcatggtggcaaagatcagactgaccgcgaatcaactattgctgatttcaagagcaacgtgtgcagcttgctgattgctactagtgttgctgctagaggattagatgttaaagaacttgaactggttgtcaattatgatgtccctaaccattatgaggactatgttcatcgtgttggtagaacaggtcgtgctggtagaaagggctttgccgttacttttatttctgatgaggatgagcgctatgcaacagaccttgttaaggctctggagctctctgagcaggctgttccacaggacctaaaagccctggctgatagatttatggctaaggtgaaacagggaactgagcaggcccatggcacaggctatggtggtagtggttttaagtttaacgaggaagaggatgaagcacggaagaccgcgaagaaggctcaggcaagggaatatggatatgaggaggacaagtcagattcagattctgatgatgaagggggagtgcgtaaggcaggaggtgatctggcagcacaagctattgccaatgctcatgcagctgctgctttggttgcaaacaaggctgctaataatgcaaatcagcaaataccaggatctgcaacagcccccttgattcctttactcacagcatcaaaccaacaaaatgatgaggccactgctcgggcacttcaggctgcaatgaacttgcaacaaaatctggcaaggatacaggcccatgcagttccagaacactatgaggctgaacttgagattaatgatttcccacagaatgcccgttggagaatcactcacaaagagacactggcccctattcaggactggactggtgctgctatcactacgaggggaacatatattcctcaaggaaaaattgttggtgcaaatgagcgcaagctttacctgtttatcgagggcccgacagagtcttctgtgaagaaggcgaaagcagaattaaaacgtgtccttgaggattgtgcaaaccaggctctaaatcttcctggatctgctcaaactggaaaatattctgttatttgagttgcagagtagataacaaagtggccgagtatttttttaggagcttataatggtttgcacacttcaaagccgctgatggattgctacttctgatgctcttgctgtctccagccttttattttgtctgatactcttttataaggcaactatggttacttaatgtgacatgattattatgaaattgtcggggtattttggcaatttctactgatgagttttcattgcctttggacagaagacttagaacacaggcggtgaccgagtgctgtaatgcaaaggaaggcggccagttttctggtgcggttttgaaagtgctggttgtgttatgacactttgaaaactgatcttattattttcttgtttatggatatcgttccctttttgtgagaggcaatacaaagtttgtgtgactatggtctaattaatccaggtgtacgtattgatttgcctaaaaaaaaaaaaaaaaaaaaaaaaaaaaaaaaaaaaaaaagagctatttacccttcattacttg

SEQ ID NO: 29637 - DNA, 150 bp, Zea mays
  Clone ID: MRT4577_12703C.1
tccgatgccaagttcctccacatcttgtgtttttagaccatccaccgcgtgaagttcaatgagtaattttataccgccaacacgtccggcattctcgtcgccgacatgtcctttcaactttttgttccaaccccttgacattttccgctt

SEQ ID NO: 29638 - DNA, 367 bp, Zea mays
  Clone ID: MRT4577_127040C.1
ggggggaaaagccctagggcacagaacggaacgggacgcccgtctcttcacgctctaaaccctcgccaacatggctgcattggacctgctcctcatagccgacatcggtgccgccaacgccgccgatcctgacttgaaaatgtagatcatgtcatacatcgaggagcacgtcactctctttctggagcagacggaaccggatatccggtcgctggacgagctcacgctagtggtgcacggacccacttaccacgcgcgtggttagcgctaccgccgattgcgagtgctcttggacaacctgcgactcgtagacccgcacatctagcgctccgtgaaacacagtttaaggcttggtatgaaccactta

SEQ ID NO: 29639 - DNA, 621 bp, Zea mays
  unsure (1)..(621): unsure at all n locations
  Clone ID: MRT4577_127041C.1
ttgcgataaaacctgatcatctcatccttttccttcctgattcctctcaatatctcgccccacctcctggcagacgattgacagcgtggggaatcccctccacgacttaccttaggacactatccgtttcgccaagcgctgtcacaagatccgaccgcacggaggtcaccatctggctcgaccctacagtcatcggcctacaccgcttggacttcatatgctacttccataccttcatcttcatccccatcaatcaatatcatcaaacagatgcagataagtttacaaggatatagtgccgactaccatgaaagaaaagnccagtacttgttggagaccccatactataacagagcgatccatgaagctgttcgatatacataaaggccaatgactatttttcggtaatggtgaggttctgatgtaatatgtagtactgatcagaccttatgcataccgtactctgactaaaactttgaattcttgatggatcacacaatctcgctacggaagattctgaaaagaaagatgaatagatatccctatgcgcagcggccgctctatatagtaagaagtccaccattcttgaggaaatctatatctagctgtatcgatgctatt

SEQ ID NO: 29640 - DNA, 784 bp, Zea mays
  Clone ID: MRT4577_127042C.1
ctggccggaaggtgagccttctacctgtacattcgcacacattcgtcatgtctgcgccaaaaggtaaatcctacgacgagacatcgcgcaacaaggacaacatccgccgcggcatcaaggaacccagtcccatcggcaccgcgtgcttcgtcggctcacgcgctctcgacccgttcttacaatatggcattctcgcgaaaggattcggcggcaatgcgatcgagaacctcggaggaaaagtgctgcctcaagggccagcgctcatcacaaacacgccgctggatagcttgctaggcctgagtccgtaccgatgcatcatcttcggcatgtctgtaggcagcatgctcaagcagaacatccactgcactactatcatgcaggagcagatgccaccacagtttgggcttgcggtcggcgctttcaactcggtcttcaactcgcttaactcgctcttcttcgtctgcgcgcaaacctccgcctcctgcaacggcgagcatttcccgcaaactccgctcatcgtaggatcctcgctgtatgtcgtcggtatgactttggagtttgtttctgagatccagaggcacgcgttcaagaaagataagaagaacaagggacaggtctacgagggtggggttggttcggcttgagcagacatatcaactacttcggatacacgctgtggcgcacaggctatgctatcgcttctggaggctggacatggggtgctgtcacggcgtcttggttcgtgggcgatttcacgcttcgaggcatttctgtgctgcagcat

SEQ ID NO: 29641 - DNA, 403 bp, Zea mays
  Clone ID: MRT4577_127043C.1
attcggctcgagctgcacctccgcagcgtttctttatctacaaggaggccctcacaaccaccagagcgcccaaatccatggcgagctacaccaaactatcctccgctggctccaacgcctaagcaaagcatgtgaaggccaatcctgctgtaatgcggaacctatctaaagagcaagggctacaagatggctactgatgcaactgagaaccaccttgctatacgcgatctccgccccatcggctggactggaaacaggtgccgaaatgctatgcccatctacgccacatcacattgaacaagaacgctctcttaagagacggcagtgcacttgttccaagaggagtccctatacaaaccgccaacaaagacctcaacgggtccactgaagaaggctccacagc

SEQ ID NO: 29642 - DNA, 675 bp, Zea mays
  Clone ID: MRT4577_127044C.1
gggtacctcgaggccggccgggagcgacgacatcccatccggctcagaccgccgatgtctgatgacactatggaccccccttacctgcgcaagtcacgactattgccttatccctatactcttctccattgttcgcccttcgacaagtagttgatcaccatgcttcatataaatgtttcttacccacgtgaatctccgcaacgtcgaccattttcctaactgccttctgagcatcacaccacaacgaaaagtgccatttcgtcaacggaggcttactgaaaacggatattgctgattctcgcactagcatcctcctgacccattagagagagaagatcacgactctgtctctgggcagccctccgtaatatggatcagctgcgatcaaaggattttccacagacctctgtccagatcatgaacagcaagcctgctaaggatggctgacagaatcggcttctggactacgtgtatccactgaatgataatctaacatctcatggctgctacataaatggacaaagagagtccacgactgatcttacgctgtcgccaaagcttttccacctacatatcgctatggacgtatatcacaggctgcaacataccaaataacttaagcaacgcccatgtctacacaaaggttcttttcagccgcgagtctattgacagact

SEQ ID NO: 29643 - DNA, 404 bp, Zea mays
  Clone ID: MRT4577_127045C.1
cctttatctgggcactctatggccttggttaaataaaagtggtatgttgttgcaaaaaaaaaaaaaaaaaaaaaaaaaaaaaaaaaaaaaaaaaaaaaacctaaaaaaaaaaccacactaaagacaaaaaactaaaaaaaaacataacaactggaaaacaaaaaaaaatattttttgtttccccaccccgccccaccctaaggccaattactaaaaattgccctcaccttgacaccctctaaactttcaaaaaaaaggcccaacccaccctaatagcgttgcaaaacaaacccctttgcccagcttttaaaaagcgaaaagggaaaaacccatggccctccccaacaaaatcccattctgaaaaaccacctttcccaccctggagcaaaaaattaaaagccccc

SEQ ID NO: 29644 - DNA, 537 bp, Zea mays
  Clone ID: MRT4577_127046C.1
ggggtggggtgttttttttttttttttttttttttttttttttttttttttttttttttttttttttttttttttttttttttttttttttttttttttttttttttttttgcaagcaaaaccaagggggggtttgttaaaaagtttggggagggggggggggcccccccccaaaaaaaaatcgtttttaaaaaaaaaaagggattggtttgggaaaaaaaacaccccccccccccgaatgttaaaacccttttactggtgtttgcccgggaccctttttaggggtgaggggccaacctcagttaaaatccgggcagtttttttttttttgggggggggcccaaccccccaaaaattggtttgggccggggaaagaaaccccccctaacaaggggaaaaaaaagctcaaaaggggggcctatccccccacctcggaaaaaaccggtgaaaaggggccacccggaaaccatttaggctgccccaaaaaagggtttggggggggggcccctttgtccccccaccctttaactggtaaaa

SEQ ID NO: 29645 - DNA, 1959 bp, Zea mays
  Clone ID: MRT4577_127047C.1
ggtttgaccagagcggcagatagagtaccccaaggcccaaacccaagtgcccatcacggagctctcgctagcgacgacgacggcgcccgctcgattggtgctacaagatccctcgtgcgtccaccggtttgcggcgtggggatctcggctctgactgaccgtgcccggagccggaggcaggcgcgatggcagtggcagctccggccgcggtgagcacgggagccgggcagggcaaggagtaccccggcgggctcaccctctacgttctcctcacctgcgccgttgctgccaccggcggccttgtctgcggctacgacatcggcatatccggcggcgtgacatccatggacgcgttcctgcacaagttcttcccgtcggtgtaccgcaaggagcagacggcgcggggaggcggcagccagtactgcaagttcgacagccagctgctgaccgcgttcacgtcgtcgctgtacctggcggcgctcgcggcctccttcttcgtcgcgtccgtggcgcgctccctgggccggaaatggtgcatgtttggcggtggcgtctccttcctcgccggcgccgccctcaacgccgccgcgcaggacgtcgccatgctcatcgtcggccgcattcttcttggcatcggcgtcggcttcgctggcctgtccatcccaatctacctgtcggagatggcgccgcaccacctccgaggcacgctaaacatcggcttccagctgatgatcaccgtgggcatcttctccgccaacctcgtcaactacggcgtcgacaagatcagaggcggatggggctggcgtctcagcctcgggctcgccgccgtcccggcggccgtgatcaccgtgggctcgctcttcctccccgacacgccaaactccctcatccgccgcggctaccacgagcaggcgcggcaggtcctcgcccggatccgtggcgcggacgtcgacgtggccgacgaatacggcgacctcgtgtcggccagcgaggcgtccgccgccgtccggcgcccgtggctggacgtcctcgggcgcaggtaccggccgcagctaaccatggccgtcctcgtcccctttttccagcagctcaccggcatcaacgtcatcatgttctacgcgcccgtcctgttcaagacgatcgggctcggaggggacgcgtcgctcatgtcggccgtcatcaccgggctggtcaacatcgtcgcgacgttcgtgtccatcgccaccgtcgacaggctcggccggcgcagcctcttcctgcagggagggtgccagatgctcgtttgccagatcgtcatcggaaccctgatcggcgtccagttcggggcgagcggagacggagccgccatccccaaggcctccgcggccaccgtcgtggcgttcatctgcatctacgtcgcgggcttcgcgtggtcgtggggcccgctcggtgtcctggtgccgagcgagatcttcccgctggagatccgaccggcggggcagggaatcaacgtggccgtcaacatgatgtgcaccttcgccgtcgcgcaggccttcctcccgatgctctgccacttgaggttcggcctcttctacttcttcggcgggtgggtgctcgtgatgacgctgttcgtcgcggccttcctgccggagacgaagggcgtgcccgttgagaagatggggactgtgtggaggacgcactggttctggggaaggttcgttgctgacgctggcatggacggccgcgcgggaaaccgcgactccgccttccacaagggcaaggacattgctatagagagccgtagtcgtcctgtgtagacatgggtattggattggagtgtgcaagtgaaacacatgaaagtatgaaacacgcacaaaaaatttggttgtgggttgagctcacaaaatggacctatttctatcgtacgttggacgtaaaaacaaactaccaagaattataaagaattctcaataaataatt

SEQ ID NO: 29646 - DNA, 1870 bp, Zea mays
  Clone ID: MRT4577_127048C.1
acgcgtcctgaataaagcactacatcaagagatggatagtttgctggctgaagctgaaagccagagtgatgatggcctaacacataaactccgatatgcacatctacacaaactaaaaccccttgaagcgcagattctagacctaaagaaaaagcactagaaccaaattcagattttgaaggaaaagcagaagagtgatgaagctgctaagaaactgcacgaagaaattcattttataaaagcgtaaaaggttcagctacaacacaagattaaacaggaagcagaacagttcaggcaatggaaagctacccgcgagaaggaacttcttcagttacgcaaggagggacggagaaatgagtatgaacgccacaagcttcaggcacttaatcagcggcagaaattggtattgcaaaggaagtccgaggaggctgctagcgctaccaaaaggctgaaagagatattagaagctaggaaatcttccgcccgtgacagttccgctggcagcaatggtacatctccaggctataatatgggtgagagatcgctgcaaaaatggtttgatcaagagcttgaagttatggtgcatgtgcatgaagtccgaaatgagtacgaaaaacaaagccaactgcgtgctgcgcttggtgaggagcttgccattttgaaacaagaagatatacgggctggtggatctagtccccaaagagggaagaatggaaactctaggacaaataccttgtcaccaaatgcaagacaagctaggatagcatcacttgagagcatggtgacaatctcttcaaacactcttgttgcaatggcttctcaactctcagaagctgaagaaagagagcgtgccttctctgggcgtagtcgttggaatcaattgcgatcaatgggggaggcaaagagcttactgcaatatgtctttaatgttgctgctgatgccagatgccaagtaaaggagaaggaagtggagatcaaggaaatgaaggaacaaatgacagagctggtgggcattcttcgacacagtgaatcacgcagaagagaaatggagaagcagctcaagcaaagagaacagacaactccaatggccactacacctccgaaaagtggaaatggcacgacgaagcactctgctgatgaccccaacacaccactgtcccctgtcgccgttcctgcacagaagcagctcaagtattctgctggaattgtaaatagccccagcaaaggagttgctgcgataaaaaaagagcaacttaagatggttccaattgcacagttgtctgcggggaagagagtttcaatagcagggcattcaggaaagctctggaggtggaaaagaagccatcaccagtggctgatgcagttcaagtggaagtggcagaagccgtggaagttgtctgaggtgatacgacacagtgatgaaacaatcacgaggattaggcccagacctccacttcttccacataaacctcataactgatgtgaaacggacttgtttttgtctcaacaagaactgacacggtttgcaaacctacacagctaactgcctgcacaagccttcactgacggtgacatgtcaatagttggtgttcgtcttcacaaaggaatctgtcaaaggaaggcgccttgtaaagtctttcttgtgctgttgtgtgatagttttgtgtgaagggtaactgaaagttgaatgggttttgtgctcgagtgatagtctattttcccctcttcttttgtttgttgatactaaatgagaaaagacaagtgatattggtttggtttgctaggagtattgtgatgtaatgcagaaacttgttcccctatatcagtacacccttttaatctatgtatcgtggagtactgattgctgact

SEQ ID NO: 29647 - DNA, 772 bp, Zea mays
  Clone ID: MRT4577_127049C.1
catctcggaaagctctggaggtggaaaagaagccatcaccagtggctgatgcagttcaagtggaagtggcagaagccgtggaaattgtctgaggtgatacgacacagtgatgaaacaatcacgaggattaggcccagacctccacttcttccacataaacctcataactgatgtgaaacggacttgtttttgtctcaacaagaactgacacggtttgcaaacctacacagctaactgcctgcacaaggtaacaatgcagttaatactccatgagatctccttcgtgcttgtttttacttggccacgggatcgacaagtatgtgttcatgggtgactcttgtctatggatagatgtaaattccctgtgggttggtataaagtgagatgtcaacgtagagaaagaaaatagttagtgggtgagtgagcagagtgaatgggcattctttcatgcaaatactgagcacaatgcttaatgtttcagccttcactgacggtgacatgtcaatagttggtgttcgtcttcacaaaggaatctgtcaaaggaaggcgccttgtaaagtctttcttgtgctgttgtgtgatagttttgtgtgaagggtaactgaaagttgaatgggttttgtgctcgagtgatagtctattttcccctcttcttttgtttgttgatactaaaatgagaaaagacaagtgatattggtttggtttgctaggagtattgtgatgtaatgcagaaacttgttcccctatatcagtacacccttttaatctaaaa

SEQ ID NO: 29648 - DNA, 418 bp, Zea mays
  Clone ID: MRT4577_12704C.1
attcatagacacaccacgcgaaacacattagcaacaacctaacaacaatggctaccaagagattatccctacttgtgcttcttgcgctttatgagagcgcaacaaatgcgttcattattccacaatgctcacttgctacaagttccataattacacagtatctcccaccaattacttcaatgggcttggaacacccagatatgcacgcctataggctccaacaagcaatcgccgctagcgtctaacaacagccaatttcccaggagcaacaacaatacttggctcatataacaatacaatccatctcatcgcatcagcatctacaatttctaccagcactgagccacctagccatggtgaaccctgtcggctacttgcaacagctgatgcttgcatcaaacccacttgctatggcaaa

SEQ ID NO: 29649 - DNA, 247 bp, Zea mays
  Clone ID: MRT4577_127050C.1
ctcgctgactggtagtaatatggggcggggttgctgtaccaagccatgctaccttattaacacagcaacagttgctgtcattttaccaactggttgagggtaacccagcagcatttttacaactacaacaaattgttgccatcagtccaacttgttttgacaaacccattgttcaactaccaacaatagatgaacattggtgccgccttttagattgcttatcggtcgtaattcaataataaagttt

SEQ ID NO: 29650 - DNA, 773 bp, Zea mays
  Clone ID: MRT4577_127051C.1
gctcctcgccatcgcaaccagccgtggaatccgcgcggtggacctcccgcaactgtcgcgcgacctggccagctcgccctccacaaatataaaacccagtgccatgcccctctcggctcccacgaccgatccatcgccctagaaaacggaacaccgggggtccgccattgtcgggatgcgccacgatgccatctcccgcctcgggtgctcgcctcttatcgcatccgcgtcctcccccaccctgtcgccgcggacaacgatgacgtgggacccctgcgcggcctcttcgtgctatcccgcgaccccggagcgcaagaatcagtcgtcgccccgggtgcgtgttggggggttccatggggagccaccgctgtcgccgttcctcgcctctgtcgacggccggaatccatggaattgatgcggagcttcgactggacacggggaagctatcccgaccgccaatttgatgaacggccagtcggaactcgggcaatggctcaccggaggagtggcgtccgtcgcgggccgcgttccatcgtgggcgttcgtctccgtgcccgaatccgtggtcaagaacatgtaccacatgatgagacgcatggaagatgttgcgatgtgttcgtgagaggtctaggccgtcgtctcccagtcaacttcgggttgctggatcgttgtctcctttcaatgtaattatttatttattttgttcagaactcctattgcataataaagttgtgacattcgtttctaaaaaaaaaaaaaaaaaagcggccgcc

SEQ ID NO: 29651 - DNA, 405 bp, Zea mays
  Clone ID: MRT4577_127052C.1
cctatggttcatgcactggttacccccgctgacagcccatggctaccactggcatcgggcggtcagagtactggagctaccagagcatctgtgggacccgaagagcattatgcgtgccggttaccttcgccatgggggtggccacaccgccttgtgcatgatacagggtacgaacacccccacactcgaagacctgcaacctatctagccaacagaacacgaacttgttctggttcgcagagtgatttcaaaacatcgtacaggaccgctatgtgccacataatggctataggaatatccatgtaacacacggttatggtgaactggcatggcatacatgagatgcaacacacggtgagacaggagcttactgccatgttacggatgaaaggtgctttgcactgt

SEQ ID NO: 29652 - DNA, 718 bp, Zea mays
  Clone ID: MRT4577_127053C.1
ggaacagagatgcgctgatggagatggaaaaaaaaaagataattactgtacatatttgtaaattctggaataaatgtacaatcccctgttctcgtgacctgatgttgtagggaacatattcggtgctgatggagccgggaacagagatgtgctgatggagatggaaaaaaaaaagaaaattactgtacatatttgtaaattctggaatcaaatgtcacaatccccttttctcgtgacctgatgttgtagggaacatattcggtgctgatggagccgggaacagagatgtgctgatggagatggaaaaaaaaaaagaaaattactgtacatatttgtaaattctggaatcaaatgtcacaatccccttttctcgtgacctgatgttgtagggaacatattcggtgctgatggagccggcaacagagatgtgctgatggagatggaaaaaaaaaagaaaattactgcacatatttgtaaattctggaatcaaatgtcacaatccccttttctcgcgacctgatgttgtagggaacatattcggtgctgatggagccggaaacagagatgtgctgatggagatggaaaaaaaagaaattactgtacatatttgtaaattctggaatcaaatgtcacaatccccttttctcgtgacctgatgttgtagggaacattttcggtgcttgtggagccgggaacagaaatgtgctgctggagatgg

SEQ ID NO: 29653 - DNA, 690 bp, Zea mays
  Clone ID: MRT4577_127054C.1
ccggccgggacgaccgatccatcgccctagaaaacggaacaccgggggtccgccattgtcgggatgcgccacgatgccatctcccgcctcgggtgctcgcctcttatcgcatccgcgtcctcccccaccctgtcgccgcggacaacgatgacgtgggacccctgcgcggcctcttcgtgctatcccgcgaccccggagcgcaagaatcagtcgtcgccccgggtgcgtgttggggggttccatggggagccaccgctgtcgccgttcctcgcctctgtcgacggccggaatccatggaattgatgcggagcttcgactggacacggggaagctatcccgaccgccaatttgatgaacggccagtcggaactcgggcaatggctcaccggaggagtggcgtccgtcgcgggccgcgttccatcgtgggcgttcgtctccgtgcccgaatccgtgcagtgaggtcacgagtcacctgaagatcaccctggtacctggaatctcaagttccaggtcaagaacatgtaccacatgatgagacgcatggaagatgttgcgatgtgttcgtgagaggtctaggccgtcgtctcccagtcaacttcgggttgctggatcgttgtctcctttcaatgtaattatttatttattttggtcagaactcctattgcataaataaagtgtgacattccgttc

SEQ ID NO: 29654 - DNA, 419 bp, Zea mays
  unsure (1)..(419): unsure at all n locations
  Clone ID: MRT4577_127055C.1
ngcccgcatctttgacaaaggccctgcttcaaccctccacccagggcggctgccccacgtacaatcgtcctcgctactgcagcccggttgccggttaagcatgccgcccagcccgtctacccctacgccgctgcccagccccgcacggagtcgccccgtagccgttcgccggtcaccgtgccagcacggctgcttcgccgacgcgtccccgcacaccccgttgttgtgcggaggagccctacagcctcgccgctcgtcgtgcccgtgcctcgacatcaaaggtcgccttgctgccgtcgcggaggagctccgtcgcgcttctgcgaccgcgcatcgaaacctcgcctagcccgttgccatcgcctggaggctcaccattggcacgccgaccaccctagcccactatgtgcggccgtctt

SEQ ID NO: 29655 - DNA, 647 bp, Zea mays
  Clone ID: MRT4577_127056C.1
attgggacctcgagccggcgggagagaacttcagcgaagggcgcaactactccgatcttacataacagtcacggctaatagctagccacgcagcccagcaccgaagaactacccgtacgtacgaacgggcgcttacgatgacgaccacggccgagggcctccacgaccgcaagctcccccgccttctccgcccccggcgcgcgtgccaggacgcgccgaccgggttccgccagggcgacgcgaccgagtagccgcggcggcgcgccgtctcgcgcagctcgccaaaggctcccaagaggtggaagacgctgccgccgacccaagcgcgagtgcggcgccgcatgctcgggagccgcggctctgtgatgctgtgcgcgaacgcgggcccgcgccggagcggataaaagaccgtgtgcggatggagctacaacgtgtccgctggtcggcgccgcatcgccgcccggcggcgacggcatactactcgcacggcggagacggtcccggcctcgcgcgagctgtgtacagcggcgtcgccctgcccgtcgcgtcgctgggtgctctaggtcaactgcggagcgccgatgctcggagtcaagcgcctcatgagcggccacaacgaggtctggaacggaggcctcgccatgctc

SEQ ID NO: 29656 - DNA, 935 bp, Zea mays
  Clone ID: MRT4577_127057C.1
accacgcgtccgacccaatgcggcgccggcccctcctccctcttgcgcaaccatgccattgccatcggccgcccagagcgctctcgtcgcggcggccgtcgccatagccaccgccaccgtcctcctccccttcccaccagcggtggagaagatcctgcaggtagtgcagctgtgaggcggtggatctccagacagtgcagcagttgggtggcaggtggagcagccccagcaagttgtgttagccagcacgcatgtgattttttattgctttattttttgtctgcaggaacctgagttgacaatggttgcctggttgggtaccaagtgcaattttctgggtcatgatagttcagaaaaaaacgaagaactgaattgatcagttagttctaaccgaatgtctaccagtctaccctaaatacaagaaccacgattctaccacaaagtgtccttaattcctcactgatattctctctcaaaaaaagtaaaccttcatgccaataagctatgcaatcaatagatcattagtacagaaaatacatggacagatccagtgctggcagctcccacatgagtggggtctagggaaggaataaccaaggcaagccttacctctgcatttttgcaaagaagctaaatcggaaacaggacctttggctcagtgggaaagcttctcaccactgcgtcaggcccgtccttcagtacagaaaatacatcattcaagggaaatctctaacgtacaagtagtgcatgattagtctgtttggacaatgcagctgacaaaatcatataatgttatggtgggccaagtttaccaatacaagaagcacaaccatggctgatgggtggcgcgcacgtgagcgcgagatgcatgtagctaccgcatccatggcagcacccatcctagtctttacgatctttgttactcagtttatatg

SEQ ID NO: 29657 - DNA, 256 bp, Zea mays
  Clone ID: MRT4577_127058C.1
accacgcgtccgaacaggtcagattttttcccttaaccttattcggcgactctggcggcggagcggcaggcgggggccctcagggccttgtgcccacgggagcacggacattcataggatgcctcgcgccgagcccacctcggcaccaagaactgccacttccagggggagcgtctcgggtacacgcgccgcactggtggatggacatcattaaccttgtttttttcttccacattcctcaggtgggcggcagggc

SEQ ID NO: 29658 - DNA, 305 bp, Zea mays
  Clone ID: MRT4577_127059C.1
atacaagccacgcactcgaatatattcattctactactggcactgcgcacaacacttgacccgcaccagagggatgctgatcctatccctctttattaattattaaacgtgcttcctatataactcacagtttgaacttgatcctcacagcttgaggattaaatttataattggttggagagcctgtttcctggttcataacaggaatcgctagtagcttacattactttcattcgtagggcgcgtgagaatctctgagaaggcatcccccatggagaattccagggggggtagcctatcagact

SEQ ID NO: 29659 - DNA, 431 bp, Zea mays
  Clone ID: MRT4577_12705C.1
gaattggtagaacctagagtcgcctggacgcctaggcgtcgcctaggcgacgccataataaccttgcttttcagtcattggagtatattttggttcttgtgttttactgcatatctgatttttgttcccaatgcatcatacatatctaggttgcagctgttttgtgtggatataaaatgagacctgaatggtttgaataaataaaacaaagttaggagtccccgctgattgctttgcaatttataatgaaggaaatttatctatgcttaatgcattcaagttccaacaggatttggattttttttattttactttgctgtgtttctatttcatgaaggcagatctggtgcagcggtgaaagttgtctcgctgagtcaccatgcctctctgcatttgcaaaggaaaggtttgtctctggttattccttccca

SEQ ID NO: 29660 - DNA, 397 bp, Zea mays
  Clone ID: MRT4577_127060C.1
gatccatctgcacacaactgacatgagctgcacctgctcatgggcctgccgtacagggataaggtctcatctatgaataggagggttatatatgggatataccatctgactaatatggttatggttcgcttcatctggttagtgaacctacacgtccccaaccttcggtccttcgaccaatgcccatggcttgaaatcggaaaggcgcacatatattgcacacctttagctgagagaagctttaatgcgcactgtaacgattaactaacactctttattggagactgtgcccatcctatgacactgttagaatatctcacggacactcatgttgaatatgcattgagcatcgctgcactggtcatacgtatggtcatctagattgggaacattaagc

SEQ ID NO: 29661 - DNA, 236 bp, Zea mays
  Clone ID: MRT4577_127061C.1
ctacagttgtttcaagatgatgaaatggtaggagtagcattcagtgaatggaatcggcttgacttttttgtcccagaaaaagggggggaaaaaaaaagggcggcccccgattagtgggccctgcgccccgggatttattccggggcggtgcgctgaaggggtacaagtttccccaaaggggggcggtttaaggggtggggaaaacacgggggaagcgggttcccgggggaaatttg

SEQ ID NO: 29662 - DNA, 1402 bp, Zea mays
  Clone ID: MRT4577_127062C.1
ggccgggccggagttcctctagacctcatccggccggaccccagacgccagtgcactctatcggtatcccctcagctatggcgacaaccgtcacgcccgcctccccgttccgcgactacctccaccgccgccgcgtccgcctccacgccaagccgcacccgcattcccagcgccgcctatcacgcaccgcgcggctacgctatgctccggacggtggcggcgctgaggtctcgggccctcccgcttccgcggccgtcgaggagcaaacgccgcaggagcggccggaggacttcatgctcctggctgccaaccgcagcgaattcaacgagatcatcatggtcatcgactcgcccgtcgcgcggtacctcgtcctcgaccacaacaagaatatccacagcattctccccaaaacaaccgtttggaccaactcgtactgggatgagtttgtgagcctgccagctattgttccacggggccctgttgcactactaggtttgggtgctgggacctcagcacatctgatgctaaagttttggccttggttacaacttattggctgggagatcgaccctatgataattgaattgtcaagggattattttggtatgtctgatttagagaaggccacagaatcaggtggttcacttttggtgcgcattggtgacgcactttctccatcagctacagttgaaggaggatttgctggaattgttgtagatttgttttgtgatggaaaggtcatacctcagctacaagaagccaaaacttggttgcaaattgcaaaaaggctaatgccagacggtcgaatcatggtaaattgtggtggatcagacactgaagaatctctctcatcgccttgggttcaaaaccctacagttaaagcactttgttccgcatttcctggacaggtaagctggaagagactatcggagaaagagagtgtaaactatgttgccctgactggacctctcccagacctggacgggtggtcggcgtcggttcctagtgagctaagcacgaaagtgaaacaatggatgccatgcgagcttgcgtgatggaagggcattttcttttgttctagctgcacctaatttgcctcagcaacttgtccatgaccgctgtggccttctccaacctccatgccccttcaatttctggtgagggacgctcagctgtcggtgggtgccatccacagcgcttcgtttccggatctatcggcggactatgcacccatccggcacactgacagtcttgtctctctctcgtctctttcttcttcttttttttacttaagggtgcgctttgtggcatcatctgcatcggaggcagtattgaccccagacgttcgtgggatggaataggtaaacattgagggcccctttggcatggctctggcttctcg

SEQ ID NO: 29663 - DNA, 506 bp, Zea mays
  Clone ID: MRT4577_127063C.1
cctcgaggccggccgggccgggatttccaggaaccgatcatagagagacagagacgcatatccgatcatgaaggtagtcaagaacgaagcgcccgatgcggtggtgcacatactgctggctctgcatctcatggaaactccaccgacgggcatgaccggccgctcgacgcacggagtcgagccggatgtctccctcgccacgacgaccaaggtgacgatgctgtcggtcacgctgcgctacacggtggagacatgcaaatacattggctgcctcactcctgcttgctcctgaaactatattgatcgtgctatgcgtacatcatatttactcctgctgcttgaggccattcccgcgaagccacaactcttacatgcatgcgccggccgacgactactctgcctctcgtgagcttctgatcaagtgatgcatgtttcaaggcatcgcatggatgctttatgcatatgatatgcgtattattaattatccgcgtcagggaaccgggcag

SEQ ID NO: 29664 - DNA, 225 bp, Zea mays
  Clone ID: MRT4577_127064C.1
cccacgcgtccgtgctaaaccaactgaggtgtcagcagtggaaattgttcaacaaatactactgagttatctccaagaagctggttcacaagatgatgggaacctgtttactcgatggttctatctgtgcatctggaacaaagatgaccaacattctcaggagaagatcatttactatcttgctagattaaaatccaaggagattctgcgagattctggcaatgg

SEQ ID NO: 29665 - DNA, 378 bp, Zea mays
  Clone ID: MRT4577_127065C.1
tcggccgaataccagccatgccaatgctgtgccactaaagatggtctctgtttctgcgccatgcccttgtacaactccgggccgggatgcacctttcttgcttcacgttaggcggctgtccgacaccaccggtgagccgagacgagcttcaagaggatggcgttactggaggccgaccttcccgtgcttggcctcctactcctgcatgatgctctaagggagcgggccgtacccacataaccggcccctcatcatggccccacatggaaaacgtaattctgggttgtgtggaccaggaacggcttgaggctgtggcatgggagccgcccaaagaagaaagggaaaggaaaaaaggagctggataaatattagcccctg

SEQ ID NO: 29666 - DNA, 368 bp, Zea mays
  Clone ID: MRT4577_127066C.1
cttatgtgttactggttcagctcaggctaaagtattctgctcttgtaacctttcatattttccattacttcaaaggtgaaaacttgttgttgataattatgctttaagtcagatttatgatagggatgggcttacactacacgagtttgtcaagggtgatatgtatattcgtgatctgaagaacacaaaaggtcacatctctgagcttacaggtggtgagtggaatccaaagtcaaaagagaccattttgacatcatctgaagatggctccatacgtctctaggatgtgtctgactttaaaaagaagcagataatctctgcagttgcgggaggaataacggatctgtcattccatgctgggggatata

SEQ ID NO: 29667 - DNA, 297 bp, Zea mays
  Clone ID: MRT4577_127067C.1
ggaagccgggcggaccaaggcttctacccattgttaccaaaagcatttagaattttaatggggaaataacaataaggtgggcgagtttaaaaaggtgtccggcgacttccatagtattaaacttaggagttatttcgagggcacatctggagaaatttgtttcttgcaaaactaagttgcttgggttttgaaccatattgaaattggtaaaatatttaattccctttaagcaagaaaaggtttaatgaaattttctaagtttcttataatgagccccctaacttttgcccttacaat

SEQ ID NO: 29668 - DNA, 257 bp, Zea mays
  Clone ID: MRT4577_127068C.1
gctcatatttactcatctcaactgcgacggttgtagatctctactcatgaatatcggtacggggaacagtcacaaatacaggctcagactatttaacaacgattccacacatgaaaacacctgctgccttgactaaaatttctgacctataactaaagcacgtatactgagaaatgtataactactgcttctgatacgtcgtctgccaaagaacttctacaagacacatttctttgacctgacaatacacctgaacc

SEQ ID NO: 29669 - DNA, 190 bp, Zea mays
  Clone ID: MRT4577_127069C.1
tgaagatgtccaggttgctgcgctcgaagtacgaggtgccctgccccattagccagaccaaggcggtcaggttagagatcccaacgccgttgcattcagtggaggccagctacagcgtgacgttcgcgtgcgcaccgtccttcaagatcgaccccgtccggatgaacaccgtgtacacacactgcatgct

SEQ ID NO: 29670 - DNA, 304 bp, Zea mays
  Clone ID: MRT4577_12706C.1
accttatgtgcatatgttacactatcgaatatcagtactctgggagcggctagatgctcacgagattgatgcctggagaagagggcttttactaatttacagcacacatattggatataatcataacactgtgtcgactgaggtgctgttggctcgactacttttgttatttaccatccggagcttcactttcgcattacaccctcgattctcctacctacacgcacggcgagggcagcataaactctggcccggtagatcgttaccttgacgtagctttgacgctatcacgcttatggcgacc

SEQ ID NO: 29671 - DNA, 144 bp, Zea mays
  Clone ID: MRT4577_127070C.1
catgacagggaattctagtatataaatatacctatccttatcagctgattacatattaacatgactagtatcaaccttttactatatatgacatagaagataaatgcgtatcaataatcaaagattattaacatataagcttat

SEQ ID NO: 29672 - DNA, 423 bp, Zea mays
  Clone ID: MRT4577_127071C.1
gtatattatactgtaaattcactttgcccttgattattcagaagttcagaagtaagtgaatcctctccatgaccctaactgagcctttgcttagttttcaggaagaattgctatcctttaaatactaccctacaaaactgaacaaatcactgtccatatctttgggacagtctcctttccagataggccaggacaaggatacatacatttcactcatttatcacatgaagcagtatgtcataccagaaaaacatggcttaagaatcaaaggagacctgaattgtagttttgccaccgggtcccattatctcttcaggcaatttcctcagtttctctggatgcagattccgcatttataaaagggatagtcagaccctattggtaagattctgtaactggttaaaaatcatatgccaaacaccc

SEQ ID NO: 29673 - DNA, 537 bp, Zea mays
  Clone ID: MRT4577_127072C.1
ggccgcttttttttttttttttttcttttttttttttttttttttttttttttttttttttttttttttttttttttttttttctggaacagggagttatttatgaaggccgagggaaaggtttccggggtggcgggtaaactatcgaatcaccatccggttcgccaaatggagggatggctttgggggccatcattcatccccggaaaaaagataggtctaagggaaaagaaatgtcaatcacccaactgaaaagggttcaagccgggattccaattctcctggcccagagagcaatgacctgatcccgaacagcaggaagagccctccctttgacaatcaaaccattttttgggatatctgggaggctgggctttttccaccaaaaacagaacaagaagtgcaaagtgcttgccctatgatcccacccaggacaaccccaaatgggtttccatctgcccccaagccaatagtggcaatctggcttttgacaccccactcaccaaagaatggaaaaaaaaacgcctttatgaaaat

SEQ ID NO: 29674 - DNA, 1792 bp, Zea mays
  Clone ID: MRT4577_127073C.1
tcattagtccgccttctcccccgagacccccgagagtcccctcgctgccgacgccacacaaacgcctccaccctcatgttcaccggcgctgcgggcggcattggcaacctgccacggccgcgcaggccgcggctcggcggaataggacacgggggcgtcatggtgtctccacagggacaggtggctctgggggcacatccgcacctagccgccccgccgtgcaccgactacgacgtggcctacttcaaggcctactcacacatcggcgtccacgaggagatgctcaaggatcatgtgagaactagtacttacagaaatgccataatgcatcacaaagatcttatttcaggcaaggtagttttggatgtgggttgcggcactggtgttctttcgatattctgtgcttttgctggtgccactcgtgtttatgcagttgatgcaagtgatattgcatttcaggctatggagattgtaagagagaatgagctgtctgacaaagttgtggttttgcatggccgaattgaggatgtcgatattgaagaaaaagttgatgtcatcatatctgaatggatgggctacatgcttttgtatgagagtatgctgggaagtgtaatttttgctagggacaaatggcttaagccaggaggtcttattcttccatcgcatgcatcgctttacatggcacctgttacgaattctcaaagataccatgatagtatttacttctggcgagatgtatatggcataaaaatgtcctctatgatgcctcttgcgaaactatgtgcgtttatggagccatcagttgagacaattagtggagagaatgtcttgacatggccagcagtggttgcacaggtggattgttataccatacaagctcagaagctcgaaaccatcactgctgcatttaaatttacgtcaatgttacaagctccattgcatggttttgcattttggttcgatgttgagttcaatggaccagtacgccagaaatcgaagaagcaacctagtcaatcattggatgagaacacccaaaatgccagcccaagcaataggaagagaaaaccagatgtctctattgttctttcaactgcaccagaggatgcccctactcactggcagcagacccttttgtacttgtttgaacctatagaactaaacaaagatcagatcatagaaggctctgttactatctcccagagccagcaacatgctcgcttccttaacatctgcctgaaatactttactggcgaccaatggtatgtcaaagaatctgtgatgcgataatctgggggaaactgaaacatagtaaccttctttctgaataggctcaaatctgttttgtatgaaggacaaccttgctgctggtcattgcggtttaggagcattctgactgtactgggttgtcgtggtagcaaattgataaaaaatggagtgccatttcgagtgcagcttgatcaaaatggtagtgggcctcgacaagtaatatgtgaatctttggctccaaactcaaattgacgaacaaaacatagaacatgttgacaagagtagtaccgttttcttttttttttgttcttttgaataggtacaagctgctggtactttattccccataatagactgctcattcattgtaacgcttctgcagcgtgtagtgcagcatagacggtatgattttacaaatggtagcattgaatttttacgagtggagtttttgaagagtaaaatgcatgaataaaatgtgcatggtgtctggacaagtagaatgcatggtgaatgtcagtttgtttca

SEQ ID NO: 29675 - DNA, 374 bp, Zea mays
  Clone ID: MRT4577_127075C.1
aagtcaccgaaccgccttgtcgtcgacgaggccaccaacgacgataactccgtcgtcgcactgcaccctgacaccatggagaggctgcagctcttccgcggcgatactgtgctcctcaaggtctgatatggctaatctgagcttgttgcagcagcttggggatgttgagctaatctagcagattgtattatcacgtgaccgatctgtgtgtgttcgacctgaattccgtgtattcagagtgcagacctgttagaaataaccttagcttttgtcacaagtacttgctgaagtgtttaatgttgtaatttgttgtattgtttgagaacttgagtatgctgaggcattgagggtatttgggctcctcctgctttgct

SEQ ID NO: 29676 - DNA, 379 bp, Zea mays
  Clone ID: MRT4577_127076C.1
gcggcagaaacactgcgcacgacgatagtccgtccactcctttctaaacgcgcgcgcagggcagagagtcacaagccacgcacgcagaccattcaagaacagagcggccgacacaaacctccttccaagcataccacgcttacccccggtgcgaccacgcataccaactatactctacgaagcaggcggagcggcggcacattactgtgggacacgctgtaagagtgaagacaccacctacactggccgtggaggaggcggtctaccaggggaggataggctgagggcagaaagggataacagcgaaaatggcgacggagccgcccacaccctgaatgcatgatctgtaaggacaccgcacaggggaatgacagtggtg

SEQ ID NO: 29677 - DNA, 104 bp, Zea mays
  Clone ID: MRT4577_127077C.1
aaacacacagaagccaggagccctacttgttgggtggaatctctttaatctatcagcttagccaggtaaggttcagacacacatggggagcattggcagaggca

SEQ ID NO: 29678 - DNA, 2056 bp, Zea mays
  Clone ID: MRT4577_127078C.1
cggacgcgtgggcggacgcgtgggttttgtgcacataaattggaacaaagctggagcttcggaccaagctggaccgaaatcttttggtggtgatggttggaacaagggtggtgatcagaatagcagttggaacagtcctggaaattttggaggtgggcgtggctttgggcgaggacgagggagaggtaggggtcgggaatctggagatttcaatggcagaaatgatcaaggaaattgaaagaattcatggggtggtgacaatgctgaaaaatcctcttggaggtctgataatcaggtagacaatgaggctggagagtctggtggatataggggaaggggaagaggaggaagggggcaatatggaggacgaggtaaagacaatggttggagaaatgatgatagaagcaattctgggtttggaagggaaaataacagtggcgatggaccaaaatggggtggtggaggtaattggaacgctacaaatccaccaagtagcagtgtaggcaccaagtcatatggtcaaaatcagcctttcacttggaataattctgaggataacaaaccatctgtaggtgaacaaggtgatccttgggcaagcaaggtgtcttctactgaaggtacagaacaacagaatgattcttggtcaagtaagatgatttctggtggtgctgggaataccagtggtggctgggacaccaaggtgaaagactcttcctgcaatgatgggggttgaaggactacaaaatgatccatgggcaaacaagattggttctaatgcaaggtaaagaacaagaaactgatccttgggccagcaagatgtcttctactgtgtgtgctgatgacaagaaaggtagctggaacactacagcaaagggcattccatctaaggaaaaggctgatgatccatggaatagtaaggggggtaatgatgacagcaagaaaactgacacctggggtgctggctcgtcaggtggggatcaggaactttcttggagtaaacctaatttctctttgggggaccaggaatctacttggaacaacccaaggttcggtgacgatgacaatgtaaataatagaggtggatttggacgtggaaatcgaggcagagggagaggaaggaattttggggatggtggtgggtcatcatggaatggaggcaatagaaacgatgaatcaggtggcggaaggtctggagagccatggaacagaagggactttgatggtggcggaggaggagccagagatcgttttgggcgaggtgaccgtaaccagggcaacaacttcgggtcagcagatggggacagctggggcccgggaaggggagtgacacagacagctccggtacacaaaacggatcattctccatctatcatgggtcagtcaagcggttgtgctgttaccgagcctagcttctgagacggcgttcccagcagagaagttggcaggggaggcaaggtttctcggaaaaaaagccccgctgggaagcacaaaacacctctggtagagatggtcaggcaggaaagggtgatgcaaacaactcctggagtaagaacagatcatctccatctagcgcttggggcgctcccagtggaggagctggcggccgaggttcttggggaaagagcaacgaggatggctggaactcagcgggaggatcagccaaagagaagcctgcatggggtggtgggtcagaagcgtctaccaagaaagaggacaaaggtggtgaggggaacgggagccaaggaggaggtggtgtcagttcctgggataaaggggcagatgatgcatggaacggcaacacgggtagtgatattgggagtggtggatggtaagatttccgccaaaataatatgaactctgtcggtgcgtgtgtctagttcgtatccgttacttcgccatgtgtactctacactaaaaagaacatggcttgtgaccatttaaacattaccttagtggtggcagtaactaggtacctttgctccatcgtaaatcgggcaaaaaaaaaaaaaaaaattcaaaaaaaaaaaaaaaaaatttaaaaaaaaaagaaaaaatt

SEQ ID NO: 29679 - DNA, 496 bp, Zea mays
  unsure (1)..(496): unsure at all n locations
  Clone ID: MRT4577_127079C.1
gggaatggcggcatttgaaatagaacagtgtacgactccacaacaatttatctggtgagatacaattccatgggaccacttatatgtcgaaaatgatcacctaaattaatgttgaaccctacattgtgcatcttgtaaacatgttcttcgttgaccaaactatcgaagtgtttggttgtctcatatagtgcagttcgatagtttgactgtctcatgaagcctaaaccaacgggcagtgaaaacattacaaatccttaacgccagttaactgatcaggattatagtattgtggccttgcttcaccctgagtaaagcaggaggaagagaagccatagatatgtatttcggttaaacacatgtatagcaacaaagtataataattaatctcaagaagtaaggtctgttttcagtaacagcctatcaacagaatagcaagtgttccaatgcanaaattcaattcttccttcaagatcatgtaacaggtattaaataaaag

SEQ ID NO: 29680 - DNA, 253 bp, Zea mays
  Clone ID: MRT4577_12707C.1
ggacgcgtgattttagggatctgtttgtatggcagtaatgaagtcgatgccagatttgagcgtaaaaatcttcacgtttgagcgtaaaatagtgtcagacgtagcataaaatcttgttttcatcacctcgcatgcgaggtcctatttttatggaagatatagtcttcacccaccagatgtggatgtggttttcgatttgtatggcaggtgcggtttcagatcaaaaaattatggcaagtccaaaaattatggc

SEQ ID NO: 29681 - DNA, 610 bp, Zea mays
  Clone ID: MRT4577_127080C.1
acgatggagcaaaggtacctagttactgccaccactaaggtaccgtttaattgtttaaatggtcacaagccatgttctttttagtgtagagacacatggcgaagtaacggatacgaactagacacacgcaccgacagagttcatattattttggcggaaatcttaccatccaccactcccaatatcactacccgtgttgccgttccatgcatcatctgcccctttatcccaggaactgacaccacctcctccttggctcccgttcccctcaccacctttgtcctctttcttggtaggcgcttctgacccaccaccccatgcaggcttctctttggctgatcctcccgctgagttccagccatcctcgttgctctttccccaagaacctcggccgccagctcctccactgggagcgccccaagcgctagacttgttagcatcaccgcttggctgacacaggatagatggagatgatctgttcttactccaggagttgtttgcatcaccctttcctgcctgaccatctctaccagaggtgttttgggctttccagctgggcttgcttttcgagaaagcttgatttccttcgccattttctttgttgggattt

SEQ ID NO: 29682 - DNA, 284 bp, Zea mays
  Clone ID: MRT4577_127081C.1
cttgtacctcgccgacgagagctacaccggccactactcaccgcatctggaccacgccatactgcgccaccactgctccgccggcggaataccgttgcagaccatcaacctcagaggcatcatgatctgcaacgcggcgatcaactactatactgacactaatggcatgtaccacttgttatggacgcacgcgctcatctactacgcgacgggcgacgccatttgcaggcactgcaactatagcgccgccgacggcggcttcgatggctccatcgacaagtgct

SEQ ID NO: 29683 - DNA, 1005 bp, Zea mays
  Clone ID: MRT4577_127082C.1
ggagatttcaatggcagaaatgctcaaggaaattggaagaattcatggggtggtgacaattctgaaaaatcttcttggaggtctgataatcaggtagacaatgaagctggagattctggtggatataggggacggggaagaggaggaagggggcaatatggaggacgaggcgtccggagagacaatggttggagaaatggtgatggaccaaaatgggatggtggagataattggaacgctacaaatccaccaagtaatcagccttggagtagcagtggaggcaccaagtcatatggtcaaaatcagccttccacttggaataattcagaggataacaaaccatctgtaggtgaacaaggtgatccttgggcaagcaaggtgtcttctactgaaggtaaaggacaacagaatgattcttggtcaagtaaaatgacttcttgtggtgctgaggataccagaggtggctgggacagcaaggtgaaaggctcttcctgcaatgatgggggcattagcataaatcatatgaaggaagtagattcacatgcacccgtgaagcagaagctacaattatttccaataaatgaagctactcttaagccatttgagaaggttgatttattagacagccctattgccagacttgacatagagaccacaacacttggagccacatatgttgctagcttagatgcaggagtttggaccaaggaacaagtatttgcaggttagcacaaggagaacgcgacaatctttcgcccaaaactggatgaggtgcacaagaagagggctgattcatggtacaagacggtttcaagatcattcgatttggctgacctttctctgtaaatgtttcttgtcggcattgatctatcctgtttttggaagatgcaaatgaataaattggtctttgctggtactattcttaactacttgttatttacggtctttacaaaagcgagtacaagaatatcctcaaattttcggcaggaagtatttttctagaat

SEQ ID NO: 29684 - DNA, 669 bp, Zea mays
  Clone ID: MRT4577_127083C.1
agcgccccagccgccgccagggccctcagtggcgtgtgggcgtcctgtcccggtggatagggcacgaacccaagctccggctcaccggtgggtggcccggccaggcgcggtggccgggcgggtgcggcctcctgccccgacctcggctcggcgcgcgcaggcgcctggcagcccccagcctcggcctcggccaggcgcgcgcgacccccagccccggctcgccggctcgccggtcatggtggctccgatccgggctcctccggcatgggcaggcgcgggttcccccggctagcagcctctcctggtgggcacggcctgccccggcggctcaggaaggcgcggcggccccggcgtgcacagccgtggtccagccatggcggcgcgggcacgcagcctcggctccccggcgggcatccatggcgcagtacgggcgcgcagcccggcggctagtctgctcggcggggcagcggccctccgcgggcgtgcgtccacggccaggcgcgggccgggcagacggccctcatccagcgtgcggcagcctctggcgcggtccagcgcagtcgggcctcggccagcatgagcgcgcggcggcctcgacggcgcagacacgagacacggcctcggtacgggatccggccatggcgagggcggccgccgactagtataaac

SEQ ID NO: 29685 - DNA, 450 bp, Zea mays
  Clone ID: MRT4577_127084C.1
cccataaccgggcaaagatccttgtagggggtcagccctcggcagtcttaagttacgggtttccttgccttaaaaacataaacatccggaaatagttacaacttactactaccctgattccccatcccagcaaagggaaaataataataagcttgaccaaaataaaaaacactacccttgctgcccctaaccaaaggggggggagagccccaccttcgtttgttcggcatacatgcatgacctaaatcaggggggcaatcaaatttgctgacggccgggggcctactaggacggttgtatggccagccactggctgaaaagctgcagttgactcaagcttctcccacgtaagtctacccttcgtttttagcgacacgcgtttttttttttcgcccttgacctgggccaggcatgacgaaaaaagatcgccccccatctaaaataacattt

SEQ ID NO: 29686 - DNA, 244 bp, Zea mays
  unsure (1)..(244): unsure at all n locations
  Clone ID: MRT4577_127085C.1
cacngagcgacgggaaacnggnggagnangacaagccnacgaagcncanggaaaccgaagggncncncnnccgngaccccgncaaagagnaccggncgnacgcagcgaaggggaacancaagaagccaccnccaaacaacgaccgngngcangnnnccacccgccgcaccccccngaaaggagacacaagaancngggcgcgcacagccgaagaaccacngnacccgaaacccggagaaaaggc

SEQ ID NO: 29687 - DNA, 263 bp, Zea mays
  Clone ID: MRT4577_127086C.1
ctctggccgtcaacgccaacgtggggtacgccgcggttcaagaactggctcggaactgcccagaactccaccaccttgacctcaccggctgcctccgcgtcggaagcgacggtgtcaggacattggccgagtactgccccgtgctgcgttcgctgcgggtgcggcactgccaccatgtggcggagtccagcctgagccgcttgcggaagcgcggcgtggacatcgacgtggagccgccgctactcaaggccctggtgctgctg

SEQ ID NO: 29688 - DNA, 189 bp, Zea mays
  Clone ID: MRT4577_127087C.1
gacccagtggctagagcgtacatcggagggaaggatcggcgccacgagccggtcgagcggtgtgagcatgctcggagtggctgctgagcctatgggggagcccaagtagggctgcacattcatcgccctatgactcgatggaaaggatggaaggaagaagagcaccctatatacactgtccggaccagt

SEQ ID NO: 29689 - DNA, 429 bp, Zea mays
  Clone ID: MRT4577_127088C.1
gtgttgtccttttttaggtggtacagaacgggttaagtgctttaacatggcgcagagcgagaagaaaaaatgtaagttgacctgaaaaaggcagggccacatgaactacaggaattacataagtacctcagaacttacagcttccggaggaatggctatgtgcgagatgaactccgggagcacctgaaccgttttttcttcagagtaacatacatgctcgtgccccgctggagtggcaaacagtgcttgcaacctgatagggcctaagccacagacggtctaccaaccatacttggtgctagacaaaatcaatggtgaaggagacgtaagggagggcctccaacaagctcttccaaaccagcaacgactacaaagtcctgggacacccaatacatgaccgggagatagccagatagctctgctaagatg

SEQ ID NO: 29690 - DNA, 173 bp, Zea mays
  Clone ID: MRT4577_127089C.1
cggactcgtgggggccggcggcgaggtcgttactgagcctaccggtccacttggcgtgctcaagggcttcaaggacctgcctcccgggatgccttccgtgctcttcgtgactgcattaacttgcttttgtgggttccggtcattcttttacacaacgactggattggcccgga

SEQ ID NO: 29691 - DNA, 243 bp, Zea mays
  Clone ID: MRT4577_12708C.1
ctagttctagatcgcgagcggcgcccttttttttttttttttaacaggtagaagaaatacgataatcccaggtttgaacttgaatcccaccagaaacacggagcatccacagaatacacaccagccctagtctaatccaatcgacatcgacagagtaccagtagtcttataacagagagagagagagagagaaaaaaagataaaaaaaaaaaaaaagtaaaaacaaagaatgtattaaagaaa

SEQ ID NO: 29692 - DNA, 466 bp, Zea mays
  unsure (1)..(466): unsure at all n locations
  Clone ID: MRT4577_127090C.1
accaccacactattaaatcgataaatatttatccatataaataagttctcaacgtttgggccgctaaagagggggggngaaaggaaaaaagcacaaagcctggggccactcaagcttaaattcagagacatgaaatcaacagtactggcaacaatgcagtgaagagcaatggttacattaatttcctctgatagtctgattagtcctctactcgacagtttaaccaattcagtaccttttaattccaaaaatgcactttgcaatgatcaactacctaaacaggttaagatctgaatggatgagtgctgcatgacatataaatggaacatttgcatacacccctgaaagggcacaccttacacactcggcaaccgtgaagatttgaatgaaggccattgccatccagaaatgtgccatttgtttgccctgaaaagcaatgcttggattccagttgcaggcaggggcc

SEQ ID NO: 29693 - DNA, 452 bp, Zea mays
  Clone ID: MRT4577_127091C.1
gagttcttgagccccgaccaaaccaagcagcgggagggggaactgagaggccgagcccgaagcgggaacagtggaggacgagcggacgacaccctcgaaaaagaccagcggacgggagcgacccacagaaaaccggagatgcagaatggagacagcacggaggcgcaagcgacgagagaggaccagcagaacatcaaacgcttcggacgccacaacaaccgcctccacgagcacgaggacgagaacaaactggcgaaggaaacgaacgagaaccgcgacgaggctgggaacgaagcaaagccggcggacgaagaagcccggcgctaacaaaacggggaggagcaggcaaacaagccgagggacgacagccagacaaggcaggagcagaagaaaaaggatgcggttaagaagctggagaggctagaggaggaaaaggaaaacagcctgcccaa

SEQ ID NO: 29694 - DNA, 444 bp, Zea mays
  Clone ID: MRT4577_127092C.1
gggcccgaaacgggctttttttttaaacaacagggggaaggcccccccagggaaaaaaaaacggaggaaacagtccccaaacttccccaccaaagtaaaacaagggggaagggaacccaagaaaaaaaagcggatatccgaaaagggaagggcgcaacaaaaaaaaaaaggccggttaaaaaaacgggaggtgcacaaaagggctgaatttttgggaacgggggccgaccggcaaaaaaaaagccccgcaccggggggaaccaaggcccttaaaaggacggaccggggccatgtacatttttaaaaaaaaaaggcttcgacgggggcaaaaggggccccccccccaaaagccaaaaaaaaaccaccccggggtcgggccttgggcttcccaaggggcccccttccgaccccctttggtattctttgaaaagtttcaaaaatttc

SEQ ID NO: 29695 - DNA, 174 bp, Zea mays
  Clone ID: MRT4577_127093C.1
attcggctcgagaacaaaatgggccctgttctttgaggcatcgttctgacctcctgcttgcgggttattatgatgcactcagacctgctctcgcccagtctcctcctgggaggcatatgcttaccacaccagctcaagggtacgatattctaaactcgagagcaaaccaggacc

SEQ ID NO: 29696 - DNA, 120 bp, Zea mays
  Clone ID: MRT4577_127094C.1
ctcgctctattcccatacgaagttcccgctctaggatttccgacgacaagctcggaactacttcttccctgctcgttgctcgtagaaacagctgccgacatttctgacgggaaccaactc

SEQ ID NO: 29697 - DNA, 314 bp, Zea mays
  unsure (1)..(314): unsure at all n locations
  Clone ID: MRT4577_127095C.1
gtacgcctgcaggatccggtccggaattcccgggtcgacccacgcgtccggccgggaggaggcagccaatcttccgcgcagccagagccgggcggaagccgggcgggatcgtcggcggtcccaccccgttcacctgcgcaggtcacaagcaccctcggaacccggaggctcgcactgtgaaggtgacccccgcctcggggaggagggcgacggcccctgggagcacgatggcgggccgccgcctggcgcggnccagcatctctgcgntcggcgtatggctcctttgcgcgcttggnctncaggccaccgaggcc

SEQ ID NO: 29698 - DNA, 277 bp, Zea mays
  Clone ID: MRT4577_127096C.1
ccggccgggctccgtctccgtttccgtccgcccggcgtaaagaaaagcctctgctaccacagccgccacgccatggccgatgagaccgacacctggcctgcctccgcggtctcccgaggccgtcccgctcccgaggacgacgacagggaggagggcgagatcaccgacctcgcctgcgctccttccccgcccgccacgcacccgcttgagcactcctggaccttatggctcgacagcccgcagagcaagcacaagcaggccgcgtgggggagctcca

SEQ ID NO: 29699 - DNA, 748 bp, Zea mays
  Clone ID: MRT4577_127097C.1
taaaatatgctgtgattggggcaactctcacaagcaattggcacagcgcataggaaagcaagcaagtactttcattcaagacgagctcagtatggaccatgtttatgactacatgcttcatcttctaactgaatatgccaagctcctaaaattcaaacccactaagccacctgatgctattgaggtatgttcagagtctttggcctgccaagctgaaggcctcgagaagaagtttcttatggaatccatggtgaagtttccccgtgatgcatgtgatctgcctcctcccttcaacccacatgagctcaagttgctaaagcagaagaaagaaaattcaataaagcagatccatatgtgggagcaaaaagatttgggggcttaaataacaattttgaccccctgcttttttttcttccaatcgtaggcacacataattggtgtcttataatttggaattggggagtatgatctaactcagtgtcattgaggtgcaaccaaataccaattatttattgactgcgatcaacttagaagaatctagataaattgagcagatacccattccttaggtatttttgtataaagcaaccaatagctacttagctttaaacatttttctgtatttaattttgttttgattggctttactttgtaaagcaactgtaaatgtgacacagaaattatacataatatataattctcaacaacaattatacagaatatatcattctgatccgatattcacttc

SEQ ID NO: 29700 - DNA, 681 bp, Zea mays
  unsure (1)..(681): unsure at all n locations
  Clone ID: MRT4577_127098C.1
atctcatttcttcatatcatacatatacttactcttattcttytatctctactattatattaamctaamtcatactcaacatawattattatcccaacattkgatctatkagtatctaaagttckaataatccwctctctactatctttaattcctattttgtctayatyytcstcccatattacttgcttcccagcacaatcactctcacactcttatctnctctcamcacctnggngggcttcctctatncctccacagcgtattctcnggttctccttctttccatcctycwmtatntctactctcctctacatctccttcatcttctcagttctcacatacttctytgctttcttattgatctcctyctttgttmttttnctyacctctcagcttcttgatcttctctttctatcattttcttttctctcttctctayaggctcttcactccataanatcttcyttatagtttctncattattttatactttatctcttttctcntcncttcntctttaactnawnatctactttcttntactyatttaynacancatttcttctnatctctcantctcacaactctcactccactatctcttcatctcacttcaatatctnctwntnatttatayanyatcttcanctacatatctctcctnctatctctcactat

SEQ ID NO: 29701 - DNA, 387 bp, Zea mays
  Clone ID: MRT4577_127099C.1
cgggcggctcgtccttttttttttttttttttttttttttttttttttttttttttttttttttttttttttttttttttttgtttttttttttgggagggggggggccacaaaattttatttgcaaaaaaaaaccaaacccccctgaaaatttgggcttacaaaaaaatctaaaagcttcagcgggggcaataatggaagataaccttccaatcaaaaaaaacccggtttttgatggggggttcccatgacttccccccctaaaccgaccacttttagacattacctcctggatgaaactggtgtgggcttaaaagggacatgggaaagcaccgcttgggggcccggtttttaactctaatttataaataacggggacgggttctt

SEQ ID NO: 29702 - DNA, 277 bp, Zea mays
  Clone ID: MRT4577_12709C.1
aaaaaagactaaattccgtttgaaaccacaaacactggcggtcaattttttaagggatgggaaaaatggttcacatttagtttcacaaaattgcaactcaaacgacatttattttcatttcctggcatttggggtactttggcgctcactggtcctttttgatgacccccttgtcgtttacatagataccgtccaaaaactttgggattttcttttttttaacatgggattttttgttgataagggcggcggaaccagattccaactttactttttt

SEQ ID NO: 29703 - DNA, 916 bp, Zea mays
  Clone ID: MRT4577_1270C.1
actcgccggccggaacaagcctgcctcaagctctctcgatctatatatgcgtcctcatccaacaccttccatggaggacccgtcgtcaccagcagggtgtcccggccctctctagtttctaccccggcccccaacattggcctgatgctgctgccatgtagcccagcgctcccccctcggcttcaccggcggcggcggcaacgacggtgaaaactacatcgggtgctagctccgacggtggtgcgtgccctgttgacgatagggcacgcggggcgcgggcagcttgtaagcgttcgatcggccatgtagggcaactatacatctttggcaggtctccatcatcctccgtgggagagaagatggtaatggagtgcgtgtgtatgtatgtgtatgcccagggcgcgcgcgcggctctgggcgagtcacagtagagatgcaatatcatgtatccagtatctttcttacaacacaaacagtgagaaattattagtaaagtgtgcattgtggtgctaaaaaaaaaaaaaaaaagcggcgcttctatagtgtcacctaagggcccgtgccctttcgaaccttcccggtcccggattgccttcaacccgaaaggccaagccttaagaaccaacagttccaagccgccgatccgaagaacttcgcaatccgtactctgttccggccttgaaggaaggggatggtcgccgattttatgccaatttactcgcgccccacgccgcgagtctttgatcgatgtgtttgtacagtcgaaagagcattgctttacataggaccattcatatatatatattgatcttccctcccttcctcttcccgcgggccgtcagaggcaatttcgccctcgattcgaccccgattcgttcgcccgcgaccgggattcccttcggcaagcgcggatctg

SEQ ID NO: 29704 - DNA, 247 bp, Zea mays
  Clone ID: MRT4577_127100C.1
agggggtgagaaatactgtagtgcacatctactcattgctcaatataagcggtatctaagtatttcagatgttagttatgatattataagtgtgactacttcagtgccctctagcgcttacctaacaagatagaaagcggtagcaagattaagtactatcaggacgaggggcctccgctgccgcctaattccgggccgcgctcttcctgcttacacggcctattgcactgtatcgttttcggtgtag

SEQ ID NO: 29705 - DNA, 175 bp, Zea mays
  unsure (1)..(175): unsure at all n locations
  Clone ID: MRT4577_127101C.1
accggccgacccacgcgtacgatttacaccaacttgtttcacagatttcttatataccgcaccaacaatggcagccaaaagacgttgtctccttatgctccctggcctnnntaatagngctgttaaggagaccattttaccataatgctttcaagttnttataggtttccttttt

SEQ ID NO: 29706 - DNA, 349 bp, Zea mays
  Clone ID: MRT4577_127102C.1
gcatagcgaaccaccatgggcagcacataaccattcccattttactttgaggactgaaaatctgattcatgtgctctagccgaagggggggggggtgttctggaacttgcgtaaacgggggaattctaaaatcatcgtacatagactctctgcttccctttggattttgatcatgcctcacgcaaaatgttatatctgataagcgcgtaccttgcaccagagtactctaccttaggcgctcctcgcctcaatatatagcactgccatccggcaacagttatgtatctggatcacacatgtacctagcctttgtcagccctgcgaatcctgtacttaggcattcacacag

SEQ ID NO: 29707 - DNA, 486 bp, Zea mays
  Clone ID: MRT4577_127103C.1
ggacttctgtcaccttcctccacgcgaggaggcgatgcttttacgtccctttttggcatgaacggcaaggagctggacggccgcaacatcaccggcaacgaggcccactcccacggcggccgtggaggcggctcccgcagcgggtactgtggtggccgtacaagcggcggatacggcggtggcgggcgccctgatggccgaggcgactacggctgtggcggcggctaccgcggtggcggcggcggctactgtggaggcggcggcggctactgcggcggcaaccgtggcgggggctactgcaactccggacaggaactggaggaactgagcggtggggcccgcgccggcaagttatcctgttcgctaccgggtagcttaccctattccagagtgtttatcttccttcgtctcgtgcttgttgatacccatctgtgtattatgatgaaggccgctctgtgtcaaggggctagggctgagttcatcctc

SEQ ID NO: 29708 - DNA, 316 bp, Zea mays
  Clone ID: MRT4577_127104C.1
ctgcgcgatggtcgtgcgctcggcgacctcgtcctcctccgtgccctgcgaccgtttgagggggtcgggcagcagcggcgtgacggggaggcggcggccgtagacgagggagaggaggtggaggacgaagaggagttggggccccgcgccatggggaggagttgcttcgccgcagcaacctccattcgcgcggccgctgagagggagagctgcagggaggtagagcggcggctgggaggagggaggccgcccccgggagggaaggatgagcctcccggggggcgacggctggtcctagggctagccgacagcaacg

SEQ ID NO: 29709 - DNA, 415 bp, Zea mays
  Clone ID: MRT4577_127105C.1
aattcgggattcgaggctacgacgtcacgcgtccgcatcaagctacatataatgtttaagctaatcgcgacaatagagcaacactggctaccgatatacaatatctgcatacgcttcgtgctctatctgcatgtgttgctaacgcgacataattccgtcaatgctcacaagctcgtatagctatgcttgatgcagcatacctataatcaatgatagcttctgaatgtgaatacccatctctttgaccctataggcttcaaccagctatcacagctagctacataccgctatcaccattgtgcaaacaatcgccaggcgaatctgtagtgcagtcattggtacaaactataaaggcacatcagctgcaataactactgctaccagggatcaatcaagcaggtctggcaaacctttc

SEQ ID NO: 29710 - DNA, 158 bp, Zea mays
  Clone ID: MRT4577_127106C.1
cgtggaggtcgggaaatggagtgtcgctgagcccgggtcgctgtgggggcaccagctggaccccaccggacgacgaggacgaggtctatccgtaccttggcgcgaggggagaggaagaggacacggtcacgttatggtgcttgacatctgctgaggag

SEQ ID NO: 29711 - DNA, 554 bp, Zea mays
  unsure (1)..(554): unsure at all n locations
  Clone ID: MRT4577_127107C.1
gctggctgctgttgccgtgccgtggggggggggggggggggaccatcgcgccgcgggaggcacctcaacccctggcgatggccatgcgggcccgggctcgccgctccgccgggcacctataccacctccgcctcccccgggtcctcttcctcctcccgttcgctctcctcctcatcggggggggggggggtccccncgctcctccnccgcgccaacgcacacgggcgccagtgcatgccagccgccaccgaccgccccatccccttccctcaccccgtcccggacccccggctcagccttgccatagtcaccctcgccgacgaggacgccggcgggccgggcgcgcgccggtccttccgcggggtgctggcggcatccgcgcgggacaaacgcgcctacgcggcagcgcacggggatagcgctcgcgcgctccccgcctctgccgtggaccccagccgcccgcccaggtggagcaaggggctcgcgctccgggcccacctgcggcaccaccactgggtcttctggaacgacgcggtacactgggtactaacccg

SEQ ID NO: 29712 - DNA, 605 bp, Zea mays
  Clone ID: MRT4577_127108C.1
gccggcctgcgtacctcgcgccgcggaggcgacggccaggcacctcaacccctggcgagtggcgatggcatgcgatcccggcctcgccgctccgccggccacctataccacctccgcctccgccggctcctcttcctcctcccgttcgctctcctcctcatcctcctcgcgcgcctccccgcgctcctccgccgcgccaacgcacacggccgccagtgcatgccagccgccaccgaccgcctcatccccttccctcaccccgtcccggacccccgcctcagccttgccatagtcaccctcgccgacgaggacgccggcgggccgggcgcgcgccggtccttccgcggcgtgctggcggcatccgcgcggaacaaacgcgcctacgcggcggcgcacgggtatagcctcgtcgcgctccccgcctccgccgtcgaccccagccgcccgcccagctggagcaaggtcctcgcgctccgcacccacctccgctaccaccactggctcttctggaacgacgcggatactctggtttctaacccggaaatcccgctggagaggattttattttcagtgaccggtcctagtgcttttggtgcgtgacctga

SEQ ID NO: 29713 - DNA, 262 bp, Zea mays
  Clone ID: MRT4577_127109C.1
ctcgagccgctcccatctctccccctctccctctcgtggccacgactgccgctgccgcactacgccaggtgtccaagtcatctccagcccattcgccggcgacgagcaccccactagatcgaccgagatatgacggcctgtggcatctaggggacgagctccgcgggcagccccaggtggtagaggaccgccagttatcgctcatgaagaccaaactggcagaaatcaccatgtccaggggcgataagatgaacgatctcga

SEQ ID NO: 29714 - DNA, 251 bp, Zea mays
  unsure (1)..(251): unsure at all n locations
  Clone ID: MRT4577_12710C.1
cgacgaagctcggaacncggctcgagcccgcgggaaaccgccgtttaagcacagacgagaaaccacacaggcggggcacggacaagagacgggcccgagccgccccagcaggcagagaccacgcgccagcagagaacgcccaagccgagganacgccggccaaaacagcccacacgcaaagagaccagacgacccaaggcaagggcaagggcggagacgaggcccnaagaggaggcggggagaaaaagcac

SEQ ID NO: 29715 - DNA, 1264 bp, Zea mays
  Clone ID: MRT4577_127110C.1
ccggccggggtcgccagtttcgttccgctgcagcagcggcagcgctcccctcctcgacgccgcggcttctcctcatcctcgcccgctccgtccgctgactgaaagtggtcaacacagaagaaggtcgccatattgttaagttaaaagttggatcattggaataatgccgccccacaagatcgagactgggcatcaagatgtggtgcatgatatcaccatggattactacgggaagcgcctagctacagcctcctctgataacacaataaagatcattggcgtaagtggaaactcgcaccagcagcttgcaaccttgagtggacaccagggcccagtatggcaagtcgcgtgggctcatcccaagtttggttccatgcttgcatcctgcagctacgacggccgggtgatcatctggaaggaaggaagcaagcctgatgaatgggcactggcacacacctttgctgagcacaagtcctcggcgaactccattgcctgggcgcctcatgagctgggtctatgcttggcttgtggttcatcagacgggaacatttcagtcttcgctgctcgttcggatggaggttgggacaccacacgtattgaccaggcacatccggttggtgtgacctcagtttcctgggctccagcaatggcaccaggagctctaatcagcgcaggatcttctggccagtttgagtatgttcaaaaactcgcttctggtggctgcgacaacacggttaaggtgtggaagctcacaatgggagttggcggatggactgtttccctgccctacagatgcacaaggactgggtgagagatgtcgcgtgggcccaaaccattcggctcgagggacggaacggtcgtcatctggacagcagcaaaagaaggtgagcagtgggacggccgggtgctgtatgatttcagaacccccgtttggaggctgtcgtggtcactgactgggaacatactggcggtttccgacggcaacaacaatgtgaccctgtggaaggaagctgtggatggcgaatggcagcaagtgacgactgttgagccataggtccataggtctctcgagttatttctcgcctgtattttctaaataataattgtagttttcgtgtaaggtaaagttatgccctttgggtagcacgtgggactgtttgtggttcacagctgttggcaaggcacattgcacgagacatggtttcaggctcgggcaaaagtgaacaattaacttgttatacagtccattctgtttattcagtgc

SEQ ID NO: 29716 - DNA, 569 bp, Zea mays
  unsure (1)..(569): unsure at all n locations
  Clone ID: MRT4577_127111C.1
ccgtcctcccctccgcctccgcctccgcccccgcccccgaccacgcccactcctcgctgccaccactcctgtcacctcttcccgcgccgacggagacgccatggaccccgacgccacgtgggggctaaccccgctcgcgggcgccgacccggagatctacgacctcctggagcgcgagaaggggcgccagcggagaggtatccagatcatcgcctccgagaacttcacctcctntgcgacgggatggaggtgatcgggtccgtgctcactaacaaggactccgagggcatggccggagcccgctactactgcgaggacgacctcgtcgacgagatcgagaacctctggcggctgcgcgcgctcgcagccttacacctggactgcgcgtgctgaggcgtatacatgaagacctactgagtctcccccgacgaattacgcggctacacagggttgctcaacacgtgcgaccggatcatggcgatcgaccttcccatcgcgaggacgcctcacgcacggttactacacggacactacataagaagatctccgccacctgcaatgtactgttg

SEQ ID NO: 29717 - DNA, 759 bp, Zea mays
  unsure (1)..(759): unsure at all n locations
  Clone ID: MRT4577_127112C.1
ataccagttcgccgcccctagataatctctcctctccagggacggcaggccgtgccgtgccgtcacgacagaccagaccagagagagctagtgcgtgccaacgcgcggtgggaggacgatggagcgcggcagttcctggcggctcacggtggtcgctggcacccttgtctgcgcgtccctcttctcgccgcccgccgccgcgctcaacgtcggcgtccagtacgccggcgacgacgcgcgccgccgttcctgcggtacggcaagtactgcggcatcatgtacagcggctgccccggcgagccgccgtgcgacgcgctggacgcctgctgcatgcaccacgacaactgcgtccaggcaaagatggactacctgagcacggcctgcaacgaggcgctgctggactgcctggccaagctgcgggagggcacgtccacgttcgaggggaacaggtgcatgatcgaccaggtcatcgacgtgatctcgctcgtcatagaggccgccgtcgtcgccggcagggtgctgcacaagccctagccgcacgcgccggggcgccgggcgtggtgggcgcgcagggacatgtgtagcacagcagcctgcgccctgcggttggtgggtggcacacatctttttcgtgcttggcagggtggcggcgtcctggaacgggggggccggggctgcgtcggctcacatgggcagctcgtgtcgntgtgtgcctactagctggctagctcctagtccctcagcccggnctaaaccgac

SEQ ID NO: 29718 - DNA, 303 bp, Zea mays
  Clone ID: MRT4577_127113C.1
agttagcgggcatccttttgtccttactttctgggggctatcgacacggagtaggtgataagccttcgctgtctattgccacaaacggaacgcgtagcgtgctacttataaagtgcatggatgaatgtgattatatttatccatacatacgggccttagaatgcaaaacttgggccaagcagcgctgtcattattggcgcatacactgtccacaggcttgctaacgatatgttctatggacgagatctcttcagaccaccggcaatgcttttggaatgtatgagcattgggactactctagtt

SEQ ID NO: 29719 - DNA, 1298 bp, Zea mays
  Clone ID: MRT4577_127115C.1
aaccaaaaccagcatgagggaaactttctttatacttgtacggtaatacagtgtgatagggacacgagttgcttaaaaccaaagaagctttctttaaggagtgatctccatatatcttgtcgtcggtttaggccgggctgagggactgggagctagccagctagtaggcacacaacgacacgagctgccatgtgagccgacgcagcccggccccccgtccaggacgccgccaccctgccaagcacgaaaaagatgtgtgccacccaccaaccgcagggcgcaggctgctgtgctacacatgtccctgcgcgcccaccacgcccggcgccccggcgcgtgcggctagggcttgtgcagcacctgttcccctcgaacgtggacgtgccctcccgcagcttggccaggcagtccagcagcgcctcgttgcaggccgtgctcaggtagtccatctttgcctggacgcagttgtcgtggtgcatgcagcaggcgtccagcgcgtcgcacggcggctcgccggggcagccgctgtacatgatgccgcagtacttgccgtaccgcaggaacggcggcgtcgtgcagtggtccgactcgcacgtgcggctgcacgcctgctgcttgctcgcgtcgtgacggcacggcacggcctgccgtccctggagaggagagattatctaggggcggcgaactggtctcactcaactgcagttgcggtgcgggcttgcggcagtggctggccaggccaggaggtggacagaaatgggggagttggcggatggactgtttccctgccctacagatgcacaaggactgggtgagagatgtcgcgtgggccccaaacctgggccttccaaagtccaccatcgccagcgcctctcaggacggaacggtcgtcatctggacagcagcaaaagaaggtgagcagtgggacggccgggtgctgtatgatttcagaacccccgtttggaggctgtcgtggtcactgactgggaacatactggcggtttccgacggcaacaacaatgtgaccctgtggaaggaagctgtggatggcgaatggcagcaagtgacgactgttgagccataggtcctctcgagttattcctcgcctgtattttctaaataataattgtagttttcgtgtaaggtaaagttatgcccctgtgggtagcatgtgggactgtttgtggttcacagctgttggcgaggcacagtgcacgagacatggtttcaggctcgggcaaaagtgaacaattaacttgttatacagtccattctgtttattcagtgcctttcgttcc

SEQ ID NO: 29720 - DNA, 974 bp, Zea mays
  Clone ID: MRT4577_127116C.1
ccggccgggcgacgccgcggcttctcctcatcctcgtcccctccgtccgctgactggaagtggtcaacacagaagaaggtcgccatattgttaagttaaaagttggatcatcggaataatgccgccccacaagatcgagactgggcatcaagatgtggtgcatgatatcgccatggattactacgggaagcgcctagctacagcctcccctgataacacaataaagatcattggcgtaagtggaacctcgcaccagcagcttgcaaccttgagtggacaccagggcccagtatggcaagtcgcatgggctcatcccaagtttggctctatgcttgcatcctgcagctacgatggtcgggtgatcatctggaaggaaggaagcaagcctgatgaatgggcactggcacatacctttgctgagcacaagtcctcggtgaactccattgcctgggcgcctcatgagctgggtctatgcttggcttgtggttcatcagatgggaacatttcagtctttgctgctcgttctgatggaggttgggacaccacacgtatcgaccaggcacatccagttggtgtgacctcagtttcctgggctccagcaatggcaccaggagctctaatcagcgcaggatcttctggccagtttgagtatgttcagaaactcgcttctggtggctgcgacaacacggttaaggtgtggaagctcaacaatgggagttggcggatggactgtttccctgccctacagatgcacaaggactgggtgagagatgtcgcgtgggccccaaacctgggccttccaaagtccaccatcgccagcgcctctcaggacggaacggtcgtcatctggacagcagcaaaagaaggtgagcagtgggacggccgggtgctgtatgatttcagaacccccgtttggaggctgtcgtggtcactgactgggaacatactggcggtttccgacggcaacaacaatg

SEQ ID NO: 29721 - DNA, 1408 bp, Zea mays
  Clone ID: MRT4577_127117C.1
gaaggagcatgtgcggacaagctcggtttgatgggcttgatccaaaagcccgcataggctgagcaccgtctagtcgtcgccagtttcgttccgctgcagcagcggcaagcggcagcgctcccctcctcgacgccgcggcttctcctcatcctcgcccgctccgtccgctgactggaagtggtctacacagaaggttaccatattgttaagttaaagttggatcattggaacaatgccgccccataagattgagactgggcatcaagatgtggtccatgatattgccatggattactacgggaagcgcctagctacagcctcctctgataacacaataaagatcattggcgtaagtggaacctcacaccagcagcttgcaaccttgagtggacaccagggcccagtatggcaagtcgcatgggctcatcccaagtttggttccatgcttgcatcctgcagctacgacggccgggtgatcatctggaaggaaggaagcaagcctgatgaatgggcactagcacacacctttgctgagcacaagtcctccgtgaactccattgcatgggcgcctcatgagctgggtctatgcttggcttgtggttcatcagacgggaacatttcagtcttcgctgctcgttctgatggaggttgggacaccacacgtattgaccaggcacatccggttggtgtgacctcagtttcctgggctccagcaatggcaccaggagctctaatcagcgcaggatcttctggccagtttgagtatgttcagaaactcgcttctggtggctgcgacaacacggttaaggtgtggaagctcaacaacgggagttggcggatggactgtttccctgccctacagatgcacaaggactgggtgagagatgtcgcgtgggccccaaacctgggccttccaaagtccaccatcgccagcgcctctcaggatggaacggtcgtcatctggacagcagcaaaagaaggcgagcagtgggacggccgggtgctgtatgatttcagaacccccgtttggaggctgtcgtggtcactgactgggaacatactggcggtttccgacggcaacaataatgtgaccctgtggaaggaagctgtggatggcgaatggcagcaagtgacgactgttgagccataggtcctctcgagttattcctcgcctgtattttctaaataataattgtagttttcgtgtaaggtaaagttatgcccctgtgggtagcatgtgggactgtttgtggttcacagctgttggcgaggcacagtgcacgagacatggtttcaggctcgggcaaaagtgaacaattaacttgttatacagtccattctgtttattcagtgccttttcgttcccaaaaaaaaaaaaaaaaaacgcgagaccggcacgagctcgtgc

SEQ ID NO: 29722 - DNA, 314 bp, Zea mays
  Clone ID: MRT4577_127118C.1
ccggcccttcccgggccgccctgtccttgcctttgtcccttgtcggcgctggcgccgggtctgggctgactcgccggcgccggtccagctccgtggcgcctacctcgccggcgtcggtgtcgtggtcctcctcgctgccttcttcctcccggtcgccgtgtcggcctgcgcgcgacttaactcattggtgcgagacatttgccaagtggtgggagagcggctatgggattgaaggcatgcctcatataacaggtgctggtgcgctcactcttgggctgaaggcggtggggagtgtggctttctggcggtaagtg

SEQ ID NO: 29723 - DNA, 1690 bp, Zea mays
  Clone ID: MRT4577_127119C.1
ggccgcttttttttttttttttttgcttaatcgaagtacacgctctgtattattcatcatttgcaacagcgtaagctacacttgtgtggactgtagtgtgtcgaatacggattctccaagaaaccaaaaccagcatgaggaaactttctttatacttgtacggtaatacagtgtgatagggacacgagttgcttaaaaccaaagaagctttctttaaggagtgatctccatatatcttgtcgtcggtttaggccgggctgagggactgggagctagccagctagtaggcacacaacgacacgagctgccatgtggtttcgttccgctgcagcagcggcagcgctcccctcctcgacgccgcggcttctcctcatcctcgcccgctccgtccgctgactggaagtggtctacacagaaggttaccatattgttaagttaaagttggatcattggaacaatgccgccccataagattgagactgggcatcaagatgtggtccatgatattgccatggattactacgggaagcgcctagctacagcctcctctgataacacaataaagatcattggcgtaagtggaacctcacaccagcagcttgcaaccttgagtggacaccagggcccagtatggcaagtcgcatgggctcatcccaagtttggttccatgcttgcatcctgcagctacgacggccgggtgatcatctggaaggaaggaagcaagcctgatgaatgggcactagcacacacctttgctgagcacaagtcctccgtgaactccattgcatgggcgcctcatgagctgggtctatgcttggcttgtggttcatcagacgggaacatttcagtcttcgctgctcgttctgatggaggttgggacaccacacgtattgaccaggcacatccggttggtgtgacctcagtttcctgggctccagcaatggcaccaggagctctaatcagcgcaggatcttctggccagtttgagtatgttcagaaactcgcttctggtggctgcgacaacacggttaaggtgtggaagctcaacaacgggagttggcggatggactgtttccctgccctacagatgcacaaggactgggtgagagatgtcgcgtgggccccaaacctgggccttccaaagtccaccatcgccagcgcctctcaggatggaacggtcgtcatctggacagcagcaaaagaaggcgagcagtgggacggccgggtgctgtatgatttcagaacccccgtttggaggctgtcgtggtcactgactgggaacatactggcggtttccgacggcaacaacaatgtgactctgtggaaggaagctgtggatggcgaatggcagcaagtgacgactgttgagccataagtccataggtctctcgagttattcctcgcctgtattttctaaataataattgtagttttcgcgtaaggtaaagttatgccttgtgggtagcatgtaggactgtttgtggttcacagctgttggcaaggcacagtgcacgagacatggtttcaggctcgggcaaaagtgaaaaaataacttgttatacagtccattctgtttatttagtgccttttcgttcccatgtttaattcgttgttcactgaggtgttcatatatcagttattgtattcaggataatggttaattgaagacttgaatcaaaaaaacaacccc

SEQ ID NO: 29724 - DNA, 650 bp, Zea mays
  Clone ID: MRT4577_12711C.1
cctcgggctcgccggagggtacgccggcccatatacactgaggagtgaggagcacaattcccagaagattcgacgttccacgggctccggcggcggcaggaacgcctcccgatttcgacggcagagcgagagagcgatggcgctgactaacttcatcgtgacggtggccgtggttggcgcgggggtgcttctcttcaccaccgacatccgcaggtctggcgccctcttccgccgcaacgcgcgccagctccggcagtggctcgaggaggacacggcctccgccgcgtccaagtctgcaaaagaagcagctcaaaagaaactcgactcgacggtccccaaggagaagccaaaggaagatagccactgattggagctgtttatatgaacggtataacccctatttgaagtattgcaagttctgttttctacagttactgcgatagaaacttgtagctctcaagtaggtgcacggcaagattatgtttccgtttgaacatcggcctctgtggaacagctagctgaatgttggtattatgtcgtgtgcttatatggatccgaagcacttcgctaatctacacgtagctcaaatctttgtggtcgaaaaaaaaaaaaaaaaaagaaaaaaaaaaaaaaaaaaccacccccccacc

SEQ ID NO: 29725 - DNA, 125 bp, Zea mays
  Clone ID: MRT4577_127120C.1
cccacgcgctactccaactatgaaatctgtttgcaccccacagacattaagacgccctaggagtgcattataaaatgtcttgtgactcataaaaactcacatgttacttcttcctttaatatcaa

SEQ ID NO: 29726 - DNA, 349 bp, Zea mays
  Clone ID: MRT4577_127121C.1
cgtccgccttgtcggtctggccctagccaatagcgctacccttgccagcgcgcagtcatctcaaggcacccagggcggcgtgagcctgcactacggtatcggggacggggaccagcgcctgacgctgaactacgggggggggtcgatctggacgtaccacttctgcggcaactggggcctcctcgacctgacgccggaattccgcgcttcgtactggtgggctgacggcgatcgttcgccgaccagcctctggcaactgaacgccatccccatgttccgctggtagaccggcgatcttttttttttccacacccgtatccgcgccaccgtgttctcgcgcacccgcttc

SEQ ID NO: 29727 - DNA, 383 bp, Zea mays
  Clone ID: MRT4577_127122C.1
gcgaaataaacgggcgttttgaattggctgtgaagggtctttcgagcgctatgatacagtccgaagatggatgtgcagctatctcgctcggactactacacatgattacgatgatcgggagactgtacagtacgcatgcattacatgactgggcacgcgttgacgttgttggcgctgaacatggacatgtacttgacctccggagcgcttgcgtttatcatgggctgaggtgcgctaacgacgaagcccgggggagccttcttggcgtaggcgccatccacgtatgggtaggtggggagcgtgtagggcacctatggccacatgttggcgatattgacggtggcctggactcgctccagcaccttggcgggctacacgtaccc

SEQ ID NO: 29728 - DNA, 763 bp, Zea mays
  unsure (1)..(763): unsure at all n locations
  Clone ID: MRT4577_127123C.1
attgggacctcgagccggccgggaaatctagctcatggacgccgtcagccgtctgcaatgcgctagagacctggagaggtcgacccctgcgcggaggagctcgacctctccgtcgcccaattacaggagataatccacctccatattcgtcttatctcatcttctaccactgcgagagacattctttcaagcattactcgctcatactagcgagaaatactacgtataatctcatgaccgatgagcggaatggagatcatattccaagacaaaaatatgagtcataaatgccatgagatcagactatgatatcgttaccttgaaactttccattcggtatcaacatctctcgcgcaacatatttgaacgccatttgaaagatataatgtgagatgacagaccatgagtcacctgcgcatatttccttccaggagaacaccaaggatcttatgactgcattgtttccccacagaaaccatcgcaaatgacattgcagattaagcaatgtgtttttctccatgccaaacacttccgagctagcatcaaagattgagatgaaacatttcaggttatttacatttaatagattataattcaaaacggtttatggctagccaatgaacactgaaaatgatttcatagtcacaaaataaggcctaatactggtttaggtaagtttctcacttgttagtcctntttatagagaacgctaatatggtaatactattgtcaagaagctattccaaacgagaactataatagc

SEQ ID NO: 29729 - DNA, 131 bp, Zea mays
  Clone ID: MRT4577_127124C.1
cccttctagatacgacttatcgttagtaactagtgggtccgcgcgatgtgagaccacattggacgagcaccggatctagactctctcactgtagagacgtctgagcgtcattatgaaataaaaagaggagc

SEQ ID NO: 29730 - DNA, 324 bp, Zea mays
  Clone ID: MRT4577_127125C.1
acgttcaaattgaaaaagataatgttttaattctatagagtctcagagattacattagcatgaggccgacgccaattgcagccaacacatcaggatgtgcacaatgccggcatgctatatggacccgaacatcaaagtgacattagagttgagtgtgcatccaatgctgcgctcagcttaagcctgaacctatatttccactaaatgctgcaagcttcttgagaggaagaaaacatgcacacagagcaccatggctaataacgtgacaagtataactcgccttcaaactcatgttgcctgccaaatattctgctcccgcatgat

SEQ ID NO: 29731 - DNA, 317 bp, Zea mays
  Clone ID: MRT4577_127126C.1
gaattcccggctcgacccactcgtcctaaaaaaaaaaaaaaaaaaaaaaaaaaatttaaattaaaaaaaaaaaaaaaaaaaaaaaaaaaaaaataaaaaaatacaaataactacaaaaatcaacaaataaaaaataaaaaaaaaaaaaaaaaaggccaccctttttaaaggttcaaagtttacttccccttacttccaacttattaccttttttatagggtcccctaaattaaattaattgcccgtttttttaaaacttattaactggaaaaaccttggctttaccaaatttaatcccttttaaaaaaatccccttt

SEQ ID NO: 29732 - DNA, 249 bp, Zea mays
  Clone ID: MRT4577_127127C.1
cgaatccctggcataggctttccattctttgctggatgactttacccatataaattatcggttgatattgatggcgcccaaggcggaggagatgccggctgcgaagaagccagcggtggaggagcccgctgccgcgaacgccctcggtttttttattttgcttaggcgtgctcagtgacttgtcgttccccagttgtttggaaaggttctcttgtgaaggttagagcctcgttaggtccgtgctctgtc

SEQ ID NO: 29733 - DNA, 291 bp, Zea mays
  Clone ID: MRT4577_127128C.1
cggccctggataagaaggaggtgccctgcctagtagatgccgaggtggagtccggggaggcaccccatgctttgcgttggcgtagcaggtgagagtgcgccccctgcaactgctggttacttgctccgacgactctagatatgattatatctctatctaagttgtcgtggtggttgaacagtagttctagatggccagctggctgccctacattattattgtgtggagtgtgagagagagagagaatcagatgttttttagtaccgctatatctctcgtgttatgtttggc

SEQ ID NO: 29734 - DNA, 278 bp, Zea mays
  Clone ID: MRT4577_127129C.1
ttgggaccctcgaggccggccgggatgtcatctgcaaagtgatctgagcagcgcaatatataattctcggatagtattctcgcccacggaaatcggaggacacgaacccaaactcctcgaaaatcaaaataataataaaaaaaaagcccagcccctgctttccccccaccgtcccacggacgccacgccgacacgctttttcttccctttcccgtacaacctccaaccctgccggttgtacgcgggggtcgtattaacacaataccttggagagagac

SEQ ID NO: 29735 - DNA, 271 bp, Zea mays
  Clone ID: MRT4577_12712C.1
cactacgcgaaccccgtcatcgatctcgtttcaaatccatccatcctcgtttcctccgtcccgcagcatctcaaccccatggccaagatcaagatcgggatcaatgggttcggcaggatcggaaggctgatggccagggtggccctgcagagtgacaatgtcaatctcgtctccgagaactacccctgcatgatcaccgattccatgacctacatgtcgaagagcaacactgttgctctacaggggctagagggtgctgttgcggtgatgg

SEQ ID NO: 29736 - DNA, 451 bp, Zea mays
  Clone ID: MRT4577_127130C.1
agccggccggctctgcatctactacgcgctcctccacgtcggactccccgaattgcctacccatacacaaacagaactatgacaagcgcatcacgcacaaagatcctttggttgcatgctctcaggcacggagtggaaggccaaagaacacagccaagaccatcaatcaccatccccagagacccgagagagaaaagtccctctaggcgctgagtgagagcatttcttcatccagctttatgcctagcaccaaagtagaagcgctgaaatggggcattaatgtgtatgcttagattggacaatgagtcagaaataattttatgcctaacagcaatgtatgagcagtatatagatactgtactcttctcaccctatggaggacatctagccgttacgttctccatctataccgccctgcttagaaaaagaaaaaaaaaaaacccgcggccct

SEQ ID NO: 29737 - DNA, 1194 bp, Zea mays
  Clone ID: MRT4577_127131C.1
ttatccgctttcatgtcttggattgagctttctaactcttattatagttgggtgggcggaacttcttttatttttgtaggttatgaggaacctatcagcacatagttcttcgctatgcataaatccttcatgctccatagggaatttgagtgcttcttctttattaagaattaaggtggtagtgctttcagggttaataccaaacctgccgtagagactattcatagtggtcttgtgaataaaatctaaagctttctcccctctagcctttgcttcaagccttcttcggtagatatcattcacaaaatccttgaatggtgattccattctgtcaaacagatagccgcagattgggtagaccttgtaaccgatacttacagcatactttagctcctcagaaaaatagacacctataaacctaccagttggaaatatgagcgtaccgtcactctgtttataaggtagaaatggcttgtgcatgtcagcagggcatattatgaacgctttaatgaaaccaaacatatccttcagctcaatcttggttttctttaacccaagattatttttccatctaggcttgcccgctggcatctctgataacatagaataggggtatagagaattcacatcgtaatacttcaaatgttcccccgtaggtagatatacatctgtatgaccgccgtagtatccactcctaatgaattgttcttcattgtcgtttaggatgtagatcctattcttttcactatcgtttatgtatttacgcctaaagatggagagggccagtgaagatattgttaatcgattaagtatgtcgacctgatacaaatcataatagatagcttttgcttcgagcataacagcgccgtccgcatatgtaagcctaatggctgtggttatggtaatattagctatatcgtcgtctgtttttaatctaagttgaagggtgaacttggccccaccctggatttgcggataggcatgcatattcatgagctccatataggctatactaagcgtctcagtgctagcaggtgtcgggtatggttccttgaactcctgtacagcagtgatttgtcgttcatacaaacggtaagatctggatcttcctctgtagtacttttgtaactcgttcagatatccacggaaagtattgccattttgtagagtagagcagtcatttttcaattccat

SEQ ID NO: 29738 - DNA, 472 bp, Zea mays
  unsure (1)..(472): unsure at all n locations
  Clone ID: MRT4577_127132C.1
tataccttatatctgcgggcaaagattccaacgtctacatttggaacttcgcgaactctaaagatgcaagatcggttcattcgtgcgagctgttcttctccaaagctgtaactaccgcagtaccatggccgggagtgtaccaagatgggcacacgaagccttcctacctgactgagaaatcctgcagcatgcccattttgcgccacctcggggagtgccagtccgctgagccgtggtcgttcgtggacggcagcaagggattggcgacatggcctgaagagaagttgccttctacagcaaagcctggaagcagcccgcagctgggcgactgtctctccatgatatccgccgcgtggagcacggtcatcgtgaccgccagccgcgatggcgtgatccgatcttttcacaactacggcttgcccgttngattgtgggctttgngaccggtttgngctngtcngtggagcgccgc

SEQ ID NO: 29739 - DNA, 319 bp, Zea mays
  Clone ID: MRT4577_127133C.1
atctgtgtgggttttttttttttttttggtggttttctttcttgacaaacaaagccccccgagggggggggattttaatttacttttcccaaaccccctgccaaatggccgattctttttttttccacatggtaaaattggcccagatctcccccttgggccggcccccgagggggaattataagggggcggaaatccccattgcttagggaaaccaaccccttcccttttggttttcccatccaaaaatgtaaaaacccccccctccggaagctgattattggggggcccctttcaggggaagaaaaagaaaccccct

SEQ ID NO: 29740 - DNA, 296 bp, Zea mays
  Clone ID: MRT4577_127134C.1
ggccaatgaaacccccctgaacttattggtcattccaaacaacccacactaacaggaaccatgttaagaatgcattattggtattacccaaacccaaacatcccaacccaacgtacgctgcgcaatggggggggggaaaaacaatagacgcccgtaacccccaaccaatttgaaagccaaagagccttacgcccgcccacgaatacacaggttatttacaggccaaatcccattggagggcctaacactcactcaatttgtgcccttgggggggaggccttaccccaacgggaaga

SEQ ID NO: 29741 - DNA, 560 bp, Zea mays
  Clone ID: MRT4577_127135C.1
ccccgcgtccgccccgcgtccgggcccgggccttcgagacccgcgcagttgcgtcgacaccggcccctacggcgtagggagccaatttcccgctgcgccagggtcagcctgcgccaactcgagccccgctgcagcaaccacccccagcacttgggcgacgcaccaaccccagcagaaaccgactaccctgctcgccagttccgttgtctcttccctacgaacaacaagagcggcaccatcaagggctctgctataagtgtgacgagccgtatgtctggggccacgtctgtcaacgcctcttctacttggagtcgaccgacttcattgacgacgatatcccgaccaacatctctgctacaacaggtcctcgtaaccacaatgttgtggcagggactgctccgggtggatgaattgtcaacgcctctaccccaattttcagctcgaggatgagctgttttcgcaggcaaggagagatgttatgaccgacacatgctataagagacgtcggggatcaggattatgaggcgttcaggccaagttatcattagataaggtgatag

SEQ ID NO: 29742 - DNA, 783 bp, Zea mays
  Clone ID: MRT4577_127136C.1
atgtcaccgctcgtagccccggcgacgccccgtaccccgggcgcgccggcctcagacgcgtcgccgctgcccacgatcacgctcacggcgccgccgtccaacaagcggaggcgccgcggcggggccgcgcgctcctccctgcgcgccatccgcgccgtgcgcgcgctgttccggtccctcccgatcctcgcgccggcgtgccgcttcccgggcgtcatcccgcggcacggcggcggcggcggcgggccgaggggacacggtggccacatcggcggcgcgtgccgtacgacggggacgctgttcgggcaccgcagggcgcgggtgacgctggcggtgcaggagacgcccgggagcgtgcccgtgctgctgctggagctcgccatgcagaccgggaggttcatgcaggagatgggcgccgagcacctgcgcgtcgcgctcgagtgcgagaagaagccgccgccaggcgccggacgcaccaggctgctccacgagccgctgtggacggcctacgtcaacggccgcaagattgggtacgccgtgcgccgggagcccacggaggacgacctcacggtcctgcagctcctgcgcacggtgtcggcgggcgccggcgtgctgccggccgacgccgtaggcgcccccgaggggcaggacgccggcgacctggcgtacatgcgcgcgcacttcgatcgcgtcgtggggtccagggattccgagtccttctacatgctcaaccctgacggcaaccacgggccggagcttagcatcttcttcatcaggatatga

SEQ ID NO: 29743 - DNA, 523 bp, Zea mays
  Clone ID: MRT4577_127138C.1
cccgggtccaaaacctacctcctgatctctcctcaggctcctcgaccacactctcgctagccgttcccgctctgcagtctccgggggcggacgccgaggggagatggctatcgacctgtttgcgcgccgccatgccgcgtggccttccccgccggccgctcggtggcggccacccgatcggttccctacgggggccgtgcggtcgccgccgaccaccgcgcgtagtacttatgcaggatgccgggggagctcgaggactgcgcggtattgtcggtgctgccgatgcatactgcggaggccggagacaggtttactactcctgtgagcacatcgtatagctgccgtagtctctttcaggacatcctctgttgtgactatcccgggctttaatatcagatggtactatacggtcaaaggtgataaatagctgaaagacttgctaatgacatgctgctggactcaaatgatttctatagattagtcatatgattgaacatcagtaactctacagttcatcaccagt

SEQ ID NO: 29744 - DNA, 275 bp, Zea mays
  Clone ID: MRT4577_127139C.1
atggactgaaaatatcatactagtaaggtgttactagtagaacacgatgcaggagaatcgtgctagaaaagatgtctacaacagtgagtactaccacttccgcgcgcctgagtgcagctgcgctggatgtcccccgaggccatcctggagggtgacttctctgaccacggtctgatgtctgggccttcggtgtgctgatgtgggaagtgtatacacatggagagatgccccatggtgggcaggcagatgatgaagtactggcagatctgcaggct

SEQ ID NO: 29745 - DNA, 1350 bp, Zea mays
  unsure (1)..(1350): unsure at all n locations
  Clone ID: MRT4577_12713C.1
attgggtacctcgaggccggccgggcaggggcaccacccaaaggcgggcgggctataaatcgtccctgtcactcctcgtcgcggtcctcgtccctgcgctcgacgacgacgacgacgtctcccgccgtggctccccccgcggagtcctcggacctctcgccgtccgcgtaccaccggatgctgtcgagcaccagcaggctccgcctccagggcgtgctcgccgacacgctccggggctacggggtacaccaccaccagcagcagcacttggacaggctcgccgcggtccgctatatgccgaggttcctggcctccatgcgcgtgatgcgcgcaccgcggatgctgtggaccagcagcctgcacgcgctgtttcgtccacaccggcgagctcctcggcagtccacgagtgggcgacgcccaagtcggagctcgagctgatggacgtcaaggatctgacgctagcgcatgtgaagagccacttgcagatgtacaggaccgtgaagagcactgacaagtctgcaacgacctcatcgggcgggccgcctgtggacggtggcggcgacgacgatgatctcccgagtgcccggcgggctcagtcgtcgtcgtcgtcgccagctggacgacgggacggcagcagcccgcaggcgttcaccagacaccggtcggctgcctcctcggagggcgcggcgagcctcgcgggcggcgacgacgtcgaatgctcctcctcggccgacgattccgactgcggcagggcgcgcagtgcttcgtcgtcaagagatcagttgctaccaccaagtgcaggcagtgcaggcacccttccttcagttggcgtatcatcatccactactgaggatatggagccagcttatcgatcagtaggcttgcaacaggcacccaaccatgaaatgagctgccctcctagcctggagttcaggctagggcgaccgatctggaacggagcagaacattagtagctaacactatctgcaacagcttattcaaactccactatgtaaacggtacagtctacaatgtagaacagtgcaaaacaatgttttaggtaaccatatgggtaaatgttggacacggtctaagcaacactagttacacacatgaatggcacattattagttcaacacttccactatacagtttactatatataccttgattggtccttgcatcatctagaatttaggaatgtggtgaaacgaaatgtggaattaatgatattagttttgtgttggccccaagatcgtcacaacatgaacttgctttgggttttgtttccttttttacattttggcttttgttgtggtcatataaaacaaaggntatatattgttgttt

SEQ ID NO: 29746 - DNA, 334 bp, Zea mays
  Clone ID: MRT4577_127140C.1
gtcttgcctcgtgaggctctaccacgacgttgttatcatatctgtcgtggacatcatatagcatggaggcgttaaaacatgttgggcgacaaaagaagtccctagcggaacctggacactacacgccatagtctcgctcaacttccccctttgaatgcccattgttgtcaaatatggtgcctactccatcaccaacgacctcattacagcgtagttccaagttggaaccacttataaaacaaaactcatcatggaagtagcttctgatgaagaaccatgttttacaagacctcatgtggcgcacgatatagcatgacactatttttttttggca

SEQ ID NO: 29747 - DNA, 463 bp, Zea mays
  Clone ID: MRT4577_127141C.1
ccacatcgagcgtgctataataagaagccggtgcaggcagacgggagcggtacaccataggctaggtgactcgaccgcagacataaacgtgttgcagctgatgatagttgctgggaggcaactaccttcgccagaccaagaggcaccaatgcaagcagctgaagtggcatgcataccacagggatcaccactgccaggtgtctcaggggtgacagaaaacgctgttgttgttgggatgagatggcacggaaggtccatatgcgccaagcattgttgatggaacaataatttcgcgtgatgaaggagctcgccctaggccctgccgggagactatatgctccacagtctggcttctctggacggtgccaacgtacccggtagccagactgagactactggatactcggacgtgggacgcctgcacactaatgaccactttcagcgcactgactaccaggactag

SEQ ID NO: 29748 - DNA, 1319 bp, Zea mays
  Clone ID: MRT4577_127142C.1
tcgaggggccggccgggatcaaatccggatgcacgatgatgcacccgctctgaacccaacccaccgccatttctatacccctctcgccctgcgcctcgtcacctctctgatccctctcctcttgctttgatgctttctctctccatctcgtttcccccgcctgcccagccagcgcaaaccctagcccgtactgcgaggctcttggcagcggataactggacctgtccgcatgaatcgggggagagaaactggcggtaacttacgtgaatcgggtttgtttagtggctgcgacggcgacggcggcgcagggatggaccgtaagcgcattaaggacgtgctcgagaagcacctggagaggtcgtcgccgtccacctccaggggcgtcgtgtccaaggagagggagcgcctcgctgccgggaaactgccggcgtcgcttggcaaggcggagaaggtgtctgatggtgaggaatttgaaactgacagtgaagatgaagattctgatatcagtggttctgagagcgagggcacatcctggatttcatggttctgtacattgcgaggcaatgaattcttttgtgagatcgatgatgactatatacaggatgattttaacctttgtggtctgagtatgcaggtgccatattatgattatgcacttgatctcatcttagacattgagtcttctgatgatacatacactgaggagcgaaaagaatttatcgagttgtctgcagagatactatatggattaattcatgcacgatacatcttaaccagcaagggtctagctgcaatgttggagaagttcaagaatcgtgactttggtggatgccccagagtgtactgctgtggccagccctgtcttccagcaggtcaatcggatgttcctagatcgagcacagtgaagatatactgtccaaaatgcgaagaacttaactatccaatatccatgtaccaaggcagcattgatggatcatacttcgggacgacgttccctcatcttttcctgatgacctatccgcacttgaagccgcagaagccgccacagcaatacactccaagagttttcggcttcaaacatcacaagccgtcatgacagagctgcactttcagcagaaacaccctttgcacctaggatttagggagagcaccgtggccttcaaatattgttgcctgatcgatgtacgaattcgcgaccttgggtcctgctgcaaactgctgtcaaattgtacgtatctgttttctcgtattactattgcgtaacttaggttttctcagtcccaaaaaaaaaaaaaaaaaaaaaaaaaaaaacccaaaaa

SEQ ID NO: 29749 - DNA, 334 bp, Zea mays
  Clone ID: MRT4577_127143C.1
aattgttgggacgacgagtacactcgccggcggccgccctttctttgggtgtttttttttggggagtgcgcggtaacgccccacaagatgagagaatgacatcacagttctttcacccaacacaaagtgtcactcgagcacaaatgttgcacaaaaataagaaaaaaaaaagtcgaacatgagttgcctggcccaaaagagcctgcatgttcaaacgcacggctgcttccggacatgcaacacataaggtagctaggtgagctcagcactcaactcctcatggcttgaggacggggccctcgtcccttggtaaaaacagagcgatcccttaccc

SEQ ID NO: 29750 - DNA, 1471 bp, Zea mays
  Clone ID: MRT4577_127144C.1
ctcgaggccggccgggccggggaacccaacccaccgccatttctatacccctctcgccctgcgcctcgtcacctctctgatccctctcctcttgctttgatgctttctctctccatctcgtttcccccgcctgcccagccagcgcaaaccctagcccgtactgcgaggctcttggcagcggataactggacctgtccgcatgaatcgggggagagaaactggcggtaacttacgtgaatcgggtttgtttagtggctgcgacggcgacggcggcgcagggatggaccgtaagcgcattaaggacgtgctcgagaagcacctggagaggtcgtcgccgtccacctccaggggcgtcgtgtccaaggagagggagcgcctcgctgccgggaaactgccggcgtcgcttggcaaggcggagaaggtgtctgatggtgaggaatttgaaactgacagtgaagatgaagattctgatatcagtggttctgagagcgagggcacatcctggatttcatggttctgtacattgcgaggcaatgaattcttttgtgagatcgatgatgactatatacaggatgattttaacctttgtggtctgagtatgcaggtgccatattatgattatgcacttgatctcatcttagacattgagtcttctgatggtgagattgttgttccttaaggaagttgatgcatattggtttgcctttgaatttatgatacatacactgaggagcgaaaagaatttatcgagttgtctgcagagatactatatggattaattcatgcacgatacatcttaaccagcaagggtctagctgcaatgttggagaagttcaagaatcgtgactttggtggatgccccagagtgtactgctgtggccagccctgtcttccagcaggtcaatcggatgttcctagatcgagcacagtgaagatatactgtccaaaatacgaagaacttaactatccaatatccatgtaccaaggcagcattgatggatcatacttcgggacgacgttccctcatcttttcctgatgacctatccgcacttgaagccgcagaagccgccacagcaatacactccaagagttttcggcttcaaacatcacaagccgtcatgacagagctgcactttcagcagaaacaccctttgcacctaggatttagggagagcaccgtggccttcaaatattgttgcctgatcgatgtacgaattcgcgaccttgggtcctgctgcaaactgctgtcaaattgtacgtatctgttttctcgtattactattgcgtaacttaggttttctcagtctcacactcacttgatcagagtatgtcaacctgcatgacatggtttcacgtaaaaaaaaaaaaaaaaaaggcccctagggtcctcgtgttcatgtcaatatatggccaatatgtgcacggtttctacgcacctggaaatgtgaaagtcgtgacgtcgtcgagtgt

SEQ ID NO: 29751 - DNA, 262 bp, Zea mays
  Clone ID: MRT4577_127145C.1
aacatgaaagtcttgggagatctgcttcaggggaaaaaaaggaaaaaaaaaaaaaaaaaaaaaaaaaaaaaaaaaaaaaaaaaaaaaaaaaaaaaaaaaaaaaaaaaaaaaaaaaaaaaaaaaaaaaaaaaaaaaaaaaaaaaaaaaaaaaaaaaaggggcggccgccaactagggacctcgtcaccccggaaataaatcccggcccgtaccctgcaggcttacaattttcccctatagggagcctaataaaacctgggcga

SEQ ID NO: 29752 - DNA, 382 bp, Zea mays
  Clone ID: MRT4577_127146C.1
gtgagcaaaacaaagatcggccctatggtatacaaaaaaaggaggggttacaccatttaaaaaatccagtatgcaacaaaccggggacacaaaaacggggacgaacataatgtctttaacaacccgggtttttggagggggaccatggattaaacccgaaaatcttccttcatggaactcttcccacaactgaaacagggcggacgaaaagccaaattaagccgacagaggccttaaggagcacttttaaccagggaatcctgacaagaaaacccctaccaccaatccggaggggtaaaggcaggcaccctccccggcgaaaaacaggctgcccaccggagcctagaacctttcatacaggtgaatctggtttcccctccag

SEQ ID NO: 29753 - DNA, 241 bp, Zea mays
  Clone ID: MRT4577_127147C.1
gtcaccgacgccgccgccggaatggccgcgggccggaggcaaggacgacgacgacaggaccccactacacaaagcggcacctgcacgccgccagcgtgcagaggaaagaatagaacgcgaggaggagaacccggcgggacacaggattactgcgggggccaaaaacaacgccgccgagaaaaagatggcgcgcgtggccatggaagtcaaatagcagaagcccagcagaatgcaagggcac

SEQ ID NO: 29754 - DNA, 1276 bp, Zea mays
  Clone ID: MRT4577_127148C.1
gtgcggcgctcgagcggcccggacacggggaatgtcgcacgcgcgcacactgaaatagctgtgcctctggctgcttcgtcttcctccccttccttgtcctctgcctctgctgcactctgctccacccccttttttctttcccccatccatggtgcagcttttgccggcgctggtggcgctcgcccttctcctcgtcagaccggtggcggatgcggcgatggctaaatacacgttcacagtggggagcatgcagatcagtcagctgtgcagcagcaccagcattattgcggtgaacgggcagctgccgggcccgtcgatagaagtgaacgaaggcgacgatgtcgccgtcaaggtcgtcaacaactcgccgtacaacgtgaccatccactggcatggtgtgctccagctcatgaccccgtgggcggacggcccgagcatggtgacgcagtgccccatccagcccagcagctcctacacgtaccggttcagcgtcccggggcaggagggcacgctgtggtggcacgcgcactcctccttcctccgcgccacggtgtacggcgccttcatcatccgcccgaggcgcggcaacgcctaccctttcccggcgccggacaaggaggtccccatcgtgctcggcgagtggtggaaccgcaatgtagtcgacgtcgagagcgacgccatcttggccggtcagcttcccgcccagtccgacgcgttcacagttaacggcaaaaccggcctgctgtaccagtgcgcgaacgagacgttcacggcggtggtggagcccagcacgagggtgctcctccgggtcgtcaacgccggcctcaactcgcacctcttcttcaagctggccggccacaacttcaccgtcgtcgccgtggacgcgggctacacctccaacctcaacacggacacgctcgtgctcgcgccgggccagaccgtggacgcgctcgtcaccaccgccgccgcgcccgggagctactacatggcggtgctggcgcacgacaccatgagcccgctcgcgttcgcggcgtcggacacgaccaccgccaccgcgatcctccagtacaacggcacgtcgtccaccaacccgcccgcgatgcccgccatgccgtccagctccgactccgggacggccaacgccttctacttcgggctgaggggcctgggcgcgcccgcggtgccggcgccggtggacgtgagcatgaccatcgagctgggcctcggccagctgccctgcgacccgtcgcagaccaggtgcaacgggaccgcggcc

SEQ ID NO: 29755 - DNA, 249 bp, Zea mays
  Clone ID: MRT4577_127149C.1
gggataaatctcaatcaatatattgattatttctaggaaacacatgtcggtttgagggccccattggcgagtacatctcatatgtaatctaaaaaagggacccccaaccatgggttgctgcaaggcagggttcatcaaaaaaaactggttttttggcaacaattgttgtttcttcttccggaagggagccacccatgggttaacccccgcccatggattaaataactggtggcgcttcccacccctccc

SEQ ID NO: 29756 - DNA, 785 bp, Zea mays
  Clone ID: MRT4577_12714C.1
cctcgaggccggccgggctcgattcataggtgtgaagttctttcacaagtaaacacctttccaagttcttacacagcatgttctttgaagatgcttatttcttactgtctgatatatattagtcaaatagtcctccttgcttttattttacctcgccttctagttgataaacgatgaccgggaaaaagaccacagcctcctcttcccgcggcactccaaagaaggccaagatcgaggatgaggaagaggcggggttggaaaatgaggaagaggtgactgtgacactatccgtggagaaagacgcgctggagtgcgatatctgctgcctacccttccagtccgaagtttttatgtacaagaacggacattctggatgtgcaaagtgctgcatccgcagagacggtaagtgctggacctgctccgagcgcattggcgacatgcgttgccgtccgctcgagaagctcctggcggcggcgaccacctcctgcgtgttcaagagcaacggctgctacgacgccgtcagctacctcgagagggcgacccacgaggagacatgccagcgcgcgccgtaaagtgccccatcgacggctgcgcctatagcggcctgcggctcggccaccacgtcgcacaggaccacggccgccgcgatggcctcgcctccatcgtctttatctccggaaaggcgtgggccgaccgtacgcaagggacgagccgttccgcgtccctgctgcaacggaccaccgaccgcgtgttcctgctgctcacggtcacgatttgctaagggg

SEQ ID NO: 29757 - DNA, 305 bp, Zea mays
  unsure (1)..(305): unsure at all n locations
  Clone ID: MRT4577_127150C.1
ctgagcaggcccctcatcctattcttggcccgccggcgccgttggggggctgcgttttaatccatgctgctgtcccactcccagtgccagcttatgcgctgngatggtccgcctcctgcctcgaatccgcgcagctccttggagctgatgcgccactccctggccaccgttgccgtcgtggaggtcgccgggaggttgtcggtcctctaccatcttgncgtcgcccccgctgagatcggcgctgctcgccgtgagctgggtgtcctttcttctcatggccgcctctgccgtcgggtcttcccccg

SEQ ID NO: 29758 - DNA, 329 bp, Zea mays
  Clone ID: MRT4577_127151C.1
attacaccttttgccgagggggccgtcccgagccctatagctcctatcgtgtcgggtgctgatgaaaaaccaccaccatgaagtcagcatggaaaacccgtgtacggactgccaaatgatgctggtgatcttggacgaccaagaactacctgccttatatgaccgaaggatctcccacgaggccagcggtgaggctctgggcgaggagtttaaaggttatgtctcaaggaaccgggaggatgggacaaacagggcgtaccaatgaagcatggaggattgacatctgtgtgtgctcagactctatcttaacagaggcgatgaatgattgc

SEQ ID NO: 29759 - DNA, 203 bp, Zea mays
  Clone ID: MRT4577_127152C.1
cgcggacattgaaatttattcttattaaccacacattgacggctcctcagcggtggcgggaaccgctgtagctgaagatatagtgatccttaataacgcctgcctcagctgcactgtgtgtggtgacttactccgaatgtttggcgaactcgtgaacataaacaaagggaggtctgattcataactgcttttgaataccacag

SEQ ID NO: 29760 - DNA, 939 bp, Zea mays
  unsure (1)..(939): unsure at all n locations
  Clone ID: MRT4577_127153C.1
ccacgccgtccgcccacgccgtccgngtgccgccgagccgagcgggagtagcgcgtcaggcaatggctccggcaccggtggccgctcccgtggcttcggtctcccgcgcggcagctgcgctcgcccccgccggcgccgtccgctccgccagggtagcctccctgcaccctttccactcttccaatccgccaggcagaggcggcgcttggcggcacggagcagcacctcggagagcagcacggatgactcccaatccccgaaacaagagaaggcgccgttcgggtacacgaggaaagacgtgctgctgatcggcctcggcgtcaccgccttcggcgtcggcctcaagtacgggctcgagctcctgggagttgaccccttgcaggccggcaacgtcgtgcagctgctggtggtgctcgggatgacggtggggtggatctccacctacatgttccgggtggccaacaaggacatgacctacgcgcaccagctcagggactacgagaagcaagtcatggagaaacggctggagagcttgtcggaggctgagctgcaagctctgctcgagcaagtggaggaggagaagcagcgcgtgcctcaggtcccggaagagcctaacgctattaccttcaggaagaaatgatgatcgttctattatctgccaaatggacaccgacctagcttgtttatagcatagcttcgccttcaatagctagctccatcgatattttaagatctgtacaatacgccccgctaagccactagtgctgtcaaacatgaaattatccattttctgccgcgcgccgttatgggacaataccgtagcaccaagaaccgatccgttttttgagatatcattgtcgttgtaactatatcatccgcaaagctacagtttgggaggtcttcaaaaaaaaaaaaaagggcggccgccaccgcggtgga

SEQ ID NO: 29761 - DNA, 245 bp, Zea mays
  Clone ID: MRT4577_127154C.1
gtgtggtgtgttttttgagcttttgatcgattgataagggtcaaaccctcaatctgcttgcgtgcgtgctcatcgaactgcctagctatagtctaagtgaggagagagagaggactgtgcaaataatggggtttcgatcattagggggggggggggagcaaatgaacaatgagaagagtaataatcctaatgaaaaaaaaactgggggggtgttgacccacccaacccaactgggggaaggaaaa

SEQ ID NO: 29762 - DNA, 677 bp, Zea mays
  Clone ID: MRT4577_127155C.1
ctccaaaaagcgggagtagcgcgtcaggcaatggctccggcaccggtggccgctcccgtggcttcggtctcccgcccggcagctgcgctcgcccccgccggcgccgtccgctccgccagggtagcctccctgcaccctctccactcttccaccaaaatcgtgctgctgccaccacggaccggcctgctcagatccgccaggcagaggcggcgcttggcggcacggagcagcacctcggagagcagcacggatgactcccaatccccgaaacaagagaaggcgccgttcgggtacacgaggaaagacgtgctgctgatcggcctcggcgtcaccgccttcggcgtcggcctcaagtacgggctcgagctggtttactcgccgggaaacgctacgcgcagctcctgggagttgaccccttgcaggccggcaacgtcgtgcagctgctggtggtgctcgggatgacggtggggtggatctccacctacatgttccgggtggccaacaaggacatgacctacgcgcaccagctcagggactacgagaagcaagtcatggagaaacggctggagagcttgtcgggagctgagctgcaagctctgctcgagcaagtggtaggaggacaaacagcgcgcggcctcaggcccgggagaagctaacgctattaccttcaggaaaaa

SEQ ID NO: 29763 - DNA, 1265 bp, Zea mays
  Clone ID: MRT4577_127156C.1
ctccgagtaagcgtgcttgggcgagagtagtactaggatgggtgacctcctgggaagtcctcgtgttgcattcctggggtacctcgaaaaaaaaaaaaaaaaaaagcccaggaggacgtgcgcacgcgcggctcggcagcgtcctctcgtcagccgcgtccaggataagataaagagctgcccgggtacttactggcgtgcggccgagccaagcgggagtagcgcgtcaggcaatggctccggcaccggtggccgctcccgtggcttcggtctcccgcccggcagctgcgctcgcccccgccggcgccgtccgctccgccagggtagcctccctgcaccctctccactcttccaccaaaatcgtgctgctgccaccacggaccggcctgctcagatccgccaggcagaggcggcgcttggcggcacggagcagcacctcggagagcagcacggatgactcccaatccccgaaacaagagaaggcgccgttcgggtacacgaggaaagacgtgctgctgatcggcctcggcgtcaccgccttcggcgtcggcctcaagtacgggctcgagctcctgggagttgaccccttgcaggccggcaacgtcgtgcagctgctggtggtgctcgggatgacggtggggtggatctccacctacatgttccgggtggccaacaaggacatgacctacgcgcaccagctcagggactacgagaagcaagtcatggagaaacggctggagagcttgtcggaggctgagctgcaagctctgctcgagcaagtggaggaggagaagcagcgcgtgcctcaggtcccggaagagcctaacgctattaccttcaggaagaaatgatgatcgttctattatctgccaaatggacaccgacctagcttgtttatagcatagcttcgccttcaatagctagctccatcgatattttaagatctgtacaatacgccccgctaagccactagtgctgtcaaacatgaaattatccattttctgccgcgcgccgttatgggacaataccgtagcaccaagaaccaaatccgttctttgagatatcattgtcgttgtaactatatcatccgcaaagctacagtttgggaggtcttcagcattgcctgtttgatcttccattggttattggtcgaaaaaaaaaaaaaaaaaagcggaaaaaataaaaaaaaaaaaataaaaacaaaatacaaaaaaacaaataaaacacacaaaaacgaaataacactaaaatataccaaagggggg

SEQ ID NO: 29764 - DNA, 1242 bp, Zea mays
  unsure (1)..(1242): unsure at all n locations
  Clone ID: MRT4577_127157C.1
cattgggtacctcgaggccggccgggacttactgtcgtgcggtcgagccaagcgggagtagcgcgtcaggcaatggctccggcaccggtggccgctcccgtggcttcggtctcccgcccggcagctgcgctcgcccccgccggcgccgtccgctccgccagggtagcctccctgcaccctctccactcttccagtacgtgccactgcaactctcttatctttctcggcatcttgcgctggttaatttggtcggaatccaattctttttactgcttcgtgctccccccctaagccaaaatcgtgctgctgccaccacggaccggcctgctcagatccgccaggcagaggcggcgcttggcggcacggagcagcacctcggagagcagcacggatgactcccaatccccgaaacaagagaaggcgccgttcgggtacacgaggaaagacgtgctgctgatcggcctcggcgtcaccgccttcggcgtcggcctcaagtacgggctcgagctcctgggagttgaccccttgcaggccggcaacgtcgtgcagctgctggtggtgctcgggnatgacggtggggtggatctccacctacatgttccgggtggccaacaaggacatgacctacgcgcaccagctcagggactacgagaagcaagtcatggagaaacggctggagagcttgtcggaggctgagctgcaagctctgctcgagcaggtggaggaggagaagcagcgcatgccgccggtcccggaagagcctaacgctattaccttcaagaagaaatgaggacaccgttcttccttcgacatgtttatagcgtagcttcattagctagctccatcgatctcttttaagatctgtacaatacgctaggccactagtgctgtcaaacatgaaactatccattctctatcgttacgagataacagcattgcaccaataacaaatatcctttctttgaggatatcacggcttacaattgaacgggctaatatgtcattgttgttactaaaaaaaaaaaaaaaaaaaaaaaaaaaaaaaaaaaaaaaaaaaaaaatggggggccgccctttttttttttttgtaacaatgtcgtccaagctcatgcctggttggcctattgcagaatgcatttttcaatgcattctcaccgattgtgcgccgaaaacactgggaaaacccagcttattcccattttaaaaaattttgcagaacatcaccttttttaaaattggggt

SEQ ID NO: 29765 - DNA, 408 bp, Zea mays
  Clone ID: MRT4577_127158C.1
gtgggggggttttttttttttttttttttttatttttttttttttttttttttttttttttttttttttttttttttttttttttttttttttttttatttttcctcccttggggttggttgtttcttttttacttattgcctctttttgggggggggggcgggcttcgttgctagtcggtggtttcattacatttttacttcaggacttagttgcctgaggagttgaaaccgttggccgttggtttttaagggcaggggcctggctgctgtagctgtaggccacacatagccgcaagctgctggttttactggggggccatcagcgccgcgagctcgctctccggctgctgctgcaggaagggctgcaggaccaccccgcttggtgcctggggccggggctgcgggt

SEQ ID NO: 29766 - DNA, 614 bp, Zea mays
  Clone ID: MRT4577_127159C.1
cgggccccccctcgggtcgacccacgcgtccggcgggagtagcgcgtcaggcaatggctccggcaccggtggccgctcccgtggcttcggtctcccgcccggcagctgcgctcgcccccgccggcgccgtccgctccgccagggtagcctccctgcaccctctccactcttccagtacgtgccactgcaactctcttatctttctcggcatcttgcgctggttaatttggtcggaatccaattctttttactgcttcgtgctccccccctaagccaaaatcgtgctgctgccaccacggaccggcctgctcagatccgccaggcagaggcggcgcttggcggcacggagcagcacctcggagagcagcacggatgactcccaatccccgaaacaagagaaggcgccgttcgggtacacgaggaaagacgtgctgctgatcggcctcggcgtcaccgccttcggcgtcggcctcaagtacgggctcgaggtgaggtgccggtgccgccgccgtgtctgtccatgttcactgcaaaagtttcgctcgtttttcatctgcagctggtttactcgccgggaaacgctacgcgcagctcctgggagttgaccccttgca

SEQ ID NO: 29767 - DNA, 445 bp, Zea mays
  Clone ID: MRT4577_12715C.1
cccacgcatccggaaatctatatggtttcttccatttgatcagagtctcgagagcaatgatgcaactgaccgggctaaaatatttttccatggatggatcatgcggcctctaacagaaggtgtatattcagacatcatgagggaagatgttggtgataggcttccagatttcactgaaacatatgccgcacttgtccatggttcatattatcttcttggtctcagactattacgtcactcattacgcccattagaatcatacgattgtgccttcggacgtatacactgccttgatggactcacgcataactctcacatcaaattatgtatctggtcattctcctggtccaccgttcattgcacctagttactagttcccaaaaagcatttactacgtaatggattacttcagaatcacttacggtgaccctttaatatatgtcac

SEQ ID NO: 29768 - DNA, 265 bp, Zea mays
  Clone ID: MRT4577_127160C.1
ggcatcgatgagactactactgccatggttgtatgagagggctactgcgcgctgcgcctcccggctactacggggaggtgtcagcgcagactgtctcccgtcgtccgatcgaatcgatgcgccgtcgagggcgagaataagatgataaccctcaaaagctccgatggcgaggagttcgaggtggaagatgcggtggaaatggactcgtatccatgcgtccatgatcagggatgactgagacgacaatggtcttcctcttcctaac

SEQ ID NO: 29769 - DNA, 735 bp, Zea mays
  Clone ID: MRT4577_127161C.1
attgggaccctcgaggccggccgggacttactggcgtgcggccgagccaagcgggagtagcgcgtcaggcaatggctccggcaccggtggccgctcccgtggcttcggtctcccgcccggcagctgcgctcgcccccgccggcgccgtccgctccgccagggtagcctccctgcaccctctccactcttccaccaaaatcgtgctgctgccaccacggaccggcctgctcagatccgccaggcagaggcggcgcttggcggcacggagcagcacctcggagagcagcacggatgactcccaatccccgaaacaagagaaggcgccgttcgggtacacgaggaaagacgtgctgctgatcggcctcggcgtcaccgccttcggcgtcggcctcaagtacgggctcgaggtgaggtgccggtgccgccgccgtgtctgtccatgttcactgcaaaagtttcgctcgtttttcatctgcagctggtttactcgccgggaaacgctacgcgcagctcctgggagttgaccccttggaggccggcaacgtcgtgcagctgctggtggtgctcggatgaccggggggggtggatctccacctacatgctccgggtggccaacaatgacatgacctacgcgcaccagctcagggactaccagaagcaagtcatggagaaacggctggagagcttgtcggatgctgagctgcaagctctgctcgagcaagttgaggacgagaa

SEQ ID NO: 29770 - DNA, 351 bp, Zea mays
  Clone ID: MRT4577_127162C.1
gcagtgcgcgcccatggttttcgcgctgctcgtgatcccggagtcgccgcggtggctggtcatgcagggcagagccgacgaggcgcgcgccgtgctcctgagggtcaccgacaccgaggacgaggctaaggagaggctcgccgagatcgaagctgctgctgttgtcgccacgacgggcgccgccggcaagcacggggacaggaacaggacggtgtggcaggagctgtcgaggccgtcccctgagatcgcccggatgctcgtcaccggagtaggcattcagtgcttccagcagatcacgggcattgacgcgctggtgtactacagcccgaccatattccgggacgctgggat

SEQ ID NO: 29771 - DNA, 593 bp, Zea mays
  Clone ID: MRT4577_127163C.1
cattgggaccctcgaggccggccggggtgcttgcatcacatgaacccgctgtctctcctccacgatctatctcggctgtctcccggatgctcccatggcctcatcggcgcctccctccctcaccaccaagatgcgctctcctcctgtgaaccaccaatcccataccagcacaggactacgactccttgccatagcgactcactactgatcgcaccaatgaactcatgatgagagccacttgcctccagagttcgctgcagcgggagtatgaacaagtgcgccattgtcatccatcacgacgtgccgttctgccgacgagatagctcatcactttcatcactgcgatcgtgagcgcgccgttggacctggccatgtcgtcaatccccgaccgtggtgctggtgccagaggcacccctggatggaggagttcggaaacaccatgggctgccaccgcctgcacgctgtgacggtgagacacagaggtgtggtacaccgtgatgcatcccataatgcagctggtccataaccgactaacagatgtgcgcgttccggacgtaaatctccatctacggcttcatctgctcagcagtggt

SEQ ID NO: 29772 - DNA, 478 bp, Zea mays
  Clone ID: MRT4577_127164C.1
tagcaagccagcaggcagactcccggtagtcattgcctgggatgcggtttagtgggctgaggcaggggagattgagcccaggcgcagcaagctcttcccccctttcttttttttcttttatttctttccaattcaaattttccatttaaaatttaaattccaatcctgtgtcaaatttatccccaaataaaaaaaatgcaatttgaacatatccaaaaatgagaggaatttatttatttataaattttatttggtgttgtataatattcttttcgttcctctttttcctattttcctttcaatttcaagatttaaggattcaaactcctattttgaacttcaaatttccaaatatcaaaattcctactaatgtgaatatgtactctattgtttagaatatgattatttattattattatttttattccctggcatttatttatttatggaaggaataaatgggttcatttaaaatttc

SEQ ID NO: 29773 - DNA, 394 bp, Zea mays
  Clone ID: MRT4577_127165C.1
atatgggacaaaaaggtttcatttttataatttaaaaacccgggcccgattaaaagccacccaaggcgaaaaccgggggcccgcaaagcaaacccaagggccttggggggctgctctgctagcggagtacgggccacaacatgtcacgtccgagggacccgacgaccaccacgacaaacggggggaccctaaaccaagggatcactagggggggcaagaaccacttttttattatgggcccccctgatgacccacacctagctaggacatttttgctacaacaacaactgcatgctgttgatggccaccctgccatccaaacgagctacctccactatgggtccatcgaacaattgatcttggggcacccaaccggggggctgatgggcccccc

SEQ ID NO: 29774 - DNA, 253 bp, Zea mays
  Clone ID: MRT4577_127166C.1
tggagaaagaaatgatatccaatcacatgcttttattggttcacatggaaaattcagggcgggctaacatgcttgtagatgaccaattcaaagattcgggtcggatgtattcattgttccgaagggttccagatcgactatcaactattagagatgccatgacttgttacttatgggccacaagttagcagtctgtgacaaatcaaaatcgtcggtctcagctatcgaacttaatgtgagcattgtcaaatgc

SEQ ID NO: 29775 - DNA, 624 bp, Zea mays
  Clone ID: MRT4577_127167C.1
tcggctcttcgccagggttgaagcaacatgaatccgccgcacccagagccgggccttccccgccgccaccaccacatggtccacctccacctcgacccgcgccaccaccaccacgtccacatccacctccgctgctgccatcatcaccaccacggcacccacctgctcgctcctgcgccggcggcccgcctccacgacaaccagcagcggcacccggctcccgtactcttcccctacacccacccgaacccaagcgcggcgcctgggcagccggagccgccccgcgccgccgtaagggaggacgtggaggatttggatcccgagccggggctgctgcacgcggaggaggaggaggaggaagacgaggaaccggtgttcgtgcttacggacgagtgggcggagttcttcgccaaatccgaggccaagagaagactgggtaatcgatcaccacttgctggtcatgcgtctctcagtggggcgatgcttttgttctttctgtctcttcgaacttacaaactcaaacgggttgatttcttggcgtcgcaatggaaccgtgtcgaacgacagctaaacagcagaagaagaagagccggaagtgatctgatgggtctgggccatcatcag

SEQ ID NO: 29776 - DNA, 928 bp, Zea mays
  Clone ID: MRT4577_127168C.1
ccggccgggatacttacctggacggggtcgacgggctatcaagaaggcccgtggcctaggtcaatggcccacattgcacttggtgggtgcgttggtttaccatctccccaagtgggagagtggacgtcataatttgtggtagagggggtacgcgttcgcgcggcccctggcaacatgaatccgccgcacccagagccgggccttccccgccgccaccaccacatggtccacctccacctcgacccgcgccaccaccaccacgtccacatccacctccgctgctgccatcatcaccaccacggcacccacctgctcgctcctgcgccgccggcccgcctcaacgacaaccagcagcggcacccggctcccgtactcttccccaacacctacccgaacccaagcgcggcgcctgggcagccagagccgccccgcgccgccgtaagggaggacgtggaggatttggatcccgagccggggctgctgcacgcggaggaggaggaggaggaagacgaggagccggtgttcgtacttacggacgagtgggcggagttcttcgccaaatccgaggccaagagaagactggctaaacagcagaagaagaagagccggaagtgatctgatgtgtctgggccatcatcagacagtctggccagagtctggagctcgggaagagaacggacgaatagcttgtcaacatatacgcatcgctttgccaggagttcattatgttttttttacttcctttatacagagagttacgagttcacatgatctgaacactgtacgcctttttcttcctttatttatagaaccttttgagttcataccatctgaaatttgtgctgtattagtctgcaatgtaaaccggtgtttttttttacataaaccatatgcaccatctgggaaaaaaaaaaaaaaaaaagcggcc

SEQ ID NO: 29777 - DNA, 446 bp, Zea mays
  Clone ID: MRT4577_127169C.1
tcctcgcgtccgtaagggtgcaaggctgtgcagtcgtcttaagcaagatcatgtatccaaccagttcacgtcagatcaacccgatgtgcacaagtgtatatctcgcgtatcaactgatactctgctggtatcctgtattgcctctaatcttttccaagcttgtcgttttactattgctcatattgtggagcctggcgctatactatccatggtccttaatcacccccatgtaagttacgtcaatggaatatcattcttcttaaatcgttttccttgacacacagagcgtagcattagaggaagattcactcccacatgctcctgagttaacatcagctagtgtatatatattgactttgatgttgatgcaccctgggtaacatgttattctccttgatcactgtagggtactgttgtgactgttggctgcaccatatcattctcct

SEQ ID NO: 29778 - DNA, 405 bp, Zea mays
  Clone ID: MRT4577_12716C.1
ccaaaaaaagggagcaaatgatttttttttttttggcaatgttaaaacgatgggaaaaaacccccccttttttattaaaaattacgggggggggggggtgtttccaccacccaaacccagcccctttttttgccccaattttgaaagttggttaaaaaacccccccccggggaaaatttaagttgctccctttataaaatgcttgaaaaaaagggggtggaaaatttttgccaggtccataaagctcctgtactcaagggttttcccccccccaattttgaacccaattgtttttttaaagggccctttgaactgcccacccttttttgatttaagggcccgggggtcaaaaaaaaaatagttggcccccctgggattgggtttccttttcataaaaacttcaac

SEQ ID NO: 29779 - DNA, 494 bp, Zea mays
  Clone ID: MRT4577_127170C.1
atagctatgtggaggaataggcctaagctttttttttttttttgttcttttttttggaaatgaaaatttttatttctgggtgctacctttcatcatccaaaaaactttattataagctttacaactaatatgcaatataaaagagggctccatcaaagatgtggtgtggggtggaggctgctggttatgtcaaagcacgttggtcaaagggcaacaattgttgtacttgtaaaagggttgcggggttagccgtaaactgttgagtagaaaggcagcaactgatgctgtgtcaaaaaggaagcacggattgctgctactatctagctaaatggctgaagaaaagcgtgcttacttattgacacaggaacagtggctgcctttgtaccagcagtttaaggttaaccgcgtaaactgttacaactacaacaatcgaagggctttggccaactggttatgacagacccaggggtctgctaccaacaacacatgattgg

SEQ ID NO: 29780 - DNA, 379 bp, Zea mays
  unsure (1)..(379): unsure at all n locations
  Clone ID: MRT4577_127171C.1
taagctcgaattcgctcgatcactgtcattcattcatttatgtaaaccacgccctttctccttataggttttgtagaggccaacaacanctnantccattcatcttaattagctatataattaaacaagggtgtacactaacttctaattgttattctcatctctagctaaaacatcatccacacatcttccttccacctcccaacacccaccatcttcgactaacaacaactcattattcccatagcacggttaaacaatcaatgcttttcttaccaattatcaatgctgcaattgcatgaccctctattaacaacgactcaactgctaagccaacactctatcttacaattactataacttcaatcctcctatcact

SEQ ID NO: 29781 - DNA, 402 bp, Zea mays
  Clone ID: MRT4577_127172C.1
ggaatcacggaacgaccacgcgtcgggcagcatgcgacctagcgagttgtgataccgactcacattctcgatgaacacacgtatgtcacgcgacgctcgcagttacagtcctccacctgaccgctgcagaatggcgaccgctaagcgtagcatacggcatgaatctccatcacatcacaagagccaaggacgacggaacagtactaaatatactatacgaaggtttaactcggtcacaatgacgacaaccaactccatgacgtcttcggacactagacccgttcgattagaaattaacgtcatttgcgacatctcaaggatcatggatcaactgaatgcagctagatacaattgtctgcgacgcatcttctgatacatacaactatacatacgttttgcaaa

SEQ ID NO: 29782 - DNA, 1058 bp, Zea mays
  Clone ID: MRT4577_127173C.1
cccacgcgtccgcggacgcgtgggggctttacaggtgtaatggttatggctgcaaaaaacggatccgtctagaccatggcatggaatgaagcttcctattcagcagcaagcaactgactgggggagatcactagcctagccttcaaactcgtcgaagtcttggaactcctagagatctgctccggcagcttcatctgagcaagggttgcaccgagggcaaccttgtgtctatataaaaagcaaagtgaatattacgcaccgggtatccaagtgacaaaaccaacacaatgcattgaaaaaggtgtgcttgcctcgaaggtaataaacccaacgcttttgtctgttgttcccaaggatggcgtaattgcagaagcaaagagaaaggccaagccagatcttgacaagaatgtgatgactgctgcaagtagacacaaaacaatgccagaagttgtaaaaaatgagttcgctataaaggtgagagataatcagaacgatgagcttaacaaaaaggtaacaaaggtgaaagcaaaggcagtctataaggatctcctgaattcaaagacgagaacaaaggcaaagccagatgttgccagtgatgagttaatagcaaaggtgatcgatcatcataggagaggtgagctgcgtttactgacagtcagtgatctgaagtgcttcctcggtgcgaagaaagcaaaggttggaggaacgaaggaagtgctaatacaaagagtgactgagctcttgcttgacaaatgcattgctattagcaactgagaagtctgaacataacaagcatgtgatgatgtgaacctacgcaaagtaccctttttttgtgtttctacttgttgcaatttgaagagccgcaatcaacaatagccgaaacactggtgctagaacaaaatgacgacagcaacttgaattgtgtgtgtgtgtgtgtgtgtgtgtgtgtgtgtgtgtgtgtgtgtgtgtgtgtgtgtgtgtgttttgcgggaacacaactataatttttcacttggattttgatacgtcaataccagaaaggcttaaagcctaactgt

SEQ ID NO: 29783 - DNA, 1030 bp, Zea mays
  unsure (1)..(1030): unsure at all n locations
  Clone ID: MRT4577_127174C.1
gttttcgggtacttcaggnagtgtctgggattgctcccgtttcagcttgtggagctatagtttataatataaatttaaatagtttaaagatattcttaatttcaacaataaacaaaatgacttatgtaaatgttttctaaaagtctacaacttttagctctactgttttatggagcaccgaatgacaccaactccactaaatttgctggaggtagagcagtctcaaacagagccttgatcggcctgtgagctcgtgggtcgtttcaatggtacacacgattttgatgtctgtttaaagagaaagggacgattgcaatggattatgagtatgtcttttctgttccaattttgcactatgttctgctcataaccttattcatatgaaattttatggagaacccttcacatctgctaccattggatacgagatgaatgtcctagatttaaaatgtatacatgaccaccatacacctttgggcataggatacgatgccctaaaaataacgttattcatattttagtgtgtttgctgtatcacttcttgcactctagcccaacccaaccatgacaaggcctgcagaagcgctcataccaggactgcgcccagagcgggtgtgtaacatgtaccggtcggccagaacccagaaagagagtgagtagaccgtgaatcgcaaaatgtaaccaacactgaactatcttatttcccaacacgcaacatgtcctcactgacactctgctgccggaactctgatctctattcctctgttcttcctgcgaggttgctattaatcctggtatcaaagccatcggttctcggcttcacgttggattcagcatcctctcacgaccactacacccatcataaatcatgtggtgccatggcgctgaacatcaaacccagattgacaactcttacctagatatctggtttatggcactagacatccagtaagagctgccagcctgggaaaaagtggaaagatattttccggacctccggtcagaaccggacatccggttttagctgttt

SEQ ID NO: 29784 - DNA, 280 bp, Zea mays
  Clone ID: MRT4577_127175C.1
gggaaaaaacgacatcatgaggaaaatgacgaacaatacgatttaaagcgtgcaaacacacgtgatcaacgtgtgcatttggaaaaatcttcaggcagtgggcgtctggattctttgattgagagagcaagacctgatcgtagttgtagtccaagtaaaatccactcaagaagttcacctagcacaagttcttatcatgataaagatcaaaacgggaatggatctaaagtggtcaatcatggaaagagagaaatgccatatgatgagagaaatagtcgac

SEQ ID NO: 29785 - DNA, 158 bp, Zea mays
  Clone ID: MRT4577_127176C.1
ccttttgggggagcgtactaacaggggctctgtatgtaggttaaatgggcgccacgattggcaggctatcaacttagggcagaaggtcacagactgggccacggatcggcttcttgaactgactcgacgacggtacactgattaaagcacatttattt

SEQ ID NO: 29786 - DNA, 937 bp, Zea mays
  Clone ID: MRT4577_127177C.1
gcggcacactttctttgcggctgttgctgtaatacctattcttggggataccactagccggtaccagatcaaagattctgatcttaggatagaacgtttccgatctggtggccctggtggtcagcatgccaacactacagagagtgccattcgaattgtgcacattccgactggtataagtgcaacatctcaaaatgaaagatcacagcacatgaacaaggcatcagcaatggcagtgctccaatctcgtcttgatcagcttgagattgcccgccaggcacagatgaatgcagagcacacacaatcactcaacgaaatcagctggggcaaccaaataagatcttatgttctccatccataccgtatggtcaaagatctccggacgaactatgaagtatctgacccggattcagttctagaaggagatctagacgatttcatcttgaactatttgtcttcgtcactggatgaagctgatgtaagtacctgaacaaagaaccatgctcgccatttttcatgagctacctgccaaatcacttggctttgaaacaaaccaactgagacactgctgaagcgctagcagctggaggtgctgctccagtcttttgtttggtagccaatacaactcgaggtcaaatgatgggaatttaaggtacgggatagtagtaggttgcaagtgcaaaaaccagagttagttgcccaggatagagtttatagtgtaacaggccaggcaataatgtgaaaaatatttgcctgatattcgagacggggttactttttctgtactgcatttgccgtttgtgatcgacgtataaacagtcatccctaattatctagtcaatctagctcctcttttttactgtagtgacagtgttgcacccaggaaagctgaggtggtctccaataattgcccattttctccaaaaaaaaaacaaaa

SEQ ID NO: 29787 - DNA, 373 bp, Zea mays
  unsure (1)..(373): unsure at all n locations
  Clone ID: MRT4577_127178C.1
gaagtggtatccatttcaacaatttagcaccaacgaccaccaanaaggggcggggcttattcttcctgctctttctcaatcaattgctaacgccacacttttccctctatgctcacaagctcctatatcttccattcttcccccataccttacatcaatgatcgcttcattatgagaaaacccaattattaaaccctataggctccaacaagcaatcgtaacaagcaacatacctttatcacccttgaatcaacaagtcccaaccctatcttttgtgcacacattggtacaaaccatcaaggcacaccagctgctgcaactcgtgctacctgttatcaaccaaataactttggtaaacctttctacatactct

SEQ ID NO: 29788 - DNA, 337 bp, Zea mays
  unsure (1)..(337): unsure at all n locations
  Clone ID: MRT4577_127179C.1
tctagttctagnacgctcgcaccctcctatacgtatacataattattatagggaacatatctggtgcatatataaatttagtgtacatggtgcatatattaaatcagcattactcattttagatataatgtctctagttgttggtatattttgctaagaacaccctccgacgtggtgaagtatagcggtgngaaaatattatttataaaaaaaaaaaaaaaaaaaaaaaaaaaaaaaaaaaaaaaaaaaaaaaaaaaaaaaaaaaaaaaaaaaaaaaaaaaaaaaaaaaaaaaaaaaaaaaaaaaaaaaaaaaaaaaaaaaaaaaaaaaaanaaaaa

SEQ ID NO: 29789 - DNA, 194 bp, Zea mays
  Clone ID: MRT4577_12717C.1
caggggaacacggcttttgttctatttttaagaatgacttgacaaggcaggtgttcatcgaaagtatagtttggttcgtatggtcagaaattgttgtctgttgcaggtaaggcggtagaccaatgggaaagtggccgcaagcgggttaagtagttggggccgctgttgtgggtacctgcccgggcgggcggtgg

SEQ ID NO: 29790 - DNA, 437 bp, Zea mays
  Clone ID: MRT4577_127180C.1
cacgcggagatcacctataatattttgagcattcaaaaacacaccaagcgaagcgctctatcatcaacctaacaacagagggtaccaagatattatgcctgcttgcgctacttgcgctgtttgggagcgcaacgaatgcggacattattccacagtgctcacttgctcatagttccattattacacagatcctgccaccagatacttcactggtgttggaacacccagatgggcaagcctataagatacaacaagcgattgaagcgagcgtcttacagcagccaattgaccacattgcaacaacaatgcttgacacatgtaacattacaaaccatgctaacgcaacagaaacaacagctgctaccatgactgatccagctagccatgagtgaaccctgtcaactacttgcaacagcagatggtagcatacaaccgac

SEQ ID NO: 29791 - DNA, 519 bp, Zea mays
  Clone ID: MRT4577_127181C.1
atcgccatattatagagaccactagaacatagaaagcacaatagtgggggggcagtggcagccaaaatatttagcttccttatgctccttggtctttgtgaggagttgataccgcaaccattttcccacaatgctcacaagctcctatagctacccttcttcccgcatacctcgtaccaggggagggttgagtgggagaaaacccggtgggtaaccctacagaggccaacagggaataaaacaggcgtgttaccattatcacgcttggtgctgcaacaaccgtggaaggtatggcaaaaaacacctttggcacattgggtgcagcaacacatgacagaaggacacaggcggcaacaggagctaaggtacctggcttgaggcatacggagacagcaagggctagcattgtaactgctggtggcgagtgcctcacatttgaacagcttgctcttcgtgctccactcggcgagaacacggtcctcctgaggggcctcaagaacgcccgcgaggtagcgaggc

SEQ ID NO: 29792 - DNA, 1580 bp, Zea mays
  Clone ID: MRT4577_127182C.1
ccggccgggcggtttcgctttcctgctcccatcttctcctctcccccctcggcacgagggccaaagccatgcctccttcgacttctacttcccccaccacgtcacaacagggcctccacaccgcctccctccgcccccttccgcttgcgcccacgaaccctaaccctaaccccgtcgccgccgcgggacctacccggctagcactcgcaccgcgccttcggcgtcatattcggcgcctgcgctctccgtcctcgcgcggcgagccggggtgctagggttttctagatggatccacgccgcgcacccccgcggggcgggggcgccaacgggctctcttactccacgctgttcaatctcgagcctttgctgaacttcagggttcctgtaccggaagatcttgcccgctacgagaatagcagctcaaatgggagtccaagcagtgaaggtcagggatccttattggatcagtacaatggtgtaaatgatgcttcccatggcctgcaccggaagcggaaaaggcatcttgacggtgccagcgatgatgatgaggcagatgcctatagtaacaaaataactgaggagcaataccgtgctatgctcagtgaacatgtccagaagtaccggaggtcaaagttcaaggagggtgcttttagttctgatcctcctcgtgtggcaacccctcaattaaaacacaaaaatggtggtaaaaaaaatatgaagcgcataagtgatttcagcgatgatgtggcattagatgggatagaagcctcacatgaatataatgggatagagtgtattaaaactcatggcggttttaataagcttgttgcaactcttgattccacttatttagatatgggggatagtcacgttacttagttccagagggttatgataagttagcatcatccctcaatctccctgtttcttctgatatacgtgtcgaggaacacttcttgaagggcatgctagatttacgcaccctagcagcaatgcttggtactgaccaaaggtttgaggcttccaatcgtggtggaatatctgaacccctgccacaatttgaatctctcaaagaaagggtaaaggtgcaggaattttctcttcaagttaccaaggacccctttgcaattccggaaggatcagctgggaggatacgaaggtatattatatcagaagctggcgatttgcaggttcattatgttagagtcatggaaaaaggagatacatatgagattatcgagcgtagcttaccgaagaagcaaatagtaaagaaggaaccttcggtaattatgaaagaagagtctgaaaagacttacaaactatggcagtctcttgctacaaaaagcataccaaagcatcacaagaattttactgctttgataaagaaacgacaagtagatgcgaagcgcttctctgatagttgtcaacgagaggtaaagctcaaagtaagcaggtcactgaaactgatgaggtgtgctgcagtacgcacaaggaagtttgttaaggatatgcagatgttttggaaacgtgtagacaaagagcagtatgagttgaggaaaaaaaaaaaaaaaaaagcggcc

SEQ ID NO: 29793 - DNA, 660 bp, Zea mays
  unsure (1)..(660): unsure at all n locations
  Clone ID: MRT4577_127183C.1
ccgggnaccttcctccaccaccagcaaccgccgccacagcccaaaaagctcaagctcggcgccggcccaccacaacagcccatcgtcgtcatggacgacgaccttctcacggcccggcccaacaagacatcatcaccaccggcccactgggagctgctgtcatggctccagcaccagcaccaccaccagcagcagcatctttctgctacgaccttgacgacgatgtacctgcttttttcgacgaccacgaccaccaccaccagcagcagcacatcaccaacggcgggctgctggaagacatggtgccgctgctggtccggcggccctgcaccaccaccaccaccacctccgccggtagcacgtcgccggacctttccgcctcgtcctctgtctcatggaaccccacctcgccttacatcgacatggccattctctccaacattttctagtgcatgcatgcatgcgtccgtgttcaactaccatgcacacgcacccatcgtcatgtttgtattgtgtgctgatatatagtatgtatgtatgtatgtactagctagtataatactactagcagtacgtgtgtgtacgtacgtagatccgatccatcctcaggcgcgcggtgctatatatattgtcgatctgttattaaattgngttcgtgct

SEQ ID NO: 29794 - DNA, 284 bp, Zea mays
  Clone ID: MRT4577_127184C.1
cggacgcgtgggcgaaccttcttgtgcatcttcacgccgtggaaaattcagaaccgcaaatctccgaccgagcagctgaaaagcgtcgagctgacgcgcttggtgccttgcctgctcgccgcatggcagatcctggaggtgagctgcaggagctccggcaaggttcggcggctcgcggaggtgacgacggtccgctacgcgctgtacgccatgaaccgcaagctcggccccggggccccgccggcgctgcacgttgagggctgaagggacggttaggagcccgt

SEQ ID NO: 29795 - DNA, 211 bp, Zea mays
  Clone ID: MRT4577_127185C.1
aattcggcacaaggggggagacctgttcattttctatgctttgaccatgatacagagagggcagccgacaatgcaataccagtctcctctaaaagcccatgactctgccgaaacgagagtatcatcacagcatcctatgaaaaaagaaagagaccaactgaccgagcacataaagcagcatttatgtatcaccaaggcaccgacgatcaca

SEQ ID NO: 29796 - DNA, 858 bp, Zea mays
  Clone ID: MRT4577_127186C.1
gagcgccgcagctttgaacctggttctcctgtcgctgtcgcccatcttgcggcatcccaccacggcaccaccgccacagaagagcggccgagcggtgcagagaaccagccagccgagctgagcggccgcgcttccggtgggaggatggagaaggctctcaccaaactgggcagcttcaccatctcccgcaaggccaagcaggagctctccgccatcggcgacgacatctctcgtttctcgagcacggtggaggagaaggcaaaatgggtcttcgaaaagctcaaaggacacaagaagtccctctccgatctactgcgcgagcacaacctccctccaggcctcttccctcataacatcatctgctatgagtacgacgaatcgacatcgaagctgatggtgcacctgtcgaagccctgcgaggtgagcttcaaggattcctccgcgatacggtatgctcctcgcgtcaaggcgactctgtcccgaggcaagctttccggggttgaaggcatgaagaccaaggtggtggtgtgggtgaaggtggctagcgttagcatcgacagctacaagtccgacaagatatgcttcctcgccggtgtgaagaagctgaggcagaaggatgcttatgaggtccctcgtgaagccgtctctgttgatgagttctgagctcgattgatttcccttatcgtagtatcattcgttcgtagcattttttgggtcccatgtcatcggcaattgatgtgctgcggttttgtagatttggaatcacatggatctgttgtgcctggcagaagacaacccgttcatgttatctgacgagacattcacatgtgtgatgtttcagtaatgtgaacatttagc

SEQ ID NO: 29797 - DNA, 287 bp, Zea mays
  Clone ID: MRT4577_127187C.1
gttcctcatctgacatggctcggggaggagcgtgatcctcatccatgggttggatggtcgtctgctcttcacgctacaccgacggcggctatgaactacctacaggctcacctttgacggagtaaacctacgggcaaggtcgacttcattgctaaggatgacattaatgtgggagcgggggggcccctctaagccttgccgcggagtaacctaatggacgaaggctgttgctataccacctatgagccagcaatctaattatttcctggactaggtgttgaagtaaa

SEQ ID NO: 29798 - DNA, 968 bp, Zea mays
  Clone ID: MRT4577_127188C.1
cctcgaggccggccgggccaggaacacgaaaaaaagctttgaacgggagctttgaacctggttctcctgtcgctcttcgtgcgggcgtgcggcacaccaccagaagagcggccgagcggcgcagagaagagagaaccagccgagcggagcggctgcgcttccggagggaggaaggaggatggagaaggctctcaccaagctcggcagcttcacaatctcccgcaaggccaagcaggagctctccgccatcggtgacgacatctcccgtttttcgagcacggtggaggagaaggcaaaatgggtgttcgagaaactcaaagggcacaagaagtcgctccctgatctactgcgcgagcacaacctccctccaggtctcttccctcgtaacatcatctgctacgagtacgacgaatcgacctcgaagctggtggtgcacctgtccaagccctgcgaggtgagcttcaaggattcctccaccgtaaggtatgctcctcgtgtcaaggcgactctgtcccgaggcaagctttccggggttgaaggcatgaagaccaaggtggtggtatgggtgaaggtggccagcgtgagcatcgagagctacaagtctgacaagatatgcttcatcgccggtgtgaagaagctgagaccgaaggatgcttatgaggtccctcgtgaagccatctctgtcgaggagttctgagctcaactcaactccattggtttgcctacgtagtatcattcattcgtagcatttttcgggtcccatgtgatcggcgattgatgtgctgtgatttggtagctttgtactgatattggaagcatgtggatctgttctgcctggcagaagataacccgtgcatgttatctgacgtgacgagtccttcacatgtgtcctggtcctggttctgcattggctgctcctagagttcacgtgttcctgttttattttatatatatggtattgcactgcc

SEQ ID NO: 29799 - DNA, 1567 bp, Zea mays
  Clone ID: MRT4577_127189C.1
ttcacccggggttacgagatcgaatcatcatccctagcaggctaacgtggcccaaaaggcgcaaacattcactgatatcccatgttttgacacgagcggtgggacgtgctgacggagatgggtggcgccgccgccgccgttcttgccgtcgcagccgcacgccggaaatctggtcccttcgtatccttgttctccagggcggcgcgcaggctccacgatgctgtagagactgcagcggcggaggaggacatggcggggacgcggagtccgcggcggcggcggcggagcagcagcagcctccttcttggaccggaattccccgacacctgggacccttcatcgcgtgacacgacgccgcagtctcctccgcggtgtgcccaagctgattatgatcgcactgcatccattattgatggcaagtccattgcagaggacatgaggttacatattgctgaagaggtctgtcaaatgaaatgttcagttggacacgtgcctggtctagctgttgttttggttggtgatagaagagattctgaatcatatgtgcgatacaaaacaaaaggctgtgaggaagttggtattaaatctttgttggcgaagttgcctggaaactgttcagaagatgaagtgatggattcagtgtcaagatttaatgaggatccatctgttcatggcatcctagtgcagttgcctctaccagagtttatggatgaggaaaagattctgagcatcatcagtctgaataaggatgttgatggtttccatcccttaaatgttggcaatcttgcactaagaagccgaaatcctttgtttgtgccctgtgctgcaaaggcttgcattgaattattgctccaatctgggattgaactgatgggcaagcatgtatctgtcattgggagaagcaaagttgttggattgcccacttccttacttttacagcggcatcatgccactgtcagtgttatccatgccttcacaacaaatccagaggctattacccgcgaatctgatattgtgatatcagctgctggagtggccaatcttgtaaggggaagctggttaaagcaaggtgcagtggtgattgatgttgggacaaatccaatcgaggatccaaccagtgactacggttatcgcctaactggggatgtctgctttgaagaagcagtgaatgtggcctctgctataactccagttcctggcggagttggaccagtaacgattgccatgcttcttggcaacacacttgattcagcaaaacgcgtttatggcctaagtgactgaaactgacccccctctgaactgtaattttgtcgtgcttgtcctttgtaaactagttctcttctcttttcaacctcccgtcgctctctattttagctgtaggaggagggctgggatgtaccatattcttgctcaataagtattgtattagctgtgtccattaggtaagttttttttgtgtgtgaccatattagcctgttacctatataaccaacacacaatagcaggaacatgtcttcagacacgatttatttgcatttttttataagagaaataggcctgactgact

SEQ ID NO: 29800 - DNA, 290 bp, Zea mays
  Clone ID: MRT4577_12718C.1
tcccgggctagttctagaccgcagcgcgcgcggggggcgccaggacagccattccctggcaatggtggagccatcatggcgtcacggcctcgctcgccagagccccttgtttttgttttattaattaactatctgtcgcttctgggtgcagtcggtctcatctcagcgcgccaccgcggatgccgccggagagcgagagcgaacctgcggtggcctcaggtgctccggtggttgcttcacttcacacgcgagtgctggaagggaaggaacgccagccagccaggcaggca

SEQ ID NO: 29801 - DNA, 638 bp, Zea mays
  unsure (1)..(638): unsure at all n locations
  Clone ID: MRT4577_127190C.1
tggatccccggttcacgagctgatacagagcatcctaggcaagaagaggagagactcaccacccgagagcagcggcaatggcgtccttcggttctatcgcggtggcgctcgtggtgtgcgcaatgctgctgcagacctgcgtggccacgaggaggctccaggcgctggtgcaggagcagcccatcaccatgaagtaccacaagggagcgctcctctccggccgcatcgccatcaacctcgtctggtacggcaacttctccgcgccgcagcgcgccatcgtcaccgacttcgtctcctcgctcgcctccgcgtccgcgtccccggcgccgcagccggagccgtcggtggccacctggttcaagacggcgcagaagtactacgccagctccaaggcccgcttcccggcgctggccctcggctcccacgtcttcgaccggtcctactccctcggccggcggctccgggagcgtgacctcgtcaggctggccgcgcgcggcgggcccagccgcgccatcaacgtggtgctcacggccgacgacgtggccgtcgacggcttctgcatgagccgctgcggctcccacggcgcctccccgcggtcccgcgccgggcggntcgcggacgtggggggggggcacccg

SEQ ID NO: 29802 - DNA, 394 bp, Zea mays
  unsure (1)..(394): unsure at all n locations
  Clone ID: MRT4577_127191C.1
aacctttttncttattatccnnnnnnannnnnttttttgtttggttttttttttgtttttttttccgttaataaaaaggccacccaaaaattgggggggaaattgcaaacaaaaaacaagatgcttggggggaaaaaaggggattggaattgacaacatgttcctggaaaaaaaaccaagacaagggggggggccaaaccaattctgaaaattatactatggccaagggctgggaaaaaagagggaccatttttgggagcccagggctgggaaaaaaaccgggggaattgcaaaaagggtctccacccaaaagggggccgagaaaatccatttaaccatcaaaactggggggggccgggaaaatccctttaaccctcaaaactcctaaaggggg

SEQ ID NO: 29803 - DNA, 329 bp, Zea mays
  Clone ID: MRT4577_127192C.1
ggggaaagaaagggggaacaaaatggataataattcaggggggacagtttccttccataacaaagatgggtggttggtgcttaaaccgggggggccactgggggcccccaccgggccaaaagcaccaaccagtttgggaaaaggggggaacaaaggccagtccttccagctgtagcagggtggaggtttacacttgaatcacgacgcgggagagcggcccaggacgggcggggagccagggcaaaaattattagaattgcgcacggggggggcccagcaaaaacatatataaatatatttatatttttttgcaaccaggaaacggggcc

SEQ ID NO: 29804 - DNA, 414 bp, Zea mays
  Clone ID: MRT4577_127193C.1
cccacgtgttcggcgcggcggcgatgccgagctcgcggcggaccacgggccgcgggggcgcaggcggaggcagcgcgggagcgggtgatgcaggaggcggcgacggcgaccgggtgccgccgttcatgggcaacaaccgcgaccacaacccgtgggagctgcgctcctgggcgcgccgcacggggttccacccctcggccttcttctcgggggagtccaactcctccttcgcctcctccgccgcgccgcaggccccgccgtcgccgccgtctcccccggtctcctcgcgtcgcccgccgccggcacgggagcgggaacccgaaccggacacggaggacgaccttgttcccgcgccgccactggaattagagcgcggtgggcccgcccccgtccgcggacgcggtggacgcccgc

SEQ ID NO: 29805 - DNA, 301 bp, Zea mays
  Clone ID: MRT4577_127194C.1
cttagacctccctccccacgaacgagatcctctaacgtacttctttcttcagaggagctaggttgcctggccggtcgcgctgcgctccatctttggtgcgcttgtcccgaggcgccgtcgcataaagcagcagccccactttcgcggcggcggcgcactcacggtccctcgtcacacggaagtcctaaaggagagagccaggattcgcccatgctcggtggccgtgatcctctggccccgttcctcgtcgcttacttgaagcgtgcggcgcgcctacgctgcggcgagcagctgcacgcgc

SEQ ID NO: 29806 - DNA, 1290 bp, Zea mays
  unsure (1)..(1290): unsure at all n locations
  Clone ID: MRT4577_127195C.1
gtcaaggtgcttcctttcttgaaacctataatcgaaagaaattctcttaagtcagttatccaaggcttcttgccaggaatcatattgaaaatctttcttatacttctcccaacaattctaatggccatgagcaagattgaaggacacacatcgctctctggattggacaggaaaacagcaacgaagtactacattttccttttcgtaaatgtgttcttggggagtgtaataactggaacagcattccaacaactagacaacttcatacatcagtccgcaaataaaattccagaggttgttggagagtccattcctatgaaggcagcatttttcatgacatacataatggttgatggctggtctggtatagctgctgaagttcttcggttgaaggcattagtcatattccatataaagaatgcgttcttggtcagaacggagcacgaccgtgagcaggccatggatcctggaagcctggatttttacaactgtgaaccacgattacagctgtattttctgcttgggcttgtatatgcagttgtcacgccaatgcttcttcccttcatcatagtgttcttcagccttgcatatcttgttttcagacatcagataattaaggtatatactcagcactacgaaagtggtgcacaattctggccagatgttcacatgcgactaattatagcgctgatagtatcacaaatcctcctactggggctgctgagtacacaggaggcagagaagtctactgttgcccttctcccgcttcctgtcctctccatttggttccactatgtttgcaagggccggtttgaaccagcgtttgtgaagttccccttgcaggatgctatggtaaaggacacattggaacgggcgcatgacccgactttaaatttgagagagtacctaaagggtgcttatgtgcatccagtcttccagaaaaatgatatctacaaggttatcgccgtcgacgaggaagagaagaaccccatggttgtgacaaagaggcaatctcgcatgaacgcaccggccggaagctaattgaattccatttctggtggtactaacgaaggggaattctgttggatgcttcctacctaaagcctgattctttcatgagcaaatagcccagtaatcttgtaaatgtttggggaaaatggaaatacaggaggcagtaggatagtgaaacaggctgtattatatatgatccacaatttattaatttcattagtgattacaattattaataaaaaacaaatttacaataaaaaaaaaaaaaaaaaagcggnc

SEQ ID NO: 29807 - DNA, 193 bp, Zea mays
  Clone ID: MRT4577_127196C.1
agcagtggtaacaacgcagagtacttttttttttttttttttttttttttttggttttttttttttttttttttttttttaatcccaaagatattgactccgatttaccgtataacacctcatctgaaagagcaaacatggtgtgaaacgcccaagcagggcaacatattaagacaggaggtaatactacata

SEQ ID NO: 29808 - DNA, 322 bp, Zea mays
  Clone ID: MRT4577_127197C.1
gggccggggaattcccatgcggggcccccctctcgccgttttccccgtcatcctccgccgccgcctcctcctctcctcgccgctcgcctcctcctcccgcgcccgccgcatcttctctcgcgccatggactcctccaccaccgccgccgccgcgcagcacgcaggtggcgcggcggcgggggagtacgaggaggtgctagggcgcctctcctcactcatcacacaaaaggtgcgcgcgcacacaggcaaccgcgccaaccatctgcgaccttctggttcgctacctcccgattccgcagccggtcgaccccatcgcgcggat

SEQ ID NO: 29809 - DNA, 279 bp, Zea mays
  Clone ID: MRT4577_127198C.1
tagctgttgtggtctgagaatatgattctgagcatcagtctatttgacatttatgttcctctaagaaagcagggggtgatatctagggagcattttatctcagcctataattgtaattcctagtgatttatcttccaatgactgctcaactctgttctctctcatccagcaagatctaattagtaccataggagaaagtgctgcgttgggagctgcaggcatggttgtttggggagacatgaatttaacttcatctgcggagaactgtaccaaggtgat

SEQ ID NO: 29810 - DNA, 1018 bp, Zea mays
  Clone ID: MRT4577_127199C.1
cctcgaggccggccggggcacacgcacggccgttgagacttgagacagagacgcaggagcgcggaggaaaaggaggcccagaccaccgacggggaaaaaacatcacgaacaccgttctccatagcgggagtagtgaggaacgaaagagagggggcggcctagggcttcgattccgcagccatggacgccgctgacgtgtggggccgctcatcgtcctcgtcttcttcgtccgccgccgccgcgaggcgcctgcaggcgcgctacgatctgtacatggggatcgacgacgcggacgccggcttggacgaggtgacggagccgcgcggcggggcggagtcctacaactgccccttctgcggcgaggacttcgactttgtcggcctctgctgtcacatcgacgacgagcatgccgttgaggctaagagcggggcatgccccatctgtgctacaagggtcggaatggacttgataggacatttgactatgcaacatggaagttatttcaagatgcaacgcaggcgcagagtccgaaaagtatcttctgggtcccattctttattatctttgttgagaaaggacttgagaaatggcagtttgcagtcatttctcggtggatcatcctatgtatccaatcctcctgctgcagcaccagatccatttgtgtcatcaaacttgataacagcatcacaatagttaaggaacacgaagagaatcatcagactctgctgctgttgtcgtgatcacacaagaggcccatctaagttcgtatatgtacggatggaatatttatgcatgtatgtatttatgtttatctccctgcatttacccttagtgcaacagggtggtaggggacggttgtagtattccaaatttatgtatcaaataaatgaggacactgtccttggggtgcaattgtgtatataatataataatagggagctactcgccatgatttaggatattttatttaactgttgtaataatatgcagtgttttgtatgatgaccccattttttac

SEQ ID NO: 29811 - DNA, 596 bp, Zea mays
  Clone ID: MRT4577_12719C.1
actccatagggcgattgggtttctcgaggccggccgggacggaacagaaatcaggtccaagccagaaaacagtaaaatggcccaatgtaagaccatcgtcgcagcagtcctcgtggttgctctcgtggtttcgacgatcccagccagcgccgatacgaacctggaacctgcaggaggctctacggagggcagtgcccgcacctccggcatgcagaaggaagagacccgaggcaacaagaagccagcgacgctcgctggatctcttggttcaggcaagaatgccatctacgggtaaatgattagaaggaatcctgcttcggaaggtatgaaaacaatggggatgtgctcaacaatcaatctcaaccccaggtgacggcaatgagtcacccacaggaatgtaaccggatatagatggacattgctcgttccatatttctttttcatattttctcttcaaattcaattgaaatacggataatattgtgtgaggtcggataaaatttaaatgaatatcagtatcttatccaaaaaaaaaaaaaaaaaaaaagcggccgcggccaaacaaaaaagataaaaaaaaaaaaggggcggccaaa

SEQ ID NO: 29812 - DNA, 1259 bp, Zea mays
  Clone ID: MRT4577_1271C.1
agatacaccggaaccggagagagaaggggtgaagatgcaggttgcagctggctcgcagggctcacaggcggtgatggagaggggcgaccagcagagcgccaagaaaccaaggctggctgctgagccgctcctccatgccccagtgaagcaggagatcgtcgtgcatcaaccggccggagacgccactgaagatctccaggacgccgccgagctgaccgctgacggaatggccgtggacgcgcgccgacccgtacgtcacccgaaccagcgcggggacgtcgcctgcccccgctcgggtggtatacggccaagggcttgccccccggaagtcacgagccatcgcgtaagattgccgcggccgagttcgatttcagttccagttcagccggcgacagctgctaatccgcgtccggcaaggattggaagctctccggtaaataaaagggcagccgccccaactcgatctgctcgcccaccttcccgatctccagacctaggcacgccatcgatggcggccaaggtgctccagctccgcagcgccgacggcaaggtgctcgtcgctccggcgtgggactatcgtccggccgccgcccaagccctcccgctggagatgcgggtgccctcgcgcgccctcgagagggtgctccagtactggaccaagcacagcctggccaaggccaccggtgagtcccgggagtccctcgcccgctgggacgccgacttccagcgccgtctcgacgaagacggcctcgtcaaggaggccgccgcagccgtccaagaactccgccgccacggcgtccaccatggagggcgtccccgtcgccacgccggcacgggcgcatctggtgtcgctgctccagccaccgccacccgtgctgatcccgtccgtgcctggtgccaactcgttcaccacctcaagggtgtcgaccacggagaacctagcccagcgccgacggcgcccatcgctttccatgcctccgatattgccgtcgccgcacgccctgggcctgccaccaccttgccggccgctgctggtgctcaacccgttggtgtccggtgcgccatccgtgcccgtggacgccagatggctgaagacgaggagtccgcttgccaccaccgcaagctcccggcttccaaggcttccaagcctcgctcttcggtctgcctgcctgccactgctgctgcgcccgtgaaaaaggctctcgtcaggtcgctttccaggcttgctctttcgtcggctctacccactgcctgccctg

SEQ ID NO: 29813 - DNA, 841 bp, Zea mays
  unsure (1)..(841): unsure at all n locations
  Clone ID: MRT4577_127200C.1
aggcgtcacgcacggccgttgagacttgagacagagacgcaggagcgcggaggaaaaggaggcccagaccaccgacggggaaaaaacatcacgaacaccgttctccatagcgggagtagtgaggaaggaaagagagggggcggcctagggcttcgattccgcagccatggacgccgctgacgtgtggggccgctcgtcgtcctcgtcttcttcgtccgccgccgccgcgaggcgcctgcaggcgcgctacgatctgtacatggggatcgacgacgcggacgccggcttggacgaggtgacggagccgcgcggcggggcggagtcctacaactgccccttctgcggcgaggacttcgacttcgtcggcctctgctgtcacatcgacgacgagcatgccgttgaggctaagagcggggcatgccccatctgtgctacaagggtcggaatggacttgataggacatttgactatgcaacatggaagttatttcaagatgcaacgcaggcgcagagtccgaaaagtatcttctgggtcccattctttattatctttgttgagaaaggacttgagaaatggcagtttgcagtcatttctcggtggatcatcctatatgaaaagcctgtagagaggtacgtcacctcaagcttgtcctttctgctgcctcactcatctccctctttgccacgataccattggatctgggctgaaccatcattgtcggangaagatcagaagggaaagggntcaaaggagcaaattcgtccgagggcttgtgctctcgacatatttgatgatgataacttgtaaaggggtcatcaaacttgatacagcatcacatagt

SEQ ID NO: 29814 - DNA, 103 bp, Zea mays
  Clone ID: MRT4577_127201C.1
cggtcgcgtgggctgcagctgggatcactcaattcccgctagtggttgttcaggattatgctcaagtttatgcgtagtaaatagcaaaatctttgattagcct

SEQ ID NO: 29815 - DNA, 1437 bp, Zea mays
  Clone ID: MRT4577_127202C.1
atgtcgccctcgaggctgggaggacgtcattcggtcaccactcccaccgccaccggcctcaagccaacaccaccagtccacacatgcgcaggcgcacacgcacggccgttgagacttgagacagagacgcaggagcgcggaggaaaaggaggcccagaccaccgacggggaaaaaacatcacgaacaccgttctccatagcgggagtagtgaggaacgaaagagagggggcggcctagggcttcgattccgcagccatggacgccgctgacgtgtggggccgctcatcgtcctcgtcttcttcgtccgccgccgccgcgaggcgcctgcaggcgcgctacgatctgtacatggggatcgacgacgcggacgccggcttggacgaggtgacggagccgcgcggcggggcggagtcctacaactgccccttctgcggcgaggacttcgactttgtcggcctctgctgtcacatcgacgacgagcatgccgttgaggctaagagcggggcatgccccatctgtgctacaagggtcggaatggacttgataggacatttgactatgcaacatggaagttatttcaagatgcaacgcaggcgcagagtccgaaaagtatcttctgggtcccattctttattatctttgttgagaaaggacttgagaaatggcagtttgcagtcatttctcggtggatcatcctatgtatccaatcctcctgctgcagcaccagatccatttgtgtcatctttaatttgtactttgcctgtggctgaaccatccaaagatttacattccgactcatctgacaataactttttgctaaataaattcccagatgaaaagcctgtagagagggctgaaccatcattgtcggagaaagatcagaaggaaagggttcaaaggagcaaattcgtccgagggcttgtgctctcgacaatatttgatgatgataacttgtaaagggggtcatcaaacttgataacagcatcacaatagttaaggaacacgaagagaatcatcagactctgctgctgttgtcgtgatcacacaagaggcccatctaagttcgtatatgtacggatggaatatttatgcatgtatgtatttatgtttatctccctgcatttacccttagtgcaacagggtggtaggggacggttgtagtattccaaatttatgtatcaaataaatgaggacactgtccttggggtgcaattgtgtatataatataataatagggagctactcgccatgatttaggatattttatttaactgttgtaataatatgcagtgttttgtatgaaaaaaaacccaattttttctatatataactgttcattttaaaaaaaaaaaatataataatacaagggaaaaaaaaaaaataatttcaaaaaatttgcctcccctttttgtgatttttttccccccttttttttt

SEQ ID NO: 29816 - DNA, 1794 bp, Zea mays
  Clone ID: MRT4577_127203C.1
atgcggacggtccgcccttggtcttggacggtccgcgtcagctctataattccttttgctcaacttgtcaccttcgggctttttggttctgcaccgaccggacgagggcaaggaaaaaagagaaagactgccgcttcggccaccacagttgtgccgaagggcaaaaaggtgaaggttctgacccgccaaccacgttatattgaaccgaccgtagtgcctaaatttgacgaaggggcctcttcaactgccgaagcaagacaagctgttccgattgtgcagagcgttgaagagccggctgtagtactgaaggtacctatagtcgggccagccgaagctaagaatgataaggccgaagggccacatgtggaaaaaatagagaaaatgccagaaattctgagcccaccaactgaggcaaaattgccgaaggtgcaaaagactcctgccacaactcccaagaggaggagaatgaccaatgtgctggacgctgtcttggagactacgaaggccttgagccctggacctactaagaaaaatactgaagctgccaaaatccaagaagaggccgaagtagggccttcagcgcccgtcgagacaaagactgtcgtgcctgaagataaagttgatcaacaaactgcagatatcggcatggcagcaaggcaagacacggcaaagaaagcaaaaccttctgtccccgaagacctagttgaagatattgattacatttttcgacatgcttcggggaaaaaattatccgaagaagaaatcatggaagtaagacattatgctcaaaaactgaaatattcgaaaggagccttagtgtttaacgacagtaatgaagatgatttcctatactgtctcctggacaacaaagaaatatccatttaccgggagatagctaagagtatgagatttccgaaacttgaagaaggttgttcggttttgtcgaaggatgatcttgctgatagcctggcgtacaacagtataaagggtttaattcttcgtaacgccttgagggcacagaaaagcgccgaagacgaaggttgtacaatagcccttaacaaccttcgctcagaggtgattgagttaagaaacgaaggtatagagaaagacaaggttttgatttcattggtaaataagataaaagaagacgaagctcaatacaaagctcaagctgaaacacaaaaagctgaggttgaagaccttcggagacaactggccgaagctaatgagaggtgcgcactcgcacatgctaaccaagagatcagtgaatactggaaaaataagctagagaaaaatgttgaagaacttcgcgaatccaaggaaaggtgctttaaaaattccttggattgtgtgaagaaattaaaaactagcttcgccaaagtgggcgcctactctgctgaagaaaatttcatacgaggcgaccccgagggtgttgttgaatggataagtggagaagtcgaagccttcgaggaaattttgagtgatcgcgaggatatttgcgcattttccggtgcacgaggaatctcagctattctggagaaggccggatgtgatcacgttaaggctatagcccaggccgaagctgccttctccatagacgatacgaaggatccttcagctgaagcaactttaatgggcgggaagttttataacgatgtctgggtgaatggtggccaagagctggcccatgagattataaaaaagagtgaaaaagacacccacgacgcccgggcagaagcaaagcgagctgaagaggctgctgaacgtgaaaggcgtataggtattgttttttaa

SEQ ID NO: 29817 - DNA, 2650 bp, Zea mays
  Clone ID: MRT4577_127204C.1
ccccttaaacgctattgaatcatcacttcttctaaagacagtaaaacctatatcttgattcccatccctgaatgtgatagctcgttggggatcttggtttttctcgtaggaggagaacatcttcttctcccctgtcatgtggtttgtgcacccgctgtcgatgatccaacttgagcccccggatgcataaaccttgccggatttattagtcaaaacataagatgcatcaaaagttttaaatgaaatgttagaatcgtttgatgcaataggagttttcttctttggcaatttagcacgggttgattgcctagagctagatgtctcacccttatacataaaagcatgattagggccagagtgagacttcctagagtgaattctcctaatcttgtgctcgggataaccgacagggtacaaaatgtaaccctcgttatcctgaggcatgggagccttgaccttaacaaagtttgacaatcttttaggaggggcattaagtttgacattgtctcccttttggaagccaatgccatccttgatgccagggtgtctcccattatagagcatgcttctagcaaatttaaatttctcattttctaagtcatgctcattaattttagcattaagttgagctatgtgatcattttgtttcttaattaaagctaggtgaacatgaatagcatcaacattaatgtctctacatctagtgcaaatggaaacatgctcaacagtagatgtagagggtttgcaagattttagttcaacaatcttagcatgtaaaatgtcattttcacttctaagattggaaatggtaacattgcaaacatctaagtcattagccttagcaattaatttttcattctcatttttaaggctagcaagagaaacattcaattcttcaatcttagcaagtaaactaacattatcgtctctaagattggaatttgaatcatctttaacattagaatcaaccttagcaattaatttagcattttcatttctaaggttggcaataatatcatgacaagtgcttagctcactagataatttttcacatttttctacttctagagcataagcattcttaaccttaacatgcttcttgttttctttaattaggaagtcctcttgagaatccaagagttcatccttctcatgaatagcactaattaattcatttaatttttctttttgttgcatgtttaggttggcaaaaagggtgcgcaaattatcctcctcatcactagaattatcttcatcactagaggatgcatatttagtggaggattttgattttaccttcttccttttgccgtcctttgccatgaggcacttgtggccgacgttggggaagaggaggcccttggtgacggcgatgttggcggcgtcctcgtcggaggaggagtcgatggagctctcatcggagtcccactcgcggcacacatgggcatcgccgcccttcttcttgtagtatctcttcttttctctcctctttcccttcttgtcgtcgcccctgtcactatcactagataatggacatttagcaatgaaatgaccgagcttaccacacttgtagcacaccttcttggaacggggcttgtaatctttccccttcctttgtttgaggatttgacggaagctcttgatgatgagcgccatctcctcattgtcgagcttggaggcgtcgatggggattctacttggagtagaatcttctttcttctcctccgttgctttgaatgcaacggtttgtgcttcgggcgtggaggagtcgccttgctcgatgatctttttggagcctttgatcattagctcaaagctcacaaatttacctatgacctcctcgggagacattagcgtgtatctaggatcacctcgaattaattgaacttgcgtagggttaaggaaaacgagggatcttagaataaccttgaccatctcatggtcatcccatttggcgctcccgaggttgcgcacttgattcaccaaggtcttcaagcgattgtacatggcttgtgggtcctcgctaaacttcttgcgctcatggcgcttagaagttacggacggcgtgtcagagccagaggtggatggcgacgaagagtcggtctcgtagtagaccaccttcttcatcttcttcttcttgtcaccgctccgacgcgacttgttgtgtgaaggggatcccttcaccttgttggcggactccccggatggagccttcccatggcttgtggcgggcttctcgccggtcccgatctccctcttggcggatgctcccgacataaatgaggtttgatccattcacaggtgaaccttacaagtttgatcccttcacaggggagcccatcaggccagatccgaaccagcgccgctcaggaagcctgtactgatcagattagttggagcgatatgccagatgagaccctgaaacaaagctagatctggataactcttcttcttgtctgccaagtgtctctgtgattttgcttgtgggctacagatcatgtaccccgagcaccatgtgtgatccagtcggactaatcatttcggcattgaaaagtcggactaactttttttgtgcccataacgctacgtattgtttggtaaaacgttcaggagtacccttttggtagattaattaaaaattcatccggtg

SEQ ID NO: 29818 - DNA, 993 bp, Zea mays
  unsure (1)..(993): unsure at all n locations
  Clone ID: MRT4577_127205C.1
gagccgtttggtcgcgtctccacccaaaccctaatcctcgtccaatcgtcccacccaccccggcccctcctcttgaagccgccatcgccatgacgacccccaagaagaagcccgaggcagcccagcccgcgccccccaagaagaagcacgaggccaatagggacagggacaagatgctcaagctcaacgccatgcagcagcctgcgctggcgttcgcggcggctgcagctgcggcggcggcagccacttcggtgccattgccgactccctcatcaagggaggagaagaagcctgtcgtgaaacaagaagcgcaaggctctgcgcctccaccgagggatgatcaggatcgccctcctctgtttgggaccttgcagtcgtgagattgttggtgctgtaatctgcttcttcctccccctattccattgtgttagcgtgattttgtgcagcgaaacagtctgaggagagactgaggtttgccgtgcagtgatcttgcaaagtgtagggatcgcatttcagagtctcctcaccgtatatcctactctttggcatgctagctgatcttccatccatcatagctgttctgcatcctgtgttccgatttgttctctcgtatttctagtgaaatgatttccaagatgaagtgcaaccaggttctccagcttccaaactgtcactggtggcttagctagatttaggagacatggacatcagggttttagaacgatgagcatcccaattgctcgtccatcctgttgcactgtggattggatagaccaaatgcttagttgattggaccatagggtcatcaagttgcctgtcacacaaatctccttcacaagtgaatgctaaaataacagaaatgtgtattatgcagatctcccacccatttggtatatgctaaacttgtaagttttgttcgagctcattgcaaaaaaaagaaaacagagattgatatggtattattggtatccatggaatgcagntgtgtggtca

SEQ ID NO: 29819 - DNA, 4620 bp, Zea mays
  Clone ID: MRT4577_127206C.1
atgtcgggagaacacgccaagagggagatggagatcggcaacaagcccatcggcgacaagcccactacaagccacgagaaggcttcatcggaagagtcccgcaaaaaggggaaggggaaggagaagaaagcctcttcccacaagtcgcatcagagtggcaacaagaaaaagaagatgaggaaggtggtctactacgagaccgatacttcatcaccttccacctccggctccgacgcgccctccgtaatttctaagcgtcatgagcgcaagaagtttagtaagatccccttacgctatcctcgcattcctaaacatacgcctttactttccgtcccattaggcaaaccactaacttttgatggtgaagattatgcaaggtggagtgatttaatgcgatttcatctaacctcactccacaaaagtatatgggatgtcgttgagtttggtgtacaggtaccatccgtaggggatgaagattatgatgaggacgaggtggcccaaatcgagcacttcaactcccaagccacaactatactcctcgcctctctaagtcgagaggagtataacaaggtgcaagggttgaagagcgccaaggaagtttgggacgtgctcaagaccgcacacgagggagatgagcttaccaagatcaccaagcgggagacgatcaagggggagctcgtgcgcaacctcgggagcaaaaagtgggatgaccacgagatggttaaggttattcttagatcactcattttccttaaccctactcaagttcaattaattcgtggtaatcctagatatacactaatgactcccgaggaagtaatcgggaattttgtgagctttgagtacatgatcaagggctcaaagaaaatcaatgagctagatgatccctccacatccgaagcacaaccggtcgcatttaaggcgacgaaggagaagaaggaggagtctacaccgagtagacaaccaatcgacgcctcaaagctcgacaacgaggaaatggcgtttgtcatcaagagcttccgccaaatcctcaagcaaaggagaaggaaagattacaagccccgctccaagaaggtttgctacaagtgtggtaagcccagtcactttatagcaaaatgtcctatttctagtgacagtgacaggggcgacgacaagaaggggagaagaaaggagaagaagaaatactacaagaagaagggtggcgacgctcatgtatgccgcgagtgggactcggacgagagctcctccgactcctcctccgacgaggacgccgccaacatcgccatcaacaaaggccttctcttccccaacgtcggccacaagtgcctcatggcaaaggacggcaaaaagaagaaggttaaatccaaatcctccactagatatgagtcttctagcgatgataatgctagtgatgaggaagataatttgcgtacactttttgccaacctaaacatgcaacaaaaggaaaaattaaatggattgattagtgctatccatgaaaaagatgatctcttggactcccaagaagacttccttattaaagaaaacaagaagcatgttaaggttaaaaatgcttatgctctagaagtagaaaagtgcgaaaaattatctagtgagctaagcatttgccataagactattgacaaccttagaaatgaaaatgctaatttgttagctaaggttgattcaaatgtttgtgatgtttcaattcccaatcctagaagtgataatgatgatttgcttgctaagattgaagaattgaacatttctcttgctagccttagagatgaaaatgaaaaattgcttgctaaggctaaagattttgatgtttgcaatgctaccatttctgaccttagaagtaaaaatgatatattgcatgctaaggttgtagaattaaaatcttgcaaaccatctacatctaccgttgagcacacttctatttgtactagatgtagagatgttgatattaatgctattcatgatcacatggatttaattaaacaacaaaatgatcatatagcaaaattagatgctaaaattgccgagcatgaacttgaaaatgaaaattttaaatttgctcgtagtatgctttatagtgggagacgccctggcattaaggatggcattggcttccaacagggaggcaatgtcaagcttaatgcccctcctaagaaattgtctaattttgttaagggcaaggctcccatgcctcaagataacgagggttacattttgtaccctgtcggttatcctgagagcaaaattaggagaattcattctaggaagtctcactctggccctaaccatgcatttatgtataagggtgagacatctagttctaggcaaccaacccgtgctaagttgcctaagaagaaaactcctagtgcatcaaatgatcatgacatttcatttaaaacttttgatgcatcatatgtcttaactaacaaattcggcaaggtttatgcatccgggggctcaagttggataatcgacagcgggtgcacaaaccacatgacaggggagaagaagatgttctcctcctacgagaaaaaccaagatccccaaagagcgatcacattcggggatggaaatcaaggtgtcactgtctttagaagaagtgatgattcaatagcatttaagggtgtgttagagggtcagctatacttagtagattttgatagagctgaactcgacacatgcttaattgctaagactaacatgggttggctctggcaccaccgactggcccatgttgggatgaagaatcttcataagcttctaaagggagagcacattttaggattaacaaatgttcattttgagaaagacaggatttgtagcgcatgccaagcaggaaagcaagttggtgctcaccatccacataagaacatcatgacgactgacaggccactggaactcctacacatggacctattcggcccgattgcttacataagcatcggcgggagtaagtactgtctagttattgtggatgattattctcgcttcacttgggtattctttttgcaggaaaaatctcacacccaagagactttaaaaggattcttgagacgggctcaaaacgagttcggcttaaggatcaagaaaattagaagtgacaacgagacggagttcaagaactcacaaatcgaaggcttccttgaggaggagggcatcaagcatgagttctcttctccctacacaccacaacaaaatggtgtagtggagaggaagaatagaactctattggacatggaaagaaccatgcttgatgagtacaagacttcggatcagttttgggccgaggcggtcaacaccgcctgctacgccatcaaccgagtcttcggtagcaaatgctttattcttattaaaagaggtagaaaatctaaatttgctcctaagactgtagaaggctttttactaggatatgattcaaacacaagggcatatagagtctttaacaagtcctctggacaagttgaagtttcttgtgacgttgtgtttgatgagactaacgactctcaagtagagcaagttgatcttgatgagataggtgaggaagaggctccatgcatcgcactaaggaacatgtccattggggatgtgtgtcctaaggaacccgaagagcctccaagtgcacaagatcaaccatcctcctccacgcaagcatctccaccaactcaaaatgaggatgaggctcaaagtgatgaaggagaaaatcaagcaaatgagccacctcaagatgacgacaatgatcaagggggagatgcaaatgatcaagacaaggaggatgaagaaccaaggccgccacacccaagagtccaccaagcaatccaacgagatcaccccgtcgacaccatcctcggcgacattcataagggggtaaccactagatctcgtgttgctcatttttgtgaacattactcttttgtttcctctattgaaccacgtaggatagaggaagcacttcaagattcggattgggtggtggcgatgcaagaggagctcaacaacttcacaaggaatgaggtatggcatttggttccacgtcctaatcaaaatgttgtaggaaccaagtgggtgttccgcaacaagcaagacgagcatggtgtggtgacaaggaacaaagcccgacttgtggcaaaaggatactcccaagtcgaaggtttggatttcagtgaaacctatgcacccgtagctaggcttgagtcaattcgtatattattggcctatgctacttaccatggcttcaagctttatcaaatggatgtgaagagtgctttcctcaatggaccaatcaaggaagaagtctatgttgagcaacctcccggctttgaagatagcgagtaccctaaccatgtatataagctctctaaggcgctttatgggctcaagcaagccccaagagcatggtatgaatgccttagagattttcttatcactaatggattcaaagtcggaaaggccgatcctacactctttaccaaaacacttgaaaatgatttattcgtatgccaaatttatgttgatgatattatatttgggtctactaacgaatctacatgtgaagagtttagtaggatcatgacacaaaaattcgagatgtctatgatggggtag

SEQ ID NO: 29820 - DNA, 4038 bp, Zea mays
  Clone ID: MRT4577_127207C.1
atgtcgggagcatccgccaagaaggagatcggaaccggcgacaagtccgcaagctcggggagaacacactcaagggagtccgcccacaagcacaaggaggaatcctcttcctccatcaagtcccaatggaagggtgacaagaagaagaagatgaagaaggtggtctactacgagaccgactcttcgtcaccctccacctccggcaaaccacttatgcttgatggtgaagattattctatgtggagtgataaaatgaggcatcatctaacctcactccacaaaagcatatgggatatttttgagtatggagcgcaggtacaaaaggaaggggacaaggattatgattcggaggaggtcgaacaaatccaacacttcaactcccaagccactactatactcctcgcctctctaagtcgagaggagtataataaggtgcaaggattgaagagcgcaaaggagatttgggatgtgctcaagaccacgcacgaaggagacgaggtgaccaagatcaccaagagggagacgatcgagggggagctcggtcgattcatgcttcaccaaggggaggagccacaagcgatgtacaaccggctcaagaccttgatgaaccaagtgcacaacctcgggagcaccaaatgggatgaccatgagatgatcaaggttattcttagatcactcgtttttcttaaccctacacaagttcaattaattcgtggtgatccaaggtataaactaatgtctcccgaggaagtgataggaaagtttgtgagctttgaattgatgatcaaaggctccaagaaaatcatcgagcaaggcgccacctcaacacctgaggtgcaacccgtcgcattcaaggcgacggaagaagaaaagaaggattctacaccaagtaggattcccatcgacgcctccaagctcgacaacgaggaaatgacgctcatcatcaagagcttccgccaaatcctcaagcaaaggagggggaaggattacaaacccagctctaagaaggtttgctacaaatgtggtaagcccggtcattttattgcaaaatgtccattatcaagtgattgtgacaggggcgatgacaagaagggaaagagaagagaaaagaagaggtactacaaaaagaagggcggcgatactcatgtttgccgggagtgggactccgacgagagctccatcgacttctcctccgacgaggacgccacaaacatcgccgtcaccaaagggcttctcttccccaacgtcggccacaaccaagaggacttccttattaaagaaaacaaaaagcatgttaaggttaaaaatgcttatgctctggaggtagaaaaatgtgaaaaattaactagtgagctaagcacttgccatgacactaattccaaccttagaattgagaatgctaatttgattgctaaggttgagaagtcaaatatttgtgatgattcaattgtcaatcttagaaatgataatgctagttcaattgctaagattgaaaaattgaatgcctctcttgctagccttagaaatgagaatgaaaagttaattgctaaggctaaagacttagatgtttgcaatgtttctatttccaatcttagagatgagaacactattttacatgctaagattgttgaactaaaaacttgcaaaccctctacatctaccattgagcatgttacaatttgtactagatgtagagacattaatgttgatgctattcatgatcacttagctttaattaagaaacaaaacgatcacatagctcaacttagtgccaaaattaatgagcatgacttagagaatgaaaaaattaaatttgctagaagcatgcttatagtgggagacgccctggcattaaggatggcattggctttcaacagggagacaatgtcaagcttaatgcccctcctaaaagattgtctaattttgttaagggcaaggctcccatgcctcaggataacgagggttacattttataccctgccggttatcccgagcacaaaattaggagaattcactctagaaagtctcactctggctctcatcatgcttttatgtataagagaaaaatcacaaacccaagagacattgaaggaattcttgagacaggctcaaaatgagttcggcttaaggataaaaaagataagaagcgacaacggaacggagttcaagaactcacaaatagaaggcttccttgaggaggagggcatcaagcatgagttctcttctccctacacgccacaacaaaatggtgtagtggagaggaagaatagaactctattagacatggaaaggaccatgcttgatgagtacaagacttcggatcggttttgggccgaggcggtcaacaccgcttgctacgccatcaaccgagtctttggtagcaaatgctttattcttgttaaaagaggtagaaaaactaaatttgctcctaaggttgtagaaggctttttacttggttatgattcaaacacaagggcatatagagtctttaacaagtccactggactagttgaagtttcttgtgacattgtgtttgatgagactaacggctctcaagtagagcaagttgatcttgatgagctagatgatgaagaggctccatgcgtcgcgctaaggaacatgtccattggggatgtgtgtcctaaggaatccgaagagcctccacatgcacaagatcaaccatcttcctccatgcaagcatctccaccaactcaagacgaggatgggtctcaagatgatgaaggagaagatcaagaagatgagccacctcaagaagacgacaatgatcaaggggagatgcaaatgatcaagacaaggaagatgaacaagatccaagaccgccacacccaagagtccaccaagcaatccaacaagatcaccccggtagaggaagcacttcaagatttggattgggtgttggcgatgcaagaggatctcaacaacttcacgaggaatgaggtatggcatttagttccacgtcctaaccaaaatgttatagaaaccaagtgggtcttccacaacaagcaagatgagcatggtgtggtgacaagaaacaaagcccgacttgtggccaagggatattcacaagtcgaaggtttggattttggtgaaacctatgcacccatagctaggcttgagtcaatttgtatattacttgcctatgctacttaccatggcttcaagctttatcaaatggacgtgaagagtgccttcctcaatggaccaatcaaggaagaggtctatgttgggcaacctcccggctttgaagatagtgagtatcctaaccatgtctacaaactctctaaggtgctttatgggctcaagcaagccccgagagcatggtatgaatgcctaagagattttcttatcactaatagcttcaaagtcggcaaggccgatcctactctctttactaaaactattgaaaatgatttgtttgtgtgccaaatttatgttgatgatatcatatttgggtctactaacaaatctatttgtgaagagtttagtaggatcatgactcaaaaattcgagatgtcaatgatgggggagttgaagtatttcttaggattccaagtcaagcaactccaagaaggcaccttcattagccaaacgaagtacattcaagatattcttaccaagtttgggatgaaggatgctaaacccatcaagacacccatgggaactaatgggcatctcgacctcgacacgggagcgtgtaagattgatagaaagagcacatcagggacttgtcagttattgggaagatccctggtgtcttgggcttctaagaaacaaaattctgtagctctttctaccgccgaagccgagtatattgccgcaggccattgttgcgcgcaattgctttggataaggcaaactcatagggattatggttacaaattaaccaaagtccctctcctatgtgataatgagagtgcaatccgcatggcggataatcccgttgagcatagccgcactaaacacatagtcattcggtatcactttttgagggatcaccaacaacgggggatatcgtga

SEQ ID NO: 29821 - DNA, 1785 bp, Zea mays
  Clone ID: MRT4577_127208C.1
atggcaagaaccatgcttgatgagtacaagacagcggaccagttttgggtggaggcgattaacaccgcttgctactccatcaaccggttatatcttcaccgaatcctcaagaagacatcatatgaattcctcactggtaaaaagcccaatgtttcatattttagagtctttgggagcaaatattttattcttattaaaagaggtagaagttctaaatttgctcctaaagcagtagaaggctttttattaggttatgacacaaacacaagggcatatagagtcttcaacaaatccactggattagttgaagtttcttgtgacattgtgtttgatgagactaatggctcccaagtggagcaagttgatcttgatgaattagatgatgaagaggctccatgcatcactctaaggaacatgtccattggtgatgctcaagatgatgaagatgaatatcaagaggatgagccacctcaagaaagggacattgatcaagggggagatgaagataatgaagacaaggaagatgatcaagaaattagggatcaaagaccgccacacccaagagtccaccaagcaattcaaagagatcaccccgtcaactccatacttggtgacattcataagagggtaccaagtgggtatttcgcaacaagcaagatgagcatggtgtggtgtcaaggaacaaagcccgacttgtggcaaagggatactcacaagtcgaagatttatcaaatggacgtaaagagtgccttcctcaatggacctatcaaggaagaggtctatgttgagcaacctcccggatttgaagatagtgagtatcctaaccatgtgtataagctctcaaaggcgctttatgggctcaagcaagtcccaagagcatggtatgaatgcctaagagactttcttatcactaatggcttcaaagtcggcaaagccgatcctactctcttcactaaaactgttgcaaaagacttgttcttatgccaaatttatgttgatgatattatatttgggtctactaacaagtcaacttgtgaagagtttagtaggatcatgatacagaaattcgagatgtctatgatgggggagctgaaccaaactaagtacattcaagacatacttaagaagattgggatgaagaatggcaaacccatcaagacacccatgggaaccaatgggcatctcgacctcgacacgggaggtaagtccgtggatcaaaaggtatatcggtcgatgataggttccttactctacttatgtgcatctcgaccgaatattatggtttctgtatgcatgtgtgcaaggttcgagacaaatcctaaggaagttcaccttagagctgtaaaaagaatcatgagatatttagtttacactcctaagtttgggctttggtgccccaaggcatctacctttgatctaattgggtattccgataccgattatgccggatgtaaaatagatagaaagagcacatcagggacttgtcaggttctggggagatccctagtgtcatgggcttcaaagaaacaaaacttcgtatctctttccaccgccgaagccgagtacattgccgcaggacattgttgtgcacaattactttggatgaggcaaaccctcagggactatggctacaaattgagcaaagtccctctcctatgtgataatgagagtgcaatccgcatggcggataatcccgttaaacacagccgcactaagcacttagacatccgatatcactttttgagagatcaccaacaaaagaggatatcaaaattgcttatgtga

SEQ ID NO: 29822 - DNA, 1314 bp, Zea mays
  Clone ID: MRT4577_127209C.1
atgtcgggagatcacgccaagaaggagatggagaccgacgacaagcccactacgagtcacgggagcacttcatcggaagagtcccgcaccaagaggaaggagaagaggaaggactcctccaaagggaagaagtcttcttcacactccaaagggaaggagaagaaatcctcttctcaccacaaagagaagaaggaaaaatcttcttcccacaagccgcatcggagtggggacaagaagaagaggatgaggaaggtggtctactacgagaccgattcttcatcaacatccacctccggctccgacgcggcatccgtcacttctaagcgccaagagcgcaagaagtatagggatgaagattatgatgaggatgaagtggcccaaatcgagcacttcaactcccaagccacaaccatactcctcgcctctctaagtaaggaggaatacaacaaggtgcaagggttgaagaatgcaaaggagatttgggacttactcaagaccgcgcacgagggtgatgaactcaccaagatcaccaagcgggaaacaatcgaaggggagctcggtcgcttccgtcttcgccaaggagaggagccacaagatatgtacaaccggctcaaaaccttggtgaaccaagtgcgcaacctcgggagcaagaaatgggatgatcacgaggtggttaaggttattttaagatcgcttattttccttaaccctactcaagtacaattaattcgtggcaacccaagatatacactaatgactcccgaggaagttatcgggaattttgtgagctttgaatgtatgatcaagggctcaaagaagatcaatgagcttgatgatccctccacgtccgaagcacaaccggtggcatttaaggcgacagaggaaaagaaggaggagtctgcaccgagtagacaaccaattgacgcctccaagctcgacaatgagaagatggctttaatcatcaaaagctttcgccaaatccacaagcaacggaaggggaaggattacaaatcccgttccaagaaggtttgctacaagtgtggtaagcccggtcactttattgctaaatgtccattatcaagtgacagtgatagggataacgacaagaagggcaagaggagagaaaagaagaggtaccacaagaagaggggaggcgatgcccacgtatgccgcgagtgggactccgacgagagctccaccgagtcctcctccgacgaggacgccgccaacatcgccgtcaccaagggactcctcttccccaacgtcggtcacaagtgcctcatggcaaatgacggcaaaaagaagaagccttag

SEQ ID NO: 29823 - DNA, 702 bp, Zea mays
  Clone ID: MRT4577_127210C.1
atgtcaggagatcacgccaagaaggagatggagaccggcgacaagcccactacaagccacaggaaggcttcatcggaagagtcccgcaacaaggggaagaagaaggaaaagaaatcctcctcccacaagtcgcatcagagtggcgacaagataaagaagatgaggaaggtggtctactacgagaccgatacttcatcaccttccacctccggctctgacgcgccgtccgttacttctaagcgccatgagcgcaagaagtttagtaagatccccctacgctatcctcgcattcctaaacatacacctttactttccgtcccattaggcaaaccaccaacttttgatggtgaagattatgctaggtggagtgatatgatgcgatatcacctaacctcactccacaaaagtatatgggatgttgttgagtttggtgtacaggtaccttccgtaggggatgaagattatgatgaggacgaagtggcccaaatccaacacttcaactcccaagccacaactatactcctcgcctctctaagtcgagaggagtataataaggtgcaagggttgaagagtgctaaggagatttgggacgtgctaaagatcgcgcacgaaggagacgaggtgaccaagatcaccaagcgggaaacaatcgagggggagcttggtcgcttcctgagagcacctagaggggggggggggtga

SEQ ID NO: 29824 - DNA, 1144 bp, Zea mays
  unsure (1)..(1144): unsure at all n locations
  Clone ID: MRT4577_127211C.1
tgcaggtcgactttagacttcactccaagacacataaacaaaagattatancctctccaagtcccaaactcattccaaagatttagtgactagtgagagagagatatttgtgttcattcgagttcttgtcgcttggatcacttttcttcttccccaattcttgttctcaagcaacttgtaatcgagcaagagacacaaagttgtggtggcccttgtaaggggtctaagtgacccgttgattaaggagaaaagctcactcggtctaggtgaccgtttgagagagggaaagggttgaaagagacccggtctttgtgaccacctcaacggggagtaggtttgcaagaaccgaacctcgataaaacaaatcaccgtgttatccgctttcatttgcttgtgatttgttttcgccctctctttcggactcgattatatttctaacgctaaccccggcttatagttgtgcttaaactttataaatttcagatttgcctattcacccccctctaggcgactttcaattggtatcagagcccggtacttcattagagcctaaccgctcaaagttatgtcgggagctcacgctaagaaggagatggtgaccggcgagaagcccgccacaagccacgggaaggctccatcgggggagtccggcaacaagaagagggaggaatcacctccccgcgtcaagtcgcaccggagtggcgacaagaagaagaaaatgaagaaagtggtctactacaagaccgattcttcgtcgccctccacctccggctccgacacgccttccatcacttttaagcgccatgagcgcaagaagtttagtaagatccccttacgctatcctcgtatttccaaatgcacccctttacttttcgtcccactaggcaaaccaccggtttttgacggtgaagattattgtatgtggagtgataaaatgaggcaccatctaacctcactccacgctagtatttgggacattggtgaatttggtgcgcaggaaccattcgtgggggatgaaggttatgactcggacgaggtagcccaaaatccgcacttcaactcccaagccactactatactcctcacctctttaagtcgagaaggagtataattaggtgcaaggggttgaagagcggccaagaga

SEQ ID NO: 29825 - DNA, 569 bp, Zea mays
  Clone ID: MRT4577_127212C.1
acacacgaagcctcccgtcagtgggcaggaccgaacaccaaagtgctacgcatagaactagagcggccctgggctgcggggccattgagagagcgcaacaacaagcgcgcgattataaggaaagcagctgcacatgggtgcctgatggccaaacctgccacaagcggctgccagaaaggacttcaaagcacatggaggattcacgcgcccaagactacaacttacaacaaggcgcttgatggtgagaggaagtacaggcagccacatgtccaacggaagaaacaaaccttggcacatataaaccaacaaaccattgcagcgcaacaacaacaacaacagtcagatggcataactgagccagctagccgaggtgaaccgtgcaacatacttgcaacactaactggttgcaaccgacccactcgctgtggcgaacgcaactgcataccatcaacaacaacagctgcagcagtccatgccaaggctcagggaactagccatggcaaagcctgacgacaacctacaaatactgtcatccatccagctacgggcgggcaatgcaccgacttacc

SEQ ID NO: 29826 - DNA, 4245 bp, Zea mays
  Clone ID: MRT4577_127213C.1
atgtcgggagaacacgccaagaaggagatggagactggcgacaagcccactacaagccacgggaaggctacatcgcaagagtcccgcaacaaagggaaggggaaggagaagaaagcctcttcccacaagtcgcatcggagtggcgacaagaaaaagaagatgaggaaggtggtctactacgagaccgacacttcatcaccttccacctccggctccgacgcgccctccataacttctaagcgccatgagcgcaagaagtttagggatgaggattatgatgaggacgaggtggcccaaatcgagcacttcaactcccaagccacaactatactcctcgcctctttaagtcgagaggagtataacaaggtgcaaggattaaagagcgccaaggaagtttgggacgtgctcaagaccgcgcacgaaggagatgagctaaccaagatcaccaagcgggagacgatcgagggggagctcggtcgctttcggcttcgcaaaggggaagagccacaagacatgtacaactggctcaaaaccttggtgaaccaagtgcgcaacctcgggagcaaaaagtgggatgaccacgagatggttaaggaagtaatcgagaattttgtgagctttgagtatatgatcaagggcttaaagaaaatcaacgagctagatgatccctccacatccgaagcacaatcgattgcattcaaagcaacggaggagaagaaggaggagtctacgtcaagtagacaaccaatcgacgcctcaaagctcgacaatgaggaaatggcgctcgtcatcaagagcttccgccaaatcctcaaacaaaggagggggaaggactataaaccccgctccaagaaagtgtgctacaagtgtggtaagcccggtcactttatagcaaaatgtcctatttctagtgacagtgacaggggcgacgacaagaaggggagaagaaaggagaagaagaagtactacaagaagaagggcggtgatgcccatgtttgccgggagtgggactccgacaagagctccaccgactcctcctccgacgaggacgccgcaaacatcgccatcaccaagggacttctcttccccaacgtcggccacaagtgcctcatggtcaaggacggcaaaaagaagaaggttaaatccaaatcctccactagatatgagtcctctagtgatgataatgctagtgatgaggaagataatttgcgtaccctttttgccaacttaaacatgcaacaaaaagagaaattaaatgaattgattagtgctatccatgagaaggatgatctcttggacacccaagaggacttccttattaaagaaaataagaagcatgttaaagttaaaaatgcttatgctctagaagtagaaaagtgcgaaaaattatctagtgagctaagcacttgccatgagactatagacaaccttagaagtgaaaatgctgatttgttagctaaggttgattcaaatgtttgcaatgtttcaattcccaatcttggaaatgataatgatgatttgcttgctaagattgaagaattaaacatttctcttgctagccttaggattgagaatgaaaaattaattgctaaggctaaagaattagatgtttgcaatgttacaaattctgatcttagagataaaaatgatatattgcatgctaagattgttgaacttaattcttgcaaaccctctacatctatcattgaacatactactatttgcactagatgtagagatgttaacattgatgctattcatgatcacatggctttaattaaacaacaaaatgatcatatagcaaaattagatgctaaaattgccgagcatgacttagagaatgaaaaatttaaatttgctagaagcatgctctatagagggagacgccctggcattaaggatggcattggcttccaacagggaggcaatgtcaaacttaatgcccctcctaagaaattgtctaactttgttaagggcaaggctcccatgcctcaggataacgagggttacattttgtaccctgccggttatcccgaggacaaaattaggagaattcactctaggaagtctcactctggacctaaccatgcttttatatataagggtgagacatctagttctaggcaaccaacccgtgctaagttgcctgaaaagaaaactcctagtgcatcaaatgatcatgacatttcatttaaaacttttgatgcatcttatgttttaactaacaaatccggcaaggtttatgcatccgggggctcaagttgggtaatcgaaagcggatgcacaaaccacatgacaggggagaaaaagatgttctcctcctacgagaaaaaccaagatccccaacgagctatcacattcggggatggaaatcaaggattaacaaatgttcattttgagaaagacaggatttgtagcgcatgccaagcagggaagcaagttggaacccatcatccacacaagaacatcatgacgaccgacaggccactggagctcctacacatggatctattcggcccgattgcttacataagcatcggcgggaaaaaatctcacacccaagagaccttaaagggattcttgagacgggctcaaaatgagttcggcttgagaatcaagaaaattagaagcgacaacgggacggagttcaagaactctcaaattgaaggcttccttgaggaggagggcatcaagcatgagttctcttctccctacaccccacaacaaaatggtgtagtagagaggaagaatagaactctattggacatggcaagaaccatgcttgatgagtacaagactttggatcggttttgggccgaggcggtcaacaccgcctgctacgccatcaaccgagtctttggtagcaaatgctttatacttgttaaaagaggtagaaaatctaaatttgctcctaagactatagaaggctttttactagtatatgattcgaacacaagggcatatagagtctttaacaagtcctctggacaagttgaagtttcttgtgacgttgtgtttgatgagactaacggctctcacgtagagcaggttgatcttgatgagataggtgttgaagaggctccgtgcatcgcgctaaggaacatgtccattggggatgtgtgtcctaaggaatccgaagagcctccaaatgcacaagatcaaccatcctcctccacgcaagcatctccaccaactcaaaatgaggatgaggctcaagttgatgaagggcaagatcaagaagatgagccacctcaagatgatggcaatgatcaagggggagatgcaaatgatcaagacaaggaggatgaagaaccaaggccgccacacccaagagtccaccaagcaatccaacgagatcaccccgtcgacaccatcctcggcgacattcataagggggtaactactagatctcgtgttgcacatttttgtgaacattactcttttgtttcctctattgagccacacagggtagaggaagcacttcaagattcagattgggtggtggcgatgcaagaggagctcaacaacttcactaggaatgaggtatggcatttggttccacgtcttaaccaaaatgttgtaggaaccaagtgggtttgccgcaacaagcaagatgagcatggtgtggtgacaaggaacaaagctcgacttgtggccaagggatactaccaagtcgaaggtttggatttcggtgaaacctatgcacccgtagctaggcttgagtcaattcgtatattattggcctatgctacttaccatggcttcaagctttatcaaatggacgtgaaaagtgccttcctcaatggaccaatcaaggaagaggtctatgttgagcaacctctcggctttgaagataagtttagtaggatcatgacacagaaattcgagatgtctatgatgggggagttgaagtatttcttgggatttcaagtgaagcaactccaagagggcaccttcattagccaaacgaagtatactcaaaacattctaaacaagtttgggatgaaggatgccaaacccatcaagactcccatgggaaccaatgggcatctcgacctcgacacgggaggtaaatctgtagatcaaaagaaagagcacatcggggacttgccagttcttgggaagatccttggtgtcttgggcttcaaagaagcaatattccgtagctctttcaaccaccgaagccgagtatattgccgcaggccattgttgcgcgcaattgctttggatgaggcaaacccttag

SEQ ID NO: 29827 - DNA, 111 bp, Zea mays
  Clone ID: MRT4577_127214C.1
tttctcaccaatgatgacctagtttatttgagacaccaatggatgcaaagtttattgaaacacgggggtggcatttttggaattcatcactggcttggcttgttaagagcc

SEQ ID NO: 29828 - DNA, 4725 bp, Zea mays
  Clone ID: MRT4577_127215C.1
ctaggtgctctcaataatatccggtcgagatgcacataaatagagtaaagaacctatcatcgaccggtataccttttgatctacgaatttacctcccgtgttgaggtcgagatgcccattggttcccatgggtgtcttgatgggcttggcatccttcatcccaaacttgtttagaatgtcttgaatatactttgtttggctaatgaaggtgccctcttggagttgcttcacttgaaatcccaagaagtacttcaactcccccatcattgacatctcgaatttttgtgtcatgatcctactaaattcttcacatgtagattcgttagtagacccaaatatgatatcatcaacataaatttggcatacaaacaaatcattgtcaaaagttttagtaaataaagtaggatcggcctttccaactttgaagccgttagtgataaggaaatctcttaggcattcataccatgctcttggggcttgcttgagcccataaagcgccttagagagtttatacacatagttaggatactcactatcttcaaagccgggaggttgctcaacatagacctcttccttgattgatccgttgaggaaggcacttttcacgtccatttgataaagcttaaagccatggtaagtagcataggcaagtaatatgcgaattgattcaagcctagctatgggtgcataggtttcaccgaaatccaaaccttcgacttgtgaatatcctttggccacaagtcgggctttgttccttgtcaccacaccatgctcatcttgcttgttgcggaagacccacttggttcctacaacattttggttaggacgtggaaccaaatgccatacctcgttcctagtgaagttgttgagctcctcttgcatcgccaccacccaatccgaatcttgaagtgcttcctctactttgtgtggctcaatagaggaaacaaaagagtaatgctcacaaaaatgtgcaacacgagatctagtggttacccccttatgaatgtcgccgaggatggtgtcgacggggtgatctcgttggattgcttggtggactcttgggtgtggcggtctcggttccgcatcctctttgtcttgatcatttgcatctcccccttgatcattgctgtcatcttgaggtggctcatctttttgatcttctccttcatcaacttgagcctcatcctcattttgagttggtggagatgcttgcgtggaggaggatggttgatcttgtgcatttggaggctctttggattctttaggacacacatccccaatggacatgttccttagcgcgacgcacggagcctcttcatcacctatctcatcaagatcaacttgctctacttgagagccgttagtctcatcaaacacaacgtcacaagaaacttcaacttgtccagaggacttgttaaagactctatatgcccttgtgtttgaatcatatcctagtaaaaagccttctacagtcttaggagcaaatttagattttctacctcttttaacaagaataaagcatttgctaccaaagactctaaaatatgaaatattgggctttttaccgataagaagttcatatgatgtcttcttgaggattcggtgtagatacaaccggttgatggcgtagcaggcggtgttgaccgcctcggcccaaaaccgatccgaagtcttgtactcatcaagcatggttcttgccatgtccaatagagttctattcttcctctctactacaccattttgttgtggcgtgtagggagaagagaactcatgcttgatgccctcttcctcaaggaagccttcaatttgagagttcttgaactccgtcccgttgtcgcttctaattttcttgatccttaagccgaactcattttgagctcgtctcaagaatccatttaagtttcttgggtatgagatttttctcccgccgatgcttatgtaagctatcgggccgaataggtccatgtgtaggagctcgagtggcctgtcagtcgtcatgatgttcttgtgtggatgatgaacaccaacttgcttccctgcctgacatgcgctacaaatcctgtctttctcaaaatgaacatttgttagtcccaaaatgtgttctccctttagaagtttgtgaacattcttcattccaacatgtgctagtcggcgatgccagagccagcccatgttagtcttagcaattaagcaagtgtcgagttcagctctatcaaaatctactaagtatagctgaccctctaacactcccttaaatgctattgaatcatcactccttctaaagacagtaacacctacatcttgatttccatcctcgaatgtgatagctcgttggggatcttggtttttctcgtaggaggagaacatcttcttctcccctgtcatgtggtttgtgcacccgctatcgatgatccaacttgagcccccagatgcataaacccaaacacaagtctttgaccccttgtgcttgcccccaacatacttggcaactacattgccggatttgttagttaaaacataagatgcatcaaaagttttaaatgaaatgttatgatcatttgatgcactaggagttttcttcttaggcaatttagcatgggttgattgcctagaactagatgtctcacccttatacataaaagcatgattagggccagagtgagacttcctagagtgaattctcctaattttgctctcgggataaccggcagggtaaaaaatgtaaccctcgttatcctgaggcatgggagccttgcccttaacaaaattagacaatcttttaggaggggcattaagtttgatattgtcccccttttggaagccaatgtcatccttgatgccggggcgtctcccactatagagcatgcttctagcaaatttaaacttttcattttctaagtcatgctcggcaattttagcatctaatttagctatatgatcattttgttgtttaattaaagccatatgatcatgaatagcatcaatgttaatgtctctacatctagtgcaaatagtgacatgctcagtggtagatgtagagggtttgcaagaattaagttcaacaatcttagcacataaaatgtcattgttatctctaagatcggaaatggaagcattgcaaacatctaattctttagccttagcaagcaatttttcattttcaatcctaaggctagcaagagatatgttcaattcttcaatcttagcaagtaaatcaacattatcatttctaagattgggaattgaaacatcacaagcatttgaatcaaccttagtaattaatctagcattctcatttctaaggttggcaattaaatcatgtgatgtgcctagctcactagttaatttttcacatttttcaacttctagagcgtaagcatttttaaccttaacatgctttttgttttccttgattaggaagtcctcttgggtgtccaagagttcatccttttcatggatggaattgtggccgacattggggaagaggagtcccttggtgacggcgatgttggcggcgtcctcgtcggaggaggagtcggtggagctctcgtcggagtcccactcccggcaaacatgggcatcgccgcccttcttcttgtagtatctcttcttctcctttcttctccctttcttgtcgtcgcccctgtcactatcactagataatggacatttagaaatgaaatgaccgggcttaccacacttgtagcacactttcttggagcggggcttgtaatccttccccctcctttgcgtgaggatttggctgaagctcttgatgatgagcgtcatttcctcgttgtcgagcttggaggcgtcgatgggtgttctacttgatgtagatttctccttcttttcctccgtcgccttgaatgcgaccggttgtgcttcggacgtggaggggccatcaagctcgttgattttctttgagccacgaattaattgaacttgtgtagggttaaggaaaacaagtgatctaagaataaccttaaccatttcgtggtcatcccattttttgctcccgaggttgcgcacttggttcaccaaggttttgagccggttgtacatgtcttgtggctcctccccttggcgaagtcggaagcgatcgagctccccctcgatcgtctcccgcttggtgatcttggtcacctcgtctccttcgtgcgcggtctttagcacgtcccaaatttcctttgcgctattcaacccttgcaccttattatactcctctcgacttagagaggctaggagtatagtggtggcttgggagttgaagtgcataatttgggctacttcatcctcatcatagtcttcatcccttttgtggagtgaggttaggtgatatcgcatcatatcactccacctagcataatcttcaccatcaaacattggtggtttgcctaatgggacggaaagtaatggcgtatgtttaggaatgcgagggtagcgtaaggggatcttactaaactttttgcgctcatggcgcttagaagttacggacggcgtgtcggagccggaggtggatggcgacgaggagtcggtctcgtagtagaccaccttcctcatcttcttcttcttcttgtcaccgctccgacgcgacttgtgtgaaggggattccttttccttccccttccctttgttgtaggactctcccgatggagcctccccgtggcttgtaatgggcttctcgccggtccccatctctttcttggcgtgatctcccgacat

SEQ ID NO: 29829 - DNA, 449 bp, Zea mays
  Clone ID: MRT4577_127216C.1
gtacccttccccactacgcgaccgctagttactctatcggatcctgaccacgcccgcctaccaggccaccaccaccaccacccacaaccacaaatcacccatgccgaggcgcatcgccgcgccggccagcgttcctggcgctggccgcggcggctcccgccgcgctggcgcaggctcccgggcccgcggcgacgccgagggggccgacgaacgtgacggcgatcctgcagaaggccggccagtacatcatgttcatgcggctgatgaaggagacgcatcaccgaacccacctgcacacccagctgaacagctcctacgccagcagcgctggcggccaccccgcgccccgccgcccaccgacaacgcccttcccaaccttaagtccggcccgctccactcgctgacgcaccaacaccacgagccgctggcgcatgcccacataccgcccc

SEQ ID NO: 29830 - DNA, 902 bp, Zea mays
  Clone ID: MRT4577_127217C.1
tcgcgatctttttttttttttttttttttttatagaattgttgtctcgatttattataactacagcagtttacaactgactttaatccgaaaaattgacggatccaaagatacatttttatttgtgctttctaactagtataacacatctcgattccaaaactgttcaaattctatgtaatcttttaatttctactaccgcccgaccatcgaagaaccggaggtgccgtaatcggagggatcccagtccagcgtcgagttgtgcaccgccgtgagcgagacgaacacctcgtccatggccggccgcgcgcggggctccgtggccacgcaccgcagcgccagcgcagccatggcgagcgcgaggtcgatcgggaagtccccgtgcaggcgcgggtccatgaacgcgcgcaccttggcgcggtccacgtcctcgccgccgtccgccaccagcgcctcctccgcggcctcccacagcagcgtctcctcgcccgtgccggcgtccgcgaacgcagcctccttcccggacagcagctcgagcaggacgaccccgaaggcgaacacgtcgagcttgggcgtgatgaggccgtcctcgaggtactcgggggcgaggtatccctgcgtgcccgcgacgtggcgcgtgagctgcgcgccgccgtcggacgcggcgaccgtgcgcgccagcccgaagctcgacaccttggcgcggaggtcggcgtcgagcaggacgttgctgctcttgaggttcttgtgcacgcacggcgggttggtgtagtggtggaggtagttgagcccgtcggcgacgtcgaacgccacctgcacgcgctgcctccaccggagggtgctgccgccgccgccgtggatccagtcgctgagcgcgccgtctccgcgaactcgaagacgagg

SEQ ID NO: 29831 - DNA, 2825 bp, Zea mays
  Clone ID: MRT4577_127218C.1
atgtcgggagatcacgccaagaagatggtgatcggcggtgagaagaccgctacaagccacgggaaggctctgtcgagggagtccgccaacaagaagaaggatggatcaccttcacgcattcaatcgcacaagagtggcgagaagaagaagaaaatgaagaaattggtctactacgaggccgactcttcctcgccctctacatccggatccgacaccgcgtccgtcacttctaagcgccaagagcgcaagaagtatagtaagatccccctacgctatcctcgcattgctaaacatgctccattactttccgtcccattaggcaaaccaccgacatttgacggtgaagattattctaggtggagtgatattatgagatatcacataacctcactccacaaaagtatatgggatgttgttgagtttggtgtacaggtaccatccgtatgggatgaagattatgatgaggacgaggtggcccaaatcgtgcacttcaactcccaagccaccactatactcctcacctctctaagtcgagaggagtataacaaggtgcaaggattgaaaagcgccaaagagatttgggacgtactcaagaccgcacacgaaggagacgaggtgacaaaaatcaccaagcgggagacgatcgagggggagctcggtcgtttccggcttcgccaaggggaggagccacaagaaatgtacaactggctcaagaccttggtgaaccaagtgcgcaacctcgggagcaaaaaatgggatgaccatgaaatggtcacggaagtaataggaaaattcgtgagctttgagttgatgatcaaaggctcaaggaaaatcatcgagcaagatggtccctccactcccgaagcacaaccgatcgcattcaaggcgacggaggagaagaaggaagagtctacatcaagtagactccccatcgacgcatacaagctcgacaacgaggagatggcgctcatcatcaagagcttccgccaaatcctcaagcaaaggaggggggaggattacaaattccgctccaagaaagtgtgctacaagtgtggtaagcccggtcattttattgcaaaatgtccattatcaagtgatagtgacaggggcgacgacaagaagggaaagaggagagaaaagaagagatactacaagaagggaggcgatgcccatgtgtgccgcgagtggaactccgatgagagctcctccgattcctcctccgacgaggacgccgccaacatcgccgtcaccaagggactcctcttccccaacgtcagccacaaatgcctcatggcaaaggacggcaaaaggaagaaggtaaaatcaaagtcctccactaaatatgcaacctctagtgatgaggataattctagtgatgaggaggataatttgcgcaccctttttgccaacctaaacatgcaacaaaaagaaaaattaaatgaattgattagtgctattcatgagaaggatgaactcttggacacccaagaggacttcctaattaaggaaaataagaagcatgttaagattgattcaaatgtttgtgatgtttcaattcccaatcttagagatgataatgttagtttacttgctaagattgaagaattgaatgtctctcttgctagccttaggaatgagaatgaaaaattaattgctaaggctaaagacttagatgtttgcaacattaccatttccattcttagaagtgaaaatgacattttacatgctaagattgttgaactaaaatcttgtaaaccctctacatctaccgttgagcatgtttccatttgcaccagatgtagagacattaatgttgatgctattcatgatcacctggctttaattaagcaacaaaatgatcacatagctcaacttgatgccaaaatttctgagcatgacttagaaaacgaaaattttaaatttgccagaagcatgctctatagtgggagacgccctggcatcaagggtggcattggcttccaacagggaggcaatgtcaaacttaatgcccctcctaagagattgtccaactttgttaagggcaaggctcccatgcctcaggataacgagggttacattttgcaccctgccggttatcccgagcgcaaaattaggagaactcactctaggaagtctcactctggccctaaccatgcttttatgtataagggtgagacatctagctctaggcaaccaacccgtgctaagttgcctaagaagaaaactcctagtgcatcaaatgatcctgacatttcatttaaaacttttgatgcatcttatgttctgactaacaaatccggcaaggtagttgccaagtatgttgggggcaagcacaaggggtcaaagacttgtgtttgggtacccaaagttcttgtgtctaatgccaaaggacccaaaaccgtttgggtacctaaaatctttatgcatccgggggctcaagttggatcatccatagcggatgcacaaaccacatgacaggggagaagaagatgttctcctcctatgagaaaaaccaggatccccaaagagctatcacattcggggatggaaatcaaggtgtcactgtctttagaagaagtgatgattcaatagcatttaagggagtgttagagggtcagctataccttgtagattatgatagagctgaactcgacacttgcttaattgctaagactaacatgggttggctctggcaccgtcgactagcccatgttgcgatgaagaatcttcacaagcttctaaagggagagcacattttaggattaacaaatgttcatttcgagaaagacaggatttgtagcgcatgccaagtgaaagtcgcctag

SEQ ID NO: 29832 - DNA, 394 bp, Zea mays
  Clone ID: MRT4577_127219C.1
cggacgcgtgggctatgaacttaccgtgaccgcttgttggtaaacctctttctgtgtgttttatccaagatggtgcatctgattctattggggtaagatcccgtatttgccgttcgttcaatagactcaaatagtgcagtgtcatcagaaaaagcaaactgcacacatgaaaccttatgggtttctttggcagacatcgcctttattaatggacatctttaaattagcttgtaccgatacatgctatgtccattagagaaacgacatcctgaggcactcgccttcgctccggactgtcttagggttatcgctgatatagatatggtttacatgcttctatacccttagaactctttcgctccgaatctcgggacgagattcttttaagggggga

SEQ ID NO: 29833 - DNA, 201 bp, Zea mays
  Clone ID: MRT4577_12721C.1
cggacgcgtgggcggacgcgtgggcggacgcgtgtgtcgtgaacctggtgggcgacccttacctgggggcataagaccccggggtagccttcaagacggccatcatggactggatgacgccgcattcagccaagcccatctaccacgccgtgattaccgtcgtcgggaggccctacgccaccgaccgcgccgcggggaggc

SEQ ID NO: 29834 - DNA, 428 bp, Zea mays
  Clone ID: MRT4577_127220C.1
taccacatcatcgggggaagaaaaaacccacttacttatttcgggcacaaattccccggccggggactatgactgttttatcaccttttttttttttcttggatacctgaagttccatgatcccaagggggcgagcgtggttaatagctagattccctttaacttctctgtacctatatatatgaaataaatgtaggcgaaccgctgccaaccgataagcggactaccacgtttcccacccatgaacacctaggcctgcaaggaaaccctgtataaccacgacccctcaccttggctggaaggtggcgacctggagccctgctcctgtgtcggcgaccagacgaagactacccttatccttgcccttatgctgcacaactgagccacccacctttcaggcgccctgagtgctgctgaaccaggaccac

SEQ ID NO: 29835 - DNA, 468 bp, Zea mays
  Clone ID: MRT4577_127221C.1
aaagggaaatttttattcgggggccatatttcggaaaaaaaaaaaggaagcctccttccaaaaaaaaaatccccaaacggttcagggggggaaaaaaatcaggcccggaatttgcaaccaaacaaaaaacacacaatctagggctgactagggaggtccgcctccctctcttttgggctttttttttggaaaggccccaattaaagaaagggcccaggcaacgggaacctttaggcaaaaaaaaaacttatttatccctggaaaaaaagggctttctaactgggggaaaagaacacccccccatggggaacggaaaaggggttgtttaacccttttttggccaaaggtatccccaacaaggccaattgatcgggcaaccacaaaaagcccattgaaataaccgatctccacaatttaatcgatctcctgttggggaaacatcccacttccaaataaaaaacccaaaaa

SEQ ID NO: 29836 - DNA, 953 bp, Zea mays
  Clone ID: MRT4577_127222C.1
ctacccgcccggccggccgggaggtgaaggtcagatcagagtatcaccacttggcaatttctcccccggcacaagcgcatggctaccgtcgggggcaatcgtgctctctatgcagtcgtcgcgctgccacttctcgcgacccttcttcacggaccaatgcggctgtcgcatgccttcccataccgttccctactccagacctgccagcccagcggctccatccagggccgttccggcaactgcaacacggagaacggctccgagtgctgcaagaacgggcggcgctacaccacatacggctgctccccgcccgtcacgggtagcacccgcgccgtactgactctcaacagcttcgccgagggcggggacggcggcggcgcggccgcctgcacggggaagttctacgacgacagcaagaaggtggtggcgctgtcaactggctggtacaacggcggtagccggtgcagaaagcacatcatgatccacgcgggcaacgggaattccgtgagcgcgttggtcgtcgacgagtgtgactccaccgtgggctgcgacaaggaccacaactttgagccgccgtgccgcaacaacatcgtcgacgggtcgccggcggtgtgggacgctctggggctcaacaaggacgacggccaggcacagatcacctggtccgacgagtgagcgactgtaccaccgctgcaccggccgggtgcgctcgtgcaagtgcaccggccggcacgtctcatgttgccaatatataataagtagtagggtacagtggtacaccctctaaataatcatgcatgaagcagctgttcatctttagacgtgtttaaccatttgcaaaattaaataactgttggccccccaagttccacttaaaaaaaaaaaaaaaaaaaaaaaactcgagtgagaaatgtgtccaaaaaaaaaaaaaaaaaaaaaactcgaggaggggc

SEQ ID NO: 29837 - DNA, 199 bp, Zea mays
  Clone ID: MRT4577_127223C.1
tcggcagccagaagagaccacccccttccggcagacgggctcgatcacctgactccatcaccgtgcctgtctgtgatctagggacaagacgagcagagatatacatgatcgtgcagatgctgggataagaggatgagcaccacaactgcgtcgtcgatgaaccccaacgcgcggccttcatcccgacggcgtaccggct

SEQ ID NO: 29838 - DNA, 3808 bp, Zea mays
  Clone ID: MRT4577_127224C.1
agctcggaattcggctcgaggaaatttcgcgaatctgcaaaagtagatgccaggcactgggagcagataaatgagcggcggtataatcttgatttggttcgtgatgtgatgtctacagagctaagagcaattcgtcaagacaaatacggttggatattgcacggagaaagtgagtggcaaagccagctccaagaacttgtccatgagagaggtatttttcctatgcggcaaccatccacagaacctgagtggcagctgtgtggtgttgaaggaccatatagaatgaggaagaaacttgagcactccaaatttaagatagatactattcagaatgttctaaccagcaaccttggatcaaatggtggtaagattatcaataaagaggatggagaattgttgttgacatctgggtcagacacaatgtcaggcttgaatcttttgacctatgacactgaacagagggatcttgatgctgtcgagttttcgtcattcaaagatgatgatgacatattcaaaggaggaagcacaatttcaggtccaattggctggactgatgataaaagcagcgttaatgagcagagccttcattctgcgacggaatttggagcaaaatcaagttccctttcttttcacatgactgagagtcaccagggtaaatctgaacttagttcaccaaggagggcaccttcagtcaaaggtactgatgcaagaacctcagaggataaatcagaaaaggagttgcttgacaatggtgagtatcttatcaggccttatctggagccctatgagaaaataaggcataaatacaactgtgaacgggttgctggtcttgataaacacgatggaatatttttaattggagaactttgcttatacattattgagaacttctacattgatgattccaattgcatttgcgaaaagggcagtgaagatgagctctctgtcattgatcaagctttaggtgtgaacaaggatataatgggaggcagtgaatctcagttaaagtcacctaccacttggggtgggacagcaaaggtcttgcttggtggcagatcatgggcatataatggaggtgcttggggtaaggagaagctttgcaacagtagcaacctgcctcatccatggcatatgtggaagcttgatagtgtccatgagttgttgaaacgtgattaccagctccgccctgttgcaattgaaattttcagcatggatggttgcaatgagcttctagttttccacaaaaaggagagagaggaagttttcaaaaatttgattgccatgaatctcccacggaatagcatgttggacacaaccatatcagcatcctctaaacaggagagtggtgaggggagccgtctttttaaagtcatggcaaaatcattttctaaaagatggcaaagtggagaaattacgaacttccaatatctcatgcatctaaatacacttgctggtcgagggtatagtgatctcacacagtacccagtatttccatgggttctcgcagattatgagagcgatgttttagatctgaggaatccacagacatttcgcaggcttgataaacccatgggatgccaaacggaggaaagtgaagaggaattctgcaagagatatgatagctgggatgaccctgatgtaccaaagttccattatggctctcattattcaagtgctggaattgtccttttctatctcttaaggttgcctccttttagcacagaaaatcagaaattgcagggtggacaatttgaccatgcagaccggttattcaacagtgtgaaggatacatgggtaagtgctgcaggcaaaagtaacacatcagatgtgaaagaactaattcctgagttctattatttgcctgaatttttggagaaccgttttaatctggatctgggcgagaaacaatcaggagagaaggttggtgatgttgttttaccaccttgggctaaaggcagcgccagagagttcatcaggaagcatcgggaagcactggaatcggattatgtatctgagaatctgcatcattggattgatcttatttttggatataagcagagaggaaaggcagctgaagatgccgtcaatgtcttctatcactacacatatgaaggcaatgttgacatagacgcagtatcagatcctaccatgaaggcttcaatactagcacaaatcaaccattttggtcagacccccaaacagttattccagaaaccacatccacagaggcggactgacaggaaagtccctcctcatcctctacggtactgtgcctatctaacacagcaggagattcgcaagacagcatcttcggtgtcccagattgtctcctacaatgataagatcctaattgctgcagttaactgcttgctcaagccgctaacttataatgaatacatttcctggggattccctgaccgaagcttgagaatattaacatatgatcaggatagacttttgtctactcatgaaaaccttcatggtggtagtcaaattcagtgcactggagtgagccatgatggcaacattctcatcactggtggtgatgatggagttgttgcagtgtggagatttgtgaaggatggcatccgccgtctcctgagaatggagaaggctttgtgtgctcacacgggcaagataacttgcgtctctgtcagccaaccttactcattaattgtctcaggctctgatgactgttctgttatcttgtgggacctgacaagcctagtctttgtgaagcagctaccaaggttcccggcatcagtatccgcgctacatgtgaacagcctcactggtgagattctgactggtgctggtgttctttttgctgtttggagcatcaatggggactgccttgctgtggtgaacacctcccagcttccttctgacctcatcttgtctgtgacaagcgcgacacactcagactggcaggacacaaactggtacgtgacaggccatcaaagcggcgcggttaaggtatggaagatgttgcactgctcgtctgatgaagcagtaaatagcaagagcaaatcacctgcggtatcgtctggtgggcttagcctgaacggccaagcaccagagtataggctacttctgcagaaggtgctcaagtcacacaaacaccctgtcactgccctttgtataccaccggacttgaagcagcttctgagtggggatggcagcggtcacttgctctcatggtcattgaaagacgacagtttcaagggttcatagctcagagaaatatagggattcagctgcacatatagagaaacactggttaaatcttaccactgatttcttcctcgtccagaactgagcattggcgtgcattgacaaaagatctcggatcagcaagcttctacatggtatatgaaatgttcccttgatgtcccatgcctgggccatacagcagtccgggcaggagagagaatacaacagacacaattggaaggatgaagtggacgtggatgcgccgctgcgctgacatcataatcttatactgtgaattatgagatggttgtaccttctcttgtttttttgaggagaaaaggattcatgtgggctgtaggtgccattgtttgtaaagtctatacagggtaattttggtggtgccggttgaggtggctgatggtgtagtgtctcgatgttttgttcggggttgtgggagcaaggaaagaggtattagtttcaaaatctccccccacctctggaggctagtttgggagccacaaaaccgaaagtgattggatggactaaaagcttctacatattcaaaattgaataagaacgagattttaatcacttc

SEQ ID NO: 29839 - DNA, 587 bp, Zea mays
  unsure (1)..(587): unsure at all n locations
  Clone ID: MRT4577_127225C.1
gggtaccctncnggnctgnccggggtgcccgcggtgctagtgacggttgctctagatccgttcatcctggtggttttgggagggcgaaagcgccaagcgaattacaagatgctggacaagctgtgggactacgttgccaggctgggctcttccccacacgggccctacgcatactgcattgcctaaccattaccccatcaatccttgcattcatcatcaccttccttgcctacatgggtgggggggctatcctttcccgttacatcccgacgtccggattcaaactcgcatagcagggaagctcaagaagctgtaacagtaatagcagcgctgccttgtgactgtggacctgctatggccgatgcccggaattaagggagcttcccagcacaaggaggaggggttcgaggccgacttacgcgatttttagcgcggcctcggctaggatgacgtggacagcgccggcgaaggcggcgaccacgaggtccaggagctttctccggcgtagccgacgaggattgccttggccaaccggctcaaggtcggagttgatggcttaatgactcctcctccaaaggatggactgg

SEQ ID NO: 29840 - DNA, 390 bp, Zea mays
  Clone ID: MRT4577_127226C.1
ccgggtcccgcctcgcatccactggcacctatgcggtccacgttcctttggggatcccgagcgcctgtccggccgcatccagatccacggagacagatgccatggtgaaggaaggcggagcatggaggagggaaccctagagatcggcatggagtacaggactgatgtggagtggccgggcctctgattatcataaagtgggggggccaaaggaccaagaaattgagaacatcctacttggaaatagcaccactcgccgagcgccaggacttggagttgcaggagaaaaagctgttgcgcagaatattgaaggaacggctggaaaagacaagaaagacacagcccttgcaggcactggcgggggtcacagaaacggctgactaagtggat

SEQ ID NO: 29841 - DNA, 674 bp, Zea mays
  unsure (1)..(674): unsure at all n locations
  Clone ID: MRT4577_127227C.1
aattcggcacgagggagatttccaagaattatcttccactctcatcattatgtatctctgcaaagctggcttagaaaacgcatccaaatgtgttcagcaatttatatcactgctccctaatattatctctgaagatgatcagtgcaaaaatagactgcatttcttgatttggtccttactaagggtaagatcccagtatgggcaacttgatgatggtgcacgtttccatgtcatgtcacacttgattcttgaaactgtgatctatggaaagtctatgcttacaactaatatagtaggcagagatgattctactgaagcaaataacagtaaggaggctgggttcattcttaatcttgtacagaaggaccgggttctcactgcggctactgatgaggcaaagtacatgaaggatgcaattgctgatcgcatgaagctggtccaggaactccattctaaacttgatgaacgctcaattcaagacgttgaacaactgcaaagttttgaggatgatgtacagtttgccaagactgctgctatagctgcggacgacagtagaaaagcagctttccagctagcatttgacgaggatcagcaaattgttgcagacaagtggattcatattctccgtgctctgagtgatgagaggnggccatggtctgctgctccttttccaa

SEQ ID NO: 29842 - DNA, 205 bp, Zea mays
  Clone ID: MRT4577_127228C.1
cttaagataatacaccttttatacataagtgggcacattgaatgcatacatgtacaggggttcacagggaccatgcctagctcacattgtggcaaccatattactcaatggcacctgctatcgttaggcacattaacatccatagggaaatcctttggaatggaccgaacaggcaaacgtgatggacaggggctgtcaaactaca

SEQ ID NO: 29843 - DNA, 180 bp, Zea mays
  Clone ID: MRT4577_127229C.1
ggccgcgcaatacattgtattcgtggtcactgccgcatactggcacggcgtattctttgtggctcactatttcaatgtacgccgtttccagtcaatacacttctgcactggctcgaggggcacaaccgcctgcaaggtgctatgcatggtcgacaccaataacaacaccagaaccgtaat

SEQ ID NO: 29844 - DNA, 195 bp, Zea mays
  Clone ID: MRT4577_12722C.1
gctgctcttaggtggccttcctggcttgaggccgtaggctgcgacccccaggcgagcctcacatgaaccagcgggggggccccacgaggcgcagcccgacgggctatgaacctcccaggccccgggccccgcaagctagctagagcgctcagcagaggccaccctggcggagaacgcatacctcggatagtctct

SEQ ID NO: 29845 - DNA, 247 bp, Zea mays
  Clone ID: MRT4577_127231C.1
ggggtggggatttttttttaggcaaaacacgcatgcattaaattcgccacttaggatccattaaaaaaaagaaacaccgggttaatcctaaaatcaagccacacccaaagcgtttcaaattttccagctcaaatccaaagggggcccaccacattaaagggcaggcttgacatctacattttcccaaaaagaacacccacaaaaaataatgggggggggaaataataaacccccctaaaaggtttcc

SEQ ID NO: 29846 - DNA, 277 bp, Zea mays
  Clone ID: MRT4577_127232C.1
gagacacatttgaaaccattgataggccatatataacagtccatatatctatatataatgtcagccgtgacaaaggatctggagtcgattcgcatgttacagaaggacattaagctgcttcttatactcaacgtgaccaccaatgaggctcacacagggagagaacgcgatacaaacactgtgcgaatccttgcggcatgcatatcgtcctgaaactgtgccaacgtctacacaactgaaggcttctccggtcataagttcacaatcttacgacctc

SEQ ID NO: 29847 - DNA, 3383 bp, Zea mays
  Clone ID: MRT4577_127233C.1
gcttttcactagtttggattcggacttcctgagctccgccgattccttcctcctccacctcctctcctcccccagccgccgccgctgctcatcttatctttatctcatccccatcgcccgcccttgctccgcccccgggaatcgtcgatggcggcgtcggcgttgtggcagccgcaggagcaggggctccgcgagatctgcgcccacctggaggcgcatatctcacccaactctgaccaggcccgcatctggcagcagctccagcagtacagccagttccccgacttcaacaattacctactcttcatcctggcccgcggagaggggaaatctattgaagttagacaggcagctggtctattactgaaaaacaatctgcgaacgacttacatttccatgcaatcttcatcccagcattatgttaagtctgagctgttaccatgtataggggcaaccaatagggcaattagatccacagttggaacagtgatcagtgtgcttttccaaattgtacgagttgctggatggattgagttgtttcaggcactccataagtgtttggagagtaatgacctggatcacatggaaggtgctatggatgcgatatacaagatctgtgaggatgtccctgaagagcttgatgttgatgttcctggtttgtctgaacgaccgatcaacgtgtttatgccaagaatactgcagtttttccagtcaccacatgcaagtttgagaaaactatcattgggtatcataaaccagtacatagtagtgatgccatcggcactctacatgtctatggatcagtatattcagggattattcaaccttgcaaaggactcttcagcagatgttcggaaactggtttgttcagcctgggttcagctcattgaagttcgcccatcaattttggagccacatcttaaaaatgttactgaattgattctgcaagctaataaagattcagatgatgaagttgctctggaagcttgtgagttctggtctgcatactgtgatgtgagcatgcctcctgaaggtttacaggagttcttgccgcacttaatcccgactttgttgtcgaacatggtatatgctgacggcgatgagtcccttgatgatgctgaggaagatgaatcctttccagacagggaccaggatttgaagccccgcttccatgattctcgattgcatggatcggaaactggagatgacgatgatgatgctgatgctgtaaatgtctggaacctgcggaagtgtagtgctgctgggttggatgttctctctaatgtgtttggtgacagcatccttccaactttaatgccattgattgagcaaaacttggctcgaacagatgatgattcttggaaggagagggaaactgctgttttatgtctaggcgctatagcagaggggtgcattagtggtctatacccacaccttcctcagattgttgcctttctaatcccacttcttgatgataaatttcctcttatacggagtattacgtgttggacgctctctcgatacagcaaattcattgttcagagccttgatcatccaaatggacgcggacaatttgataagattcttatgggagtgctcagaaggatattggatactaacaaaagagtgcaagaggctgcttgttcggcgtttgcaatccttgaagaggaagcttctgaagaattagtaccccatttggaagtaattttgcagcacctcatgtgtgcctatagaaaataccagagacgaaatctccggatactctatgacgccctcggtaccctggctgatgctgttggagcagaattaaatcaggcaaaatatctagacatatttatgccgcctttaatcacaaagtggcagcaactttccaattatgacaaagatctatttccactccttgaatgctttacatctatcgcacaggcattgggaccaggatttgctcagtttgcggaaccagtgtttcaaaggtgcattaatcttatccattcgcaacagttgtcaaagattgatcctactgcagctggtgcggtgtatgatagagaattcattgtttgttcgttggacctactatcaggacttgcagaaggtcttggcgctggtattgaaagtcttgttgcacagagcaatttgagagatctacttttgcaatgctgcatggatgaagcagctgatgttcgacaaagtgcccttgcacttcttggagacctttctagggtttgcccaatacatttgcatccacgccttcaagaatttcttactgttgcagcgaagcaactgaaccctcaatctgtgaaggatgcggtatcagtagctaacaatgcttgttgggctattggagaattagcaatcaagattggcaaagaaatagcgcctgtggtgatcaccgttgtttcgtgcttggttcccattctaaaatccccagagggttcgaacaagtcacttgttgaaaacagcgcgatcactcttgggaggcttagctgggtgtgtccagacatcgtggcccctcatatggagcatttcatgcaagcatggtgcaaggcgttgtgcatgatcagagatgattttgagaaagaggactcgtttcatggattgtgtgcaatggtggcagcaaaccctacaggaggcgccggttcattagcttacatctgccaggcctgtgcgagttggactgagataaaaagtgaaggtcttcacaatgaggtgtgccagattctgaatggctacaagcagctgcttggaaacaacggtgggtgggaacaatgcatggccgccctgaaaccagatgttgtgcagaaattagctagatacggagtatgatgagaagcaagctcgtgtggtttattcacctcatacaccgaccatcatctttatggcggagacaagagaggagcagaaaggggtgggggtcgtcgagagtgtctctgctgctgatgcatcatctttacatgtgtggcacttgagagtcgattcggttcgttggtacgccattgtccgttcgttcattgttatactggttggtgcacagcatttccagagcgagagtaggatgtcttggtaaaccccccatgtgtattggttggttgggccagtggacttggttttggtttttttgtcattcctactggcaaacacaacaaggtcaccaccctcttgctcgccctaccccggcaacattgagaaaacagaggttttgtagcgtgtaattctctctcttttcttggtttcttattattattaggtgtaggattgttttcgagtcttgtttggcaggaagggtttgtacgagaaatcaattgattgctcactcaccacaaaataataaaaaagatcgatcgatggggcttgtatctcaaagtttaataaaaaaaaaaaaacct

SEQ ID NO: 29848 - DNA, 875 bp, Zea mays
  Clone ID: MRT4577_127234C.1
ggtacattgcgagcctcgaggccggccgggaaaacgtccacgcactcacgttaaggcgcacgcttctccgcaaccttcccagcactttcccctccgtctccagcgcctggtctccgcctcccgcgcgcgcccgatgcagatgccgccgtcgcggccgatctgacgccatcggtcgccggccatgaggcctcgccgccgggccctcttcccgttgcacagcgcaggcgctggggcctgcggtgacccgtgggccgactgccagacaccaccgccggttcccagcactcctgattccggccctggcccttccccatcgctgcctccctatggcgatctaccgtgccctcccgttttgtcgccgtcgccgtctccgtcgcctgctcccgcgcataacggtaggaggaaccagggagggacgcagggatacgggcccccacccggtgcaggcgaccacgaccgacggcacctcgtcaaatacgcgctcatcgccgccggggtgttcgccttcgtatgcctgatcctgctcggcgtctcggtggccgtgcggcgccggcaggtccggcggaggcggcaggcgctcctcgcaccgcctatcccattccccgagggcgcggcgaacgtcggcggcggcggcgggcacgaccacgggtgggacggcgcagccggggtggtgcaccacgtctggaacatccggaccgtggggctcgacgaggcgtccatcagttccatcgccgccacgcggtaccgcgccggggcggggctcctgggcgcggctgactgctccgtctgcctcggcgagttccaggacggcgagctcgtgcgcctgctgcccaagtgcgcgcacgcgttccacgtcccctgcatcgacacctggc

SEQ ID NO: 29849 - DNA, 244 bp, Zea mays
  unsure (1)..(244): unsure at all n locations
  Clone ID: MRT4577_127235C.1
agggnaacgatatttttttttttgatttttcactttatgataggaaaagtttaggtttttatttcatttaacctgtttcgggctttaaaagaatttcataaatttatttttttaacaacctcttaggtttttaaaccccaacccttccgggattttattttggccaccctggtgccccttgtgcgtgacctcccttaggttcatttcgttgccctttctggccgtttttcggtgnncaaacctg

SEQ ID NO: 29850 - DNA, 246 bp, Zea mays
  unsure (1)..(246): unsure at all n locations
  Clone ID: MRT4577_127236C.1
cggacatgcggacacagcggtatccatcaccaagagcctannaaggccgtggncgtggnacctcactggtgtcggaatnaaactnctnnccaaggcgcccgtgctgggctgcgccgggaagatgcagaggcagcggcaacgggggtccgcgctgttcaggtggatttgccgtgccgaggcgccgccgagggtgcggctcatggactgccgccacctggcgtacgcctagtccggggccagcaagga

SEQ ID NO: 29851 - DNA, 108 bp, Zea mays
  Clone ID: MRT4577_127237C.1
gattgatcacccagtctgctgctcggagttactaccagcagcttggttcgacagtagaagagagcgagccgaggatggcgtcaccggagccgtcgtcggcggccctgc

SEQ ID NO: 29852 - DNA, 299 bp, Zea mays
  Clone ID: MRT4577_127238C.1
gtggtcatccttggggcttggagtctttggaaacagagaaatagatgtgtttttgatggagctcggccgtgcctttctactttagaggatggattcaaagatgagatgtggatgtggttttctgcaggagccaagaacatgtgctccctttttgaccctggttagagaaaggaaagtcttgtagcctcttggtaggctggggtggtggtgtgtcgtgtggctggtacgtgttagcgtgtgtgtgttctattcgtctgtgtatgtttgcaagtttttcttgaatctttttatcttttttt

SEQ ID NO: 29853 - DNA, 661 bp, Zea mays
  Clone ID: MRT4577_127239C.1
cattgggtacctcgaggccggccgggaccctatccaagataggctttatcactaccacacttgcaacacgttcataagaagctcgtcctcaggattgctacccagcttatatatacctatgctacctatctagctagccaagactcaatcaaccatcccatggctgcatacatgatctccacgattcttgataagccatctgtacttccgctggagcatcatggtattgcaccaaatcatgtacaaaaccgctgttatagctcctcgcaccagagcggttcgaaatgcgaatatgcagaagatacccaaggattacctgttcccataaataactatttagggtgaaacacatctgaacaattagcatgatgctcaggtaatcatactgggaaacacagcacactactcatcccaatccatgcgtacaaacatattctatgagcgaatatgtacttgaattatccactccagaagggcaccacctacatgaccacccatgaaggtgatatgaatctacccaatgacatagatgaggaaccgcacccacacatggacattccagacgccgatgtgctcatatctcaccgagcacaacgtgacatccctcgtctccaaactctgttcgggcacaaagtaaccatacgcgtccaagatcccacct

SEQ ID NO: 29854 - DNA, 443 bp, Zea mays
  unsure (1)..(443): unsure at all n locations
  Clone ID: MRT4577_12723C.1
caggtgaccggtgccgggaattcccgggtcgacccggggggcggggggaatccggaaccaatccagtaaagtattccggaagaaccgaacgggcactaaagggggactaccaatctgcacaatgaaggcattgactgtgggactctttgctgggtgggtgtgctgcanctgtaattcacaatccgaggaggggggtgtacttagcttcanctgtgtctggggtttatggggtgaaaactgccacttctcttgtantgtactctgggactgctgtatttgagctgtggggtgccatcctgattaattatcagaagatgtctatttgccacccttacaggaactgaaacatgaaatgggaggcaggcaggggcaggctcaaaaaaaaaaaaaaaaaaaaaaaaaaaaaaaaaaaaaaaaaaaaaaaaggggggggcggtctaaag

SEQ ID NO: 29855 - DNA, 5784 bp, Zea mays
  Clone ID: MRT4577_127240C.1
ctagcaaaagaaattgcgtgaatcaagaatattgagctcatgcctaagtttggtaaaagtttgttcatcaagaggcttggtaaaaatatcggctaattgatctttagtgttaatataagaaatctcgatatcccccttttgttggtgatccctaagaaaatgatactgaatggctatgtgtttagtgcggctatgctcgacgggattatccgccatcttgattgcactctcattatcacatagcaaagggactttggttaatttgtaaccgtagtcccgcagggtttgcctcatccaaagcaattgcgcgcaacaatggcctgcggcaatgtactcggcttcggcggtggaaagagcgaccgaattttgcttctttgaagcccaagacaccaaggatcttcccaagaactgacaagtccccgatgtgctcttcctattgattttgcaccccgcccaatcggcatccgaataaccaatcaaatcaaatgtggatccccgagggtaccaaagcccaaacttaggagtataagccaaatatctcaagattcgttttacggccgtaaggtgggattccttagggtcggattggaatcttgcacacatgcaaacggaaagcataatgtccggtcgagatgcacataagtatagcaaggaacctatcattgaccggtataccttttgatccacggacttacctcccgtgtcgaggtcaagatgcccattggttcccatgggtgtcttgatgggcttggcatccttcatcccaaacttgtttagaatgtcttgagtgtacttcgtttggctaatgaaggtgccctcttggagttgcttcacttggaaccctaagaaatacttcaactcccccatcatagacatctcgaacttctgtgtcataatcctactaaactcttcacatgtagattcgttagtagacccaaatatgatatcatcaacataaatttggcatacaaacaaatcattttcaagcgttttagtaaagagtgtaggatcggcctttccgactttgaagccattagcaataaggaaatctctaaggcattcataccatgctcttggggcttgcttgagcccataaagcgccttagagagcttatagacatggttagggtactcactgtcttcaaagccgggaggttgctcaacgtagacctcttccttgattggtccattgaggaagacacttttcacgtccatttgataaagcttaaagccatggtaagtagcataggccaataaaatgcgaattgactcaagcctagctacgggtgcataggtttcaccgaaatccaaaccttcgacttgggagtatcctttggccacaagtcgagctttgttccttgtcaccacaccatgctcatcttgcttgttgcggaagacccatttggttcctacaacattttggttaggacgtggaactaaatgccatacctcattcctggtgaagttgttgagctcctcttgcatcgccaccacccaatccgaatcttgtagtgcttcctctaccctgtgtggctcaatagaggaaacaaacgagtaatgttcacaaaaatgtgcaacacgagatctagtggttacccccttatgaatgtcgccgaggatggtgtcgacggggtgatctcgttgtattgcttggtggactcttgggtgtggcggtctttgctcttcatcctccttgtcttgatcatttgcatctcccccttgatctatgccgtcatcttgaggtggctcatttgattgatcttcttcttcatcaacttgagcctcttcctcattttgagtgggtggagatgcttgcatggaggaggacggttgatcttgtgcttttggaggttcttcggattccttaggacacacatccccaatggacatgttccttagtgcgatgcatggaacctcttcaatacctatctcatcaagatcaacttgctctacttgagagccgttagtttcatcaaacacaacgtcacatgatacttcaaccagtccagtggacttgttaaagatcctatatgcccttgtgtttgagtcataaccaagtaaaaagccttctacagtcttaggagcaaatttagattttctacctcttttaacaagaataaaacatttgctaccaaagactctaaaatatgaaatattgggctttttaccggttaggagttcatatgatgtcttcttgaggattcggtgtagatataaccggttgatggcgtagcaagcggtgttgaccgcctcggcccaaaaccgatctgaagtcttgtactcatcaagcatagttctagccatgtccaatagagttctattcttcctctccactacaccattttgttgtggcgtgtagggagaagagaactcatgcttgatgccctcctcctcaaggaagccttcaatttgtgagtttttgaactccgttccgttgtcgcttcttattttcttgatccttaagccgaactcattttgagcccgtctcaagaatccctttaaggtctcttgggtttgagatttttcctgcaaaaagaatacccaagtgaagcgagaataatcatccacaataactagacagtacttactcccgccgatgcttatgtaagcaatcgggccgaataggtccatgtgtaagagctctagtggtctgtcggtcgtcattatgttcttgtgtggatgatgggcgccaacttgctttcctgcctgacatgcgctacaagtcctgtctttctcaaaatgaacattggttagtcctaaaatgtgctctccctttagaagcttatgaagattcttcatcccaacatgggctagtcggcggtgccagagccaacccatgttagtcttagcaattaagcatgtgtcaagttcagctctatcaaaatctactaagtatagctgaccctctaacacacccttaaatgctattgaatcatcacttcttctaaagacagtgacacctttgaccaaaccttgatttccatccccgaatgtgatagctcgttggggatctttgtttttctcgtaggaggagaacatctttttctcccctgtcatgtggtttgtgcacccgctgtcgagtatccaacttgagcccccggatgcataaacccaaatggttttgggtcctttggcattagacacaagaattttgggtacccaaacacaagtctttgaccccttgtgcttgcccccaacatatttggcaactactttgccagatttgttagtcaacacataagatgcatcaaaagtcttaaatgaaatgctatgttcatttgatgcattaggaattttcttcttaggcaacttagcacgggttggttgcctagagctagatgtctcactcttatacataaaagcatggttagaaccagagtgagacttcttagaatgaattttcctaattttgtcctcgggatagccggcagggtataaaatgtaaccctcgttatcctgaggcatgggagccttgcccttaacaaaattggacaatcttttaggaggggcactaagtttgacattgtctcccctttggaagccaatgccatccttaatgcccgggcgtctcccattatagagcatacttctagcaaatttaaatttttcattttctaagttatgctcggcaattttagcatctaattttgctatatgatcattttgttgtttaattaaagtcatgtgatcatgtatagcatcaatgttaacatctctacatctagtacaaatagaagtgtgctcaacggtagatgtagagggtttgcaagattttagttcaacaaccttagcatgcaatatttcatttttacttctaaggtcggaaatagtagcattgcaaacatcaaaatctttagccttagcaagtaatttttcattttcattcctaaggctagcaagagaatcattcatttccttaatcttagcaagcaaatcatcattatcatttctaagattgggaattgaagcatcacaaacatgagaatcaaccttagctaacaaattagcattttcatttctaaggttgtctattgtctcatggcaagtgcttagctcactagataatttttcacatttttccatttctagagcataagcatttttaaccttaacatgttttttattttccttgattaggaagtcctcttgggtgtccaagagatcatccttttcatggatggcactaatcaattcattaagtttttccttttgttgcatgttgaggttggcaaaaagagtacgcaaattgtcttcctcatcactagcattatcatcactagaggattcatatttagtggaggatttagatttaaccttctttttgtcgtcctttgccatgaggcatttgtggccgacgttggggaagagaagccctttggtgacggcgatgtgggcggcgtcctcgtcgtcggaggagtcgcttgagctttcgtcggagtcccactcccgacaaacatgggcatcgccgcccttcttcttgtagtatctcttcttctcctttcttctccccttcttgtcgtcgcctcggtcactgtcactagatataggacatttagcaataaaatgaccgggcttaccacatttgtagcaaaccttcttggagcgggacttgtagtctttccctctcctttgcttgaggatttggcggaagctcttgatgacgagcgccatttcctcattgtcgagcttggaggcgtctattggttgtcgacttggtgtagcctcctccttcttctcctccgtcgccttgaatgcaacgggttgagcttcggatgtggatggatcatcaagctcgttgatcttcctcgagccttcgatcatgcactcaaaacttacaaaattcccgataacttcctcggcggtcattttagtatatctaggattaccacgaattaattgaacttgagtggggttaaggaaaatgagagatcttagaataaccttaaccatttcgtggtcgtcccattttgtgctcccgaggttgcgcacttggttcaccaaagtcttgagccggttgtacatgtgttgtggctcctcccctttgcgaagtcgaaaccgaccgagctccccctcgatcgtttcccgcttggtgattttggtgagctcatctccttcgtgcgcggttttgagcacatcccaaacctccttggcgctcttcaacccttgaactttgttatactcctctctacttaaagaggcgaggagtattgttgtcgcttgagagttgaagttctcgatttgggccacctcatcctcatcataatctttatcccctacagacggtacctgtgcaccaaactcaacaacgtcccatatacttttgtggagtgaggttagatgaaatcgcattaaatcactccacctagcataatcttcaccatcaaaagttggtggtttgcctaatgggactgaaagtaaaggtgcatgtttagaaatgcgagagtagtgtagggggatcttactaaacttcttacgctcttggcgtttagaagttacggagggcgcatcggagtcgaaggtcgatgttgatgaagtgtcggtctcgtagtagaccactttcctcatcctcttttgcttgtctccgcttcgatgcggcttgtgggaagaagatttttccttcttctccttgtgatgagaagaagatttcttctccttccctttgttggaggagctcttcttcttctccctcctcttggtgcgggactcttccgatgaagtgctcccatggcttgtagtgggcttttcgccggtctccatctccttcttggcgtgatctcccgacat

SEQ ID NO: 29856 - DNA, 4806 bp, Zea mays
  Clone ID: MRT4577_127241C.1
tcaatcaaagttcctagaatcaagaatatttagctcatgcctaagtttggtaaaagttttctcatctagtggcttggtaaagatatcggctaattgttctttggtgttaatgtaagcaatctcgatatctccccattgttggtgatccctcaaaaagtgataccgaatggctatgtgtttagtgtggctatgttcaacgggattatccaccatgcggattgcactctcattatcacatagaagaggaactttggttaatttgtaaccatagttcctaagggtttgcctcatccatatcaattgcgcgcaacaatggcctgcggcaatatactcggcttcggcggtagaaagagctacagaattttgcttcttagaagtccaagacaccagggatcttcccaagaactggcaagtccctgatgtgctctttctatcaattttacaccctgcccaatcagcatcggaatatccaattaaatcaaaagtggatcccttggggtaccaaaggccaaacttatgagtataaactaaatatctcaagattcgttttacggccctaaggccattagttcccatgggtgtcttgatgggcttggcatccttcatcccaaacttggtgagtatgtcttgaatgtacttcatttggctaatgaaggtgccctcttggagttgcttcacttgaaatcctaagaaatacttcaactcccccatcatagacatcttgaatttttgaatcatgatcctacatgctcttggggcttgcttgagcccataaagcgccttagagagtttgtaaacatggttaggatactcactatcttcaaagccgggaggttgctcaacatagacctcttccttgattggtccattgaggaaggcactcttcacgtccatttgataaagcttgaagccatggtaagtagcatgggcaagtaatatacgaattgactcaagcctagctacgggtgcataggtttcaccgaaatccaaaccttcgacttgtgagtatcccttggccacaagtcgggctttgttccttatcaccacaccatgctcatcttgtttgttgcggaagacccactcattcctcgtgaagttgttgagctcctcttgcattgccaacacccaatctgaatcccttaatgcatcttctatcttgtatggctcaatagaagacacaaaggagtaatgttcgcaaaaatgagcaacacgagatcgattggttatccccttttgaatatcgtcgaggatggtgttcacggggtgatctcgttgtattgcttggtggactcttgggtgtggcggtcttagaccgtcatcatcttccttgtcttgatcatgggcatctccccctagatcattgtccccttcttgaggtggctcatcctcttgatcttcattttcatcctcttgagcttgatcctcatcttgagttggtggagatgcttgcatggaggaagatggttgatcttgtgcttgtggaggctcttcgaattccttaggacacacatcccctatggacatgttccttagagcgacgcacggagcctcttcatcatctagctcatcaagatcaacttgctctacttgagagccgctagtctcatcaaacacaatgtcacaagaaacttcaactagtccagtggacttgttaaagactctatatgcccttgtgtttgaatcatatcctagtaaaaagccttctacagccttaggagcaaatttagattttcttccagttaggagttcatacgatgtcttcttgacgatttggtggaggtagaggcggttgatggcgtagcaagcggtgttgattgcttccacccaaaaccggtctgatgtcttgtattcatcaagcatggtcctcgccatgtcaagtagagttctattcttcctctccactacaccattttgttgtggcgtgtagggagaagagaactcatgcttgatgccctcatcctcaaggaagccttcaatttgagagttcttgaactccgtcccgttgtcgcttctaatctttttgatcctcaagccgaactcattttgagcccgtctcaagaatccctttatggtctcttgggtttgtgatttttcttgaaaaaagaacacccaagtgaagcgagaataatcttccacaattacaagacaatacttactcccgtcgatgcttatgtaagcgatcgggccgaataggtccatgtggagtagctcaagcgacctgtcggtcgtcatgatgttcttgtgtggatgatgaacaccaacttgcttccctgcctgacatgcgctacaaaccctgtctttctcaaaatgaacattggttagtcccaaaatgtgctctccctttagaagcttatgaagattcttcatcccaacatgggctagtcggcggtgccaaagccaacccatgttagtcttagcaattaagcaagtgtcgagttcagctctatcaaaatctactaagtatagctgaccctctaacactcccttaaatgctactgaatcatcacttcttctaaagacagtaacaccttgatttccatccccgaatgtgatagctcgttgggggtcatggtttttctcgtaggaggagaacattcttttctccccagtcatgtggtttgtgcacccgctatcgatgatccaacttgagcccccggatgcataaaccatgggagctttgcccttaacaaagttgggcaatttcttgggggcattaagtttgacattgtctccttgttggaagccaatgccatccttaatgcctgggcgtctcccactatggagcatgcttctagcaaatttaaatttttcattttctaagtcatgctcattatttttagcactaagttgagctatgtgatcattttgtttcttaattaaagctaggtgatcatgaatagcatcaacattaatgtctctacatctagtgcaaatggtgacatgctcaacggtagatgtagagggtttgcaagtatttaattcaacaatcttagcatgtaaaatggcattctcatctctaagattggaaatagaaacattgcaaacatttaaatctttatccttagcaattaatttttcattctcaattttaaggctatagagtgatgcatttaacttgtcaatcttagtaattagactaggattatcatttctaagattaacaagagaatcatcacaaacatttaaattctcaaccttagcaattaatttagcattctcatttctaaggttggaaataacatcatggcaagtgcttagctcactagttattttttcacatttttctacctctagagcataagcatttttaaccttaacatgcttcttgttttctttaattaggaagtcctcttggctatccaagagttcatccttatcatgaatagcactaattaattcatttaatttttccttttgttgcatgtttaggttggcaaaaagtgtaagtaaatcatcctcatcatcactagagctagcctcatcactagatgttgcatacttagtggaggatctagattttaccttcttcttgccgtcttttgccatgaggcacttgtggacgacgtttgggaagagaagacccttggtgacggcgatgtttgcggcatcctcgtcggaggaggagtcggtggagctctcctcggagtcccactcccggcaaacatgggcatcgccgcccttattcttgtagtatctcttcttttctcttctctttcccttcttgtcgtcgtccctgtcactatcactagataatggacatttagcaatgaaatgaccgggcttaccacacttgtagcacaccttcttggaacggggcttgtaatctctccccttcctttgcttgaagatttggcgaaagcttttgatgattaaagccatctcctcgttgtcgagcttggaggcgtcgatgggaagcctacttggtgtagactcttccttcttctcctccgtcgctttgaagacgacgggttgcacctcgggtgtggaggtggcgccttgctcgatgatttgtttggagcctttgatcattagttcaaagctcacaaactttcttatcgcttcctcgggagacattagtttatatcttggatcaccacgaattaattgtacttgagtagggttaagaaaaacaagtgatctaagaataaccttgaccatttcatggtcatcccatttggtgctcccgaggttgcgcacttggttcaccaaggtctcgtctccttcgtgcgcagacttgagcacgtcccaaatctcctttgcactcttcaacccttgcaccttattatactcctctcgacttagagaggcgaggagtatagtagtggcttgggagttgaagtgttggatttgttcgacctcctccaaatcataatccttgtcccccttctttggtacctgcgctccatactcaacgatatcccatatgcttttatggagtgaggttaggtgatgcctcattttatcactccacatagaataatcttcaccttcaaacataggtggtttgactaatgggacggaaagtaatggagtgcgttttgaaatgcgaggatagcgaaggggcatcttactatacttcttgcgctcatggcgcttagaagtggtggatgccgattccgagacggaggtggagggtgacgaagagtcggtctcgtaatagaccaccttcttcatcttcttcttcttgtcacccttccgttgggacttgatggaggaagaggattcctccttgtgcttgtgggcggactcccttgagtatgttctccctgagcttgcggacttgttgccggtcccgatctccctcat

SEQ ID NO: 29857 - DNA, 241 bp, Zea mays
  Clone ID: MRT4577_127242C.1
atacgtccgcggccacagcctctcgtcgtcgccccacagccacgcgagtcttcgccgatccgcgagcggagatcgccgaggtcaggcggcgaagagggagctccaggcgacagaggaaggggttcgccacagtcgataatttccctgggtaagagatgggcctctcctttgcgaatgtgttcaggcgcctcttccgcaagaaggacatgagaatctctcatggtcggcctcgatgccgccg

SEQ ID NO: 29858 - DNA, 1605 bp, Zea mays
  Clone ID: MRT4577_127243C.1
atgggcatttggtggttgagggctataaatatcccccaaccaccacaactccaagcatccaagttttctgaagttctcattcaatacaagaatcatgccaagagggagatcgtgaccggagacaagctcgcaagctcagggaggactctctcaagggagtccgacaacaagcacaaggaggaatcctcttcctccatcaagtcccatcaaagaggcgacaagaaaaaggagatgaagaaagtggtctactacaagagcacgaagtatagtaagatgcctcttcgatatccctgtatttctaagcgcgctcctctactttctgttccattaggaaagccaccatattttgatggtgaagattactctatgtggagtgataaaatgaggcatcatctaacctcactccacgaaagcatatggaatattgttgagtttggagcacaggtacctatggtagggaacgagggctacgactcggacgaggtcgcccaaattaggcactttaactcccaagccacaactatactcctcgcctccttgtgtcgagatgagtataataaggtgcaagggttaaaaagtgtcaaagaaatttgggacgtcctcaagacggcgcacgaaggggacgaggtgaccaagatcaccaagcgcaaaacgatcaagggagaactcggtcgattcatcctcaacaagggagaggagccacaagcgatgtacaatcggctcaagaccttggtgaaccaagtgcgcaacctcgggagcacaaaatgggatggccatgaaatggtcaaggttattcttagaacacttgtttttcgtaatcccactcaagtgcaactaatccgtggagatcctagatataaacagatgtctcccgataagcttccgccaaatcctcaagcaaagagggggaaggactacaaaccccgctccaagagggtgtgctacaagtgtggtaagcccagtcattttattgctaaatgtccaaattctagtgatagtgataggggcgatgacaagaagaggaagaagaaagagaagaagagatactacaagaagaagggcggcgatgcccacgtgtgtcgggaatgggacttcgatgagagctccaccgacccctccgccgacgaggacgccgccaacatcgctgtcaacaagggcctcctcttccccaacgtcgaccacaaatgtttcatggctaaggatggtaagaaaaagaagcatggaacaaaaggaaaaaaattaaatgaattaatagaagctattcatgagaaggatgatctcttggaaagccaagaggacttccttattaaagaaaacaaaaaacatgtcaaattgaaaaatgcttatgctcaggaagtagaaaaatgtgaaaacttgactaaggagcttagcgtttgccataattcaattaccagtcttagaaatgagaatgctaatctaaatgctaagattgatgaattgaatatttgcaatgaatcaatttctagccttagaactgaaaatgctagtttagtttctaaggttaaagagttaaatgtttgcaatgattctatttcctgtcttagaaatgagaataccatattacatgctaagatagaagattaa

SEQ ID NO: 29859 - DNA, 5304 bp, Zea mays
  Clone ID: MRT4577_127245C.1
ctaatgatctcttttctcaattgtggaacttggagaggtttgaaagctttgaatgtgtcttggaatggattgctagctcttgtattgaatgttgaaggttggaatgcttggatgaagtgaatggaggtggttggggttgtatttatagccaccaaccacttcctagccgttgctccttttctgctgagcgcggacggtccgccctcctggtgcggacggtccgcccctatagatcaacggcgaccggacggtccgcgcctgaggccggacggtccgcgcgagggctcggacggtcttcgcttttcctccggacagtctgtagtggaaacttgtgtttttgcattggttctgtccgaggggtatcccgatgtcgcggacggtccgccgcaagagcccggacggtccgcgcttggcctgtttttccaaaaagcttctcctgtccggaataatcttttgatccacggacttacctcccgtgtcgaggtcgagatgcccattagtgcccatgggtgtcttgatgggtttggcatccttcatcccaaacttagcaagaatgtcttgagtgtacttcgcttggctaatgaaggtgccctcttggagttgcttgacttggaatcctagaaaatacttcaactcccccatcatcgacatctcgaatttctgtgtcatgatcctactaaactcttcacatgtagactcgttagtagacccaaatataatgtcatcaacataaatttggcatacaaacaagtctttttcaagagttttagtgaataaagtaggatcggccttgccgactttgaagccatttgcaataaggaaatctcttaggcattcataccatgctcttggggcttgcttgagcccataaagcgccttagagagcctatagacatggttagggtactcactgtcttcaaagccgggaggttgctcaacatagacctcttccttgattggtccgttgaggaaggcacttttcacgtccatttgatagagcttaaagccatggtaagtagcataggccaataatatgcggattgactcaagcctagctacgggtgcataggtttcaccgaaatccaaaccttcgacttgggagtatcctttggccacgagtcgagctttgttccttgtcaccacaccatgctcatcttgcttgttgcggaagacccatttggttcctacaacattttggttaggacgtggaactaaatgccagacctcattcctcgtgaaattgttgagctcctcttgcatcgccaccacccaatccgaatcttggagtgcttcctctaccctgtgtggctcaatagaggaaacaaacgagtaatgttcacaaaaatgtgcaacacgagatctagtggttacccccttataaatatcgccgaggatggtgtcgacggggtgatctcgttggattgcttggtggactcttgggtgtggcggtcttggttcttcctcatcctccttttcttgatcatttgtatctcccccttgatcattgctatcatcttgaggtggctcgtcttcttgattttgctcttcatcattttgagcctcatcctcattttgagttggtggagatgcttgcatgggggaggatggttgatcttgtgtacttggaggctcttcggattccttaggacacacatccccaatggacatgttcctaagcgctatgcatggagcctgttcttcacctatctcatcaagatccatttgctctacttgagagccgttagtttcatcaaacgcaacgtcacaagagacttcaactagtccagtggacttgttaaagaccctatatgcccttgtgtttgagtcataaccaagtaaaaagccttctacagttttaggagcaaatttagattttctacctcttttaataagaatgaagcatttgctaccaaaaactctaaaatatgaaatgttgggctttttaccggttaggagttcatatgatgtcttcttgaggattcggtgaagatataaccggttgatggcgtagcaggcggtgttgaccgcttcggcccaaaaccggtccggtgtcttgtactcatcaagcatggttcttgccatgtccaatagagttcgattcttcctctccactacaccattttgttgtggagtgtagggagaagagaactcatgcttgatgccctcctcctcaaggaagccttcaatttgagagttcttgaactccttcccgttgtcgcttcttattttcttgatccttaagccgaactcattttgagctcgtctcaagaatccctttaaggtctcttgggtttgagatttttcaagacaatacttactcccgccgatgcttatgtaagcaatcgggccgaatagatccatgtggagtagctcaagcggcctgtcggtagtcatgatgttcttgcgtggatgatggactccaacttgcttccctgcctggcatgcgctacaaatcctgtctttctcaaaatgaacatttgttaatcctaaaatgtgctctccctttagaagcttatgaagattcttcatcccaacatgggctagtcggcggtgccagagccaacccatgttagtcttagcaattaagcatgtgtcgagttcagctctatcaaaatccactaagtatagctgaccctctaacacacccttaaatgctattgaatcatcacttcttctaaagacagtgacaccttgatttccatccccgaatgtgatagctcgttggggatcttggtttttctcatatgaggagaacatccttttctcccctgtcatgtggtttgtgcacccgctgtcgagtatccaacttgagcccccggatgcataaaccttgccggatttgctagtaagcacataagatgcatcaaaagttttaaatgaaatggcatgatcatttgatgcattagtggttttctttctaggcaacttggcatgggttggttgcctagatctagatgtctcacccttatacatgaaagcatgattagggccagagtgagacttcctagaatgaattttcctaattttgtcctcgggatagccggcagggtataaaatgtaaccctcgttatcctgaggcatgggagccttgccctttacaaaatttgacaatcttttaggaggggcactaagtttgacattgtctcccctttggtagccaatgccatccttaatcccagggcgtctcccattataaagcatgctacgagcaaatttaaatttctcattttctaagttgtgctcggcaattttagcatctagtttagctatatgatcattttgttgcttaattaaaatcatgtgatcatgaatagcatcaacattaatgtctctacatctagtacaaatagtaacatgctcaatggtagatgtagagggtttgcaagaattaagttcaacgatcttagcatgaagtatgtcattcttatctctaagatcggcaattgtaactttgcaaacatcaaaatctttagccttagcaatcaaattttcattctctaatctaaggctagcaagagaaatgtttaattcttcaatcctagcaagcaactcatcattattatctctagaattgggaattgaaacattacaaacatgagaatcaaccttagcatttaaactagcattttcatttctaaggttgtcaatcatctcacggcaagtgcttagctcactagataatttttcacatttctcaacttctagagcataagcctttttcaccttaacatgtttcttgttttctttaattagacaatcctcttgggaatccaagaggtcatccttttcatgaatagcacttactaattcatttaatttttccttttgagctatgttaaggttggcaaaaagggaacgcaagctatcttcctcatcactagcattgtcatcactagaagattcatatttagtggaggagttggatttaaccttcttctttttgccgtcctttgccatgaggcacttgtggccgacgttggggaagaggagtcccttggtgacggcgatgttggcggcgtcctcgtcgtcggaggagtcgcttgagcttttgtcggaatcccattcccgacaaacatgggcatcgccgcccttcttcttgtagtattttttcttttcctttcttctccccttcttgtcgtcgcctcggtcactgtcactagatataggacatttagcaataaaatgaccgggcttaccacatttgtagcaaaccttcttggagcgggacttgtagtctttccccctcctttgtttgaggatttggcggaagctcttgatgacgagcgccatttcctcattgtcgagcttggaggcgtcgattggttgtcgacttggtgtagcctcctccttcttctcctccgttgccttgaatgcaacgggttgggcttcggatgagtcgccaagctcgttgattttcctcgagccttctatcatgcactcaaaacttacaaaatgcccgataacttccacttcgtggtcatcccacttcttgctcccgaggttgcgcacttggttcaccaaagtcttgagccggttgtacatatgttgtggctcctcccctttgagaagccggaaccgaccgagctccccctcgatcgtttcccgcttggtgatcttggtgagctcatctccctcgtgcgcggttttgagtacatcccaaatctccttggcgttcttcaacccttgtactttgttatactcctctttacttagagaggcgaggagtattgttgttgcttgagagttgaagtgctcgatttgggccacctcatcctcatcatagtcctcatcccctacggatggtacctgcgcgccaaactcaacaacatcccatatgcttttgtggagcgaggttagatgaaatcgcattaaatcgctccacctcgcgtaatcttcaccatcaaaagttggtggtttgcctaatgggacggagagtaaaggtgtatgtttggaaatgcgagggtagcgtagggggatcttactatacttcttgcgctcttggcgcttagaagtgacggagggcgcatcggagtcggaggtcgatgttgatgaagtgtcggtctcgtagtagaccaccttcctcatcctcttgtgcttgtcacctttccgatgcggcttgtgggaagaagatttttccttcttctctttgtggtgagaagaagatttcttctccttccctttgttggaggagctcttcttcttctccctccttttggtgcgggactcttccgatgaagtgctcccgtagcttgtagtgggcttttcgccggtctccatctccttcttggcgtgatctcccgacat

SEQ ID NO: 29860 - DNA, 129 bp, Zea mays
  Clone ID: MRT4577_127246C.1
ctttcaatagatcgcagcgaggggagctgctctgctacgtacgaaaccccgacccagaagcacgatcgtttacgaatggtttagcgcccaggttcccccacgaaacgtgcggtgcgtgacgggcgaggg

SEQ ID NO: 29861 - DNA, 2385 bp, Zea mays
  Clone ID: MRT4577_127247C.1
ctaaagacagttgtagcccattttgcataattgagaaactgaaagcaagttatagtctaaagaatcttcaagaaaaacattagaaatagaatggtcaggagatatagcaattttaccaagtcctttgaccaaactttgattctcatccccgaatgtgatagctctttggggatcatggtttttctcataggaggagaacatctttttctccccagtcatgtggtttgtgcacccgctatcaatgatccaacttgagcccccggatgcataaaccttaggttcccaaacacaagccttggagcccttgtgtttgcccccaacatatttggcaattactttgcctgatttgttagttaaaacatatgaagcatcaaaagtcttaaatgaaacattagtttcatttgatgcaataggagatttctttttaggcaatttaacatgggttgattgcctagagctagaagcctcatttttatacataaaagcatgatgtgtaacattatgaggtttcctagcatgaattctcctaattttgtgctcgagataaccaacatgatataaaatatagcccttgttatcctgagccatgggagccttacccttaacaaaaatagacaatcttttaggggtattaagcttgacattgtctccctgttggaagccaatgccatccttaatcccagggcgtctcccattatagagcaggcttctagcaaatttaaatttttcattttctatctcacgctcaataattttaacactaagttgagctatgtgatcattttgttgtttagataaagctaggtgatcatggatagcatcaacattgatgtctctacatctatttaaatctttagccttagatattaatttatcattctcaatcctaagactagaaagtgattcattcaacttgtcaattttagcaatcaaactagcattatcatttttaagtttgacaagagaatcatcacaaacatttaatttctcaaccttagcaattaatttaacattctcatttctaaggttggagatagtatcatggcaaatgttaagctcactagtcaatttttcacatttttctatctcatgagcataagcatttttaaccttaacgtgcttcttgttttccttaataaggaagtcatcttgcctatccttgagtccatccttctcatgaatagcactaattaattcattcaatttttctttttgttgcatgttgaggttggcaaaaagtgtgagcaaatcatcctcatcatcactagagctagcctcatcactagatgttgcatatttagtggaagctctagattttaccttcttctttttgtcgtcctttgccatgaggcacttatggccgacgtttgggaagacaaggcctttggtgacggcgatgttagcggcatcctcgtcggatgaggagtcggtggagctctcatcggagtcccattcccgacacacttgggcatcgccgcccttcttcttgtagtatctcttcttttccctcctctttcccttcttgtcgtcgcccctgtcactatcacttgataatggacatttagcaataaaatgatcgggcttaccacacttgtagcaaactttcttggagcggggcttgtaatccttcccccttctttgtttgaggatttggtggaagctccagatgatgagcgccatttcctcgttgtcgagcttggaggcgtcgatggggagcctacttgacgtagactcttctttcttttcctccgtcgctttgaatgcgacgggttgcaccttgaccatttcatggtcatcccattttgtgctcccgaggttgcgcacttgattcaccaaggtcttgagccggttgtacatggcatgtggctcctccccttggttgagcatgaatcgactgagctccccctcgatcgtttcccgcttggtgatcttggtcacctcatctccttcgtgcgcagtcttgagcacgtcccaaatctcttttgcactcttcaatccttgcaccttattatactcctgcgctccatactcaacaatatcccatatgcttttgtggagtgaggttaggtgatgcctcattttatcactccacatagaataatcttcaccgtaaaaaaccggtggtttgctatacttcttgcgctcatggcacttagaagtggcagatgtcgattcggagtcggaggtggagggtgacgaagagtcggactcgtagtagaccactttcttcatcttcttcttcttgtcacctctccgttgtgacttgatggaggaagcagattcctccttgtgcttgtgggcggactccctcgaatgggttctccccgagcttgcggacttgtcgccactggtccctatctcccttttggcggatgctcccgacat

SEQ ID NO: 29862 - DNA, 1076 bp, Zea mays
  unsure (1)..(1076): unsure at all n locations
  Clone ID: MRT4577_127248C.1
gttgtacagcagtggcgctcatatctacagcatggtgaatttgttatactcacggatcacaaaagtcttacacaactgaatgaacaacgtctccacacccctagaaacacaaggttttcaccaaacttcttggcttgaactacaaaatccattatcggcatggttatgacaaccgcgccgttgatgccctttcacgaaatgggactgttgaatgttgtgtagtatcaatgttggttcctcagtggctgcagtctatctaggatagctaccaataggatttcgaggctgcttcactactctttaaactggctatcgactagtccgcagtgccccattgcaccctgtgtgatggcctgctgtgtttcaagaaccggatctgggtgggcaatgatgcacaactacaacatcatattgtggcagccttgcatagttcactggttgaaggtcacttgggagtgtcagtgacgtacagtagggtgaagaagttgtttgcctgaccatggttgaaatcatttgtccacaagtttgtgcgagagtgtcaggtttgtttataggcgaaactagatcgtgctgcctaccctggcttgttacaatcgttgccagtgccctcttctgcatgggatacaatatctatggacttcgttgaaggtttgcctcgctcacagcatgctgattgcatcctggttattgtggacaaattctctaaatatggccacttccttccactcagtcatccctatactgctcactcggttgctcacagcttcttgttcaatgtttacaagatccatggcctttcttcagttattatttcggatcgtgacctagtgttcaccagccagttttggcaacaaccgtttcgtcttgcgggcattgagcttaagcctagttcttcttaccatccccaaaccgacggacagaccgaacaagtcaatcaatgcttggaaacatatctgcgctgcttcgcaaatgtctgcccaacgaaatggaaagagtggttgcctgtgggcgagtactggtacaacaccagcctccactctgcactgnggcgtgcaccatttgaggtctttatggcc

SEQ ID NO: 29863 - DNA, 4602 bp, Zea mays
  Clone ID: MRT4577_127249C.1
atgtcgggagcatccgccaagagggagatcgggaccggcgagaagcccgccacaagccatgggaaggctccatcaaggaagtccgccaacaagaagaaggatggatccccttcacgcattcgatcgcacaagagtggcgagaagaagaagaaaatgaagaaagtggtctactacgagaccgattcttcctcgccctctagatccggatccgacgccgcgtccgtcacttctaagcgccaagagcgcaagaagtatagtaagatccccctacgctatcctcgcattcctaagcatactccattactttccgtcccattaggcaaaccaccgacatttgacggtgaagattattctaggtggagtgatatgatgagatatcacctaacctcactccacaaaagcatatgggatgttgttgagtttggtgtacaggtaccatccgtaggggatgaagattatgatgaggacgaggtggcccaaatcgtgcacttcaactcccaagccaccactatactcctcacctctctaagtcgagaggagtataacaaggtgcaaggattgaagagtgccaaggagatttgggacgtactcaagaccgcgcacgaaggagacgaggtgaccaaaatcaccaaacgggaaacgatcgagggggagctcgatcgctttcggcttcgccaaggggaggagccacaagagatgtacaactggctcaagaccttggtgaaccatgtgcgcaacctcgggagcaaaaaatgggatgaccatgaaatggtcaaggttattcttagatcactcgtttttcttaaccccacacaagttcaattaatacgtggtgatcctagatatacactaatgtctcccgaggaagtaatagggaaatttgtgagctttgagttgatgatcaaaggctcaaagaaaatcatcgagcaagatgtcccctccatgcccgaagcacaaccggtcgcattcaaggtgatggaggagaagaaggaggagtctacatcaaatagactacccatcgacgcctctaagctcgacaatgaggagatgacgctcatcatcaagagcttccgccaaatcctcaagcaaaggagggggaaggattacaagccctgctccaagaaagtttgctacaagtgtggtaaagctcgtgacagtgacagggataacgacaagaagggcaagaggagagaaaagaagaggtaccacaagaagaggggcggcgatgctcatgtgtgccgcgaatggaactccgacgagagctcctccgactcctcctccgacgaggacgtcgccaacatcgccgtcaccaaaggactcctcttccccaacgtcggccacaagtgcctcatggcaaaggacggcaaaaggaagaaggtaaaatcaaaatcctccactaaatatgaaacctctagtgatgaggaggataatttgcgcaccctttttgccagcctaaacatgcaacaaaaggaaatattgaatgaattaattagtgctattcatgagaaggatgaactcttggactctcaaaaggacttcctaattaaagaaaacaagaagcatgttaaggttaagaatgcttatgctctagaagtagaaaaatgtgaaaaaatatctagtgagctaagcacttgtcatgatattattgccaaccttagaaatgaaaatgctaaattaattgctaaggttgattctaatgttagtgatgtttcaattccaaatcttagagatgataatgttagtttacttgctaaggttaaagaattgaatgtctctcttgctagccttagaaatgagaatgaaaaattaattgctaaggctaaagacttagatgtttgcaacgttaacattttcaatcttagaagagaaaatgacattttacatgctaagattgttgaactaaaatcttgcaaaccctctacatctaccgttgaacatgtttccatttgcactagatgtagagacattaatgttgatgctattcatgatcacctagctttaattaagaaacaaaatgatcacatagctcaacttaatgctaaaattaatgagcatgacttagaaaatgaaaaatttaaatttgctagaagcatgctttatagtgggagacgccctggcatcaaggatggcattggcttccaaaagggagacaatgtcaaacttaatgccccaccgaaaagattgtctaactttgttaagggcaaggctcccatgcctcaggataacgagggttacattttataccctgtcggttatcccgagcataaaattaggaaaattcactctaggaagtctcactctggccctaatcatgcttttatgtataagggtgagacatctaggtctaggcaatcaaaccgtgcaaaattgcctaagaagaaaactcctattgcatcaaatgattctaacatttcatttaaaacttttgatgcatcttatgttttaaataacaaatctggcaaggtttatgcatccgggggctcaagttggatcatcgatagcgggtgcacaaaccacatgacaagggagaagaagatgttctcctcctacgagaaaaaccaagatccccaacgagctatcacaatcggcgatggaaaccaaggtgttactgtctttagaagaagttatgattcaatagcatttaagggagtgttagagggtcagctatacttagtagactttgatagagctgaactcgacacttgcttaattgctaagactaacatgggctggctctggcatcaccgactagcacatgttggaatgaagaatcttcacaagcttttaaagggagaacacattttgggactaacaaatgttcattttgagaaagacagggtttgtagcgtatgtcaggcagggaagcaagttggtgttcatcatccacacaagaacatcatgacgactgacaagccactcgagctcctacacatggaccttttcggcacgatagcttacataagcattagcgggagtaagtactgtgtagttattgtggatgattattctcgcttcacttgtgtgttctttttgctggaaaaatctcatacccaagaaaccttaaatggattcttgagacgggctcaaaacgagttcgggttaaggatcaagaaaattagaagcgacaacaggacggagttcaagaactctcaaattgaaggcttccttgaggaggagggcatcaagcatgagttctcttctccctacacgccacaacgaaatggtgtagtggagaggaagaatagaaatctattggacatggcaagaaccatgcttgatgagtacaagacttcggatcggttttgggccgaggcggtcaacaccgcttgctacgccatcaaccggttatatctacacggaatcctcaagaagacatcatacgaactcctaaccggtaaaaagcccaatgtttcatattttagagtctttggtagcaaatgctttattcttgttaaaagaggtagaaaatccaaatttgctcctaaggctgtagaaggctttttactaggatataattcaaacacaagggcatatagagtctttaacatgtcctctggactaattgaagtttcttgtgacattgtgtttgatgagactaatggctctcaagtagagcaagttgatcttgatgagctagatgatgaagaggccccgtgcgttgcgctaaggaacatgtccattggggatgtgtgtcctaaggaatctgaagagcctccaaatgcacaagatcaaccatcttcctccatgcaagcatctccaccaactcaagatgaggataaggctcaaaatgatgaaggagaagatcaagaaattgagccacctcaagaggagagcaatgatcaagggagagatgcccataatcaagataaggaagatgaacaactttaccaaatggacgtgaaaagtgccttccttaatggaccaatcaaggaggaggtctatgttgagcaacctcccggctttgaagatagtgagtatcctaaccatgtatataaactctctaaggcgctttatgggctcaagcaagccccaagagcatggtatgaatgcctaagagatttccttatcactaatggcttcaaagtcggaaaggccgatcctactttatttactaaaactcttaacaatgatttgtttgtatgccaaatttatgttgatgatattatatttgggtctactaacgaatctacatgtgaggaatttagtaggatcatgacacaaaaattcaagatgtctatgatgggggagttgaagtacttcttgggatttcaagtgaagcaactccaagagggcaccttcattagccaaacgaagtacattcaagacatactcacaaagtttgggatgaaggatgccaagcctatcaagacacccatgggaactaatgggcatctcgacctcgacacgggagggtgtaaaattaatagaaagagcacatcggggacttgccagttcttgggaaggtctctggtgtcttgggcttcaaagaaacaaaattctgtcgctctttctaccgtcgaagccgagtatattgtcgcaggccattgttgcgcgcaattgctttggatgaggcaaacccttagggactgtggttacaattaa

SEQ ID NO: 29864 - DNA, 752 bp, Zea mays
  unsure (1)..(752): unsure at all n locations
  Clone ID: MRT4577_12724C.1
cccggccgggnatgggaagccacaaccacaaccacaatccccggcggcggaggggaaaaggaaagaatccggaaatcggcgatcaaggaagaggagaagcgactcacctttgggagggtggccagtgtgccgaggaagaagagggttttagttttagtaggcgaggaggggcagagggcagtggggcgggttgagcgcggaggaagcctccgcgcacacggcacacgtatgcgacgagatccaaagttaaaagtggtatcgctagatcatgattcaaacgtttctttcgtttaagcaaacgaggcaacggcgactgatcactgatccgccactcaaaaggaagagggggaggacaccaggctccaggtctgtcaagatggagcagaagatggctttggtcaagcagaggctggctggccttgcttgattgtaccagcagctgaagcaggtacctgaatcaaagaccacggttagaccctgcgtgaaatgatccaacactggcttcagagtagcaccgtttctttgattaagctcagcacatgttcatctcaagtctgtgaatgatagctggtacctgaatcactactatgaaacttggcatttgtgatatctttgatttcaccaccagtactgtagatagtgttgcccttcaagcctcttttagtttgctgtttgtttgatcaaacttgccatctagaagatgctccttttgtaccatattaggctatctccagcagnttacctatatctat

SEQ ID NO: 29865 - DNA, 2457 bp, Zea mays
  Clone ID: MRT4577_127250C.1
tcatggtttctctcccaagaatggagagttgcttggagtgacggcgaaggatgagttacgtagtggaagcctttgtcttcgccgaagactccaattccctttcaatacacctatgacttggtttgaaatagacttttgatccacggacttacctcccgtgtcgaggtcgagatgcccattagttcccatgggtgtcttgatgggtttgacatccttcattccaaacttgcttagaatatcttgagtgtactttgtttggcttaggaaggtgccttcttggagttgcttcacttgaaatcctaagaaatacttcaactcccccatcatagacatctcgaacttttgtgtcatgatcctactaaactcttcacatgtagattcgttagtagacccaaatataatatcatcaacatagatttggcatacaaacaaatcattctcaagtgttttggtaaagagcgtaggatcggcctttccgactttgaagccattagcaataagaaaatctctaaggcattcataccatgctcttggggcttgtttgagcccataaagcgccttagagagcttatagacatggttagggtactcactgtcttcaaagccgggaggttgctcaacatagacctcttccttgattggtccattgaggaaggcacttttcacgtccatttgataaagcttaaagccatggtaagtagcataggctaataatatacgaattgactcaagcctagctacgggtgcataggtttcaccgaaatccaaaccttcgacttgggagtatcccttggccacaagtcgagctttgttccttgtcaccacaccatgctcgtcttgcttgttgcggaagacccatttggttcctacaacattttggttaggacgtgaaactaaatgccatacctcattcctagtgaagttgttgagctcctcttgcatcgccaccacccaatccgaatcttgtagtgcttcctctaccctgtgtggctcaatggaggaaacaaaagagtaatgctcacaaaaatgtgcaacatgagatctagtggttacccccttatgaatatcgccgaggatggtgtcgacggggtgatctcgttggattgcttggtggactcttgggtgtggcggtcttggttcttcatcctccttgtcttcctcatttgcatctcccccttgatcattgtcatcatcttgaggtggctcatttgattgatcttcttctttatcaacttgagcctcttcctcattttgagttggtggagatgcttgcatggaggaggatggttgatcttgtgcatttggaagttcttcggattccttaggacacacatccccaatggacatgtttcttagcgcgatgcacggagcctcttcaatacctatctcatcaagatcaacttgctctacttgagagccgttagtttcatcaaacacaacgtcacatgagatttcaactagtccagtggacttgttaaagaccctatatgcccttgtgtttgaatcatatcctagtaaaaagccttctacagttttaggagcaaatttagattttctacctctcttaacaagaataaaacatttgctaccaaagactctaaaatatgaaatattgggctttttaccggttaggagttcgtaggatgtcttcttgaggattcggtgtagatacaaccggttgatggcgtagcaagcggtgttgaccgcctcggcccaaaaccgatccgaagtcttgtactcatcaagcatggtccttgccatgtccaatagagtttgattcttcctctccactacaccattttgttgcggcgtgtagggagaagagaactcatgcttgatgccttcctcctcaaggaagccttcgatttgagagttcttgaactccgttccgttgtcgcttctaatcttcttgatccttaagccgaactcattttgagcccgtctcaagaatccctttaaggtctcttgggtttgagatttttcttgtaagaagaatacccaagtgaagcgagaataatcatccactattacaagacaatacttactcccgccgatgcttatgtaagcaatcgggccgaatagatccatgtggagtagctcaagcggcctgtcggtcgtcatgatgttcttgtgtggatgatgggcaccaacttgctttcctgcttggcatgcgctacaaaccctatctttctcaaaatgaacatttgttaatcctaaaatgtgctctccctttagaagcttgtgaagattcttcattacaacatgggctagtcgggggtgccagagccaacccatgttagtgttagcaattaagcaagtgtcgagttcagctttatcaaaatctaccaagtatagctgagcctccaacactcccttaaaagctatggaataatcacttgttctaaagacagggacacctacatcagtgaagagaaagttgtaacccattttgcataa

SEQ ID NO: 29866 - DNA, 400 bp, Zea mays
  Clone ID: MRT4577_127251C.1
attcggctcgagcgagattgagaacctcagtgccttcgcccacaaggatctagggatgaagagatccacctggcacaaggagaagtgtcaactttattctctgtcaatagaagcttggacgtgacaattctggtgccgaggatctaaaaaaaatataccagtggctaggggactctgggtgtatgcctgaggggtgtgaccatgtgagctagggacctgtgcacagctactagtactcgagcattgataccatacaaaaacgctatatgatgtacgaactacaaagtgaaccaaggcacagcattgtcgtcctcgaatacttgttctgtaccaacttaaataagcttatgtggatgatgcccatgggtcttggccaccctgcgttgggtgtatgtctgtg

SEQ ID NO: 29867 - DNA, 3216 bp, Zea mays
  Clone ID: MRT4577_127252C.1
tcaccccccttctaggagactttcaattggtatcagagctctattcttcctctccactacaccattttgttgtggcgtgtagggagaagagaactcatgcttgatgccctcttcttcaagaaagccttcgatttgtgagctcttgaactccgtcccgttgtcgcttctaattttcttgatccttaagtcgaactcattttgagcctgtctcaagaatccctttaatgtctcttgggtataagatttttcctgtaaaaagaacacccaagtgaagcgagaataatcatccacaataactagacagtacttactcctgccgatgcttatgtaagctatcgcgccgaataggtccatgtgtaggagctcgagtggcctgtcagtcgtcatgatgttcttgtgtggatgatgagcaccaacttgcttccctgcttggcatgcgctacaaatcctgtctttctcaaaatgaacatttgttaatcctaaaatgtgctccccctttagaagcttatgaagattcttcatcccaacatgtgctagtcggagatgccagagccagcccatgttagtcttagcaattaagcaagtgtcgagttcagctctatcaaaatctactaagtatagctgaccctctaacactcccttaaatgctattgaatcatcacttcttctaaagacagtgacaccttgatttccgtccccgaatgtgattgctctttggggatcttggtttttctcataggaggagaacatctccttctcccatgtcatgtggtttgtgcacccgctgtcgatcacccaacttgagcccccggatgcataaaccttgccggatttgttagttaagacataagaggcatcaaaagttttaaaagaaatgttatggttatttgatgcactaggagttttctttttaggcaattttgcatgggttgattgcctagaactagatgtctcacccttatacataaaagcatgattagggccagagtgagacttcctagaatgaattctcctaattttgctctcgagataaccgacagggtacaaaatgtaaccctcgttatcctgaggcatgggagccttgcccttaacaaagttggacaatttcttaggaggggcattaagtttgacattgtctcccttttggaagccaatgtcgtccttaatgccagagcgtctcccattatagagcatgcttctagcaaatttaaatttttcattttctaagtcatgctcattaatcttagcattaagttgagctatgtgatcattttgttgtttaattaaagccatgtgatcatgaatagcatcaacattaatgtctctacatctagtacaaatggaagtgtgctcaacgatagatgtagagggtttgcaagattttaattctacaaccttagcatgcaatatatcatttttacttctaaggtcggaaatggaagcattgcaaacatctaattctttagccttagcaagcaatttttcattttcaatcctaaagctagcaagagaaatgtttaattcttcaatcttagcaagcaaatcaacattatcatctctaagattgggaattgaaacattacaagcatttgaatcaaccttagcaattaaactagcattttcatttctaaggttgtcaatagtctcatggcaagtgcttagctcactggaaagtttttcacatttctctacttctagagcgtaagcatttttaaccttaacatgcttcttattttctttaataaggaagtcctcttgggtgtccaagagatcatccttctcatggatagcactaatcaattcatttagtttttctttttgttgcatgttgaggttggcaaaaagaatgcgtaagttatcctcctcattgctagcattatcctcatcactagaggtttcatattttgtggaggatcttgattttaccttcttccttttgccgtcctttgccatgaggcacttgtggctgacgttggggaagagaagtcccttggtaacggcgatgtttgcggcgtcctcgtcggaggaggagtcggtggagctctcgtcggagtcccattcccggcaaacatgggcatcgtcgcccttcttcgtgtagtacttcttcttctcctttcttctccccttcttgtcgtcgcccctgtcactagaaataggacattttgctataaagtgaccgggcttaccacatttgtagcaaactttcttggagcggggcttgtaatccttccccctcctttgcttgaggatttggcggaagctcttgatgatgagcgtcatttcctcgttgtcgagcttggaggcatcgatgggtgttctactcgatgtagactcctccttcttctcctccgtcgcaaagttcccgattacttcctcgggagtcattagtgtatatctaggattgccacaaattaattggacttgagtagggttaaggaaaacaagtgatcttagaataaccttaaccatttcgtggtcatcccattttttgctcccgaggttgcgcacttgattcaccaaggttttgagccggttgtacatgtcttgtggctcctccccttggcgaagacggaagcgaccgagctccccctcgatcgtctcccgcttggtgatcttggttagctcatctccctcgtgcgcggtcttgagtacgtcccaaacttccttggcgctctttaatccttgcaccttgttgtactcctctctacttagagagccgaggagtatagttgtggcttgggagttgaagtgctcgatttgagcctcttcgtcctcatcataatcttcataccctacggatggtacctgtacaccaaactcaactacatcccatatacttttgtggagtgaggttagatgaaatcgcattaaatcactccacctagcataatcttcaccatcaaacgttggtggtttgcctaatgggacggaaagtaaaggcgtatgtttaggaatgcgaggatagcgtaaggggatcttactaaacttcttgcgctcatggcgcttagaagtgacggacggcgcgttggagccggaggtggaaggtgatgaagtatcggtctcgtagtagaccaccttcatcatcttctttttcttgtcgccactccgatgcgacttgtgggaagaggatttcttctccttccctttccctttgttgtgggactcttccgatgaagccttcccgtggcttgtagtgggcttgtcgccggtcaccat

SEQ ID NO: 29868 - DNA, 1854 bp, Zea mays
  Clone ID: MRT4577_127253C.1
atgacgactgacaggccactcgagctcctacacattgatctattcggcctgatagcttacataagcatcggcgggagtaagtactgtctagttattgtggatgattattctcgcttcacttgggtattctttttgcaagaaaaatctcatacccaagagaccttaaagggattcttgagaagggctcaaaatgagttcggcttaaggatcaagaaaattagaagcgacaacgggatggagttcaagaactctcaaattgaaggcttccttgaggaggagggcatcaagcatgagttctcttctccctacacgccacaacaaaatggtgtagtggagaggaagaatcgaactctattggacatggcaagaaccatgcttgatgagtacaagacttcggatcggttttgggccgaggcggtcaacaccgcttgctacgccataaaccggttatatctacaccgaatcctcaagaagacatcatatgaactcctaaccaagcgagttgatcttgatgagataggtgttgaagaggctccatgcatcgcgctaaggaacatgtccattggggatgtgtgtcctaaggaatccgaagagcctccaaatgcacaagatcaaccatcctcctccaagcaagcatctccaccaactcaaaatgaggatgaggctcaagttgatgaaggagaagatcaagcaaatgagccacctcaagatgacggcaatgatcaagggggagatgaaaatgatcaagacaaggaggatgaagaaccaaggccgccacacccaagagtccaccaagcaatccaacgagatcaccccgtcgacaccatcctcggcgacatccataagggggtaaccactagatctcgtgttgcacatttttgtgagcattactcttttgtttcctctattaagccacacatggtagaggaagcacttcaagattcggattgggtggtggcgatgcaagaggagctcaacaacttcacgaggaatgaggtatggcatttagttccacgtcctaatcaaaatgttgtaggaaccaaatgggtgttccgcaacaagcaagacgagcatggtgtggtgacaaggaacaaagcccgacttgtggccaagggatactcccaagtcaaaggtttggatttcggtgaaacctatgcacccgtagctaggcttgagtcaattcgtatattattagcctatgctacttaccatggcttcaagctttatcaaatggacgtgaagagtgccttcctcaatggaccaatcaaagaagaagtctatgttgagcaacctcctggctttgaagatagtgagtaccctaaccatgtctataaactctctaaggcgctttatgggctcaagcaagccccaagaggatggtatgaatgccttagagatttccttatcactaatggattcaaagtcgaaaaggccgatcctacactcttcactaaaactcttgaaaatgacttgtttgtatgccaaatttatgttgatgatattatattttggtctactaacgagtctacatgtgaagaatttagtaggatcatgacacaaaaattcgagatgtctatgatgggggagttgaagtacttcttagaatttcaagtgaagcaactccaagagggcactttcctaagccaaacgaagtatactcaagatattctaagcaagtttgggatgaaggatgccaaacccatcaagacacccatgggaaccaatgggcatctcgacctcgacgagggaggtgccaaaggttcacacttagccaataaaaagaccaagaaatgggttcaacaaaaagagcaagggacaaccagtggcggaactgcccgaattattccaacttaa

SEQ ID NO: 29869 - DNA, 4569 bp, Zea mays
  Clone ID: MRT4577_127254C.1
ttaaaatcctaagaaatacttcaactcccccatcatagacatctcgaatttttgaatcatgatcctactaaactcttcacaagtagatttgttagtagacccaaatatgatatcatcaacataaatttggcatacaaacaaatcatttgcaatggttttagtaaagagagtaggatcggctttgccgactttgaagccattagtgataagaaaatctcttaggcattcataccatgctcttggggcttgcttgagcccataaagcaccttagagagtttgtaaacatgattagggtactcactatctttaaagccgggaggttgctcaacatagacctcctccttgattggttcattgaggaaggcactcttcacgtccatttgataaagcttgaagccgtggtaaatagcataggcaagtaatatgcgaattgactcaagcctagctatgggtgcataggtttcaccgaaatccaaaccttcgacttgtgagtatcccttggctacaagtcgggctttgttccttgtcaccacaccatgctcatcttgcttgttgtggaagacccacttggtccctacaacattttggttagcatgtggaacaagatgccatacctcattcctcgtgaagttgttgagttcctcttgcattgccaacaaccaatccgaatcccttaatgcgtctttcaccctgtatggatcaatagaagacacaaaggagtaatattcacaaaaatgagcgacacgagatcgagtggttacccccttataaatatcgccgaggagggagttcacgaggtgatcttgttgtatctcttggtggactcttgggtgtggcggtcttggaccctcatcatcttccttgttttgatcattggcatctcccccttgatcattgtcctcctcttgaggcagcttttcttgatcttcattttcatcatcttgggcttgatcctcatcttgagttggtggagatgcttgtatggaagaagatggttgatcttgtgcttgtggaggctcttcggattctttaggacacacatccccaatggacatgttccttagcgcgacgcatggagcctcttcatcatctagctcatcaagatcaacttgctctacttgagagccattagtctcatcaaacacaatgtcacaagatacttcaactagtccagtggacttgttaaagactctatatgcccttgtgtttgagtcataaccaagtaaaaagtcttctacatccttaggagcaaatttagattttctacctcttttaacaagaataaagcatttgctaccaaagactctaaaatatgaaacattgggctttttaccggtgaggagttcataagatgtcttcttgaggattcggtgaaggtagagacggttgatggcgtagcaagcggtgttgattgcttccgcccaaaaccgatccgaggtcttgtactcatcaagcatggtcctcgctaagtcaagtagagttctattcttcctctccactacaccattttgttgaggtgtgtagggagaagaaaactcatgcttgatgccctcgtcctcaagaaagccttcaatttgagagttcttgaactccgttccattgtcgcttctaatctttttgatccttaagccgaactcattttgagcccatctcaagaatccctttaaggtctcttgggtttgagatttttccctgtctttctcaaaatgaacatttgttagtcctaaaatgtgctctccctttagaagcttgtgaagattcttcatcccaacatgggctagtcggcgatgccagagccaacccatattagtcttagcaattaagcaagtgtcgagttcagctctattgaaatcaactaagtatagctgaccctccaacactcccttaaatgctactgaatcatcacttcttgtaaagacagtaacacctatatcttgatttccatccccgaatgtgatagctctttggggatcatggtttttctcataggaggagaacatccttttctcccctgtcatatggtttgtgcacccgctatcaatgatccaacttgagcccccggatgcataaaccttgggtacccaaacacaagtctttgagcccttgtgtttggccccaacatatttggcaactactttgcctgatttgttagttaaaacatatgaagcatcaaaagtcttaaatgaaatgttatgatcatttgatgcagtaggagttttctttttaggaaatttagcatgagtggattgcctaaaactagatgcctcactcttatacataaaagcatgatgagagccagagtgagacttcctagaatgaattctcctaatcttatgttcgggataaccagcaggatataaaatgtatccctcgttatcctgaaccatgggagctttgcccttaacaaagttggacaatttcttaggggcattaagcttgacattgtctccctgttggaagccaatgtcatccttaatgccagggcgtctcccattatagagcatacttctagcaaatttaaaattttcattttctaagtcatgctcattaattttagcactaagttgagctatgtgatcattttgttgtttaattaaagctaggtgatcatggatagcatcaacattaatgtctctacatctagtacaaatagtaacatgctcaatggtagatgtagagggtttgcaaacatttaattcatcaatcttagcatgtaacatgacattttcatttctaagattggaaacaatatcattgcaaacatttaaatttttagccttagtaatcaatttattattttctatcttaaggctagcaattgattcatttaacttgtcaatcttagcaatcaaattagcattatcatttttaagtttgacaagagaatcatcacaaacatttaaattctcaaccttagcaattaatttagcattctcatttctaaggttgaaaatagtatcatggcaagtgcttagctcactagtcaatttttcacatttttctacttcctgagcataagcatttttaaccttaacatgcttcttgttttctttaaaaaggaagtcctcttggctatccaagagttcatccttctcatgaataacacctattaattcattcaatttttccttttgttgcatgtttgggttggcaaaaagggcaagcaagttatcctcatcatcactagagttctcctcatcactagatgttgcatatttagtggaggctctagattttaccttctttttgccgtcctttgccatgaggcacttgtggccgacattgtggaaaaggagacctttgttgacggtgatgtttgcggcgtcctcgtcggaggagtcagtggagctctcatcggagtcccactcccagcatacatgggcatcgccgcccttcttcttgtaatacttcttcttctccttccttcttcccttcttgtcgtcgcccctgtcactatcacttgataatggacatttagcaatgaaatgaccgggcataccacacttgtagcaaactttcttggagcggggcttgtagtccttccccctcctttgcttgaggatttggcagaaacttttgatgatgagtgtcatctcctcattgtcgagcttggaggcgtcgatggggagcctacttgatgtagactcttctttcttctcctccgttgctttgaaggcaacgggttgcacctcgggtgtggaggtggcgcctcgctcgatgatttgtttggagcctttgatcatcaattcaaaactcacaaactttcttattacttcttcgggagacattagtttatatctaggatcaccacgaattaattgaacttgtgtagggttaagaaaaacgagtgatcttagaataaccttgaccatttcatggtcatcccatttggtgctcccgaggttgcgcacttggttcaccaaggtcttgagccggttgtacatggcttgtgactcctcatctccttcgtgcacggtcttgagcacgtcccaaatatctttggtggtttcaaacccatgcactttgttatactcctctcgacttaaagagacgaggagtatagttgttgcttgcgagttaaagtgtcgtatttggtcggcctcatccgagtcatagtccttatcccccacctgtggtacctgcgctccatactcaacaacatcccatatgcttttgtggagtgaggttagatgacctttcattctagcactccacatagagtaatcttcaccctcaaaaaccggtggtttccctaatggaacagaaagtaaaggagtgtgtttaggaatgcgaggatagcgtagggggatcttactaaacttcttgcgctcatgacgcttagaagtgatggatggcgtgttggagccggatgtagaaggtgatgaagaatcggtctcgtagtagaccaccttcttcattttctttttcttctcgccgctccaatgcgacttgttgtgtgaaggggatcccttcatcttgttgccgaactctcccgatggagtcttcccgtggcttgtggcgggcttctcgccagtcaccatctccttcttagcgtgatctcccgacat

SEQ ID NO: 29870 - DNA, 514 bp, Zea mays
  Clone ID: MRT4577_127255C.1
gggggccaaacttttgggccctgcccctttgcaaattcaaacctaatggaacaacttgaattggccctcccagggctccttttccaaaacctaaaaaaccccctggtcactggttaatttaccccgggatacaagaaaaaattttggaaaccactttttttaaaccaaaagaaatttgaatttgacttttgggcccggggatcactttacatattcaacggctaacttggaaaagggggcccattttggggttatgccgggggcggaccaaaaaaataaactgggttggtggaaaccaaggggcccccgaccctccccccgggggttggggggtttttaaaaattaggggggaaccaaggggatcccgtgaccaaactctttcccaagaaaaggcgggcggcgaaaaaattaaactttccccccccagaaacccccggcaccgggtttacccccggcccccaatttctttacattccgaaaaaaccccgcatgcccttggtggcggggggggcc

SEQ ID NO: 29871 - DNA, 2493 bp, Zea mays
  Clone ID: MRT4577_127256C.1
atgtcgggagatcactccaagaaggagatggagaccggcgacaagcccactacaagccacgagaaagcttcatcggaagagtcccgcaacaaggggaaggggaaggagaagaaagcctcttctcacaagtcgcatcggagtggcgacaagaaaaagaagatgaggaaggtggtctactacgagaccgacacttcatcaccttccacctccagctccgacgcgccatccattacttctaagcgccatgagcgcaagaagtttagtaagattcctctacgctaccctcgcattcctagacatactccattactttccgttccattaggcaaaccgccaacctttgacggtgaagattatgctaggtggagtgatttgatgaaatttcatctaacctcactccacaaaagtatatggaatgttgttgagtttggagcacaggtaccatctgtaggggatgaggattatgatgaggacgaggtggcccaaatcgagcacttcaactcccaagccacaactatactcctcgcctctctaagtcgagaggagtataacaaggtgcaaggattaaagagcgccaaagaagtttgggacatgctcaaaaccgcacacgagggagatgagctaaccaagatcaccaagagggagacgatcgagggggagctcggtcgcttccgtcttcgccaaggggaggagccacaagacatgtacaaccggctcaaaaccttggtgaatcaagtgcgcaacctcgggagcaaaaaatgggatgaccatgaaatggttaaggttattctaagatcacttattttccttaaccctactcaagttcaattgattcgtggtaatcctagatatacactaatgactcccgaggaagtaatcgggaattttgtaagctttgagttcatgatcaagggcttaaagaagatcaacgagcttgacgtcccctccacgtccgaagcacaaccggtcgcattcaaagcgacggaggagaagaaggagtctacatcaagtagaacacccatcgacgcctccaagctcgacaatgaggaaatggcgctagtcatcaagagcttccgccaaatcctcaagcaaaggagggggaaagattacaagccccgctccaagaaagtttgctacaagtgtggtaagcccggtcactttatagcaaaatgtcctatttctagtgacagtgacaggggcgacggcaagaaggggagaagaaaggagaagaagaaatactacaagaagaagggcggcgatgcccatgtttgccgggagtgggactccaacgagagctccaccgactcctcctccgatgaggacgccgcaaacatctccgtcaccaagggactcctcttccccaacgtcggccacaagtgcctcatggcaaaggacggtaaaaagaagaaggttaaatccaaatcctccactagatatgagtcctctagcgatgataatgctagtgatgaggaagataatttgcgtactctttttgccaacttaaacatgcaacaaaaagagaaattaaataaattgattagtgctatccatgagaaggatgatctcttggacacccaagaggacttccttattaaagagaacaagaagcatgttaaggttaaaaatgcttacgctctagaagtagaaaaatgtaagaaactatctagtgagctaagcacttgccatgagaccattgacaaccttagaaatgagaatggtaatttgttagctaaggttgattcaaatgtttgtgatgtttcaattccaaatcttagaaatgataatgttgatttacttgctaagattgaagaattgaacatttctcttgctagccttagaaatgaaaatgaaaaattgcttgctaaggctaaagatatagatgtttgcaatgcttcaatttccgatcttagagataaaaatgatatattgcgtgctaagattgttgaacttaattcttgcaaaccctctacatctaccactgagcatgtcactatttgcactagatgtagagatattaacattgatgctattcatgatcacatggctttaattaaacaacaaaatgatcatatagcaaaattagatgctaaaattgccgagcatgacttagaaaacgaaaaatttaaatttgctagaagcatgctctatagagggagacgccctggcattaaggatgacattggcttccaacagggaggcaatgtcaaacttaatgcccctcctaagaaattatccaactttgttaaaggcaaggctcccatgcctcaggataacgagggttacattttgtaccctgccggttatcacgagagcaaaattaggagaattcactctaggaagtctcactctggccctaaccatgcttttatgtataagggtgaggcatctagttctaggcaatcaacccatgcaaaattgcctaagaagaaaactcctagtgcatcaaatgaacatagcatttcattcaaaacttttgatgcatcaatgttttaa

SEQ ID NO: 29872 - DNA, 384 bp, Zea mays
  Clone ID: MRT4577_127257C.1
acgcatccagcgttgtctcacacgcccaagtcccaactcccaccgcccccgcctgccgttcaaatctccctaccctcccgaagtaggcaagtagccctccctgttcatcgagggggcagatcagtgagccgaacaacgaagcatgccgtccaagccgaacgccgcgtcacgcctcgtcttccgcgctttcctcctcgtcatcagcgccgccgcggacaacgataacaccgcggcacggctgacgatggagtagttcacccgcttctccgcctccgacgacagcgagggcccttccaacgacttccaggtcgagtcccaaggcctccagcgtcagatcgatgatcgggcctcgttcacgaagccgcccgcgacgtcggtgagccg

SEQ ID NO: 29873 - DNA, 382 bp, Zea mays
  Clone ID: MRT4577_127258C.1
gccaggtctgcttctctccagatctactgcttcctcttccagttctccttcgcgagaggggcgcccggtcggggctctagatcccgatgtccttcactcgtcgctctgtatttaaggacagcatcatcggacatagtatgcatgacacacttattttgttgaaccaatactcctaccaggagggtgagcactaaggacatgaggtccgcctgctctggttcaacttaccaggcttgtgcttctattagtgacagggtctgcacatgtgcagacttgggacactgatgccacaccagacagcatacattatgggtgatgcattctaacagctagcccagaagagccctgaaacacaggatgggatatttatggaggagatcaa

SEQ ID NO: 29874 - DNA, 203 bp, Zea mays
  Clone ID: MRT4577_127259C.1
gttcttttgaccccggcctacccgcacagtgagttccagccggcgcccgtcatgctatctgagccgccacaggcggccctcacgtccaagccggcgactccgcccacagccgtggctaacttcaagctctcccgcgccgagctcgtccgcctccgttcgcaggtccccgtgcgcgtgggcgtcccttgttttatcacttactc

SEQ ID NO: 29875 - DNA, 868 bp, Zea mays
  Clone ID: MRT4577_12725C.1
ttgggtccctcgaggccggccgggaccacatccccggcggcggaggggaaaaggaaagaatccggaaatcggcgatcaaggaagaggagaagcgactcacctttgggagggtggccagtgtgccgaggaagaagagggttttagttttagtaggcgaggaggggcagagggcagtggggcgggttgagcgcggaggaagcctccgcgcacacggcacacgtatgcgacgagatccaaagttaaaaggtcatgccgtacctccctccaacttcataaatttctactcaaagcggacgctctaaactttagcacttaaaaacttaaacattaatgttaaaatgtcctaaaattgaagtgcattcaatagtaacttagctcttgaaaatgcgttaaaatttagcacactactaaactttatcacatgggattcaaacatggcctcgtaagagcatatataaccatatttaacacgaggtctcttaaatagtctcgattgtattgttaaacttgctctaaaacttttagtatccgcggaagatttttaaaatccgaacggcgttcggcggagaagcccacggaccgatcgatggagatagccgcgcgcgtgtctcatcgaatccatcaatcactgtatctcaacagacgtggtatcgctgtgtgtggaaataaatcatgattcaaacgtttgtttcgtttaagcaaacgaggcaacggcgactgatcactgatccgccactcaaaaggaagagggggaggacaccagggctcaggtctgtcaagagagcaggtctgtcaagatggagcagaagatggctttggtcaagcagaggctggccttgcttgattgtatcagcagcttgagcaaaag

SEQ ID NO: 29876 - DNA, 1227 bp, Zea mays
  Clone ID: MRT4577_127260C.1
ggtaccctcggtcgccggccggagctcccggccgggacgacccctttctccctccgcccccgcctccacggtcggcgcgcccattcccgtctcctccctcctccccaccccaccccaccccatcccacctcggatctgctgcctccaccgtttcaatccacatgcgagcggaaatcgagcgggcgaattgaatcccgtcccgttcgggctcggccagcgagcgagcggcgtccggccggctgggcattggttcgtgctcgctcgatcgatcagaaaatggcgcatcgtgtgaacaacgagtacgactacctcttcaagatcgtgctcatcggcgactccggcgtcggcaagtccaacatcctctcgcgattcacgcgcaacgagttctgcctcgagtccaagtccaccatcggcgtcgagttcgctacccgcaacctgcagatagacgggaagactgtcaaggcacagatatgggacacggcagggcaggagaggtaccgcgccatcaccagcgcctactacaggggcgcggtcggagcgcttctagtctacgacatcacaaagaagcaaagcttcgacagcgtccagaggtggctccgagagctccggggtcacgcagacgcgaacatcgtcgttatgatggtcggcaacaagtcggacctgaaccacctcagatcggtccccgaggaagacggccgtgcgttttcggagaaggaaggcctgtccttcctggagacctctgccctggaggcgataaacgtggagaaggcgttccacaccatcctgagcgagatccatcagacggtgagcaagaaggcgctcgccgcgcaagcgtccgcgtccaccaacgggcgctcgatgcaagggaccaccattaacgtcgctgagtcgtccaccgtcacgaaaggctcctgctgctctagctgaagagccgcttccgacaggcctcgtcggaagggttcgtttccgccgagctgcacatcgctgcgtgtaggttgtagatcgcttatttgcgttatctgcctgccttccaaagccattgattgactggtgattcgattctttgtcacatggaactccctctagcgtcatatactacatgtaacctgtcttcctgttgcatttgttgttcaacttacacctgtatacttggataaattgaagagcactttgtatgtaccctgtaacacctccttctaataataatctccggtaccattttgacga

SEQ ID NO: 29877 - DNA, 274 bp, Zea mays
  Clone ID: MRT4577_127261C.1
aaacatgagtgcaacatttgttgacgttactggcgaatctgagcagtttgctgacttgttcagctatctcgctaccttgaagccagaactcaaggccgatgcagacgaaaaaaatattgagaaagccgtagaacaaaataaacaaagcgagttgttgaagaaattattatctagccaacaattggttttggaacaaggagcagaaaaagatgtcgaaggattttttggattacaaaccactttaatcttgaagcatggagcctctaacacaaaa

SEQ ID NO: 29878 - DNA, 124 bp, Zea mays
  Clone ID: MRT4577_127262C.1
atttgtttctatagtttctgtgactacttgtggatcgttcagtgtgaggctgcaatttgtacatgaataatgtaaatctagcattagtgcttattttttaatgttgaaatcaacaacttactgt

SEQ ID NO: 29879 - DNA, 821 bp, Zea mays
  unsure (1)..(821): unsure at all n locations
  Clone ID: MRT4577_127263C.1
cggccgggccgggatcattcccgcagcaaacatcctgatcggtcacctagctcatctccttccaaaacacacaccttttctctatctgaaagcagccagctctgcatttccgacgacgacgtccgtggaaatggctagttccttcatgttgtgcacggtggtttttgcggcgtgcctcgccgccgccgccgccgccgactggtctcaaggcactgccactttctatggcggagtcgacgcgtccgggacgatgggtggcgcatgcgggtacgacaacctgtacaacgcggggtacggcgtcaacaccgcggcgctgagcccgaccctgttcaacgacggcgcgtcctgcgggcagtgctacctcatcacctgcgacgggacgcgtccgggcggccagtactgcaagcccggcaactccatcacggtctccgccactaacctgtgcccggccaactacgcgctgcccaacggcggctggtgcggcccggggcgcccccacttcgacatgtcgcagccggcgtgggagcacatcggcatcttcgggggcggcatcatcccggtgctgtaccagcaggtcaagtgctcgcgcaccggcggagtgcgcttcggcctcgccggctcgcagtacttcctgctcgtcaacatccagaacctcggaggcagtggctccgtgggggccgcctgggtgaagggcgacagaaccaactgggatccagatgtccaggaactgnggcgcaaactggcaggcgctcgccgngctcgtcggncaggggctcagcttcgccgtcagcactaccggcggncagtacattcagttctgg

SEQ ID NO: 29880 - DNA, 723 bp, Zea mays
  Clone ID: MRT4577_127264C.1
gtatcttcccgcagcaaacatcctgatcggtcacctagctcatctccttccaaaacacacaccttttctctatctgaaagcagccagctctgcatttccgacgacgacgtccgtggaaatggctagttccttcatgttgtgcacggtggtttttgcggcgtgcctcgccgccgccgccgccgccgactggtctcaaggcactgccactttctatggcggagtcgacgcgtccgggacgatgggtaattaagaatgcatgcattcaattatgaacattatttgtgtacgtacgtatatatgtacgtactaattaaagaattgcagtatatatacatgtggtacatgcatgtttgtttaactatgatacatacgatcgatgatacacacacaggtggcgcatgcgggtacgacaacctgtacaacgcggggtacggcgtcaacaccgcggcgctgagcccgaccctgttcaacggcggcgcgtcctgcgggcagtgctacctcatcacctgcgacgggacgcgtccgggcggccagtactgcaagcccggcaactccatcacggtctccgccactaacctgtgcccggccaactacgcgctgcccaacggcggctggtgcggcccggggcgcccccacttcgacatgtcgcaagccggcgtgggagcacatcggcatcttcgggggcggcatcatcccggtgctgtaccagcaggtcaagtgctc

SEQ ID NO: 29881 - DNA, 785 bp, Zea mays
  Clone ID: MRT4577_127265C.1
attctgaaaccgcaccgtggcatttggtctctttcggccgcctcccccttctccaattcccaccctccaagcgacgaactcccgccgccgccggccgctcccacggcgagctagctcgcccgaagcgccgtgcctcgctggatccgagaccgcacgggcttccggatctcggttcgccgcgcttggagctgagaatggtcgaggggaaaagtgttcaagttgacgtcgagaaaggacttaatcaaatgcctaatgatagcaattcaactagccctgcaactatgcagaagatgaaacctgatatggatgattctgggagaagaactgaatcaccaactccagagaagcctgagtctggaagggaggagattgttgtcagctcattggcaactaatttactttcagagaggtacaaggacagattagctgagaagctgttgggaaatgaggatgaaacagacgatgaagatgataatgaatttgctttgcctgatggcagccaatctccagtttcaaatgaacttcttgagaaacacaagaatttgcttactcttttcaaccggatggagagttctataaggttgctgcgcctgaggaagaagatgactacatttaccaacattgcaacccaggtggaagtactcactaagagaaagttcttgtactctcatttggcccagatgaagcatttattcccagaagcaatccagataaataggatactcttgcatgatcagaaaagcctatgcatgtatgctgacatggaaatacacttctgaaggacg

SEQ ID NO: 29882 - DNA, 234 bp, Zea mays
  Clone ID: MRT4577_127266C.1
tagctcactatacttttcccgccctttttttttttttttgggttttttaaaaaaaaacggggttcccatacatccgggtaatccacatttaccagcgggagccccatgatccacattctagttgggaaacaatttgttcatcctaaagagcatgaaacaaaggatctcatgggggctgctcgtggtttttcaagctatgaacccatccaaacaccccctcttgaaagggcacca

SEQ ID NO: 29883 - DNA, 245 bp, Zea mays
  unsure (1)..(245): unsure at all n locations
  Clone ID: MRT4577_127267C.1
atctgccgacgactgtccactatccccgtgattatccgccgcctaggccgcgtaccagtgagaagagactacgactcagatggccagtgcgctgcaacaaggccgagcgtcgtaccctgctgcccagcagctagcgtcgcgtgcggcgtgtcctagctagcggctgctgactgctgtctggaacatggactgccgaacacggcaattgacgtgtaaacatagtgtggtnagggttatctgtttgt

SEQ ID NO: 29884 - DNA, 446 bp, Zea mays
  Clone ID: MRT4577_127268C.1
aaaacaaacaattaaccgggggggcttggccctcatttggttcttggttaagggcaatttttgtaaggaaaatggcccgggtgcaacgaaggggagactagaccccccctttgaccctgtttggggggcccctgcccccccctaggggggcaggtccggggggtttgggatcaatggctccgcccaaaacgaaggggggaaaaattcccccacaaaaattattaatttcttcgatatgaaagggaaaaacttgaccagatcctgactgggctggaccgggagcgaaccggtcttggtcggcatcatttttctccatttaagccccgccggggccgtacttttttccgaaaaaaaggatctggagctggtcgtagccagaaagccaccagcgccagcaatggcacgaaaaatgttagccccaacccccttgaacagggacttggggc

SEQ ID NO: 29885 - DNA, 335 bp, Zea mays
  Clone ID: MRT4577_127269C.1
tttcaatctccgatgaaaaaagaggtaataaaacaacattgtcaacttccagaaaatttggaggagtgaacaagaatataggcaccgttgtgcattgtttccaaagcaggttgtcgatgatagcaccatatgcagcatttggaggccaatttgtcctgatgggtatgtttctgttggtgatgtagctcatgttggcgtccattcaccgcatgttgcagccatctatcgagattctgatgaaaactttgccctccctgtgggctatgacctagtgtggaggaactgtgttgacgactatgcaactcctctgacagtttggctaccaagagcaccga

SEQ ID NO: 29886 - DNA, 664 bp, Zea mays
  Clone ID: MRT4577_12726C.1
aattcggcacgagggtctgtcctctccccttcagcccttcctctttcactcctccgcctgtccggctgtccctttgctctctgctccgttccttgatccagattccgcggcggtgagggcacccagcccgatcgtccgtctctgtcgatctcccgaagccctaagtggaacccttctccgcgtcggatttcatcgcgggctgatttgatccagagaattcgcggggggcgccggcggcggggaataggatgctgtaggagggagaggaaggaggaaacgtcccggatttctgggcgcgcgcgcgggcggccatgcatctgtcgctgtggaagccgctctcccactgcgccgcgctgctcttggacaagaaaaaccacccgccgcggccgccgcaggcgggggcgggggcgggcgcggggtccggcggcgggcggcggctgcaggagagcaagctgcgggaggcgcttgaggaggcgtccgaggacgggtccctcgccaagtcccgcgacgcggcgctcctcgatggaggggacggtgcggaggaggcgtccgtgggggcggtcccgctcgctggcgcggctccacgcgcagcgggacttcctgcgcgcgacggccatggccgcagagcgcgcgttccagtcgccggacgcgctccccgatgctg

SEQ ID NO: 29887 - DNA, 3699 bp, Zea mays
  Clone ID: MRT4577_127270C.1
tcacggggtgatctctttgtattgcttggtggactcttgggtgtggcggttttggaacttgttcatcttccttatcttgatcatgggcatctccccttgatcattgctctcctcttgaggtggcttaactccttgatcttctccttcatcattttgagcctcatcctcatcatttgttggtggagctgcttgcatggaggaagatggttgatcttgtgcttgtggaggctcttcggattccttaggacatacatccccaatggacatgttccttagtgcgacgcacaaagcctcttcatcatctagctcattaagatcaacttgctctacttgagagccgttagtctcatcaaacacaatgtcacaagaaacttcaactagtccagaggacttgttaaagactctatatgcccttgtgtttgaatcatatcctagtaaaaagccttctacagccttaggagcaaatttagattttctacctcttttaacaagaataaagcatttgctaccaaagactctaaaatatgaaacattgggctttttaccggttaggagttcgtatgatgtcttcttgaggattcggtgtagatacaaccggttgatggcgtagcacgcggtgttgactgccttcgcccaaaaccaattcgaagtcttgtactcatcaagcatggtccttgccatgtccaatagagttctattcttcctctccactacaccattttgttgtggcgtgtagggagaagagaactcatgcttgatgccctcctcctcaaggaagccttcgatttgtgagttcttgaacctcggtcccgtggcgctccttatttcttgatctccgccgatgcttatgtaagctatcgggccgattgatagatccatgtgtaggagctcgagtggcctgtcagtcgtcatgatgttcttatgtggatgatgaacaccaacttgcttccctgcctgacatgcgctacaaaccctgtctttctcaaaatgaacatttgttagtcccaaaatgtgttctccctttagaagcttgtgaagattcttcattccaacatgtgctagtcggcgatgccagagccagcctatgttagtcttagcaatcaagcaagtgtcgagttcagctctatcaaaatctactaagtatagctgaccctctaacactcccttaaatgctattgaatcatcacttcttctaaagacggtaacacctatatccgtaaaaaggtagttgtaacccattttacataattgagaaacggaaagcaaattgtaatctaaagaatcttgattcccatccctgaatgtgatagcttgttggggatcttggtttttctcgtaggaggagaacatcttcttctcccctgtcatgtggtttgtgcacccactatcgatgatccaacttgagcccccggatgcataaacccaaacgattttgggtcctttgacattagatacaagaactttgggtacccaaacacaagtctttgaccccttgtgcttgcccccaacatacttggcaactactttgccggatttgttagtcaaaacataagatgcatcaaaagttttaaatgaaatgttaaaatcatttgatgcaataggagttttcttcttaggcaattttgcacgggttgattgcctagagctagatgtctcacccttatacataaaagcatgattagggccagagtgagacttcctagagtgaattctcctaatcttatgctcgggataaccggcagggtacaaaatgtaaccctcgttatcctgaggcatgggagccttgcccttaacaaaattagacaatcttttaggaggggcattaagttttacattgtctcccttttggaagccaatgccatccttgatgccagggtgtctcccactatagagcatgcttctagcaaatttaaaattttcattttctaagtcatgctcattaattttggcattaagttgagctatgtgattattttgtttcttaattaaagctaggtgatcatgaatagcatcaacattaatgtctctacatctagtgcaaatggaaacatgttcaacggtagatgtagagggtttgcaagattttagttcaacaatcttagcatgtaaaatgtcattttcacttctaagatttgaaactgtaacattgcaaacatctaagtccttagccttagcaatcaatttttcatactcgtttctaaggctagcaagagagacattcaattcttcaatcttagcaagtaaactaacattatcatctctaagattgggaattgaatcatcacaaacatttgaatcaaccttagcaattaatctagcattctcatttctaaggttggcaattatatcatggcaagtgcttagctcactagatagtttttcacatttttctacttctagagcgtaagcatttttaaccttaacatgcttcttgttttccttaattaggaagtcctcttgggagtccaagagttcatccttctcatgaatagcactaattaattcatttaacttttctttttgttgcatgtttaggttggcaaaaagggtacgcaaattatcctcatcatcactagaattagcctcatcgctagatgtcgcatatttagtggaggatttagatttaaccttcttctttttgccgtcctttgccatgagacacttgtggccgacgttggggaagagaagacccttggtgacggcgatgtttgcggcgtcctcgtaggaggaggagtcggtggaactctcgtcggagtcccactcccggcaaacatgggcatcgccgcccttcttcttgtagtacctcttcttctcctttcttctccccttcttgtcgtcgcccctgtcactgtcactagatagtggacattttgcaataaaatgaccgggcttaccacacttgtaacaaactttcttggagcggggcttgtaatccttccccctcctttgcttgaggatttggcggaagctcttgatgatgagcgccatttcctcattgtcgagcttggaggcatcgatggggattctacttggagtagaatcttctttcttctcctccgttgctttgaatgcaacaggttgtgcttcgggcgtggaggagtcgccttgctctaagtcgacgatgtgtttggagcctttgatcattagttcaaagctcacaaacttcccaatcacctcctcgagagacattagcttatatctaggatcaccatgtattaattgaacttgagtaggattacgaaatacgagggatcttagaataaccttgaccatctcatggtcatcccattttgtgctctcgaggttgcgcacttggttgaccaaggtcttgagccggttgtacattgcttgtggctcctctccttggttgaggacgaatcgaccgagctccccctcgatcgtctcccgcttggtgatcttggtcacctcattccttcgtgcgcggttatacttcttgcgctcatggcgcttagaagtgacggacaccgcgtcggagccggatgtggagggcgacaaagagtcggtcttgtagtagaccactttcttcatcttcttcttcttgtcgccactccgaagcgacttgacgcggggaggggattcctccttgcctttggcgccggactcccttgataaagccttcccgtggcttatggccttctcgccggtttccatctccctcttggcggatcctcccgacat

SEQ ID NO: 29888 - DNA, 555 bp, Zea mays
  unsure (1)..(555): unsure at all n locations
  Clone ID: MRT4577_127271C.1
aattcggcacgaggccaccttgccggatttgttagtcaaaacactaagatgcactcaaaagttttaaactgaaatgttatgatcactttgacgcactaggagttttctttctaggcaacttagcatgggttggttgcctagagctagatgtctcacccttatacataaatgcatgattagggccagagtgagacttcctagaatgaattctcctaattttgctctcaggataaccggcagggtataaaatgtaaccctcgttatcctgaggcatgggagccttgcccttaacaaagttggacaatcttttaggaggggcactaattttgacattgtctcccctttggaagccaatgccatccttgantgccgggcgtctctcattataaagcatgctacgagcaaatttaaatttctcatttcttaagttgtgctcggcaattttagcatctagttttgtatatgatcattttgggtggtttaataaagctatatgatcatgaatagcattaacatcaacatctctacatctagtacaaatagatacatgctcac

SEQ ID NO: 29889 - DNA, 138 bp, Zea mays
  Clone ID: MRT4577_127272C.1
gcgcgttcgaccaacgtacggccgttatattggactaatagcttgctccatgacgttctttcttacgtagatcgattcatcgatcgctacctagctgacgaccatgggagccctctcctctggcggcattaccgcggc

SEQ ID NO: 29890 - DNA, 378 bp, Zea mays
  Clone ID: MRT4577_127273C.1
acgttcatttctttttttttacattaaacacgaacaaccaggtatattggacctaagaaaaagcgctgagccgcgcagccatggcattgcagcgcacagtcatgcacgcgtggtcagggcgacactgtacaccaaaagtaagaaaagagcaagcgcctcatacgcacggcacacataccggatcggtcaatacaaccaaaaatcaagaacgaagagcgatcgacggcacgatctatacagacacttgtacacggtttatttaagctcaagtataaggtgggcttcgtcatcttctacttggcgttctttgacttgatgctgatgggcaccgggttgtacgaccactacttgatgcactcgagcatggagtccacgagc

SEQ ID NO: 29891 - DNA, 4419 bp, Zea mays
  Clone ID: MRT4577_127274C.1
tcaaaagaaattccgagaatcaagaatatttagctcatgcctaagtttgttaaatgtttgttcatctagtggcttggtaaagatatcggctaattgttctttggtgttaatatatgcaatctcgatatcccccttttgttggcgatcccttaagaaatgataccgaatggctatgtgtttagtgtggctatgttcaacgggattatccgccatgcggattgcactctcattatcacatagaagaggaactttggttaatttgtaaccatagtccctaagggtttgcctcatccaaagcaattgcgcgcaacaatggcctacggcaatatactcggcttcggcggtagaaagagctacagaattttgcttctttgaagcccaagacaccagagaccttcccaagaactggcaagtccccgatgtgctctttctattaattttacaccctcccgtgtcgaggtcgagatgcccattggttcccatgggtgtcttgatgggcttggcatccttcatcccaaacttgtttagaatgtcttgaatatacttcgtttggctaatgaaggtgccctcttggagttgcttcacttgaaatcctaagaagtacttcaactcccccatcatagacatctcgattttttgtgtcatgatccatgctcttagggcttgtttgagcccataaagcgccttagagagtttgtaaacatagttagggtactcactatcttcaaagccgggaggttgctcaacatagacctcctccttgattggtccattgaggaagacacttttcacgtccatttggtaaagcttaaagccatggtaagtagcataggcaagtaatatgcgaattgactcaagcctagctcccccttgatcattgctctcctcttgaggtggctcctcttcttgatcttctccttcatcattctgagcctcatcctcatcttgagtcggtggagatgcttgcatggaggaagatggttgatcttgtgcttgtggaggctcttcggattccttaggacacacatccctaatggatatgttccttagcgcgacacacggagcctcttcatcatctagctcatcaagatcaacttgctctacttgagagccgttagtctcatcaaacacaatgtcacaagaaacttcaactagtccagaggacttgttaaagactctatatgcccttgtgtttgaatcatatcctagtaaaaaaccttctacagccttaggaacaaatttggattttctacctcttttgacaagaataaagcatttgctaccaaagactctaaaatatgaaacattggtctttttaccggttaggagttcatatgatgtcttcttgaagattcggtgtagatacaaccggttgatggcgtagcaagcggtgttgaccgcctcggcccaaaaccgatccgaggtcttgtactcatcaagcatggtccttgccatgtccaatagagttctattcttcctctccactacaccattttgttgtggtgtgtagggagaagagaactcatgcctgatgccctcctcctcaaggaagccttcgatttgtgagttcttgaactccgttctgttgtcgcttctaatctttttgatcctcaagccgaactcattttgagtccgtctcaagaatccctttaaggtctcttgggtatgagatttttccaagtatagctgaccctctaacactcccttaaatgctactgaatcatcacttcttctaaagacagtaacaccttgattcccatccccgaatgtgatagctcgttggggatcttggtttttctcgtaggaggagaacatcttcttctctcctgtcatatggtttgtgcacccactatcgatgatccaacttgagcccccagatgcataaacccaaacacaagtctttgaccccttgtgcttgctcccaacatacttggcaactactttgccggatttgttagtcaaaacataagatgcatcaaaagccttaaatgaaatgttagaatcgtttgatgcaataggagttttcttcttatgcaattttgcacgggttgattgcctagagctagatgtctcacccttatacataaaagcatgattagggccagagtgagacttcctagagtgaattctcctaattttgtgctcgggataaccggcagggtacaaaatgtaaccctcgttatcctgaggcatgagagccttgcccttaacaaagttagacaatcttttaggaggggcattaagtttgacattgtctcccttttggaagccaatgccatccttgatgccagggcgtctcccactatagagcatacttctagcaaatttaaatttttcattttctaagtcatgctcattaattttggcattaagttgggctatgtgatcattttgtttcttaattaaagctaggtgatcatgaatagcatcaacattaatgtctctacatctagtgcaaatagaaacatgctcaacggtagatgtagagggtttgcaagattttagttcaacaatcttagcatgtaaaatatcattttcacttctaagattggaaatggtaatattgcaaacatctaagtctctagccttagcaattaatttttcattctcaattttaaggctagcaagagagacatttaattcttcaatcttagcaagtaaactaacattatcatctctatgattgggaattaaatcatcacaaacatttgaatcaaccttagcaattaatttatcattctcatttctaaggttggcaataatatcatggcacatgcttagctcattagataatttttcacatttgtctacctctagagcataagcattcttaaccttaacatgcttcttattttccttaattaggaagtcctcttgggtgtccaagagttcatccttctcatgaatagcactaattaattcatttaatttttctttttgttgcatgtttaggttggcaaaaagggtgcgcaaattatcctcctcatcactagaattatcttcatcacttcttccttttgccgtcctttgccatgaggcacttgtggccgacgttggggaagaggaggcccttagtgacgggctgacggcgatgttggcggcatcctcgttggaggaggagtcggtggagctctcgtcggagtcccacttacggcacacatgggcatcgccacccttcttcttgtggaacctcttcttttctctcctccttcccttcttgtcgtcgcccctgtcactgtcacttgataatggacattttgcaataaagtgaccgggcttaccacacttgtagcacactttattggagcgagatttgtagtcctttctccacctttgcttgaggatttggcgaaagctcttgatgatgagcgccatctcctcattgtcgagcttggaggcgtcgatgggtagtctacttgatgtagactcctccttcttctccttcgtcaccttgaatgcgaccggttgtgcttcgggcgtggaggggccatcttgctcgatgattttctttgagcctttgatcatcaactcaaagctcacaaattttcctattacttcctcgggagacattagtgtgtatctaggatcaccacgtattaattgtacttgcgtagggttaagaaaaacgagtgatctaagaataaccttgaccatttcatggtcatcccattttttgctcccgaggttgcgcacttggttcaccaaggtcttgagccggttgtacatctcttgtggcttctccccttggcgaagccggaagcgactgagctccccctcgatcgtctcccgcttggtgatcttggtcacctcgtctccttcgtgcgtggtcttgagtacgtcccaaatctccttggcgctctttaatccttgcaccttgttatactcctctcgacttagagaggtgaggagtatagtggtggcttgggagttgaagtgcacgatttgggccacctcgtcctcatcataatcttcatccccgacggatggtacctgtacaccaaactcaacaacatcccatatgcttttgtggagtgaggttaggtgatatctcatcatatcactccacctagaataatcttcaccgtcaaacgtcggtggtttgcctaatgggacggaaagtaatggagtatgcttaggaatgcaaggatagcgtagggggatcttattatacttcttgcgctcttggcgcttagaagtgacggacgcggcgtcggatccggatgtagagggcgaggaagagtcggtctcgtagtagaccactttcttcattttcttcttctcgccactcttgtgtgatcgaatgcgtgaaggggatccatccttcttgttgttggcggactcccttgatggagccttcccgtggcttgtagcggacttctcaccgccgatcaccatcttcttggcgtgatctcccgacat

SEQ ID NO: 29892 - DNA, 197 bp, Zea mays
  Clone ID: MRT4577_127275C.1
ggtagacaaacgtaaaaggttcaatcttttattgttgcaccaatgtaatactctgttcattacacacagcccccctgatgacaaattttttcagaatatgctttctcactgcacatcagcatggcaggacctacccatctaatcataaacggcccacgcctttaagcaaattcatggacatgaaaacggactcacat

SEQ ID NO: 29893 - DNA, 982 bp, Zea mays
  Clone ID: MRT4577_127276C.1
ccaaactgttttgggtcctttggcattagatacaagaactttgggcacccaaacacaagtcttggagcccttgtgcttgcccccaacaaacttggcaacaaccttgccggatttgttagtcaaaacatatgatgcatcaaaagtcttaaatgaaatgctatgttcatttgatgcattgggaatcttcttcttaggcaacttggcacgggttggttgcctagaactagatgtctcacccttatacataaaagcatgattagggccagagtgagacttcctagaatgaattttcctaattttgtcctcgggataaccggcagggtataaaatgtaaccctcgttgtcctgaggcatgggagctttgcccttaacaaagttggacaatctcttaggaggggcactaattttgacattgtcccccctttggaagccaatgccatccttaatgcctgggcgtctcccattataaagcatgctacgagcaaatttaaatttttcattttctaggttgtgctcggcaatttttagcatctaattttgctatatgatcattttgttgttaaattaaagccatatgatcatgaatagcattaacatcaacatctctacatctagtacaaatagtgacatgctcaatggtagatgtagacggtttgcaagaattaagttcaacaatcttagcatgaagaatatcatttttatctctaagattggaaatagtagcattgcaaacatctagttctttagccttagcagttaaattttcattctctactctaagtctagcaagagaaatgtttaattcttcaatcctagcaagcaaatcatcactattatctctaggattaggaattgaaacattacaaacatgggaatcaaccttagcatttaaactagcattttcattcctaaggttgtcaatcatctcacgacaagtgcttagctcactagataatttttcacatttctctatcctagagtc

SEQ ID NO: 29894 - DNA, 300 bp, Zea mays
  Clone ID: MRT4577_127277C.1
gtgtaaagagggagatttgcatactgcctataacttatatcttgaaatgattgagaaaggtctggtaccaaatctttttatttgcagttctttagtgagttgtttctacaggaagggaaagtttgatgaggcaaatttagtgttgcaaaatcttgtgggtactgacatgattccagatatcagtgcgcccagacttgagatagggaaagtagcaaatttcattgatactgttgctggtggaaatcatcattctgcaaaaatcatgtggaacattgttatttttggtctatgcaaattggg

SEQ ID NO: 29895 - DNA, 5196 bp, Zea mays
  Clone ID: MRT4577_127278C.1
atgtcgggagatcacgccaagaaggagatggacaccggcgacaagcccgctacaagcctcgagaaagcttcatcgggagagtcccgcaacaaagggaaggggaaggagaagaaaccctcttcccacaagttgcatcggagtggggacaagaaaaagaagatgaggaaggtggtctactacgagaccgacacctcatcgccatctacctccggctccggcgcgccctccataacttctaagcgccatgagcgcaagaagtttagtaagatccccttacactaccctcgcacttctagacatactccattactttccgttccattaggcaaaccgctaacctttgacggtgaagattatgctaggtggagtgatttaatgaaatttcatctaacctcactccacaaaagtatatggaatgttgttgaatttggagcacaggtaccatccataggggatgaggattatgatgaggacgaggtggcccaaatcgagcacttcaactcccaagccacaaccatactcctcgcctctctaagtagggaggagtacaacaaggtgcaaggattaaagagcgccaaggaagtttgggacgtgctcaagaccgcgcacgaaggagatgagctaaccaagatcaccaagcgggaaacgatcgagggggagctcggtcgcttccgacttcgcaaaggggaagagccacaagacatgtacaaccggctcaaaaccttggtgaaccaagtgtgcaacctcgggagcaaaaagtgggatgaccacgagatgattaaggttattcttagatcacttatttttcttaaccctactcaagttcaattaattcgtggtaatcctagatatacactaatgactctcgaggaagtaatcaggaattttgtgagttttgagtacatgatcaagggctcaaagaaaatcaatgagctagatgatccctccacatccgaagcacaaccggtcgcatttaaggcgacggaggaaaagaaggaggagtctacactgagtagacaaccaatcgacgcctcaaagctcgacaacgaggaaatggcgctcgtcatcaagagcttccgccaaatcctcaagcaaaggagggggaaagattacaagccccgctccaagaaggtttgctacaagtgtggtaagcccggtcactttatagcaaaatgtcctatttctagtgacagtgacaggggcgacgacaagaaggggagaagaaaggagaagaagaagtactacaagaagaagggtggcgatgcccatgtttgtcgagagtgggactccgacgaaagctctagcgactcctccgacgacgaggacgccgccaacatcgctgtcaccaagggacttctcttccccaacgtcggccacaagtgcctcatggcaaaggacggcaaaaataagaaggttaaatccaaatcctccactagatatgagtcttctagcgatgataatgctagtgatgaggaagataatttgcttaccctttttgccaacctaaacatgcaacaaaaggaaaagttaaatgaattaattagtgccatccatgagaaggatgacctcttggacacccaagaggacttcctaatcaaggaaaacaaaaagcatgttaaggttaaaaatgcttatgctctagaagttgaaaaatgtgaaaaattatctagtgagctaagcacttgccatgaaactatagacaaccttagaaatgaaaatgataatttgtatgataatttgttagccaaggttgatttaaatggttgtgatgcttcaattcccaatcttagaaatgataatgataatttgcttactaagattgaagaattaaacattactcttggtagccttagaaatgaaaataaaaacttgcttgctaaggctaaagaacttgatgtttgcaacgcttccatttctgaccttagaagtaaaaatgatatattacatgctaaggttgtagaattaaaatcttgcaaaccctctacatctaccgttcaacatactactatttgcactagatgtagagatgttgatattaatgctattcatgatcacatgactttaattaaacaacaaaatgatcatatagcaaaattagatgctaaaattgccgagcatgacttagaaaacgaaaaatttaaatttgctagaagcatgctctatagagggagacgctctggcattaaggatggcattggcttccaacagggaggcaatgtcaaacttaatgcccctcctaagaaattgtctaactttgttaagggcaaggctcccatgcctcaggataacgagggttacattttgtaccctgtcggctatcctgagagcaaaattaggagaattcattctaggaagtctcactctggccctaaccatgcttttatgtataagggtgagacatctagttctaggcaaccaacccgtgctaagtttcctaagaagaaaactcctagtgcatcaaatgatcatgatatttcatttaaaacttttgatgcatcttatgtgttaactagcaaatccggcaaggttgttgctaaatatgttgggggcaagcacaaggggccaaagacttgtgtttgggtttatgcatccgggggctcaagttggatcatcgacagtgggtgcacaaaccacatgacaggggagaagaaaatgttctcctcctatgagaaaaaccaagatccccaacgagctatcacattcggggatggaaaccaaggtgtcactgtctttagaagaagtgatgattcagtagcatttaagggagtgttagagggtcagttatacttggtagattttgatagagctaaactcgacacttgcttaattgctaagactaacatgggctggctctggcaccgccgactagcacatgttgggatgaagaatcttcataagattctaaagggagagcacattttaggattaacaaatgttcattttgagaaagacaggatttgtagcgcatgccaagcaggaaagcaagttggtgctcaccatccacacaagaacatcatgacgactgacaggccactggagctcctacacatggacctattcggcccgatcgcttacataagcatcggcgggagtaagtactatctagttattgtggatgattattctcgcttcacttgggtattctttttgcaggaaaaatctcacacccaagagaccttaaagggattcttgagacgggctcaaaatgagttcggcttgaggatcaagaaaattagaagcgacaacgggacggagtttaagaactctcaaattgaaggcttccttgaggaggagggcatcaagcatgagttctcttctccctacacgccacaacaaaatggtgtagtggagaggaagaatcgaactctattggacatggcaagaaccatgcttgatgagtacaagacatcggatcggttttgggccgaggcggtcaacaccgcctgctacgccatcaaccgattagtctttggtagcaaatgctttattcttgttaaaagaggtagaaaatctaaatttgctcctaagactgtagaaggctttttactaggatatggttcaaacacaagggcatatagagtctttaacaagtcctctggacaagttcaagtttcttgtgacattgtgtttgatgaggctaacggctctcaagtagagcaagttgatcttgatgagataggtgatgaagaggctccatgcatcgcgctgaggaacatgtccattggggatgtgtgtcctaaggaattcgaagagcctccaaatgcacaagatcaaccatcctcctccacgcaagcatctccaccaactcaaaatgaggatgaggctcaagttgatgaagggcaagatcaagaagatgagccacctcaagatgacggcaatgatcaagggggagatgcaaatgatcaagacaaggaggatgaagaaccaaggctgccacacccaagagtccaccaagcaatccaacgagatcaccccgtcgacaccatcctaggcgacattcataagggggtaaccactatatctcgtgttgcacatttttgtgagcattactattttgtttcctctattgagccacacagggtagaggaagcactccaagattcggattgggtggtggcgatgcaagaggagctcaacaacttcactaggaacgagcaagacgagcacggtgtggtgacaaggaacaaagcacgacttgtggccaagggatactcccaagtcgaaggtttggatttcggtgaaacctatgcacccgtagctaggcttgagtcaattcgtatattattagcctatgctacttaccatggcttcaagctttatcaaatggacgtgaaaagtgccttcctcaatggaccaatcaaggaagaggtctatgttgagcaacctcccggctttgaggatagtgagtaccctaaccatgtttataaactctctaaggcactttatgggctcaagcaagccccaagagcatggtatgaatgccttagagatttccttgtagataatggcttcaaagtcggaaaggccgatcctactttattcactaaaactcttgaaaatgacttgtttatgtctatgatgggggagttgaagtatttcttaggatttcaagtgaagcaactccaagagggcaccttccttagccaaacgaagtatactcaagacattctaagcaagtttggaatgaaggatgccaaacccatcaagacacccatgggaaccaatgggcatctcgatctcgacacggaagggtgtaaaattaatagaaagagcacatcggggacttaccagttcttgggaagatccttggtgtcttgggcttcaaagaagcaaaattccatagctctttctaccgccgaggccgagtacattgccgcaggacacggttgcgtgcaactactttggatgaggcaaacccttagggactatggttacaaattaaccaaagttcctcttctttgtgataatgagagtgcaatccgcatggcggataatcccgttgagcatagccgcactaaacacatagccattcggtatcactttttaagggatcaccaacaaaagggagatatcgagattgcatacattaatactaaagatcaattagccgatatctttaccaagccactagatgaacaaacttttaacaaacttaggcatgagctaaatattcttgattctaggaatttcttttga

SEQ ID NO: 29896 - DNA, 197 bp, Zea mays
  unsure (1)..(197): unsure at all n locations
  Clone ID: MRT4577_127279C.1
gagggggagagcgagaccaatgcccaagagcaagaagccagagaggacagacgcgaatacaataggaatcctatncaaaaacccaccataccgcctcccccatgtgcaggaacaagatcaggagaggatactagggagaagagacaggagggggagaaagaggcccagagggaccagcagagcaaacaagaagggag

SEQ ID NO: 29897 - DNA, 323 bp, Zea mays
  unsure (1)..(323): unsure at all n locations
  Clone ID: MRT4577_12727C.1
attctattttattatttcctttttttttttttttttaaagnggtttttttttaatttttttggggggtctccccggcaaaacccgggttcttttcaaccagcaagagccggggccactggctttaaaccctaacgatttccaccatttttcccccggttttatctctttagagtaccacccccggtcaaaaagattccctttaagggaaaggaaaaaccccgaccgggcaaggttgggagggctttaaactttttttaaacccccttagaggccgggggggggcccccccggagggggggcccgatttcccccccccttccct

SEQ ID NO: 29898 - DNA, 1718 bp, Zea mays
  Clone ID: MRT4577_127280C.1
caaaagacttagatttatactctggatattttgagcaatttgctagagttgagacagacaccactcaagcaaggcatggttattatccaagttcattaccttggtaagtatgagaatgaaatggatatggaggattcccaggccatgaacactccttttcaccacatcgaccttatttaaccctttacgtgggcttgcgccctcgagcacaagatctccctaacgaagctaaatttaaagcaccatatagaagcttcacatattgagcttctactcgtagtttcgggctttggtatcctaggggatccacatattctttaattaaaagtctcaccggccgattgcgcggagtgtaaaattaatagaaagagcacatcgtggacttgccagttcttgggaggatccttggtgtctaacgcttcaaagagtccaaattcccgccctctttctaccaccgaagccgagtacattgccgcaggccattgttgcgcgcaattgctttggatgaggcaaacccttagagactatggttacaaattaaccaaagttcctctcctgtgtgataatgagagtgcaatctgcatggtggataatcccgttgagcacagccacactaagcacatagccattcggtatcactttttgtggcatcaccaacaaaggggggatatcgagattgcttatattaacaccaaagaacaattagctgatatctttaccaagccattagatgataaaacatttaccaaacttaggcatgagctaaatattcttgattctaggaattttgattgatgttttgcacacatagctcatttctatacctttgttcatatctctttcatgtgctatgactaatgtgattttcaagtgtattacatgctaagtcatagattgaaagggaaatggagtcttcaacgaagacaaggcttccactccactccatcgaattatctatcctttgccggtattccgccatctctcaaaattggtataatctttactcatattcatttgtaccactaggggagaaagtaaaaagggcttatatttcactcacaagtatccgtttttggcaattcatgccaaagggggagaaagtattagcccaaagcaaaaggaccgcaccaccaccaatttcaaaaatatagtctttcaatttgtattaaagaagtttttttttaatttgtatcttatatttgatataatttcaaattggtatgacctccttcaaaattaatatctaaaaccctcttaaacactaagaggagaatctcattgagggggagttttgtttagtcaaaggaaaagcatttgaaacagggggagaaaaatttcaaatcttgaaaatgcttttcgaaatcttactcatttacctttgactatttgcaaaaagactttgaaaataatttccaaaagattttgcaaaaacaaaacaagtggtgcaagtgtggtccaaaatgttaaaatgaagaaagtaattcatgcatatcctatgaaagttataaattggtttaattcgaagcaacctttgcacttgccttatgcaaactagttcaattatgcacttatatatttgctttggtttgtgttggcatcaatcactaaaaaggggagattgaaagggaaatagggtcaaaccttttcctataaagattttagtggttgaattgcccaacacaaatattggactaactgttttgtaaaaagtcgacctg

SEQ ID NO: 29899 - DNA, 2445 bp, Zea mays
  Clone ID: MRT4577_127281C.1
atggccactcaaaatcagaaatattcatcaaagaaggctgttgtttcatcgtctccagctgcaactgtggtggaagatgaacctcaagtgcaggagagagttactgaagaaattatgaaccctataccatcttctctgccatcaattccaactgatgatgtctcgccgcagccaacaccggtttatgatatcaatcgccttccacatgatccaggtgaaagaatgcccatccaaagttaccctattaatgatcaagatgcaattcgtagattatatattcttaaaggtccattccaaccatatgcacatgaatttccaaaaagaaaaataggaaagagatatcgtcaattcaatttcgtttggtttcataaacatcattggcttgaatatagtatcaagaaggattctgtattttgctttatatgctatttgttcaaagacaacaaatgtaagagcaagggggcagatgcatttgttatagatggttggagaaattggaatataggagagaaggcacttttgaaacatgtgggttctagtgcgcacaatgcagctcaagagaggtatagtggcttcgtgaatcctaaggcaacaattgattatcacattgataagtggagtaaagaggatcttcgtctttataagatcagattgacttattcacttaggtgtttgaagtttctattgcgtcaaggattggcatttcgtggacatgatgagagtgaagagtctaacaacagaggcaactttcttgaacttttgaaatttcttgcatcaaacagtgaagaggtgaagaaatatgttttagagaatgctccaggtaactgtaccttaactagcccaaagatacaaaagcagattattcattgttgtgccatagaaactagaaagaaaataattgaagatcttggtgaagaaccctatgcaattttagctgatgagtctagtgatatatcacataaagaacaactagctctttgcttgcgttatgttgataaattgggaagaccatgtgagcgacttattggagttatccctgtagatgatactagttctttgtcacttaaggaagcaattgaagctcttcttgttagccatggtttgtctatggctcaaatccgaggtcaaggttatgatggagccagcaacatgaaaggagagataaaagggctgaaaacattgataatgaaagagtcaccttctgcttattatatacattgctttgcacatcaactacaactagttcttattgctgttgctaaggggaataccgattgtgtgacattttttgatcaaataactctcttgctaaatattgttggagtttcttgtaagcgccatggtatgcttcgaaatgctaggcttgagaatatcagaaaagcactagattgcggtgaacttgaaactgggactggattaaatcaagagatggggttgcctaggcctggtgagactcgatggggctctcattacaaaactgtttgtagcatcatttctatgtaccccacaattcgtgacgtactcatcactctaggggctgatatttcacataagggcgattggacaaaaattcattttgttcttggagcatttgagtcctttgagtttgttttctttgcacaattaatgtttgttattcttggatacacaaatgaattatccgagtgtttgcaaagaagggagcaagatatcatcaatgcaatctcacttgttaatgtggcaaagagcagaatgcaagaattgaggtctaatggttgggatcaattcctacaaagggttacattgttttgcaatcaatatggcatccaagttcctgctatggaggataattatgtgccttatggaaaatcagcacgatacactcgaaaccaaacaaatgatgatcacttcagaagagaaatatatattggtgtcattgatcaaattagtcaagagcttgataaccggttcgatgaggtcaatatggagttgctttcttgtatgtcagccttagatccttctgattcatttgcttcctttgatgcgcagaagatacgaagactagctgaattttaccctaatgacatatttgggaatgatttgctgaaacttgagttgcagcttaataattatattgatgcaatgaggcaagatgataacttcaaaggccttcattgccttgttgacctgtcagttaagcttgttgaaaaaaagaggcatatcgtgttcgatatggttttcttgcttctcaaattgatattacttttgccggtggcaacagcaagtgttgagagggcattttctgcaatgtctttggtcaaaactaagttaagaaataagatgggtgatagtcttttggacgattgtctagtcacattcatcgaacgagatcttttcttcaaagtcgatgaagatgatataattgagacctttatggcttttagaaagcgtcgtccgaacaaatag

SEQ ID NO: 29900 - DNA, 819 bp, Zea mays
  unsure (1)..(819): unsure at all n locations
  Clone ID: MRT4577_127282C.1
gacgagtagcgaaagtgccgaaaccatattcttcctacgccttttctgctgccgctgcatcttccactcgcgtcaagaaacgaaacccagctgcaccagcaacttctgccagcagacccaacgaccgaagcttttttttccctttcttttcatcgccgccgctcggggttcaaggttcagcgcgtccccgaatggtacgtgactcgagctcgccgacggcctgatcgatctcctctgcttttctcaactcttttagattaggcccctgctttgctctacttcagtttagctattggtttaataagtcgaggccgaaattgtccgatcaatcgtgctggtcgttccttcctgagaacctgcttcagttcctcatgagcaaggctagttggatgctgcgacgagatgtttggttgcctttttgccgctagtccctcccttctcgtgattcctgaagctcaaccatgcatgtcattcaggctccgttatattatatatagataattgatcttacttgctgggttatcctagagactgggttctagatactcgtgtgtatcatcagtttaagttgcacttcacttgttttctgatgaaaacagaggaacctctcatcattgtggttgtaagcacctgctctgacaggccacaacagaacggcgtgaatttttctcccgtcagagttcactaccaaatcgtggcaaagccaaagcccgtctgttcttgctctcgatgatttgggacgctgccatacatatgcngtcggatcggaagcggcggcactgggatttcgtcgtccctgtaaaaaaaaagaaccatttt

SEQ ID NO: 29901 - DNA, 801 bp, Zea mays
  Clone ID: MRT4577_127283C.1
gccggccgggccgggttgatgcacaatctgcatttacctatgtcacatcgcctaatgttgcttcatggacatctcttataaatggtcttgcacagaatggtcactggttggaggcactgtcacaatttgggaggatgctgaagcatcatgtcaaacccaatgaaatcacttttctgggtcttcttatggctagtgctcgtgctggtttggttaataaggggatgaaaatcttttactccatggaaaactttggactagttcctacagtgcagcactgtacttgtgttgtcgatctccttggtcgaactgggcgtaccagagaagcagagaagttcatctatgaaatgcctttgccagcagatggtgttatctggggagccctacttactgcctgctggtattcgatggacctagagatgggtgagaaagttgcccagaggctgtttttcatgggcacaaaacataggtctgcttatgtcgccatgtctaacatctatgctaaattggggaaatgggaagatgttgtcaaggtaaggacatggctgaggagtctaaatgctgaaaaggaaccaggttgcagttggattgagatcaagggtatagttcatgtattccttgtggacgaccagaatcatccggagagagagactatgtattcaatgctagaagctttagtatctcatatatcattacattcaaaacctgatgatatggttattcagagcctgaattcttgatttactctttattgaaagaatgacttcaatgattatggataaaaaaaaaaaaaaaaggccccta

SEQ ID NO: 29902 - DNA, 465 bp, Zea mays
  Clone ID: MRT4577_127284C.1
actagttttagatcgaaagcgcggctctttatgtttgtttttggcggacaaaaaccttgatcattcttgcttgttgctggtttgatagagctagcaacgcagggaaagaacaggggtgccaacacctaatggaaacggagcaacggacactcacatgggggacactaagccagacgggtaacaacaatcctattcaatagcaggagaagactagagggaagccaggttgggcccacacataagtccctccagccgccgacggcggcggctttacaggaaccaacatcctcgagccgagcgtgcgagccgacacctcttctataggcgacgtcacctcacttgagtggaccgccgtatacaacaccgtcactgtaacaaccctgacggtgcccaacttaatagccttggacgacatgaccgtttccgcagctaccgtcataaccaacagggccgcagcactgggcc

SEQ ID NO: 29903 - DNA, 694 bp, Zea mays
  Clone ID: MRT4577_127285C.1
ctcttcttctccagctgcgtcgtcgcccacacgatccaccagcaccacctccacctccctcttctcgccgtctcccaccgatcccgaccccaggttgctcttcgttgggttcagcatgggtctggtgaaggagggcgccgacatggaggagggaaccctggagatcggcatagagtacaggacagtttctggtgtggcaggacctctggttatcttggacaaagtaaagggcccaaaataccaggagattgtaaacatccgattgggagatggcaccacccggcgtggtcaagttctggaagttgatggtgaaaaggctgttgtgcaggtctttgaaggtacttcaggaatagacaacaaatacacaactgttcagttcacaggcgaggtcctgaaaactcctgtctcgcttgatatgcttggacgtatttttaacggttctggaaaacctattgataatggccccccgatattgcctgaggcctacttggatatctccgggagttctattaacccaagtgagagaacctacccagaggagatgattcaaacagggatatctacaattgatgtcatgaactccattgctcgagggcaaaagattcctctcttttctgctgctggtcttcctcataatgaaatcgctgctcagatttgtcgtcaggctggtcttgtcaagaggctagagaaagga

SEQ ID NO: 29904 - DNA, 673 bp, Zea mays
  Clone ID: MRT4577_127286C.1
agccggcaggatacaaaatgttaccctctttatcctgaggcaatagagccttgcccttaacaaaattagataacttcttatgaggggcattaattttgacattgcctccctgttggaagccaatgccatccttaatgccagggcgtctccctctatagagcatgcttctagcaaattaaatttttttcatttactaagtcatgctcggcaatcttagcatctagttatgctatatgatcattttgttgtttaattaaagccatgtgatcatgaatagcattaacatcaatatctctacatctagtacaaatagaagtgtgctcaacggtagatgtagagggtttgcaagattttaattttacaaccttagcatgcaatatatcatttttagttttaatatcggaaatagtggcattgcaaacatcaaaatccttagccttagcaagcaatttttcattctcaatcctaaggctagccaagagatatgttcaattcttcaatcttagcaagcaaatcatcattattattcttaagattgggaattgaaatatcacaaacatttgaatcaaccttagctaataaattgacattttcatttctaaggttgtcgattgtctcatggcaagtgcttagctcactagataatttttcacatttttcaacttctagagtc

SEQ ID NO: 29905 - DNA, 141 bp, Zea mays
  Clone ID: MRT4577_127287C.1
cgcagaatatactgttcttagcgcccttgccaccatagcgtataccgcgatgtcacttgaaatgtacccaggggctaggatcccaagatatagtgtagcttttaagtgctatatgtcgcatttcatgacgtgagttgaagc

SEQ ID NO: 29906 - DNA, 1227 bp, Zea mays
  Clone ID: MRT4577_127288C.1
atggcaagaaccatgcttgatgaatacaagacaccagaccggttttgggcagaggcaattaacactgcatgctactccatcaaccggttatatcttcaccgaatcctcaagaagacatcatatgaactcctcaccgaggcttcgtgcatcgcgctaaggaacatgtccattggggatgtgtgtcctaaggaatctgaagagcctccacaaacacaagatcaaccatcatcttccatgcaagcatctccaccaactcaaggtgaggacgaggctcaagaagaagaggatgaagatcaagacaatgagccacctcaagaggaggacattgatcaagggggaaatgacaatgaagacaaggaagatgaacaagagattcgagatcaaagaccgcctcacccaagagtccaccaagcaattcaaagagatcaccctatcaactccattcttggtgacattcacaaggggataaccactagatctcgagttgcacatttttgtgaacattactcttatgtgtcttctattgagccatacaggatagaggatgcacaaagagatctggattgggtggtggcaatgcaagaggagctcaacaacttcacgaggaatgaggtatgtcatttagttctatgtcctaaccaaaatgttgtaggtaccaaatgggtatttcgcaacaagcaagatgagcatggtgtgttgacaagaaacaaagcccaacttgtggccaaaggttattcacaagtcgaaggtttggactttgatgaaacttatgcacccatagcaaggcttgagtcaattcgtatattacttgcttatgctacttaccatggctttaagctttatcaaatggacgtgaaaagtgccttcctcaatggccctatcaaggaagaggtctatgttgagcaacctcccggctttgaagatagtgagtatcataaccatgtatataagctctctaaggcgctttatgggctcaagcaagccccaagagcatggtatgaatgcctaagagacttccttatcaccaatggcttcaaggtcggaaaggccgatcctactctcttcactaaaactgttgcaaaagacttgtttatatgccaaatttatgttgatgatattatatttggatccactaacaagtcaacttgtgaagagtttagtaggatcatgatacagaaattcaagatgtctattgaagcgtcccgatcctttggtactcaaatgtga

SEQ ID NO: 29907 - DNA, 1944 bp, Zea mays
  Clone ID: MRT4577_127289C.1
ccggcccgaggctagctcccccacccaaaagccccacctcctccccgtgtcaaaacctccaagtcgatcgcccaggtggccggcgaggcggcaaccgccgccgtagagacgatggaggacgcgttgggctccgcggtgggtccccacttcagcggcctccgtctcgactcgcgccgcctctccctctccccttcctcctccccctcccgctccgccagcggcaacggcacgctcgtcgccgcgccggggctcgcgttccccaaggcggaggacgggaccaggaagcccttcgtcataggcgtgtgtggaggcaccgcgtcgggcaagacgacggtgtgcgacgcgatcattcagcagctccacgaccaccgcgtcgcgctcgtcaaccaggattcattctaccatggtttaactgaggaacagtctgagcatgtgcaagactataattttgatcatcctgatgcattcgatacagatcgacttttggagtgcatgggaaagctaacaagtggacagtccgtgaatattcctatatacgattttaagaatcacaggcgatgctctgaaaaatttaggaaggtcaatgaatcagatgtcatcattttggaggggatcttggtttttcatgatcagagggttcgtgatttgatggacatgaaaatttttgttgacgcagacgctgatactagacttgctagacgtgtgaggcgtgatactgttgaaagaggtagagatgttacctcagtgcttgagcagtatgtgagatttgtcaagcctgcatttgatgcttttgtcctgccttcgaagaaatatgctgatgtgatcataccaagagggggagataaccttgttgcaattgatctaattgtgcaacatatcaacacaaaacttggccagcataacttgtgcaaagcctacccaaatgtctttgtagttcacacaactttccagataagaggaatgcatactctaattcgtgacaagaacattactacacctgactttgttttctactcagataggctgattcgtctggtggttgagcatggtcttgggcatttgccatttacagagaagcaggtggttacaccaacaggatctctttacatgggagttgacttctgcaagaagctctgtggagtgtctattattcgaagtggagaaagcatggaaaatgcactgcgtgcttgttgtaaggggataaaaataggcaaaattctatttcatcgcattggagacaatggacaacaactcatataccataagctgcccgtggatattgctgaacgccatgttttgcttttggaccctgtgcttggtacaggtaattcagctaatcaagccattgagcttcttatgagcaaaggagttcctgaggaccgtatcatttttctgactctcgtctcggcccctgaaggcatccattgtgtgtgcaagcgcttccctcatttgaagattgtaacctcagagattgatagtggattgaacgatgaatatcgtgtcataccaggacttggagagtatggtgatcgatacttcggcacagactaaccgatgactgatgctgttgtagttagcagtgtgaaaaggtactcaaattagagctgacattaccgtggcagatatactggtgtttggttgctttatggtatactggaagacaaacgtggataggtttctggtaggtgctgaaaccgtgaccgtgtggtcttgtccattatcatatgttttgataccacaaaccgttggttgtgaggcaaatttgttttttttttgcattttgaggctcctagctgaagtgcctgctcctcgtcacacaatactgttatacagccttgtgaaatgtatgactgaaccctgttcccggcatctaacagttgccgtggggtcacagctgtggttggaatgaaattcaaaggttgtgacaagacttaaaaaaaaaaa

SEQ ID NO: 29908 - DNA, 285 bp, Zea mays
  Clone ID: MRT4577_12728C.1
agccggggtgacctagacctgggcacttcctcacataaacacctcagtggcagccggggtgaccgtacgcggggcgttttcgcactccgctttcaacttgggcggcacctcgccagtcgtacggctcccgcccgcgaaccagccatactcgacgtaaggatgttgagacgggggacgtcgcggtactggcaggaatgtaggattcaggaagagtagaaggttactagggagaagacgatatgggagggtactacgactaaaggtagtaggcggccctacctcatg

SEQ ID NO: 29909 - DNA, 5046 bp, Zea mays
  Clone ID: MRT4577_127290C.1
atgtcgagagaactcgccaagaaggagatgaagaccgacgacaagcccgctacaagccacgggaaggcttcatcggaagagtcccgcaacaaaaagaaagggaaggagaagaaagcctcctcccacaagtcgcatcggagtggcgacaagaaaaagaagatgaggaaggtggtctactacgagaccgacacttcatcgccatctacctccggctccgacgcgccctccataacttctaagcgtcatgagcgcaagaagtttagtaagatccccttacactatcctcgtacttctagacatactcaattactttccgttccattaggcaaactgccaacctttgatggtgaagattatgctaggtggagtgatttaatgaaatttcatctaacctcactccacaaaagtatatggaatgttgttgagtttggagcacaggtaccatccgtaggggatgaggattatgatgaggacgaagtagcccaaatcgagcacttcaactcccaagccacaaccatacttctcgcttctctaagtagagaggagtacaacaaggtgcaaggattaaagagcgccaaggaagtttgggacgtgctcaaaaccgcgcacgagggtgatgaactcaccaagatcaccaagcgggaaatgatcgagggggagctcggtcgcttccgtcttctccaaggggaggagccacaagacatgtacaaccggctcaaaaccttggtgaatcaagtgcgcaaccttgggagcaaaaagtgggatgaccacgagatggttaaggttattttaagatcacttattttccttaaccctactcaagtacaattgattcgtggcaatccaagatatacactaatgactcccgaggaagtaatcgtgaattttgtgagctttgaatttatgatcaagggctcacggaagatcaacgagcttgatggtccctccacgtccgaagctcaaccggtcgcatttaaggcgacggaggagaaaaaggaggagtctacaccaagtagacaaccaatcgacgcctccaagctcgacaatgaggaaatggcgctcgtcatcaagagctcccgccaaatcctcaaacaaaggagggggaaggactacaaacctcgctccaagaaagtgtgttacaaatgtggtaagcccggtcactttattgcaaaatgtcctatttctagtgacagaggcgatgacaagaaggggagaagaaaggagaagaggtactacaagaagaagggcggcggtgcccatgtttgtcgggagtgggactccgacgaaagctctagcgactcctccgacgacgaggatgccgccaacatcgccgtcaccaagggccttctcttccccaacgttggccacaagtgcctcatggcaaaggatgacaaaaagaagaaggttaaatctaaatcctccactagatatgaatcctctagcgatgattatgctagtgatgaggaagataatttgcgtactctttttgccaacttaaacatgcaacaaaaagagaagttaaatgaattgattagtgccatacatgagaaggatgacctcttggacacccaagaggacttcctaatcaaggaaaacaaaaaacatgttaaggttaaaaatgcttatgctctagaagttgaaaaatgtgaaaaattatctagtgagctaagcacttgccatgagaccattgacaaccttagaaatgagaatgctaatttgttagctaaggttgagtcaaatgtttgtaatgtttcaattccaaatgataatattgagttgctttctaaaatagaagaattgaacatttctcttgctagccttaggattgaaaataagaaattaattgctagggctaaagattttgatgtttgcaatgttacaatttccgatcttagagataaaaatgatatattgtgtgctaagattgttgaacttaattcttgcaaaccctctacatctaccgttgaacatacttctatttgtactagatgtagagatgttgatattgatgctattcatgatcatatggtattaattaaacaacaaaatgatcatatagcaaagttagatgcaaaaattgccgagcatgaaattgaaaatgaaaaatttaaatttgctcgtagtatgctttatagtgggagacgccctggcattaagaatggcattggcttccaacagggaggcaatgtcaaacttaatgcccctcctaagaaattgtccaactttgttaagggcaaggctcccatgcctcaggataacgagggttacattttgtaccctgccggttatcctgagagcaaaattaggagaattcattctaggaagtctcactctggccctaaccatgcttttatgtataagggtgagacatctagctctaggcaaccgacccgtgctaagttgcctaaaaggaaaactcctagtgcatcaaatgatcatgacatctcatttaaaacttttgatgcatcttatgttttaactaacaaatctggcaaggtttatgcatccgggggctcaagttgggtaatcgacagcgggtgcacaaaccacatgacaggggagaagaagatgttctcctcctacgagaaaaaccaagattcccaaagagctatcacattcggggatggaaatcaaggtgtcactgtctttagaagaagtgatgattcaatagcatttaagggagtgttagagggtcagctatacttagtgaattttgatagagttgaacttgacacttgcttaattgctaagactaacatgagctggctctggcatcgccgactagcacatgttgggatgaagaatcttcataagcttttaaagggagagcacattttaggattaacaaatgttcattttgagaaagacaggatttgtagcgcatgccaagcaggaaagcaagttggtgctcaccatccacacaagaacatcatgacgaccgacaggccactggagctcctacacatggatctattcagcccaattgcttacataagcatcagcgggagtaagtgctatctagttattgtggatgattattctcgcttcacttgggtgttctttttgcaggaaaaatctcatacccaagagaccttaaagggattcttgagacgggctcaaaatgagttcggcttgaggatcaagaaaattagaagcgacaacgggacggagttcaagaactctcaaattgaaggcttccttgaggaggagggcatcaagcatgagttctcttctccctacacccctcaacaaaatggtgcagtggagaggaagaatagaactctattggacatggcaagaaccatgcttgatgagtacaagacttcggatcggttttgggccgaggcggtcaacaccgcctgctacgccatcaaccggttgtatctacaccgaatcctcaagaagacatcatatgaactctttaccggtaaaaagcccaatatttcatattttagagtctttggtagcaaatgctttattcttcttaaaagaggtagaaaatctaaatttgctcctaagactgtagaaggctttttactaggatatgattcaaacacaagggcatatagagtctttaacaagtcctctggacaagttgaagtttcttgtgacgttgtgtttgatgagactaacggctctcaagtagagcaagttgatcttgatgagaaaggaacatgtccgttggggatggtgtgtcctaaggaatccgaagagcctccaaatgcacaagatcaaccatcctcctccacgcaagcatctccaccaactcaaaatgaggatgaggctcaagttgatgaaggagaagatcaagcaaatgagccacctcaagatgacgacaatgatcaagggggagatgcaaattatctagacaaggaggatgaagaagcaaggccgccacacccaagagtccaccaagcaatccaacgagatcaccccgtcgacaccatcctcggcgacattcataagggggtaaccactagatctcgagttgcacatttttgtgagcattactcttttgtttcctctattgagccacacaggatagaggaagcactacaagatttggattgggtggtggcgatgcaagaggagctcaacaacttcactaggaatgaggtatggcatttggttccacgtcctaaccaaaatgttgtaggaaccaaatgggtgttccgcaacaagcaagatgagcatggtgtggtgacaaggaacaaagctcgacttgtggccaaaggatactctcaagtcgaaggtttggatttcggtgaaacctatgcacccgtagctaggcttgagtcaattcgtatattattggcctatgctacttaccatggcttcaagctttaccaaatggacgtgaagagtgccttcctcaatggaccaatcaaggaagaggtctatgttgagcaacctcccggctttgaagatagtgagtaccctaaccatgtctataaactctctaaggcgctttatgggctcaagcaagccccaagagcttggtatgaatgccttagagatttccttatcactaatggattcaaagtcggaaaagcagatcctacactcttcactaaaactcttgaaaatgacttgtttgtatgccaaatttatgttgatgatattatatttgggtctactaacgagtctacatgtgaagaatttagtaggatcatgacacaaaaattcgagatgtctatgatgggggagttgaagtacttcttaggatttcaagtgaagcaactccaagaaggcaccttcctaagccaaacgaagtatacccaagatattctaagcaagtttgggataaaggatgccaaacccatcaagacacccatgggaaccaatgggcatctcgacctcgacgaaggaggtaaacccgtcgatcaaaagaaagagcacatcggggacttgccagttcttaggaagatccttggtgtcttgggcttcaaagaagcaaaattccgtagctctttcaaccgccgaagccgagtatattgccgcaggatattgttgcgcgcaattgctttggatgaggcaaacccttag

SEQ ID NO: 29910 - DNA, 755 bp, Zea mays
  unsure (1)..(755): unsure at all n locations
  Clone ID: MRT4577_127291C.1
gcccttcctcgagttttttttttttttttttttttttttttttacaaccaacggtttggggtatcgaatcatatgataatggacaagacaccagtatatctgccacggtttcggcacctaccaaaaacctatccacgtttgccttccagtataccataaagcaaccaaacaccagtatatctgccacggtaatgtcagctttaatttgagtaccttttcacactgctaactacaacagcatcagtcatcggttagtctgtgccgaagtatcgatcaccatactctccaagtcctggtatgacacgatattcatcgttcaatccactatcaatctctgaggttacaatcttcaaatgagggaagcgcttgcacacacaatggatgccttcaggggcctgtttgttaaagagacaaactaactaaccaaaaggaacacaaagatggaggaatagccatctataactcagcaaagggaattttaccgagacgagagtcagaaaaatgatacggtcctcaggaactcctttgctcataaaaagctcaatggcttgattagctgaattacctggagaaacaagatggaaacttccgtcgatagctaactggcattgctttgcaattgcaacaaacatgcgaaaagagctaactataaaaaaaatgggattatgaattgcaatgctaacctgtaccaagcacagggtccaaaagcaaaacatggncgttcagcaatatccacgggcagcttatggtatatg

SEQ ID NO: 29911 - DNA, 420 bp, Zea mays
  Clone ID: MRT4577_127292C.1
agagcgctaattgaagtcatcatcatctgaactggactcatttggatgttggcatgccgcaaacaacgcactttagccaggcctttattttggcgcctgcccatgtaatattttgggcggcctctggttgctgggccggccaaattggcgcgcgcaaatccgctgcactgatcctacgggactggctgggtaggcccaattttgggggagcccccaaaaaaaaattggactccagccaagtacattacgggagcgctcaaattgggggggggcatgagccaaactccggtttggcttgggcgggctttttaaccaaaaaggcccgaaatgtcatttcgtcccccctctgagggtaagacgtaagagtgatcaataccactggctattcactcacgggtcaccaaaagctctacctactgg

SEQ ID NO: 29912 - DNA, 305 bp, Zea mays
  Clone ID: MRT4577_127293C.1
tatcattaaaatatctatatacctcaaaataaattccattcttttaataaaatttcccattccatcccttatctttacaatcatatatccttactatcttttcactcaatctccaaaccttactacctatactatataaaaaaaatatcttatatttaattaactctatttctatcttatttcattcatcaaatatacaaactttcatctttcaatctattttccaacatctccaatcaaattctttccattcttttcatcattccaccaaaaccttatatattaatcctatcaatcaatacatt

SEQ ID NO: 29913 - DNA, 233 bp, Zea mays
  Clone ID: MRT4577_127294C.1
gggccccccggagtttcatttcaaaaaaaaaattcctcccggcccccaaaaacaaaagtcccaaccccccaaaaaaaattacaatttttttttagggggctcaaatgaccctcacaggggaattgggttgccccttaaaattccaaaattttggcctcactgggagggatttggcttggcaattcctgggacatttccttggaaaaaccggggaaaaaaaacattggttaaaa

SEQ ID NO: 29914 - DNA, 164 bp, Zea mays
  unsure (1)..(164): unsure at all n locations
  Clone ID: MRT4577_127295C.1
tttctncttgggnatccggctggtcaaacgttactntgacaagctgtttacggcgtcttgccttgctgatctgacccagtatnacatcgagcagcttggactgcgctggcgaacagaccggcggtgtctctggcacgggcattctctgtggtatcggcttgtgt

SEQ ID NO: 29915 - DNA, 720 bp, Zea mays
  Clone ID: MRT4577_127296C.1
ggccgcggtttttttttttttttttttacataaaaaagtctagattgaaaatcgtaaacgctctatgggtataatctctcaagcctgtactttgtcttcgcctctctgctcatacaaacatcttctgacgcccctccatacttcctccacgatcttccgtcgcggtaataagcccgggaacacaactaccacatcatcctcgccctcgacaatgacaatgaggtagtacctgacctcgaacccaagaaacgcttcgttgagaaggatatcctggattttttcggtgggtatgaacctcgtagccgtgccagccagatagcttccaggactctcactcgtctgcacgcccaatcctctcatgaccaggatactctcgctcacatagccccttcgactagacagccatagcacagctatactggctgggacaagtacagaaagcggtatgtcctgcgcgacggaggcaattgaggttggtgcgcggaggtatgagggtggtataatcttcagaagagacggcgcggcataggcgagtagtggatggagggtcaggcgtgcgtgaaggagaagaggggtgaagatggagaggacggcgcgggagatgagaacaacggtgtgtaatgctggcgggagcggccgaagggtcgttacagtgaattcggcggttgttggagagggatggcggatgtgaagacggggcgatatcgagagcatcgttgc

SEQ ID NO: 29916 - DNA, 1728 bp, Zea mays
  Clone ID: MRT4577_127297C.1
cattgggtacctcgaggccggccgggaagtccacactccacagtgagcagcaggaattcagcgcacgccctctcggctctcgcattccaagggtcctcgccacgctagctatcagttcaacgcacgcctcccacattccggccggcacatttcctgttgtctccgatgggtgacgccgctactgccgccgccgccactctcggcctgacctggcccaacgccgccgtcgaactgcctcaggtgcgccgcctgttttgtttctactccaactacatacgatgccttgattcaccaggatcggcctgtcaattcctatatatatgcatctagtggtttggttcggattcccgtacgtggaaagcggaatcgattcgatcatccgcctagctagcacaagccatccgcgacagtgttagtgctaccgtcgaccgcacgccgctcaacccgcgcgcgcgctgttgtctgttgtctcagatcagctttgcagctaaggacagcgaattctcggactgggacggcgacatactcgcggtcgccgtgacggacaaggacgtgcaggtgcagccccacgtctcgggctccgagttcgagaacgccgtcctgaggaggctcgacgtccagctcggcggcctcctgcgggccgcggcggcagaggaggagttcgccggcaggcccgggcagtcggtggttctccgcgtgcgggggcagcggttcaagcgggtggctctcgtcggtttcgccgcccgcgaccgcgaccgcgacgccgggtgcctgcatggcctaggcgaatccgtcgcgtcagttgccagggctgctcgggccaccagcgccgccatccttgtcgccgaccccgctgtggtccgaccggagtccaggctgaatgctgccgcggcaattgcttctggaactgtgcttggactgtacgaggacaacagatacaagtccgagtgggaaaaggtgcatctgaaacaggtagacctgattgggctgggatctgggccggagctggaccagaaacttcgccatgctaaccgtctttcgtcaggggtcatgcttgcgagagatcttgtgaactctcctgccaatgtccttacccctggtgctctcgcggaggcggcggcgaagatcgcttcgacgtacagcgacgtgttcacagccacgatactagatgcggcgaaatgcagggaactgaagatgggctcgtacctggcagtcgcagcggcctctgagacaaacccgccttactttatccacctgtgttacaaaccccgcggtggtgacgtcaggaggaagctggctcttgttgggaaaggcataacatttgacagcggcggctacaacatcaaggccgtaccggtcgccaccatcgagctcatgaaaaaggacatgggaggcgcggcggcggtgtttggtgcagcagaggttttgggacagatcaagccgcctggagtcgaggtccacttcatatctgccgcgtctgaaaatatgatcagtggctcaggcatgagacccggcgacatcgtgactgcttccaatggaaagaccatcgaggtagataacacggatgcggaggggaggcttacactggctgacgctttggtctatgcttgtaaccaaggtgttgacaagattattgatctggcgacgttaacgggtgctattcgtgtcgcgcttgggcccagcatcgctgggattctaacgccaagcgacgagctagcggaggaattc

SEQ ID NO: 29917 - DNA, 1256 bp, Zea mays
  Clone ID: MRT4577_127298C.1
ttcacgcgtccgtttattcaactcacatgtgctacttgtgacagtcttaaccataggatgttactgtcccaggtaaaccttgtatcataattaaattatttttactctttatgtatagctagatacatgtgtggtctaatgattgttccattagggggtaataataattttaggatcaaaccatcacatatataactatttttagcaccttaattctccaccaaagactagaatttgctcctagatccttacaacctcaagttttggattaggtcattgtgtaggtttctttgtctttccttggcttagtgaattcaaaacattaagtttatgactatgttgggcaagaataacttcaatgttttgtgagtccggatcttcaaaatgtatacactagcaaattacccgaaccttattcaacgcaaaatcatataacaaactttatttcatgcaatttagaagctaaataaatttccatatattattctagtttcatcatcaatattccttacatgtataagtaatcctcccttaagccatatttacaactaaggacaatgagtaaatttaaaattaagaatgctattaaaacaatttatttaattttcattttctctatggtacatgcaaatggaataccaaatgtttcttaagaaaagtatagatactatctttctaggcacttgtagcaatcatagactctactttgttttatgaccattaatttataataagttaaatttgtgattgtacatataatcacacattccataaaatttatttatttttacatgccaacatgttgaactaatgacaccatgtgcaggatactatgaagaatgaagcaagaataaattggattgagaaggaaatcgagttgaatatgcaagagcttgctcaatctctccttttgagatgtgatgagaaaactagcaataagaagaccaagaaaaccttatgggatgtcctaagaagtttatactatgctactcattccccacaacatatgatcgatagacatgtttccagagttatctttgagcctgtttaaaaatgtttaagtggtagaccattatgttaggtgtaaatgtgtacataaaagttatcataaggagtaatggtagcagaagcatgcagttgtaagtttatttgttgcttagaatagaaattagtgtagctataatatcaagaatgttcctatataagtaatcatattatggatagaggtgttcatatgaataataattttatatgtt

SEQ ID NO: 29918 - DNA, 182 bp, Zea mays
  Clone ID: MRT4577_127299C.1
actattccttatctctgcacaccaccccatcaccttcatatcataacccatccaatcctaccacctgatcctcaccaccatatttccaccatatcctccatgaatatcatacagtcaccaataattacttatcctttacgctcacacacttccctactaccacatacactctaaacaccaaa

SEQ ID NO: 29919 - DNA, 369 bp, Zea mays
  Clone ID: MRT4577_12729C.1
gcaaatactttgttcagcttctcatttgtgccttccataatgtaccgtatccagtgtctgcttctttctgcaaagttgaaaatccagttgggcccaagaatgcaacagttcaacataacagctatgaagattctggaagcacttacaacaaaggaatgccaggagaaattttcaatggaatcattagaaacacttggagattctttcattaagtatgttacaggccaaaatctttttaacaaatacaaacatcgagaggacatgctaacctctatgagagaagaaaaggtctccaacccagctctatgccagctagcttgcaaaagcgaaattgtgggatacattcgaggtgaactatttaacccccaa

SEQ ID NO: 29920 - DNA, 979 bp, Zea mays
  Clone ID: MRT4577_1272C.1
cctcgaggccggacgggctcgccggaacaagcctgcctcaagctctctcgatctatatatgcgtcctcatccaacaccttccatggaggacccgtcgtcaccagcagggggtgtcccggccctctctagtttctaccccggcccccaacattggcctgatgctgctgccatgtagcccagcgctcccccctcggcttcaccggcggcggcggcaacgacggtgaaaactacatcgggtgctagctccgacggtggtgcgtgccctgttgacgatagggcacgcggggcgcgggcagcttgtaagcgttcgatcggccatgtagggcaactatacatctttggcaggtctccaactctccatcatcctccgtgggagagaagatggtaatggagtgcgtgtgtatgtatgtgtatgcccagggcgcgcgcgcgcggctctgggcgagtcacagtagagatgcaatatcatgtatccagtatctttcttacaacacaaacagtgagaaattattagtaaagtgtgcattgtggtgcggccactgttccatgtccgtagcgacaggtcacggcccgttgcctttcggagcttcccggtcccggcatgcgctccaaccgtaagggcaaggcgtcaggagcgacaggtgcaaggcggcggatcggaagaactcggcagtcggcactgggtgcggccgtggagggaaggggatggtcgccgattttatgccaatttactcgcgccccacgccgcgagtctttgatcgatgtgtttgtacagtcgaaagagcattgctttacataggaccatcaatatatatatatggatacatacgcataagagtagctgaattatctgtgtacagaaaattgtttgtagtagtagaataattcggtctgcaaatgtagcaccaatagttcattgggcgtcctcgtgcgagggcgaatcacattggggtgtttggtttaaagaattactacatct

SEQ ID NO: 29921 - DNA, 483 bp, Zea mays
  Clone ID: MRT4577_127300C.1
tttttgggtgagacgagaatacaatccgatggcctggcttatgtaacaaatacaacaccccacgattacactacactactcccatcccaaaatggaaagcggagacctgacccagaccagtgactggattcaattcatctattttttacatgaggggcttttgtctaatcatctgattattattttatattgtaaggacagtaccccccctcctgtgctttccgttccggaaagaaccgagacctgatgctttgctcacctcacactgcactgtctcgtgtttgtgcttgccttactcctgcactaggtagggtctgccgtgccgggccgcgccgggccagttgacttgcaccaggtgcgctacatcaactacaccttggctgggctctcactccttttcttgccaggccacgaccttgactttgtcatctcccatgaccttactctgctacgcgtcgcttgtgtggggcacgtcacatcacc

SEQ ID NO: 29922 - DNA, 401 bp, Zea mays
  Clone ID: MRT4577_127301C.1
gcctcgcaggtaccggtccggaattaattcccgggtcgacgagctcactagtcggcggccgccctttttttttttttttgagttttcctcgttaagattttaatgtagatgtaaatgaattatttttaaaaaattaaagtttccattttttagaataaagatttagtgcacaaatacagccggaagccaacagaaaaataatttggccctgtcatttccctaaggaagcattgcagctacctagaagaggtgggaagaaaaaggacggatgctttctaggcgtccacagaggatctgttaagtatgtacaggggtctgatgtgcagcagtgcagtaaatatgtacacatacattcctatctgggttattaggccattctaaagagttcaatgggtcgagct

SEQ ID NO: 29923 - DNA, 405 bp, Zea mays
  Clone ID: MRT4577_127302C.1
ttcattcgtacgccaacccggtctacaaggagagcgctttcttcctgaaagacggtggtaacaaaacccttcgcttaaaaggcattacgacacgaaggcgcactctaagacggcatccaccgaccggatacttattcagctagtttattcctgctacgaccaactatagtgtagctttatacattacaaatgacttcacattgcaaggaatctgaatagccatttcatccatttattttcctaatataacctagggcgcgggtgaagacatgggcggtgtctggcgatttggaccaggactcctctttccggcagcggcggccctggccccaagatcgaggaggtggactaaacggtttgttgtcagttttgaatgtgcttgaagtgctggctggcccagttgct

SEQ ID NO: 29924 - DNA, 286 bp, Zea mays
  Clone ID: MRT4577_127303C.1
gggctccacccgtcgccgcttccttccgttagactagtttaggctaggctagggatgtcgaccagctcgcggtaatggtggccttcaggctccatcagtaccaagtggaggggcgcgcgctgccgactcccggcgactagcaccccaagatctacacgatgaagctctgggccaccaacgaatcccgcgccaagagcaagctgtggtgcttcctgaggaagtagaagaaggttaagaacagcaacggtcaggacctgcacatcatcgagatcttcgagcgtaaccc

SEQ ID NO: 29925 - DNA, 151 bp, Zea mays
  Clone ID: MRT4577_127304C.1
tactactaacaataataagacgaagatactaataataagtgagaatgtagatattataactataactataatttcagaagtatgtaattttgtttaacgaaatacaccaaatagaaatctagtaatagttgcatgtcaactaattcaagta

SEQ ID NO: 29926 - DNA, 196 bp, Zea mays
  unsure (1)..(196): unsure at all n locations
  Clone ID: MRT4577_127305C.1
aaaacataggatacatnagttgtcttttaggggttggccgtccgcctaccgtgtaggctagtacattataggagatacaaacgtaatctggaagataaaaccacacatggctgccggtagctaaaaaaagagcgctcctgggtaccccgctctgagtccacgggccctgaagcaaaattgcaagcaagtggatgca

SEQ ID NO: 29927 - DNA, 2798 bp, Zea mays
  unsure (1)..(2798): unsure at all n locations
  Clone ID: MRT4577_127306C.1
cgggggaccacgtcccaatggaatgttccttagcgcgatgtcacggagcctcttcatcacctatctcatcaagatcaacttgctctacttgagagccgttagtctcatcaaacacaacgtcacaagaaacttcaacttgtccggaggacttgttaaagactctatatgcccttgtgtttgaatcatatcctagtaaaaagccttctacagtcttaggagcaaatttagattttctacctcttttaacaagtataaagcatttgctaccaaagactctaaaatatgaaatattgggctttttaccggttaggagttcgtatgatgtcttcttgaggattcggtgtagatataaccggttgattgcttagcaggcggtgttgactgcctcggcccaaaaccgatccgaagtcttgtactcatcaagcatggttctagccatgtcaaatagagttcaattcttcctttccactacaccattttgttgtggcgtgtagggagaggagaactcatgcttgatgccctcctcctcaagaaagccttcaatttgagagttcttgaactccgtcccgttgtcgcttctaattntcttgctccttaagccgaactcattntgagcccgtctcaagaatccctttaaggtctcttgggtatgagatttttcctgcaaaaagaatacccaagtgaagcgagaataatcatccacaataactagacagtacttactcccgctgatgcttatgtaagctatcgggccgaataaatccatgtggagtagctcgagcggtatgtcagtcgtcataatattcttgtgtggtgggcaccaacttgctttcctgcttggcatgtgctacaaaccctgtctttctcaaaatgaacatttgttagtcccaaaatgtgttctcccttcagaagcttggaagattcttcatcccaacatgggctagtcggcgatgccagagccaacccatattagtcttagcaattaagcaagtatcgagttcagctctattaaaatcaactaagtatagctgaccctctaatactcccttaaatgctattgaatcatcacttcttctaaatacagtaacacctaaatcttgatttccatccccgaatgtgataactctttggggatcatcatttttctcgtaggaggagaacatccttttctcccatgtcatatggtttgtgcatctgctatcaataatccaacttgagctccaggatgcataaaccttaggtacccaaacacgagtcttggagcccttgtgtttgcccccaacatatttggcaactattttgcctgatttgttagtaagcgcataagaagcatcaaaagtcttaaatgaaacattaggttcatttgatgcagtaggagttatctttttagacattttaacataggtagaatgcctagagctagatgcctcattcttgtacataaaagcatgatgggaaacagaatgagacttcctagcatgacttctcctaatcttatgctcaggataaccagcaggatataaaatgtaaccctcgttatcctgagccttgggagccttacccctcatcactagatgtagtatacttggggtggttctagcttgtaccctctttttcttgccgtcctttgccatgtagcatttgtggccgacgtttgggaagagaagtcccttgttgacgatgatgtttgcggcgtcctcgtcggaggaggagtcccattcccaacacacgtgggcatcgtcgcccttcttcttgtagtatttattcttttccttcttcatccccttcttgtcgttatccctgtcactatcactagacatagggcatttagcgataaaatgtctgggcttaccacacttgtagcacaccctcttagagcgaggtttgtagtccttccccctcctttgcttgaggatttggcggaagctcctaatgatgagcgtcatttcctcattgtcgagcttggaggcgtcaatggggagcctacttgatgtagactcttctttcttatcctccgtcgctttgaatgcgatgggttgcacctcgggtgtggaggtgtcgccttgctccaagttgactatttgtttggagcctttgatcatcaattcaaagctcacaaactttcctataacttcctcgggagacattagcttatatctaggatcacctcgaattaattgaacttgcgtaggattacgaaaaatgagtgatcttagaataatttggttgaccaaggtcttgagccgattgtacattgcttgtggctcctctccttggttgaggacaaatcgaccgagctccccctcgatcgtctcccgcttggtggtcttggtcacctcatccccttcatgcgcagtctttagtacatcccaaatctttttggcactttttagccattgcaccttattatactcctctcgacacaaggaggcgaggagtatagtagttgcttgggagtcaaagtgccagatttgggcgatttcgttcgaatcataatcttcatcccctatgggtggtacctgcgctccaaactcaacaatgtcccatatgctagcgtggagtgaggttaggtgatgcctcaatttatcactccacatacaataatcttcaccataaaaaataggtggtttgcctaatgagatggaaagtaaaggagtgcgtttagaaatgcggggatagcgtaaggggatcttactaaacttcttgcgctcatggcgcttagaagtgacggacggagcgtcggagccgaaggtggagggcgacgaagaatcgatctcgtagtagaccactttcttcat

SEQ ID NO: 29928 - DNA, 3852 bp, Zea mays
  Clone ID: MRT4577_127307C.1
atgtcgggagatcacgccaagagggagatcgtgaccggcgacaagcccgcaagctcggggaggactctcttaagggagtccggcaacaagcacaaggaggaatcctcttcctccatcaagtcccatcggagaggcgacaagaagaagaagatgaagaaagtggtctactacgagaccgactcgtcgtccactacttctaagcgtcataagcgcaagaagtataaggagtataataaggtgcaagggttaaagagtgccaaagaaatttgggacgtccttaaaacgacgcacgaaggggacgaggtgaccaagatcagcaagcgggagacgatcgagggggagctcggtcgtttcgtcctcaacaaaggagaagagccgcaagcgatgtataatcggctcaagacaatggtgaaccaagtgcgcaacctcgggagcaccaaatgggatgactatgagatggtcaaggttattcttagatccctcgtattttgtaatcctaatcaagttcaattaatatgtggggatcctagatataaactaatgtctcccgatgaagtaattggcaagtttctgagctttgagctaatgatcaaagactgcaaacacatcgtcaacttggagcaagacaccacctccacacccgaggtgcaacccgtcgcattcaaagcgacagaaaaagagaagagagagtctacaccaagtaggcttccaatcgacgcctccaagctcgacaacgaggagatggcgctcatcatcaagagcttccgccaaatcctcaagcaaaggagggggaaggaccacaaaccccgtccaagaggtccaatttctagtgatagtgagaggggcgaagacaagaaggagaagaagaaagaaaagaagaggtactacaagaagaagggcggtgatgcccacgtgtgtcgggaatgggactccgacgagagctccaccgactcctcctccgatgaggacgccgccaacatcgccgtcaacaagggcctcctctttcccaacatcggccataaatatctcatggctaaggacagcaaaaagaaaaaggaagtagaaaaatgtgaaaacctaaccaaagagcttagcatttgtcgtgactctatttcaaaccttagaactgagaatgctagtttaatttttaaggttgaaaagttaaatgtttgtaatgattcaatttccagtcttagaaatgaaaatggtagtctaaatgctaagattgatgaattgaatgtttgtaatgattctatttcctgtcttagaaatgaaaatgtcatattacatgctaagatagaagaattaaatgtttgcaaaccctctacatctactgttgaaaatattactatttgcactagatgtaaagatgttaatattgaagctattaataatcaccttgctctaattaaacaacaaaatggtcatatagctcaattaactgctaaaattaatgagcatgagattgaaaatgaaaagtttaaatttgctagaagcatgctctataatgggagacgccctggcattaaggatggcattggtttccaacagggaggcaatgtcaagcttaatgcccctaaaagattatttaattttgttaagggcaaggctcccatggttcaggataataagggctatattttatatcccgctaattattctgagcacaaaattaggaagattcatgctagcaagcctcacactgtttcacatcatgcttttatgtataagaatgaggcatctagctctaggcatacctcacatgttaaaatgcctagaaagaaaattcctactgtatcaaatgagcataacatttcatttaaaactttttatgcatcctatattttaactaacaaatcaagcaaaatagttgtcaaatatgttgggggcaaacacaagagcccacagacttgtgtttgggtacccaaggtttatgcatctggtggttcaagttggataattgatatcggatacacaaaccacatgacaggagagaaaaggatgtcctcctcctacgagaaaaacaaagatccccaacgagctattacattcggggatggaaatcaaggactggtcaaagatgtaggtgttactgtctttagaagaagtgatgattcaatgacatttcagggagtgttagagggtcaactatatttagttgattttaatgataacaaagctgaacttgacacttgtttaattgctaagactaatatgggttggctctggcatcgccgacttgcccatgttgggatgaagaatcttcacaagcttttaaagggagagcacatttttggactaacaaatgttcattttgagaaagacagggtttgtagcgcatgccaagcaggaaagcaagttggcacttatcatccacacaagaatataatgacaacggacaggccgctcgagctgctccacatggacctattcggcctgatcgcttacataagcatcggcgggagtacactcaaaggattcttgagacgggctcaaaatgagttcggattgagaatcaaaaagataaaaagcgacaacggaacgaagttcaagaactctcaaattgaaggctttcttgaggaagagggcatcaagcatgagttcttttctccctacacacctcaacaaaatggtgtagtggagaggaagaatagaactctattggacatggcaagaaccatgcttgatgagtacaagactccggaccggttttgggcggaagcaatcaacacggcttgctactccatcaaccggctctaccttcaccgaatcctcaagaagacatcatatgaactcctcactggtaaaaagcccaatgtttcatattttagagtctttgggagcaaatgctttattcttattaatagaggtagaaaatctaaatttgcttctaaagctgtagaaggctttttactaggttatgattcaaacacaagggcatatagagtctttaacaagtccactagactagttgtagtttcttgtgacattatgtttgatgagactaatggctcccaagtggagcaagctccgtgcatcgcgctaaggaacatgtccattagagatgtgtatcctaaggaatccgaagaacctccacaaacacaaggtcagtcatcatcttccaaccaagcatctccaccaacccaagatgaggatcaggctcaagatgatgaagatgaagatcaagaggttgagccaccccaagaagagacatatagggtggaggatgcattaagagatccagattgggtgctggcaatgcaagaggaactcaacaacttcacgaggaatggggtatggcatttagttccacgtcctaaccaaaatattgtaggtaccaaatgggtattccgtaacaagcaagacgagcatggtgtggtgacaaggaacaaagcccaacttgtggccaaaggttattcacaagtcgaaggtttggactttgatgaaacttatgcacccatagctaggcttgagtcaattcgcatattacttgcctatgctacttaccatggctttaagctctatcaaatggacgagaaaagtgccttcctcaatggaccaatcaaggaagaggtctatgttgagcaaccccccggctttgaagatagtgagtaccctaactatgtgtataaactcttaaaggcgctttatgggctcaagcaagccccgagagcatggtatgaatgcctgcgatatttccttatcactaatggcttcaaagttggaaaagtcgatcctactctctttactaaaactgttgcaaaagatttgtttgtatgccaaatttatgttgatgatatcatatttgggtctactaacaaatctaaaagtcgcctagaggggggtggatag

SEQ ID NO: 29929 - DNA, 2131 bp, Zea mays
  Clone ID: MRT4577_127308C.1
atgtcgggagatcacgccaagaaggagatggagaccggcgaaaagcccactacaagccacgggagcacttcatcggaagagtcccgcaccaagaggaaggagaagaaagactcctccaaaggaaaagagaagaaatcttcttcacacaaagagaagaaggagaagtcttcctcccacaagcctcgtcggagtggggacaagaaaaagaggatgaggaaagtggtctattacgagaccgattcttcatcggcatccacctccggctccgacgcggcatccgtcacttctaagcgccaagagcgcaagaagtatagtaagattcccctacgctaccctcgcatttctaaacatacacctttactttccgtcccattaggcaaaccaccaacttttgatggtgaagattacgctaggtggagtgatttaatgcgatttcatctaacctcactccacaaaagtatatgggatgttgttgagtttggtgcacaggtaccatccgtaggggatgaagattatgatgaggacgaggttgcccaaatcgagcacttcaactctcaagcaacaacaatactcctcgcttctctaagtagagaggagtataacaaagtacaagggttgaagagcgccaaggaggtttgggatgtgctcaaaaccgcacacgaaggagatgagcttacaaagatcaccaagcgggagacgatcgagggggagctcggtcggttccggcttcgcaaaggggaggagccacaaaatatgtacaaccggctcaagaccttggtgaatcaagtgcgcaacctcgggagcaagaaatgggatgatcacgaaatggttaaggttattttaagatcacttatttttcttaaccctactcaagttcaattaattcgtggcaaccctagatatacactaatgactcccgaggaagtaatcgggaattttgtaagttttgagtgcatgatcgaaggctcgaggaagatcaacgagcttgatgatccctccacgtccgaagctcaacccgtcgcattcaaggtgacggaggaaaagaaggaggagtctacatcaagtagaacacccatcgacgcctccaagctcgacaacgaggaaatggcgcttgtcatcaaaagctttcgccaaatcctcaagcaaaggagggggaaagactataagtcccgctccaagaaggtttgctacaagtgtggtaagcccggtcactttatagctaaatgtccattatcaagtgatagtgacaggggcgacgacaagaagggaagaagaaaggagaagaagaggtactacaagaagaagggcggcgatgcccatgtttgtcgggagtgggactccgacgaaagctctagcgactcctccgacgacgaggacgccgccaacatcgccgtcaccaagggacttctcttccccaacgtcggccacaagtgcttcatggcaaaggacgacaaaaagaagaaggatgatctcttggacacccaagaggacttccttattaaagaaaataagaagcatgttaaggttaaaaatgcttatgctctagaaattgagaaatgtgaaaaattatctagtgagctaagcacttgccatgagacactagacaaccttagaaatgaaaatgctaatttgttagctaaggttgattctcatgtttgtacttcaaatcctagagatgttaatgatgatttgcttgctaggattgaagaattgaacatttctcttgatagccttagaattgagaatgaaaaattgcttgctaaggctaaagattttgatgtttgcaatgttctatttctaaccttagaagtgaaaacgatatactacatgctaagatgtagagatgttgatattaatgctattcatgatcacatgtctttaattaaacaacaaaatgatcatatagcaaaattagatgctaaaattgccaagcataacttagagaatgaaaaatttaaatttgctagaagtatgctctacaatgggagacgccctggcatcaaggatggcattggcttccaaaggggagacaatgtcaaacttagtgtccctcctaaaagattgtctaatttggtaaagggcaaggctctcatgcctcaggataacgagggttacattttgtatcctgccg

SEQ ID NO: 29930 - DNA, 882 bp, Zea mays
  Clone ID: MRT4577_127309C.1
atgaagaaagaggtctactatgagaccgattcttcgttgccctccacctccggctccgatgcaccgaccgtcacttctgagcgccatgagcgcaagaagtattgtaagatccccttacgctatcctcgcatttccaaacgcactcctttactttccgtcccattaggcaaaccaccggtttttgacggtgaagattattgtatgtggagtgataaaatgaggcatcatctaacctcactccacgctagcatttgggacattgttgagtttggagcgcaggtaccatccgtgggggatgaaggctacgactcggacgaggtcgctcaaatccggcacttcaactcccaagccactactatactcctcgcctctctaagtcgagaggagtataataaggtgcaagggttgaagagtgccaaagagatttgggacgtgctaaagaccgcgcacgaaggagatgaggtgaccaagatcaccaagcgggagacgatcgagggagagctcggtcgattcatcctcaaccaaggagaggagccacaagccatgtacaacaggctcaagaccttggtcaaccaagtgcgcaacctcgggagcaccaaatgggatgaccatgaaatggtcaaggttattcttagatcactcatatttcataatcctactcaagttcaattaatacgtggtgatcctagatataagctaatgtctcccgaggaagtgatgggaaagtttgtgagctttgagttgatgattaaaggctccaaacaaatcgttgagcaaggcggcaccttgaagcgtcccgatcctttaggactcaaatgtgatacaattactagtcccaggaggctagtaatcacattccttacaaagcacagtagaagataa

SEQ ID NO: 29931 - DNA, 402 bp, Zea mays
  Clone ID: MRT4577_12730C.1
agcgccaccgaaagggacaacctgattgattatgttcttaacagagcacacaagaactagaacttggtgaattcgttacaggacggtagcacataagttaaacatcacataagacaacgtgaaccaaaaccagcatggatccagggtgcaggggcaccggtcacattgattcttaacatagacaagcactaaagatggtgctgtgaccaaaggccacttggggacgacccacgatagggaggcagaaatatatctttctactgggtcttgaacatgtggcggatcacgttgaccactcggatgctgtacccctactctttgttgaccaagagacgagctgatgaagtggtctactaggtcaatctcaggcttggagtcgaagatgctctgactactgtcacc

SEQ ID NO: 29932 - DNA, 3516 bp, Zea mays
  Clone ID: MRT4577_127310C.1
atgactcccgagaaagtaattgggaattttgtgagctttgaattgatgatcaaaggctcaaagaagatcaacgagcttgacggcccctccatgtccgaagcacaaccgatcgtattcaaggcgacggaagaaaagaaggaggaatctactccaagtcgaacacccatcgacgcctccaagctcgacaacgaggagatggcgctcatcatcaagagcttccgccaaatcctcaagcaaaggaggggaaaagattacaagccccgctccaagaaagtttgctacaaatgtggtaagctcggtcatttcattgctaaatgtccattatctagtgatagtgacaggggcgacgacaagaaggggagaagaaaggagaagaagaggtactacaagaagaagggcggtgatgcccatgtgtgccgcgagtgggactccgacgagagctccaccgactcctccgacgaggacgccgctaatatcgccgtcaccaagggacttctcttccccaacgtcggccacaagtgcctcatggcaaaggacggcaaaaagaaaaaggtaaaatcaagatcctccactaaatatgaaacctctagtgatgaggatgatgctagcaatgaggaggataacttacgcattctttttgccaacctaaacatgcaacaaaaggaaaaattaaatgaattgattagtgctattcatgagaaggatgatctcttggacacccaagaggactttctaattaaggaaaataataagcatgttaaggttaaaaatgcttacgctctagaagtagaaaaatgtgaaaaattatctagtgagctaagcacttgccatgatactattgccaaccttagaaatgaaaatgctcaattaatttctaaggctaaagattttgatggttgcaatgttactatttttaaccttagaagtgaaaatgatatattacatgctaaggtgatagaattaaaatcttgcaaaccctctacatctaccgttgaacatgtttctatttgcactagatgtagagatgttgatattgatgctattcatgatcatatggtcttaattaagcaacaaaatgatcatatagcaaaattagatgctaaaattgccgagcatgaacttgaaaatgaaaaatttaaatttgctcgtagtatgctttatagtgggagacgccctggcataaaggatggcattggcttccaaaagggggacaatgtcaaacttaatgcccctcctaagaaattgtccaactttgttaagggcaagtctcccatgcctcaggataacgagggttacattttataccctaccggttatcccgagagcaagattaggagagttcactctaggaagtctcactctggccctaatcatgcttttatgtataagggtgagacgtctagctctaggcaatcaacccatgctaagttgcctaagaagaaaactcctaatgcatcaaatgaccatagcatttcattcaaaacttttgatgcatcatatgttttaactaacaaatccggcaaggtttatgcatccgggggctcaagttggatcatcgatagcgggtgcacaaaccacatgacaggggagaagaagatgttctcctcctacaagaaaaaccaagatccccaaagagcgatcacattcggggatggaaaccaaggtttggtcaaaggtgtcactgtctttagaagaagtgatgattcaatagcatttaagggagtgttagagggtcagctatacttggtagattttgataaagctgaactcgacacttgcttaattgctaagactaacatgggttggctctggcaccgccgactagctcatgttgggataaagaatcttcataagcttctaaagggagagcacattttaggcttaacaaatgttcattttgagaaagacaggatttgtagcgcatgtcaggccaggaagcaagttggtgttcatcatccacacaagaacatcatgacgactgacaggtcactggagctcctacacatggacctatttggcccgatcgcttacataagcatcggcgggagtaagtactgtctagttattgtggatgattattctcgcttcacttgggtgttctttttgcaggaaaaatctcatacccaagaaaccttaaagggattcttgagatgggctcaaaacgagtttggcttaaggatcaagaaaattagaagcgacaacgggacggagttcaagaactcacaaatcgaaggcttccttgaggaggagggcatcaagcatgagttatcttctccctacaccccacaacaaaatggtgtagtggagaggaagaataaaactctattggacatggcaagaaccatgcttgatgagtacaagacttcggatcggttttgggtcgaggcggtcaacaccgcctgctacgccatcaaccggttgtatctacaccgaatcctcaagaagacatcatatgaactccttaccggtaaaaagcccaatatttcatattttagagtctttggtagcaaatactttattcttgttaaaagaggtagaaaaactaaatttgctcctaagactgtagaaggctttttactaggatatgattcaaacacaagggcatatagagtctttaacaagtcctttggacaagttgaagtttcttgtgacgttgtgtttgatgagactaacggctctcaagtagagcaagttgatcttgatgagataggtgatgaagaggctccgtgcatcgcactaaggaacatgtccattggagatgtgtgtccaaaggaatccggagagcctccaagtgcacaagatcaaccatcctcctccacgcaaccatctccaccaactcaaaatgaggatgaggctcaagttgatgaagaagaagatcaaagagatgagccacctcaagatgatggcaatgatcaagggggagatgcaaatgatcaagacaaggaggatgaagaaccaagaccgccacacccaagagtccaccaagcaatccaacgagatcaccccgtcgacaccatccttggagacatttataagggggtaaccactagatctcgtgttgctcatttttgtgaacattactcttttgtttcctctattgagccacacaaggaatgtcaaaatgttgtaggaaccaagtgggtcttccgcaacaagcaagacgagcatggtgtggtgacaaggaacaaagcccgacttgtggccaagggatactcccaagtcgaaggtttggatttcggtgaaacctatgcaccagtagctaggcttgagtcaattcgtatattattagcctatgctacttaccatggcttcaagctttaccaaatggacatgaagagtgccttcctcaatggaccgatcaaggaagaggtctatgttgagcaacctcccggctttgaagacagtgagtatcctaaccatgtctataggctctctaaggctctttatgggctcaagcaagccccaagagcatggtatgaatgcctaagagatttccttattgctaatggcttctga

SEQ ID NO: 29933 - DNA, 323 bp, Zea mays
  Clone ID: MRT4577_127311C.1
tcgaagaacttgagatagtactacgctttctttactatcagtgagtatcatgtttaaaagagaagttgtttatttgtatctcatcttctgagtcattcgtcgctgcaatcctcaacgacaacctcattccacttgcttcattgtcctgcatcatactttgttacagttctcttgtaataattggcttctgcttcatatgcagctagtaataatattttattctcttgtcatatccttatgaaactttattcttgtaataagtcggctttacctcttcggagtttcttatacataaactcattctatttctcttgagcacttaa

SEQ ID NO: 29934 - DNA, 680 bp, Zea mays
  Clone ID: MRT4577_127312C.1
aggataaccgtcagggtttataatgtaaccctcgttatcctgaggttctggagccttgccctttacaaaatttgacaaggttttattgaggggcattaagtttgacattgcctcccctttggaagccaatgtcatccttgatgccagggcgtctactattatagagcatacttctagcaaatttaaatgtttcattttctaagttatgctcggcaattttagcatctaatttagctatatgatcattttgttgtttaattaaagccatgtgatcatgtatagcatcaatgttaacatctctacatctagtgcaaatcgaagtgtgctcaacggtagatgtagagggtttgcaagattttagttctacaaccttagcatgcaatatttcatttttacttctaaggtcggaaatagtagcatcgcaaacatcaaaatctttagccttagcaagcaatttttcattttcatttctaaggctagcaagagaaatgttcaattcttcaatcctagcaagcaaatcatcattaacatttctaggattggaagttgaaacattacaaacatgagaatcaaccttagctaataatttagcattttcatttctaaggttgtctattgtctcatggcaagtgcttagctcactagataatttttcacatttctcaatttctagtagtcgc

SEQ ID NO: 29935 - DNA, 1596 bp, Zea mays
  Clone ID: MRT4577_127313C.1
atgtcgggagcatccgccaagagggagatcgggaccggcgagaagcccgccacaagcaatgggaaggctccatccggggagtccgccaacaaggtgaagggatcttcttcacacaacaagtcgcgtcagagcggtgacaagaagaaaaagatgaagaaggtggtctactacgacaccgactcttcgtcaccatccacctccggctctaacacaccgtccgtaacttctaagcgccatgagcgcaagaagtttagtaagatccccctacgctaccctcgcatttccatacgtactccattactttccgtcccactaggcaaaccacccatgtttgatggtgaagattataatatgtggagtgataaaatgaggcatcatctaacctcactccacactagcatttgggatgttgttgagattggagtacaggtaccatcaccgggggatgaagactatgattcggacgaggtcgcccaaatccgacacttcaactctcaagccaccactatactcctcgcctctctaagtcgagaggagtataacaaggtgcaaggattaaagagcgccaaggagatttgggacgtgctcaagaccgcgcacgaaggagatggaggctccaaaatgatcatcgagcaaggcgactcctccacgcccgaagcacaactcgttgcattcaaagcaacggaggagaagaaagaagattctactccaagtagaatccccatcgacgcctctaagctcgacaataaggagatggcgctcatcatcaagagcttccgtcaaatcctcaaacaaaggaaggggaaagattacaagccccgttccaggaaggtgtgctacaagtgtggtaagcccggtcatttcattgctaaatgtccattatctactgatagtgacaagggcgacgacaagaaaggaaagaggggagaaaagaagagatactacaagaagaagggtggcgatgcccatgtgtgccgcgagtgggactccgacgagagctccaccgattcctcctctgacgaggacgccgccaacatcgccgtcaccaagggcctcctcttccccaacgtcggccacaagtgcctcatggcaaaggacggcaaaaggaagaaggtaaaatcaaaatcctccactaaatatgaaacctctagtgatgaggataactctggtgttgaggaggataatttgcgcaccctttttgccaacctaaacatgcagcaaaaagaaaaattaaatgaattaattagtgctattcatgagaaggatgaactcttggattctcaagaggacttcctaattaaagaaaacaagaagcatgttaaggttaagaatgcttatgctctagaagtagaaaaatgtgaaaaattatctagtgagctaagcacttgtcatgatgttatttccaaccttagaaatgaaaatgctaaagtaattgttaaggttgattcaaatgtttgtgatgtttcaattcccaatcttatagatgataatgttagtttacttgctaagattgaagaattgaatgtctctcttgctagccttaagattgaaaatgaaaaattaattgctaaggctaaagacttagatgtttgcaat

SEQ ID NO: 29936 - DNA, 737 bp, Zea mays
  Clone ID: MRT4577_127314C.1
gtgacggcctcagtcccgacgagcagcaggttggtgttgacgggctgctctctcggcatctcacactctgccacagtgccactccctgtctagccatggcctcgcggatcctgctccccctgctcgtcctcctcctcctcttcctgggcccgcattgctccacgggggcggcggcgaggcggcagctgcagcaggcgcggcgagcccgggacccgaactcgcaggtcaagttcgacttctccccgttcctcatccagtacaagagcgggcgcgtgaagcggctcatgggcaccgacgtcgtggccgcgtccacggacgcgcgcacgggcgtcacctcccgcgacgtcaccatcgacccgtccacgggcgtcgccgcgcggctctacctcccgagcctccgcgcccgcgcgcccgtgctcgtctacttccacggcggcgcgttcgtggtggagtccgcgttcacgcccgtctaccacgcctacctcaacacgctggccgccagggcgggcgcggtcgcggtgtcggtgaactaccgcctcgcgcccgagcacccgctgccggcggcgtacgacgactcgtgggcggctctcaggtgggtgctcgcgagcgcggcctcggacccgtggctgtcgcggtacggcgacctgtccccgcctgttcctcgccggcgacagcgcgggcggcaacatcgcgcacaacctggcattgcgcgcgggggaggaaggcctggacaacgg

SEQ ID NO: 29937 - DNA, 221 bp, Zea mays
  Clone ID: MRT4577_127315C.1
gcagatctgaggacatctctgtgccaggccagaacccgcccacctgcagttccctctccgggatggacgtcgggcccagctccctgcgccaccttgggctgaagctgctgctgctcctgctgctgctgcccctcaggggccaagccaacacaggctgctacgggatcccagggatgcccggcctgcctggggcaccagggaacgatgggtacgacggactg

SEQ ID NO: 29938 - DNA, 307 bp, Zea mays
  unsure (1)..(307): unsure at all n locations
  Clone ID: MRT4577_127316C.1
aataaaaatggtccgaggttctttattaattacgaccaccacaacacggggggaatttaacaaatggtttttgatcccacaaaacgnccaagacgcaattgacacagttacaccatatcaactcaacactaaggaacagcatcaccaacagcccattcactgttcaaacaaaaaagaaaaagaaagaaaagggtcacaggcatgtgtcccgaaaggtgacagtcaccaacagctatatgacatctgttttttgaacaaattatacagtgttccccagcagctaaccacttccaaaatagagccaaaa

SEQ ID NO: 29939 - DNA, 5766 bp, Zea mays
  Clone ID: MRT4577_127317C.1
atgtcgggagatcacgccaagaaggagatggagaccggcgaaaagcccactacaagccaagggagcacttcatcggaagagtcccgcaccaagagaaaggagaagaagaagatctcctccaacaaagggaaggagaagaaatcttcttctcatcacaaagagaagaaggaaaaatcttcttcccacaagccacatcggagcggtgacaagcacaagaggatgaggaaggtggtctactacgagaccgacacttcatcaccttccacctccggctccgacgcggcatccgtcacttctaagcgccaagagcgcaagaagtatagtaagattcccctacgctaccctcgcatttcaaagcatacacctttactttccgtcccattaggcaaaccaccaacttttgatggtgaagattatgctaggtggagcgatttaatgcgatttcatctaacctcgctccacaaaggtatatgggatgttgttgagtttggtgcgcaggtaccgtcagtaggggatcaagactatgatgaggatgaggtggcccaaatcgagcacttcaactcacaagccacaacaatactcctcgcctcactaagtagagaggaatataacaaagtacaagggttgaagaacgccaaggaggtttgggatgtactcaaaaccgcgcacgagggagacgagctcaccaagatcaccaagcgggaaacgatcgagggggagctcggacggttccggcttcacaaaggggaggagccacaacacatgtacaaccggctcaagactttggtgaaccaagtgcgcaacctcgggagcaagaagtgggacgaccacgaagtggtaaatgttattttaagatctctcatttttcttaatcccactcaagttcaattgattcgtggtaatcctagatatactaaaatgacccccgaggaagttatcgggcattttgtaagttttgagtgcatgatagaaggctcgaggaaaatcaacgagcttggagacccatccgaagcccaacccgttgcattcaaggcaacggaggagaagaaggaggagtctacaccaagtagacaaccaatagacgcctccaagctcgacaatgaggaaatggcgctcgtcatcaagagcttccgccaaatcctaaagcaaaggagggggaaagactacaagtcccgctccaagaaggtttgctacaagtgtggtaagcccggtcattttattgctaaatgtcctatatcaagtgatagtgaccgaggcgacgacaagaaggggagaagaaaggagaagaagaggtactacaagaagaagggcggcgatgcccatgtttgtcgcgagtgggactccgacgaaagctcaagcgactcctccgacgacgaggacgccgccaacatcgccgtcaccaagggactcctcttccccaacgtcggccacaagtgcctcatggcaaaggacggcaaaaagaaggttaaatctaaatcctccactaaatatgaatcctctagtgatgacaatgctagtgatgaggaagataatttgcgttccctttttgccaaccttaacatagctcaaaaggaaaaattgaatgaattggttagtgctattcatgaaaaggatgaccttttggattcccaagaggattgtctaattaaagaaaacaaaaaacatgttaaggttaaaaaggcttatgctcttgaaattgagaaatgtgaaaaattatctagtgagctaagcacttgtcgtgagatgattgacaaccttagaaatgaaaatgctattttaaatgctaaggttgattcacatgtttgtaatgtttcaattcccaatcttagagatgataatgttgacttgcttgctaagattgatgaattaaatgtatctcttgctagccttagattagagaatgaaaatttaattgctaaggctaaagattttgatgtttgcaaagttacaatttccaatcttaaagataaaaatgatattcttcatgctaagattgtggaacttgattcttgcaaaccctctacatctaccattgagcatgtcactatttgtgctagatgtagagatattgatgttaatgctattcatgatcacataatcttgattaagcaacaaaatgatcatatagctaaacttgatgctaaaattgccgagcacaacttagaaaatgagaaatttaaatttgctcgtagcatgctttataatgggagacgccctggcattaaggatggcattggcttccaaaggggagacaatgtcaaaattagtgcccctcctaaaagattgtcaaattttgttaagggcaaggctcccatgcctcaggataacgagggttacattttataccctgccggttatcccgaggacaaaattaggaaaattcattctaggaagtctcactctggccctaatcatgcttttatgtataagggtgagacatctagctctaggcaaccaacccgtgccaagttgcctagaaagaaaactcctaatgcatcaaatgatcatgccatttcatttaaaacttttgatgcttcttatgtgcttactaacaaatccggcaaagtagttgccaagtttgttgggggcaaacacaagggttccaagacttgtgtttgggtacccaaagttcttgtgtctaatgccaaaggacccaaaaccgtttgggtttatgcatccgggggctcaagttggatactcgacagcgggtgcacaaaccacatgaccggggagaaaaggatgttctcctcatatgagaaaaaccaagatccccaacgagctatcacattcggggatggaaatcaaggtgtcactgtctttagaagaagtgatgattcaatagcatttaagggtgtgttagagggtcagctatacttagtagattttgatagagctgagctcgacacatgcttaattgctaagactaacatgggttggctctggcaccgccgactagcccatgttgggatgaagaatcttcataagcttctaaagggagagcacattttaggattaacaaatgttcattttgagaaagacaggatttgtagcgcatgccaagcagggaagcaagttggcactcatcatccacacaaaaacataatgacgactgacaggccactggagctcctacacatggatctattcggcccgatcgcttacataagcatcagcgggagtaagtactgtctagttattgtggatgattattctcgcttcacttgggtattctttttgcaggaaaaatctcaaacccaagagaccttaaagggattcttgagacgggctcaaaatgagttcggcttaaggatcaagaaaataagaagcgacaacgggacggagttcaagaactctcaaattgaaagctttcttgaggaagagggcatcaagcatgagttctcttctccctacactccacaacaaaatggtgtagtggagagaaagaatagaactctattggacatggcaaggaccatgcttgatgagtacaagacttcggatcggttttgggcggaggcagtcaacaccgcttgctacgccatcaaccggttatatctacaccgaatcctcaagaagacatcatatgaactcctaaccagtaaaaagcccaacatttcatattttagagtctttggtagcaaatgctttattcttgttaaaagaggtagaaaatctaaatttgctcctaagactgtagaaggctttttacttggttatgactcaaacacaagggcatatagggtctttaacaagtccactggactagttgaagtctcatgtgacgttgtgtttgatgaaactaacggctctcaagtagagcaagttgatcttgatgagataggtgaagaacaggctccatgcatagcgctaaggaacatgtccattggggatgtgtgtcctaaggaatccgaagagcctccaaaagcacaagatcaaccatcctcctccacgcaagcatctccaccaactcaaaatgaggatgaaactcaagttgatgaagtagaagatcaagcaaatgagccacctcaagatattggcaatgatcaagggggagatgcaaatgaggaagacaaggaggaagaggaacaaaggccgccacacccaagagtccaccaagcaatccaacgagatcaccccgtcgacaccatcctcggcgacattcataagggggtaaccactcgatctcgtgttgcacatttttgtgaacattactcttttgtttcctctattgagccacacagggtagaggaagcacttcaagattcggattgggtggtggcgatgcaagaggagctcaacaacttcactagaaatgaggtatggcatttggttccacgtcctaaccaaaatgttgtaggaaccaaatgggtcttccgcaacaagcaagatgagcatggtgtggtgacaaggaataaagctcgactcgtggtcaaagggtattcacaagtcgaaggtttggatttcggtgaaacctatgcacccgtagctaggcttgagtcaattcgcatattattggcctatgctacttaccatggctttaagctttatcaaatggacgtgaaaagtgccttcctcaacggaccaatcaaggaagaggtctatgttgagcaacctcccggctttgaagacagtaagtatcctaaccatgtttataagctctctaaggcgctttatgggctcaagcaagccccaagagcatggtatgaatgccttagagatttccttattgctaatggcttcaaagtcggtaaagccgatcctacactctttactaaaactcttgaaaatgacttatttgtatgccaaatttatgttgatgatattatatttgggtctactaacgagtctacttgtgaagagtttagtaggattatgacacagaaattcgagatgtctatgatgggggagttgaagtatttcttaggattccaagtgaagcaactccaagagggcaccttcattagccaaacgaagtatactcaagacattctaaacaagtttgggatgaaggatgccaagcccatcaagacacccatgggaaccaatgggcatctcgacctcgacacgggaggtaagtccgtggatcaaaaggtataccggtcgatgattggttcattgctttatttatgtgcatctcgaccggacattatgctttccgtatgcatgtgtgcaagattccaagccgaccctaaggaagctcaccttacggtcgtaaaacgaatcttgagatatctggcttatactcctaagtttgggctttggtatcctaagggatccacatttaatttgattggttattcggatgccgattgggcggggtgcaaaatcaataggaagagcacatcggggacttgccagttcttgggaagatccttggtgtcttgggcttcaaagaagcaaaattcggtcgctctttccaccgccgaagccgagtacattgtcgcaggccattgttgcgcgcaattactttggatgaggcaaaccctgcgggactacggttacaaattaaccaaagtccctttgctatgtgataatgagagtgcaatcaaaatggccgacaatcccgtcgagcatagccgcactaagcacatagccattcggtatcactttttaagggatcaccaacaaaagggagatatcgagatttcatacattaatactaaagatcaattagccgatatctttaccaagcctcttgatgaacaatcgtttaacaaacttaggcatgagctaaatattcttgattctaggaatttcttttgttaa

SEQ ID NO: 29940 - DNA, 397 bp, Zea mays
  Clone ID: MRT4577_127318C.1
tggctgggcacccatcggctcactcattcggacactgtctcgcgtgcggatgctcacgaggcccaacgggaacataaactgcgcctggctggcgctctttgtttccagtgaggacgtgatggcctacttcatcgccgcccacaagaacatcctgtcattatgaaagggacactaattatactaaacttcagatgacctgagaaacacctccgtgcagggcaccggacgcccccagcgggctttattcatgccacaatgagatcagatctatatataacacattcgtccacctcatcagacatccagcccaggcagccagcgagtgaggcagtacaagcacaagcaccacagatgatgccattcatgtgtgcatgaatccatctataaaaaataaact

SEQ ID NO: 29941 - DNA, 1779 bp, Zea mays
  Clone ID: MRT4577_127319C.1
atgtcgggagatcactccaagaaggagatggtgaccggcgagaagcccgccacaagccatgggaaagctccatcgggggagtctggtaacaagatgaagggattcccttcacacaacaagtcgcattggagcggtgagaagaaaaagaagatgaagaaagtggtctactatgagaccgactctttgtcgccatccacctccggctccgacgcaccgtccgtcacttctaagcaccatgagcgcaagaagtttagggatgaatataatgatgcggacgaagtcgcccaaatccggcacttcaattcccaagcaactactatactcctcacctctctaagtcgagaggagtataataaggtgcaagggttgaagagtgctaaagagatttgggacgtactaaagaccacgcacgaaggagacgaggtgaccaagatcaccaagagggaaacgatcaaaggggagctcggtcggttcatgctcaaccaaggagaggagccacaagctatgtacaaccggctcaagatcttggtcaaccaagtgcgcaacctcgggagcacaaaatgggatgaccttgaaatggtcaaggaggttataggaaagtttgtgagctttgaattgatgatcaaaggctccaaacaaatcatcgagcaaggcaccacctccacacccgaggtgcaacccgttgccttcaaagcaacggaggagaagaaagaagagtctacatcaagtaggctccccatcgacgcctccaagctcgacaacgaggaaatgacactcatcatcaagagctttcgccaaatcctcaagcaaaggaaggggaaagactacaaaccccgttccaagaaggtttgctacaagtgtggtaagcccggtcactttatagcaaaatgtcctatttctagtgacagtgataggggcgacgacaagaagggaaagaggagggaaaagaagagatactacaagaagaagggcggcgatgcccatgtatgccgggagtgtgactccaatgagagatccaccgactcctcctccgacgaggacgccgcaaacctcgccatcaacaagggtctcctcttccccaatgtcggccataagtgcctcatggcaaaggacggcaaaaagaagaaggtaaaatctagagcttctactaaatatgcaacatctagtgatgaggctagctctagtgatgatgaggatgatttgctcacactttttgccaaccttaacatgcaagaaaaggagaaattgaatgaatggattagtgatattcatgagaaggatgaactcttggatagccaagaggacttcgttattaaagaaaacaagaagcatgttaaagtaaaaaatgcctatgttcaagaagtagaaaaatgtgaaaaattaactagtgagcttagcatttgccatgacactatttccaaccttagaaatgagaatgctaaattaattgctaaggttgcgaagttaaatgtttgtgatgattctcttgtcaacctcaaaaatgataatgctagtttgatttctaaaattgacaagttgaataaatcactttctagccttaagattgagaatgataatttaattgttaaggctaaggatttaaatgtttgcaatgattctattaccaatcttagaaatgagaatgccatgctacatgctaagattgatgaattaaatgcttgcaaaccctctacatctaatgttagccatgtttccatttgtactagatgtagagacattaatgttgatgctattgtcacacccggttttggaaggtaa

SEQ ID NO: 29942 - DNA, 150 bp, Zea mays
  Clone ID: MRT4577_12731C.1
agagaaggtaggtgaggttgctgccctacagaatcctttttaaaaatttgtcaccatcagatattctacctaatggatgcaccccaaatagatccatagcagagactcagcagagactcacatcaggtcccctgtccttctgttccacac

SEQ ID NO: 29943 - DNA, 161 bp, Zea mays
  Clone ID: MRT4577_127320C.1
agagaattcactaatcgtgtcgtccgtttataggttgctagacacctttctcgaatgaaaactttcatgcttagatcaaagcatcatcttcaggttttgcgacgaggaaatcggcttgcatggccgaaactagcacgactatcactgtgaatgcggttgcg

SEQ ID NO: 29944 - DNA, 2802 bp, Zea mays
  Clone ID: MRT4577_127321C.1
atgaagaaagtggtctactatgagaccgattcttcgtcgccctccacctccggctccgacgcaccgtccgtcacttctaagcgccgtgagcgcaagaagtttagtaagatccccttacgctatccccgcatttccaaacgcactcctttactttccgtcccattaggcaaaccaccagtttttgacggtgaagattattgtatgtggagtgataaaatgaggcatcatctaacctcactccacgctagcatttgggacattattgagtttggaacgcaggagtataataaggtgcaagggctaaaaagtgccaaagagatttggaacgtactaaagaccgcacatgaaggggatcaggtgaccaagatcaccaagcgggagacgatcgaggggaagctcggtcgattcatcctcaaccaaggagaggagccagaagcaatgtacaaacggctcaagaccttggtcaaccaagtgcgcaacctcaggagcacaaaatgggatgaccatgaaatggtcaaggttattctaagatcacttgttttttgtaatcctacacaagttcaattaattcgtggtgatcctagatataagctaatgtctcccgaggaagtgataggaaagtttgtgagctttgagttgatgatcaaaggctccaaacaaatcatcgagcaaggcggcacctccacacccgaggtgcaacccgtcgcattcaaagcgacagaagaaaagaaggaagagtctacgtcaagtaggctccccatcgacgcctccaagctcaacaacgaggaaatggcgctcatcataaagagcttccgccaaatcctcaaacaaaggacggggaaggattacaaaccccgctccaagaaagtatgctacaaatgtggtaagcccggtcactttattgctaaatgtcctatatctagtgatagtgacagggacaacaacaagagggggaagaagaaggagaagaagagatattataagaagaagggtggtgatgcccacgtgtgtagggaatgggactccgatgagagctccaccgactcctcctccgacgaggacgccacaaagatcaccgtcaacaaaggcctccttttccccaacgtcggccacaggtgcctcatgaccaaggacaacaaaaagaagaaggtaaaatctagagcctccagtaaatatacaacatctagtgatgagggtaactctagtgaagatgaggatgatttgcttaatgtttttgccaaccttaacatgcaacaaaaggaaaaactaaatgaactgataggtgctattcatgagaaggatgaactcttggatagccaagaggaattccttattaaggaaaacaagaagcatgttaaggtaaagaatgcttatgctcaggaagtagaaaagaatgaaaatttgactaaggagcttagcatttgccatgacaaaatttccaaccttagaaatgaaaacggtaatttatttgctaaggttgaaaaatcaaatgtctgtcatgattcaattgtcaatcttaaaaatgataatgctagtttgattgctaagattggtaaattgaatgaatcaatttctagccttaaaattgaaaacgctagtttaatttcaaaggctaaagatttaaatgtttgcaatgcttctatttccaatcttagaaatgagaatgctattttacatgctaagattgatgaattaaatgtttccaaaccctctacatccattgttgatcatgtttctatttgcatgagatgtagagacattaatgttgatgctattcatgatcacctagccttaattaaacaacaaaatgatcacatagctcaactaactagtaaaattaatgagcatgagatagagaatgaaaaaaataaatttgctagaagcatgctctataataggagacgccctggcattaaggatggcattggcttccagcagggagacaatgtcaagcttaatgcccctaagagattgtccaattttgttaagggtaaggctcccatggctcaggataacgagggttatattttatatcctgttggttatcctgagcacaagattaggagaattcatgcaaagaagtcccattctatttctcaccatgcttttatgtataagaatgaggcttctaggacttttgatgcatcttatgtgctgactaacaaatcaggcaaagtagttgccaaatatgttgggggcaaacacaagggctccaagagttgtgtttgggtacccaaggtttatgaatctgggggctcaagttggatcattgatagcggatgcacaaaccacatgacaggggagaaaaggatgttctcctcctacgagaaaacgatgatccccaaagagctatcacattcagggatggaaatcaaggaaaaatctcaaatccaagagaccttaaagggattcttgagacggactcaaaatgagtttggattaagaatcaagaagataagaaacgacaatggaacggagttcaagaactctcaaattgaaggcttccttgaggatgagggcatcaaacatgagttctcttctccctacacacctcaacaaaatggtgtagtggagaggaagaatagaactctacttgacatggcgaggaccatgcttgatgattacaagactccggaccgattttgggctgaggcaattaacgccgcctgctactccatcaaccggctctatcttcaccgaatcctcaagaagacatcatatgaactcctcaccggtaaaaagtccaatgtttcatattttagagtctttggtagtgaaagtcgcctagaggggggtgaatag

SEQ ID NO: 29945 - DNA, 223 bp, Zea mays
  Clone ID: MRT4577_127322C.1
atggtcgaggccttggggtatgattaaatgatgtgttgggtggcggacgtattttatagcgtgactaaagtttaggtctgaaaaagttaagataagactgttaatttgcaaaatcaaatttgacagaaagtccaaagatgtaaagactatttctgtttaatcgactttgcagaacaacgattagacaacacatgatcgttaatacggtgagatgaccaatatg

SEQ ID NO: 29946 - DNA, 375 bp, Zea mays
  unsure (1)..(375): unsure at all n locations
  Clone ID: MRT4577_127323C.1
tcctacgagcctcagctcgcgcaccgccgcagacagtgccgccgccctctcctcccccccttccggtttgccgacacccactgctgccggacgccgcaggcaccccatggacccgaccgggcggcgtaatttggncntnaatgctaacaagnttattatagntagnntttnttncnccataccttncattaattatagntnnagtatgtgaaaacggagctgttaaancatataggnttnaacaagcaatngnagcaagcaacatacntttattgnccttgttgtttaaacaatngncagccctatntttggtgcagtaattggtacaaacaatnagggnacaacaagatgtagtaacttgtgctatctgtgatt

SEQ ID NO: 29947 - DNA, 655 bp, Zea mays
  Clone ID: MRT4577_127324C.1
cgccgtcctctcctcgccggtacttcactgagggcgaagaaaaaagtggcagtatattctgccactcacccaagagccaagatcatggcgtcatcttcctgcgtccgcctccatcacctgccgtccacctctcgccggtcgtccgcccctggcgccccaaccaacctccagttccgcgcggcgagctgccggtggcggcggcgggttctcgttcccggcgcggcatctcctcccctacgcctctgcgccacgggttccccgcagccgcctcttggcagtgacagcaacgctccgttgtcccgcggaacccgggaggagggcgaggaagtggaggagcagcggcagcctccgcccccgccgcggctcaagatcgccgtggtcgggttcggcaacttcgggcagttcctggcgcgcacgctggtggcgcaggggcacacggtcctggcgcactcccggtccgaccactccgccgcggcggcagccatgggcgcgcgcttcttcccggacgcgcacgacctgtgcgagtgccacccggacgtagtgatcctatccacctcgatcctgtcggccgagtccgtggtccggtcgctgccgctgcaccggctccgccgcgacacgctcttcgtcgacgtgctgtccgtgaaggagttcccga

SEQ ID NO: 29948 - DNA, 133 bp, Zea mays
  Clone ID: MRT4577_127325C.1
ctttactcttgtggggaaaaattaccctgtttatcggggttaactgcttggtacacatggccctaggaaatgggccaaatacaaagggtacgaaatggcctggctacttctattagccttgagggcccgaacc

SEQ ID NO: 29949 - DNA, 648 bp, Zea mays
  Clone ID: MRT4577_127326C.1
ggccgcttttttttttttttttttcataataactgagtgtatagagataaatgtcacaataatcagagtatttattacatagcggaagacttacaaaaataaaagataaatataacacgaactaaggatcgtcggcaccaatgtcaactgagaaacaccacctagattgaattgaactcctcgatacgtggctcctcctgaaccacctgttcttctcctggcacttaagatttccagttatcagggtgattcttcagatcctcgtgacctcactgcgagatcggagcagtgggattccctgcccatggtgagacgcggccttgaagatccgacgagcagttcgtcgcgcgcccctgcaccgttttgtccgcggagaaccggagaagaaacttggtgtcgtggtgaagctcaccgggtcgagctcgtgctccgaacagcaacagagatttggacccatggcggcggcgcggactccgcagctgctggtggctccacgcacggggaatccaccgcctaggcgatgcgacacacggagatcctaggccaccagcgaaccctccatgtgactcgacgaccaaactctctctcccctcggttctctccctcggcgtatgcaaaacggcggctctaacaaaggaacccggccgg

SEQ ID NO: 29950 - DNA, 171 bp, Zea mays
  Clone ID: MRT4577_127327C.1
gtttcccgttggaactgcagtgccctgcgcacgccatggtcgtactctttaagctgaacctcctcttgtataggtgcctcacgactctgatgagaatcattggcaggaactgttatttataagacagtacaaaagaatgcactcatcgacggctactgtcatactggaaca

SEQ ID NO: 29951 - DNA, 283 bp, Zea mays
  Clone ID: MRT4577_127328C.1
cgggtcggcccacgcgtacgctgggagatagagagaggagagggattgttttctcaaagagaaccttaacccaaacggcatgttcgcactgcagagcgaggatgtcaagctcgtcgccgtcaactaccccttcatcaccacggattacatgacctacatgttcaagtacgacaccgtgcactgccaatttaagcacatcgacatcaccctcaaagactccaagacgcttctcttctgctagaatccggtcaccgtctttggcatcatgaacccctaagagatc

SEQ ID NO: 29952 - DNA, 451 bp, Zea mays
  Clone ID: MRT4577_127329C.1
ggacgcggtaggaaccgcctgtgccctcgacgttgctgggcgtgttcttcctgtgctggtctccttatctggcttgcacgctgctgttgtaggttggtcatcgtggatgagattgactacttaataacaagagaccgtgctgtgctgcatgatcttttcatgctcacaacttgtccattctctagatgcatactcataggaattgcaaatgccatagacttagcagatcgttttcttccaaagctggaatccttaaattgcaagcctcttgttgtgacttttcgagcatattctaaggatcaaatatctgacatagttaagcataggctaaaggttcttgagtatgatgtctttgaaccactagctctggagttttgtgctagaaaagttgcagctgcctctggtgacatgagaaaagccctatgcgtttgcaggagtgctgtggaggttc

SEQ ID NO: 29953 - DNA, 338 bp, Zea mays
  Clone ID: MRT4577_12732C.1
ggaagaaggaatggatatggatggatggataggaagtggccgccatatgggcatgggccaaaccaaaccaaatcaattggtgggtttgtatcgtgccagcggcccatatgtagacttccaccagaccaagtccgtctgattccgcggatcatgcttacaattaattaattggtcttggggccaagaagaataagaagaagattaatgggccttcttgaagctttgggccaactagcccaacgtacataaaagatgaagaagatgaacatgcatgctcagcaaggctttcttcgtggggtggtagctgtcgaagaacacgtgctgcgagacgttgtcgc

SEQ ID NO: 29954 - DNA, 306 bp, Zea mays
  Clone ID: MRT4577_127330C.1
ggtaccggggcccccccccgggttttttttttttttttttttttttttttttttttatataaccaatcaccttttttatttgtttaaactagtaacgacggaaacatctgggtactcttgtaaacataccgcccaaaaatcaaacccggggtacaaaaccgtgacagtagcgcacaaccctaaacaaatacttttttttgaagggccctactcaaaaaatcctgggcaggatatcatttagatttgtaacgtaaagcacggaacctttttttttttttgttcccaaggggtacatgagctggggat

SEQ ID NO: 29955 - DNA, 1079 bp, Zea mays
  unsure (1)..(1079): unsure at all n locations
  Clone ID: MRT4577_127331C.1
cccacgcgtccgctccccgcttggtgtccgtcgtgtgggtgcgagtcttccatgggagtttggagggaggaagaaggaagaaaagaaggaggaaaggaggaacccaaggtggtggacttccggatcgtacttatggatttgcccgaacttccagtaaaggtacttgatacatgttgggaatgaggggagtagcagcacgtccactttcactctcacaataactctgcccagacgcagccatgattgaaggcaagtgaatgtagcggaggttacttccgttctgacctgttatttctattgcctacactctaatattcagaagtatcagattctttcataattggactctatggtgatgctttacttgcttgcattatactgatgctcaatcatatattgatgatgattatgatttgagtatgactcacgagattaattcacatatctgaaggtaaatgaagtattatttgaggttggtattgcatctgaagataaatgaagtattatttgaggtttgtgttgtatctgaaggaagtgaagccggccgggctctcttctttgcccttgggcttgcttgcctctcctgcattggcagcccgctcttcacggctacctcctccctatagatctccccccccccccccgcgcagcaaggatcgataagaggaggagcacattgcgttgaaggggaagagaggaccaaggagatgttcttcccatcatcttcttgcacaatttcattggggaaaccctcacgaggctacactccagaccatgtctagtacacttccttcttcttcgatgaaggcgcttgttgctcatcaaggggagtgggaagtagcagcacatccaccttcattctcataataatgctgcccagacgcagccatgatttaattagaaacttcttgtcaaaggatgtttgtttttaactagtcgtacgcactgattaattcagttcatgttgttatggttgtcttcccattgctagcagattattaatgacttatatggtttcttatcatgatatctatttatactttgntgcggaaaaaaaaaaaaaaaaaaggggccggccc

SEQ ID NO: 29956 - DNA, 275 bp, Zea mays
  unsure (1)..(275): unsure at all n locations
  Clone ID: MRT4577_127332C.1
gtacaagcttttttttttttttttttttttttgttttttttttgtttttttttttatttttttttttggnggtttttttttttttttttttttttacttggccccggggctggtggaatggtgaaatgccacaactcgggggactggtggtgatggtttcgtgctcggtacaattgttggggaattaaggttcctacgtgtttcctgcgggaagtttaaaatggataacctgtggcggatcatgagggcctaaaggataaaatttaaaatctggg

SEQ ID NO: 29957 - DNA, 459 bp, Zea mays
  Clone ID: MRT4577_127333C.1
cccacgcgtccgcataggtgcatactttatgatatggtggtgtactcgtaaaaaaaaaaaaaaaaaaaaaaaaaaaaaaaaaagaaaaaacaagaaaggcgccctaatggaaccaggcttccttgcacgtaattgccccttctttgctctggtgtagcggcatctacttgcccttctttggccgcggctttacctggtaacccctggcttatccctggctttgccccttttaatcccctcgcctttcctccccttttctactttgacaaattcccaatctgtcccccttcctacttttgcgcaaccttcctgcttcctggttggccccctgttcgcgccctttaacggcctttcaattcctggtttcatcctggtttccccctttatgtgcgcctcgctttcccgccccttatctccctttcttccaggtgttttccctccctttctcccggctttccc

SEQ ID NO: 29958 - DNA, 280 bp, Zea mays
  Clone ID: MRT4577_127334C.1
acgcgtccgcactcactacttataagcatatctcagtcttttatccacacaaaggtccctacaattcatgcaagggtcctacttaacggcgtgggtggctgcaccacatcacagattgcactgcagataaacttcttaaccataatactgctaggtaccatcgtatatcacaagcaaatctactcctgataggtacaagagcttatctaccattcctatagttcatgctttttatcctttactataacactgtactcatatataaactcctttatccata

SEQ ID NO: 29959 - DNA, 513 bp, Zea mays
  Clone ID: MRT4577_127335C.1
caagaaaccaacacgcaggcctacctaaccttcaagcaactgaggcgtgctgcataacaatcctaacccttggcggatcatgatgagtgcaggcatgtaaagatattctcctgcgagatcccagcaagagtacctatggcatacttagtctctgagtgggggaaggctcatatatgcatcatgtgttgcgtattctcgtgctaaagtttgcgctcaccatgtcaactagcaaggatgggcttggaatcacttcagttgaggtagacctgtccagcatagacccaccgaccacagcgacctcaaaatggcctgcaaaggcatcatttatcagaactccgacaaaggatgacataaagcttgccaacagggtggatgtggcatctatacgacacccaaatcaggatacagagccagtgagaaacaaaaagtggatagtgagcattgaccgtgtgcacgcaccttcgatgaatcatcactacctaatgccgcagactttagatggtggttctgccc

SEQ ID NO: 29960 - DNA, 847 bp, Zea mays
  Clone ID: MRT4577_127336C.1
ggtaaaattagagggaaccgctgcggatagcctaatggtatttgtgctcgtttggagaaatggattttgggactgtacccagacacccagctagcatgtataaaataccttcttatgacaacctttgacatccctgtgttgtaatacaattttctggaaatgttatagtgtgcttgtctggagtgtagatattccttgagaaatggatgtgcagttgtagaataaattatctgtacaagaactagccgtatgtataagtttccacaaattcagaatttaaccattttgaaaatgtgatgcatgaaactacaaaagatgaatttgtcaagatttggtgcatgttattgtcaccttcccaatccatgttctgtatattttagcaagtatatacctatgctcaggtcatggtggtgacagtgataaatagatgcaagaatggaatgatgtctctttcatggagttttgtgaccatgtactatacttctgtctttaactatttctagattttctcgacctcatgttgttcccctcacattccttgaagggataggcgattactttgctatatacatgtccggtgatgataaaacattcattttggttgttgttttccttgtgacaggttgtaggagaagagcttgatgttttaactagaatgtgatcgatctattcagtttagctcttcaagaactcctaaactttttcagctaggagtaattcacatccaaaatttgatgtgatcatgtatgattgcaataataatgacaaaatatggttgtactttgtattttaacatattgtgcacaaaacaagtgccttctataaccatcgtgatatatgcattttt

SEQ ID NO: 29961 - DNA, 423 bp, Zea mays
  Clone ID: MRT4577_127337C.1
cggacgcttgcgttagcccttcttagcaatcacacaacattaggtttatggataagcaaaactggctacaagaatttttcgtaccaacacaactatgaacctgattacactaccctgacatacatgaaaaagccagtatggccgacccatatatgaactgagaccattgccgcacttatatgtagttgtattcaacaataaccttcacatgagcactttgcatactcaaacttgtgcaaacaacaggaatccttgattagaatacgacgctcatatgttctttaaactagctttgtaaagatgtaacaccggggacgcacacttaaggcctttaataaccgtatgcttctaaaaggaggtgaatttcaaagtgcaaaagcaataggtagcttatcacaatgcattcctgataattgttcttta

SEQ ID NO: 29962 - DNA, 667 bp, Zea mays
  Clone ID: MRT4577_127338C.1
ctcgagtttttttttctttttttttttttttttttttttttttttttttttttttttttttttttttttttttttttttttttttttttttttttttttttttttttttttttttctcccggcgagtataaaagatataaccacaagccccctcgtatgggaaaaggttataggataactaaaatctagaaaacaacaacccggggaaaaaaaaaaacaagcaaacaggcttcctgggtgttccaaggggataaaacaaatcgacatccttgaaggggaattcgtaaaaaactcgctagaaaagttgcaccccctttttttacgcaggggacaaaaaaagcatgccccgttggggggggacctcccccggcatagacaccatttccaacccccccctaataacgccccttcccccaaagaaatactgaaggccctggcacccccccgggatctaaacaaaattaacaagaggcccgttttaaaggacaatgcaaaaacttgaaccctgaacctcccaatggggcacaggggcccacacacccaaaaacaggggggggcctagcggaaaaagagcatcgggagcccccttgaagccaacaggggttgaggcgggggacccccctaaaaacttttgaaccaatcgtgttccaaagatggaacccatttg

SEQ ID NO: 29963 - DNA, 337 bp, Zea mays
  Clone ID: MRT4577_127339C.1
actgcggaacgccaagtcaccaaggtattggattatacaaccggacccttactaaaaagtacccaaaaagctagagccggaagaacttaatgggtgacacgggataggaaacattcactgttgaactggatgggatagagcacctaaagaactagagcctgggggcattacttcggttttcaccaaatacgaggattttgatgagccatacaaaaaaacgcgtgggcatgtgtcgagactaggcggccttggttgaagaccttatgaccctaggggggagacacaagctcaatttcgtcattctgatggccatcccccctattggcggtgttaggga

SEQ ID NO: 29964 - DNA, 517 bp, Zea mays
  Clone ID: MRT4577_12733C.1
atcaaatcgtgtggatatatataatagcctatgggtatactgcgtgcgcagcacacaatttcgaagacagaaagggggcatagaaccgccctatccatcctattaacacattgactatacagaaagtggcctattgttattccttgatatctccatcaccgtgtacaatttcaaatgtactacacagcaccaatgacacccctaacatggatggttacataaggcaccattcatttgaacgcctcccagaccagctccttgaaccgatctatgcatccaatcatacgcttgaattcctccttgtccagagcaaaactgaaccggcaacaaccagggatcccctttcatgaactgctgattatgcacagcccagtggccctcaggtatggcttcccggatgttgatagattccagttagccttcgaaaacaggacatctgaatgcctttcccatgctcgcagtgggcttggccagcatcgaaatgccaccgataccgatggcagctttccaaccacag

SEQ ID NO: 29965 - DNA, 2664 bp, Zea mays
  Clone ID: MRT4577_127340C.1
atgacgactgacaggccactagagctcctacacatggacctattcggcccgattgcttacataagcatcggcgggagtaagtactgtctagttattgtggatgattattctcgcttcacttgggtattctttttacaggaaaaatctcaaacccaagagaccttaaaaggattcttgagacgggctcaaaatgagttcggcttaaggatcaaaaagataagaagcgataacgggacggagttcaagaactctcaaatacaaggcttccttgaggaggagggcatcaagcatgagttctcttctccctacacgccgcaacaaaatggtgtagtggagaggaagaatcgaactctattggacatggcaagaaccatgcttgatgagtacaagacttcggatcggttttgggccgaggcggtcaacaccgcttgctacgccatcaaccggttatatcttcatcgaatcctcaagaagacatcatatgaactcctaaccggtaaaaagcccaacatttcatattttagagtctttggtagcaaatgctttattcttgttaaaagaggtagaaaatctaaatttgctcctaagactgtagaaggctttttactaggatatgattcaaacacaagggcatatagagtctttaacaagtccactagacaagttgaagtttcttgtgacgttgtgcttgatgagactaacggctctcaagtagagcaagttgatcttgatgagataggtattgaagaagctccgtgcatcacgctaaggaacatgtccattggggatgtgtgtcctaaggaatccaaagagcctccaaaagcacaagatcaaccgtcctcctccacgcaagcatctccaccaactcaaaatgaggatgaagctcaagttgatgaagaagaagatcaatcaaatgagccacctcaagatgacggcataaatcaagggggagatgcaaatgatcaagacaaggaggatgaagaaccaagaccgccacacccaagagtccaccaagcaatccaacgagatcaccccgtcgacaccatcctcggcgacattcataagggggtaaccactagatctcgtgttgcacatttttgtgaacattactcgtttgtttcctctattgaaccacacagggtagaggaagcactacaagattcggattgggtggtggcgatgcaagaggagctcaacaacttcactaggaatgaggtatggcatttagttccacgtcctaatcaaaatgttgtaggaaccaaatgggtcttccgcaacaagcaagatgagcatggtgtggtgacaaggaacaaagctcgacttgtggccaagggatactcccaagtcgaaggtttggatttcggtgaaacctatgcacccgtagctaggcttgagtcaattcgtatattattagcctatgctacttaccatggctttaagctttatcaaatggacgtgaaaagtaccttcctcaatggaccaatcaaggaagaggtctatgttgagcaacctcccggctttgaagacagtgagtatcctaacaatgtctataagctctctaaggcgctttatgggctcaagcaagccccaagagcatggtatgaatgccttagggatttccttattgctaatggcttcaaagtcggaaaggccgatcctactctattcactaaaactcttgaaaatgacttgtttgtatgccaaatttatgttgatgatattatatttgggtctactaacgagtctacatgtgaagaatttagtaggatcatgacacaaaagttcgagatgtctatgatgggggagttgaagtattttctaggattccaagtcaagcaactccaagagggcaccttcctaagccaaaccaagtacactcaagatattctaagcaagtttggaatgaaggatgccaagcccatcaagacacccatgggaaccaatgggcatctcgacctcgacacgggaggtaagtccgtggatcaaaaggtataccggtcgatgattggttcattactctatctatgtgcatctcgaccggacattatgctttccgtttgcatgtgtgcaagattccaatccgaccctaaggaatcccaccttacggccgtaaaacgaatcttgagatatttggcttatactcctaagtttgggctttggtaccctcggggatccacatttgatttgattggttattcggatgccgattgggcggggtgtaaaatcaataggaagagcacatcggggacttgccagttcttgggaagatccttggtgtcttgggcttcaaagaagcaaaattcggtcgctctttccaccgccgaagccgagtacattgccgcaggccattgttgcgcgcaattgctttggatgaggcaaaccctgcgggactacggttacaaattgaccaaagtccctttgctatgtgataatgagagtgcaatcaaaatggctgacaatcctgtcgagcatagccgcactaaacacatagccatccggtatcattttcttagggatcaccaacaaaagggagatatcgagatttcttacattaacactaaagatcaattagccgatacctttaccaagcctcttgatgaacaaacttttaccaaactttggcatgagctcaatattcttgattcacgcaatttcttttgttga

SEQ ID NO: 29966 - DNA, 342 bp, Zea mays
  Clone ID: MRT4577_127341C.1
atgtcattgagaagcatcaaggtgtcttcgagggagaagcacaaagagcagaaagaagaatctatcggctcctccaagacgcacaacacgaagaacgacaagaaaaggatgaagaagaaggtaccacaagttggagacgatgactatgattcatatgaggtcgcccaaattcagcacttcaactcacaagcaaccacaatactccttgtttccttgtgtagggaggagtacaacaaggtagaagggttgaagagcaccaaggagatttgggatgtcctcaagccaacgcaggaaggtgataggatcactgttggttacttgttctcaaatgctacgagttaa

SEQ ID NO: 29967 - DNA, 2338 bp, Zea mays
  Clone ID: MRT4577_127342C.1
atgtcgggagcatccgccaagagggagatcaggaccggcgagaagcccgccacaagccatgggaaggctccatccggggagtccgccaataaggtgaagggatccccttcacacgacaagtcgcgtcggagcggtgacaagaagaagaagatgaagaaggtggtctactacgagaccgactcttcgtcgccatccacctccggctccgacacgccgtccgtaacttctaagcgccatgagcgcaagaagtttagtaagatccccctacgctaccctcgtatttccaaacgtactccattactttccgtcccattaggcaaaccacctatgtttgatggtgaagattataatatgtggagtgataaaatgaggcatcatctaacctcactccacactagcatttgggatgttgttgagattggagtacaggtaccatcaccgggggatgaagactatgattcggacgaggtcgcccaaatccgacacttcaactctcaagccaccactatactcctcgcctctctaagtcgagaggagtataacaaggtgcaaggactaaagagcgccaaggagatttgggacgtgctcaagaccgcgcacgaaggagatgaggtgactaaaatcaccaagcgggagacgatcgaggggaagctcggtcggttccgactcaaccaaggcgaggacccacaagccatgtacaaccgcttgaagaccttggtgaatcaagtgcgctacctcgggagcaccaaatgggatgaccatgagatggtcaaggttattctaagatccctcgttttccttaaccctacgcaagttcaattaattcgaggtgatcctagatacacgctaatgtctcccgaggaggtcataggtaaatttgtgagctttgagctaatgatcaaaggctccaaaaagatcatcgagcaaggcgactcctccatgcccgaagcacaacccgttgcattcaaagcaacgaaggagaagaaacaagattctaatccaagtagaatccccatcgacgcctccaagctcaacaataaggagatggcgctcatcatcaagagcttccgtcaaatcctcaaacaaaggaaggggaaatattacaagccccgttccaagaaggtgtgctacaagtgtggtaagcccggtcatttcattgctaaatgtccattatctagtgatagtgacaggggcgacgacaagaaggaaaagaggagagaaaagaagagatactacaagaagaagggcggtgatgcccatgtgtgccgcgagtggaactccgacgagagctcctccgactcctcctccgacgaggacaccgccaacatcgccgtcaccaagggcctctgtcacacccggattttaggggtccaaaacccgggcgcgaacataatcaccagaggttgcgcatctttacccacaagtcatgttacccatctgccaagggatcgtgacttcccatacacctctaccgaggaggcgaggcagggtaacactacgaggcctttacaaagttccactagcttcagaaaacccgctacagttataggaagctccaatgcagggttcttgcctgaccgccatcgcagcaaaatcaaccaaggacctccctacactgaccactcccctactgcccttgcccctttcgggtaaggtagtcatccactagctttcctaattaatcagccaagggcgtccataaacccttgtggtagcactgttttcccgagtggttctccatgttccaattaacataatggtcttaacatgaacaataaataacaactgataacaaaagtgtaatcatgaataatgtatctccatacccaaaaccacatatagcactagcaagtactacccagaaagttcagtggtaaacaaggtataaagatagacaaactagggtatcctattgggtcccatcaaaattaacctatgcagatcattatgattaattagaacatgactgggtaaaaagaagtgatcaagggcacaacttgcctgggacttgagattccaggtaacaacttgcttttcagatgactcgtgacctcgcgctagtcgtagcaatacaaacaaacatggtataggcaaaattaacatcacaccaaacatagcaacaaactgcataataataatctactcgtcactacgagatcgtgggatcgagaactactaagatcggagtcgtggttaaggagttatgattttatagatgattcatgtgattaaaatattaaactatatcataaattggttattatagatcatatgagaaattattttataaataattatcttaactttaatctagatccccggcccggccggcctcgag

SEQ ID NO: 29968 - DNA, 749 bp, Zea mays
  Clone ID: MRT4577_127343C.1
cattgggtacctcgaggccggccgggactccgagcggcgccgggaataccaccccacacacagattgcaccggaagaccaaaaacagtcttctgaacaaccgcaatcatgggtatctcacgagactctcgccacaagcgttccgcatccggtgcgaagcgcgcatactaccgcaagaagagggctttcgagaagggtcgccagcctgccaatacccgtattggcactaagcgtatccatcttgtccgcacccgtggcggcaaccgcaagttccgtgctctccgtctcgagtctggcaacttctcctggggctctgagggcatcgccaagaagacccgtgtcatcggtgtcgtctaccacccctccaacaacgagctcgtccgtaccaacaccctgacccgctccgctatcgtccagatcgatgccgctcccttcaggcaatggtacgaggcccactacggctcctcgctcggccgcaggaggcaggccaaggccggtgagaaggaggaggacaagaagaagtccaactcggtcaccaagaagcaggccgagcgcctcaagaccagtggaaagattgagaatgctgttgagaagcagttcgaggccggtcgtctgtacgccgctgtctcttcccgtcccggccagagcggtcgctgcgacggttacgtcctcgagggtgaggagcttgctttctacagcgtctcctcaggaagtaaaggtgatatttggggcttcttcggtgcatcggtc

SEQ ID NO: 29969 - DNA, 414 bp, Zea mays
  Clone ID: MRT4577_127344C.1
attatggtaattttggcttcctttactctcaaaacaggcacagaaaaacggcaccggggaacaagactaagggggggggggaacaaaaaggacccccccccccccaaccaacaggagagaaggggggggaaggcccggaacgagaaggacacagagggcccgcccaggaggcaaggaccggaggaggaggccaaattggcggcccaaacaaggggaaccgaagccgggggggaggggaacaaaagccgggggggggcgaggggggccgaccagggaggggagggggggggacaagaagaaaaacaagggcctcaaccgagggcgggaacggggcccaggcagccgggggggggggggaagggaggggggggcggggggggggccccggtcccctgcccgtgccgggggcggggg

SEQ ID NO: 29970 - DNA, 5310 bp, Zea mays
  Clone ID: MRT4577_127345C.1
atgtcgggagatcacgccaagaaggagatggagaccggcgaaaagcccactacaagccgcgggagcacttcatcggaagagtcccgcaccaagaggaaggacaagaagaaggactcctccaaacggaaggagaaaaagtcttcctcttctcaccaccaagagaagaaggaaaaatcttcttcccacaagccgcatcggaaaggcgacaagcataagaggatgaggaaggtggtctactacgagaccgacacttcatcaacttctacctccgactccgatgcgccctccgtcacttctaagcgccaagagcgcaagaagtatagtaagatccccctacgctaccctcgcatttccaaacatacacctttactttccgtcccattaggcaaaccaccaacttttgatggtgaagattacgctaggtggagcgatttaatgcgatttcatctaacctcgctccacaaaagcatatggaatgttgttgagtttggtgcgcaggtaccatccgtaggggatgaggattatgatgaggatgaggtggcccaaatcgagcacttcaactctcaagctacaacaatactcctcgcctctctaagtaaagaggagtataacaaagtacaaggattgaagagcgccaaggagatttgggatttactcaagaccgcgcatgaaggtgatgagctcaccaagatcaccaagcgggaaacgattgagggggagctcggtcggttccggcttcgaaaaggggaggagccacaacacatgtacaatcggctcaagaccttggtgaaccaagcgcgcaacctcgggagcgtaaagtgggatgaccacgaggtggttaaggttattctaagatcacttattttccttaaccctactcaagttcaattaatccgtggtaatcctagatatactaaaatgacccccgaggaagttatcgggaattttgtaagttttgagtgcatgatcgaaggctcgaggaagatcaacgagcttgatgatgccaccacatccgaagctcaacccgttgcattcaaggcaacggaggaaaagaaggaggagtctacaccaagtcgacaaccaatagacgcctccaagctcgacaatgaggaaatggcgctcgtcatcaagagcttccgccaaatcctcaagcaaaggagggggaaggatcacaagtcccgctccaagaaggtttgctacaaatgtggtaagcccggtcattttattgctaaatgtcctatatctagtgacagtgaccgaggcgacgacaagaaggggagaagaaaggagaagaagaggtactacaagaagaagggcggcgatgcccatgtttgtcgcgagtgggactccgacgagagctcaagcgacttctccgacgacgaggacgccgccaacatcgccgtcaccaagggactcctcttccccaacgtcggccacaagtgcctcatggcaaaggacggcaaaaagaaggttaaatctaaatcctccactaaatatgaatcctctagtgatgacaatgctagtgatgaggaagataatttgtgttccctttttgccaaccttaacatagctcaaaaagaaaaattaaatgaattggttagtgctattcatgaaaaggatgaccttttggattcccaagaggattgtctaattaaagaaaacaaaaaacacgttaaggttaaaaaggcctatgctcttgaaattgagaaatgtgaaaaattatctagtgagctaagcacttgtcgtgagatgattgacaaccttagaaatgaaaatgctattttaaatgctaaggttgattcacatgtttgtaatgtttcaattcccaatcttagagatgataatgttgacttgcttgctaagattgatgaattgaatgtttctcttactagccttagaattgagaatgaaaaattgcttgctaaggctaaggactttgatgtttgcaatactaccatttccgaccttagaactaagaatgatatcttgcatgctaaggttgtagaattaaaatcttgcaaaccctctacatctattgttgagcatgtatctatttgtactagatgtagagatgttgatgttaatgctattcatgatcatatggctttaattaaacaacaaaatgatcatatagcaaaactagatgctaaaattgccgagcataacttggaaaatgaaaaatttaaatttgctagaagtatgctctataatgggagacgctctggcattaaggatggcattggctaccaaaggggagacaatgtcaaacttaatgcccctcctaagaacttgtctaattttgttaagggcaaggctcccatgcctcaggataacgagggttacattttataccctgccggttatcctgagagcaagattaggagaattcattctaggaagtctcactctggccctaatcatgcttttatgtataagggtgagacatctagctctaggcaaccaacccgtgctaagttgcctaagaaaactcctattgcatcaaataagcataacatttcatttaagacttttgatgcatcttatgtgttgactaacaaatccggcaagatagttgccaaatatgttgggggcaagcacaaaggctccaagacttgtgtttgggtacccaaagttcttgtgtctaatgccaaaggacccaaaaccatttgggtttatgcatctgggggctcaagttggatactcgacagcgggtgcacaaaccacatgaccggggagaaaaggatgttctcctcatatgagaaaaaccaagatccccaacgagctatcacattcggggatggaaatcaaggtgtcactgtctttagaagaagtgatgattcaatagcatttaagggtgtgttagagggtcagctatacttggtagattttgatagagctgaactcgacacatgcttaattgctaagactaacttgggttggctctggcaccgccgactagcccatgttgggatgaagaatcttcataagcttctaaagggagaacacattttaggattaacaaatgttcattttgagaaagacaggatttgtagcgcatgccaggcggggaagcaagttggagcccatcatccacacaagaacatcatgacgaccgacaggccgctagagctgctccacatggatctattcggcccgattgcttacataagcatcggcgggagtaagtattgtcttgaaaaatctcaaacccaagagactttaaagggattcttgagacgggctcaacatgagttcggcttaaggatcaagaaaataagaagcgacaacgggacggagttcaagaactctcaaattgaaggcttccttgaggaggagggcatcaagcatgagttctcttctccctacacacctcaacaaaatggtgtagtggagaggaagcatcgaactctattggacatggcaagaaccatgcttgatgagtacaagacaccggaccggttttgggccgaagcggtcaacaccgcctgctacgccatcaaccggttatatcttcaccgaatcctcaagaagacatcctatgaactcctaaccggtaaaaagcccaacatttcatactttaaagtttttggtagcaaatgctttattcttgttaaaagaggtagaaaatcaaaatttgctcctaaaacagtagaaggctttttacttggttatgactcaaacacaagggcatatagggtctttaacaagtccactggactagttgaagtctcatgtgacgttgtgtttgatgaaactaacggctctcaagtagagcaagttgatcttgatgagataggtaatgaagaggctccatgcatcgcgctaaggaacatgtccattggggatgtgtgtcctaaggaatccgaagagcctccaaatgcacaagatcaaccatcctcctccatgcaagcatctccaccaactcaaaatgaggatgaggctcaagttgatgaagggcaaaatcaagaagatgagccacctcaagataatggcaatgatcaagggggagatgaaaataatcaagaaaaggaggatgaggaagaaccaaggccgccacacccaagagtccaccaagcaatacaacgagatcaccccgtcgacaccatcctcggcgacattcataagggggtaaccactcgatctcgtgttgcacatttttgtgaacattactcttttgtttcctctattgagccacacagggtagaggaagcactacaagattcggattgggtggtggcgatgcaagaggagctcaacaacttcacgaggaatgaggtatggcacttggttccacgtcctaaccaaaatgttgtaggaaccaaatgggtcttccgcaacaagcaagatgagcatggtgtggtgacaaggaacaaagctcgacttgtggccaagggatactcccaagtcgaaggtttggatttcggtgaaacctatgcacccgtagctaggcttgagtcaattcgcatattattggcctatgctacttaccatggctttaagctttatcaaatggacgtgaaaagtgccttcctcaacggaccaatcaaggaagaggtctatgttgagcaacctcccggctttgaagacagtgagtaccctaaccatgtctataggctctctaaggcgctttatgggctcaagcaagccccaagagcatggtatgaatgcctaagagatttccttattactaatggcttcaaagtcggcaaggccgatcctactttattcactaaaactcttgacaatgatttgtttgtatgccaaatttatgttgatgatattatatttgggtctactaacgaatctacatgtgaagaatttagtaggatcatgacaaagaaattcgagatgtctatgatgggggagttgaagtattttctaggatttcaagtgaagcaactccaagagggcaccttcatcagccaaacgaagtacactcaagacatcctaagcaagtttggaatgaatgatgccaagcccatcaaaacacccatgggaacaaatgggcatctcgacctcgacacgggaggtaagtccgtggatcaaaagtctatttcaaaccaagtcataggtatattgaaagggaattggagtcttcggcgaagacaaaggcttccactccgtaactcatccttcgccatcactccaaccatctctctattctttgggggagaaatgagcatcaaagaaaaggacttcgtctttggtataatcttaacccatttatttatgaccaaagagaaagatagcaccaagagggctctaatgattccgtttttggcgattcatgccaaaaagggggagaaatga

SEQ ID NO: 29971 - DNA, 771 bp, Zea mays
  Clone ID: MRT4577_127346C.1
agcagtggtaacaacgcagagtactttttttttttttttttttttccgttttttgaggtgaaaaaaatatgacaaaggtgacagggttcaatagtttaggcgccacatggaaccgtcagcttttagatatgagaagatatagagaactacagggctaggtcacctctacagtgagtgcctgcatccatactttcatagaccaattcttgcctgccatttagagcttaggctatggctacacgtagctacaacagctatcgtacaacatgtccattaccataatgatacaatggatctagctatattaacgactaggttatttctgaccaacacaacttgagagaagatagatcataggaaccgaaaagactcgtggacggcaatcctgcggtgctgaattgccggttttggttcagaacttcagtttctggtcttcatctcggtctcagtagtccagaggcaccacaggtgcgatgctgccggtgagattctgcatgtcgtggcctgcagaataatcatcgcagacactgccctgcagtgtcctcactccagttgtagacagaaggtcgcctccgccgcggaccatctgctgcacgtcttgcggcgagaggatctttatgcaccatacactattcacaaactcctgccacgggtcatcgccgacgagaagaatatcgttttcccggtcaacgaatacaagctgccagcctgatcttacagggtccctccagttggccttcaagaccaaataaccgctcgagctcgctacgt

SEQ ID NO: 29972 - DNA, 428 bp, Zea mays
  Clone ID: MRT4577_127347C.1
aaacaaatggccagatttttaccagttcttgattgaggcacttaaattgtacatgttaaaaacaatgagtataagtgggagggggatccgagcacgaggctgcggaccccggactccgcctcgtatatcaccagcagctccgcgatgttgtacccttccagaaccacaatatccaccaacgaccttacctttacctccaaccccgcacagtcagccggaaatagacagcaatgtttcattcgccaaagtaattggtcaggcaaggattaaaatccttgctgaacatttcgtctgggctaccgtagttcggggtctcaacttccccaatgctgcactccaaaaagaaagcggtatccacgtgcaggaacaggacgacgtttttgagcgtcctgatctcctcccagtgtcgcaggcacaggtccttgagc

SEQ ID NO: 29973 - DNA, 4452 bp, Zea mays
  Clone ID: MRT4577_127348C.1
tcaatcaaaattcctagaatcaagaatatttagctcatgcctaagtttggtaaatgtttgctcatctaatggcttggtaaagatatctgctaattgttctttggtgttaacatatgcaatcttgatatcccccttttgttggtgatcccttaaaaaatgataccgaatggctatgtgtttagtgcggctatgttcaacgggattatccgctatgcggattgcactctcattatcacatagaagaggaactttggttaatttgtaaccatagtccctaagggtttgcctcatccaaagcaattgcgcgcaacaatggcctgcggcaatgtactcggcttcggcggtataaagagcgacagaattttgcttctttgaagcccaagacaccagagatcttcccaagaactgacaagtccctgatgtgctctttctattaattttacaccctcctgtgtcgaggtcgagatgcccattagttcccatgggtgtcttgatgggcttggcatccttcatcccaaactttgtgagtatgtcttgaatgtacttcgtttggctaatgaaggtgccctcttggagttgctttacttgaaatcccaagaaatacttcaactcccccatcatcgacatctcaattttttgtgtcatgatcctactaaacttatcttcaaagccgggaggttgctcaacatagacctcctccttgattggtccatttaggaaggcacttttcacgtccatttgataaagcttattccttgtgaagttgttgagctcctcttgcatcgccagcacccaatccgaatcttgaagtgcttcctctaccctgtgtggcatcatcatcttccttgtcttgattattaacatctccccttgatcattgccctcctcttgaggtggctcatcttcttgatcttctccttcatcattttgagcctcactctcatcttgagttggtggggatgcttgcatgggggaagatggttgatcttgtgcttgtggaggctcttcggattccttaggacacacatccccaatagacatgttccttagagtgacgcacggagcctcttcatcatctagctcatcaagatcaacttgctttacttgagagctgttagtttcatcaaacacaatgtcacaagaaacttcaactagtccagtggacttgttaaagactctatatgcccttgtgtttgaatcaaaaccaagtaaaaagccttctacagccttaggagcaaatttagattttctacctcttttaacaagaataaagcatttgctaccaaagactctaaaatatgaaacattgggctttttaccggttaggagttcataagatgtcttcttgaggattcgatgaagatataaccggttgatggcgtagcaagcggtgttgaccgcctcggcccaaaaccgatctgaagtcttgtactcatcaagcatggtccttgccatgtccaatagagttctattcttcctctccactacaccattttgttgtggcgtgtagagagaagagaactcatgcttgatgccctcctcctcaagaaagccttcaatttgagagttcttgaactgcgtcccgttgtcgcttcttatcttcttgatacttaatccgaactcattttgagcccgtctcaagaatccctttaaggtctcttgggtttgagatttttcttgcttccctgcttgacatgcgctacaaaccctgtctttctcaaaatgaacattggttagtcccaaaatgtgctctccctttataagcttatgaagattcttcatccccatatgggctagtcggcggtgccagagccaacccatgttagtcttagcaattaagcaagtgtcgagttcagctctatcaaaatctactaagtatagctgaccctctaacactcccttaaatgctactgaatcatcacttcttctaaagacagtaacaccttgatttccatccccgaatgtgatagctcgttggggatcttggtttttctcataggaggagaacatattctcccctgtcatatggtttgtgcactcgctatcgatgatccaacttgagcccccggatgcataaaccttgggtacccaaacacaagtctttgacccgttgtgtttgcccccagcatatttggcaactactttgcctgatttgttagttagcacataagatgcatcaaaagtcttgaatgaaatgttatgatcatttgatgcaataggagttttcttcttaggcaatttagcatgagtagattgcctagaactagatgcctcactcttgtacataaaatcatgattagggccagagtgagacttcctatagtgaattctcctaattttgtgctcaggataaccggcagggtacaaaatgtaaccctcgttattctgaggcatgggagccttgcccttaacaaagttagataatcttttaggaggggcattgagtttgacattgcctccctgttggaagccaatgccatccttaatgccagggcatctcccactatagagcatactacgagcaaatttaaaattttcattttctaactcatgctcggcaattttagcatctaattttgctatatgatcattttgttgtttaatcatagcaatgtgatcatggatagcgtcaatgttaacatctctacatttagtgcaaatagtaacatgctcaatggtagatgtagagggtttgcaagaatttaattcaacaatcttagcatgtaatatggcattttcatctctaagattggaaatggaaacattgcaaacatttaattccttagccttagcaattaatttctcattctcatttctaaggctagcaagagaggcatttaatttttcaatcttagcaattgaactagcattatcatttctaagattgacaattgaatcatcacaaatatttgacttctcaaccttagcaattagtttggcattttcatttctaaggttggaaataacatcatggcaagtgcttagctcactagataatttttcacattttctaattaggaagtcctcttggctatccaagagttcatccttctcatgaatagcactaattaattcatttaatttttccttttgttgcatgtttaagttggcaaaaaggatgagcaaattatcctcatcatcactagaattatcctcatctctagaagtttcatacttagtggaggattttgattttaccttcttccttttgtcgtcctttgccatgaggcatttgtggccgacgttggggaagagaaggcctttggtgatggcgatgtttgcggcgtcctcgtcggaggaggagtcgatggagctctcgtcggagtcccattcccggcaaacatgggcatcgccgcccttcttcttatagtatctcttcttctccttcttcttccccctcttgtcgttatccctgtcactatcactagacaaaggacatttagcgataaaatgactgggcttaccacacttgtagcaaactttcttggagcgagacttgtagtccttccccctcctttgcttgaggatttggcgaaagctcttgatgatgagcgtcatttcctcgttgtcgagcttggaggcgtcgatcgggaccctactaggtgtagagtcttctttcttctcctccgttgccttgaatgcaacgggttgtacatcgggtgtggaggaggcgccttgctcgatgattttcttggagcctttgattatcaactcaaagctcacaaattttcctattacttcctcgggagacattagtgtgtatctaggatcaccatgaattaattgaacttgcatagggttaaggaaaacgagtgatctaagaataaccttgaccatttcatggtcatcccattttgtgctcccgaggttgcgcacttggttcaccaaggtcttgagccggttgtacatcacttgtggctcctccccttggtaaagcatgaagcgaccgagctccccctcgatcgtctcccgcttggtgatcttggtcacctcgtctccttcgtgcacggtcttgagcacgtcccaaatttcctttgcgttcttcaacccttgcaccttattatactcctctcgacttagagaggcgaggagtatagtagtggcttgggagttgaagtgttggatttgttcgacctcctccgagtcgtaatccttttctcccttctttggtacctgcgctccatactcaacaatatcccatatgcttttgtggagtgaggttaggtgatgcctcattttatcactccacatagaataatcttcaccttctagcataggtggtttgcctaatgcaacggaaagtaatggagtgcgttttgaaatgcgaggatagcgaaggggcatcttactatacttcttgcgctcatggcgcttagaagatgcggatgccgatttcgagccggaggtggagggtgacaaagagtcggtctcgtagtagaccaccttcttcat

SEQ ID NO: 29974 - DNA, 1356 bp, Zea mays
  Clone ID: MRT4577_127349C.1
gaaaaatctcaaacccaagagaccttaaagggattcttaagacgggctcaaaacgagtttggactaagaatcaaaaagataagaagcgacaatgggacggagttcaagaactcacaaatcgaaggcttccttgaggatgagggcatcaagcatgagttatcttctcactacacacctcaacaaagtggtgtagtggagaggaagaatagaactctactggatatggcaaggacaatgcttgatgaatacaagacaccgaatcgattttgggctgaggcgattaacaccgcctgctactccatcaaccgactatatcttcaccgaatcctcaagaagacatcttatgaactcctcaccggctgtagaaggtttttactaggatatgattcaaacacaagggcatatagagtcttcaataaatccactggattagttgaggtttcttgtgacaatgtgtttgatgagactaatggctcccaagtggagcaagttgatcttgatgagctagatgatgaagaggctctatgcgtcgcgctaaggaacatgtctattggggatgtgtgtcctaaggagtcggaagagcctccacaagcacaagatcaatcgtcatcttccatgcaagcatctccaccaactcaagatgaggaacaggttcaagatgatgaagatcaggaggacgagccacctcaagaggaggacaatgatcaagggggagatgaagacaaggaagatgatcaagaagtacagggtcaaataccaccacacccaagagtccaccaagcaattcaaagagatcaccctgtcaactccatcctcagtgctattcataagggggtaaccactagatctcgagtggcacatttttgtgagcattactcttttgtgtcctctattgagccatatagggtggaggatgcactaagagatccggattgggtgctggcaatgcaagaggagctcaacaacttcacgaggaataaggtatggcatttagttccatgtcctaatcaaaatgttgtagataccaagtgggtattccgcaacaagcaagatgagcatggtgtggtgacaaggaacaaagcccgacttgtggccaagggttattcacaagtcgaaggtttggattttgatgaaacttatgcacccgtagctaggcttgagtcaattcgtatattacttgcctatgttacttaccatgtctttaagctttaccaaatgatcgtgaaaagtgtcttcctcaatggaccaatcaaggaagaggtctatgttgagcaacctcccagctttgaagatagtgagtaccctaactgtcggagaggaaatctccggtcgagtggcgaaatgcacccgccctaa

SEQ ID NO: 29975 - DNA, 826 bp, Zea mays
  unsure (1)..(826): unsure at all n locations
  Clone ID: MRT4577_12734C.1
gaggctcggnnccgggcaattcaacctaaaaacttaagtggatagaaagaggtggacaattcacttacgccccgtttcgatcaatgaaattgaatttcattctaataatagtaatttagacatatatcaattaaactaatttggttttatgcaaaatatatttgtatattattattaacaagttgttgtagatatttatgtgctacatttgtattatggaggagtgagacgaagagtgtcatataaggtatagataacggcccgttatattatattccaacactttccctcacgttgagcctattttggatctctgacgtggaatagaaacgagcaacaattattttatttaattgtggtagccaagatttcgaactcgtgatctctgtctcagatatcatattaagttgcatgcaccaatcagttcaacttaaaacttaaggtgataatagaaggtggacaattcacttatattatattctaacaatcagatactcgtctgaaggcccacatggtgaaattttcaggtaatttttaatagaagaaaaaaaagaaaaaggaggggaatcgggtccgttcggcagtagttgttcagttaaccaccagcttgatgcggaaaaaaaagctataggatggaacaaaataaagcgcacacgnggatctgaagaaaaaaaaaacataaagaaatgagcacatcgacatgaaggggggtgtgagcgcgcggcacaaactgatgtgccgagatcgtgtttttgatacggtgcgcgcatgcagatggtctcctggccatcggnggtcccctggggagagcgatggttcattttcc

SEQ ID NO: 29976 - DNA, 4380 bp, Zea mays
  Clone ID: MRT4577_127350C.1
ctaaatcaccaaaatacttagaaatggcccaagggcacatttccctcccgtgtcgaggtcgagatgcccattggttcccatgggtgtcttgatgggcttggcatccttcatcccaaacttggtgagtatgtcttgaatgtactttgtttggctaatgaaggtgccctcttggagttgcttcacttgaaatcctagaaaatacttcaactcccccatcattgacatctcgaatttttgagtcatgatcctactaaactcttcacatgtagattcgttagtagacccaaatatgatatcatcaacataaatttggcatacaaacaaatcatttgcaagtgttttagtaaagagagtaggatcggcttttccgactttgaagccattagcgataagaaaatctattaggcatgcataccatgctcttggggcttgcttgagcccataaagcgccttagagagtttatatacgtgattaggatactcactatcttcaaagccaggaggtttctcaacatagacctcttccttgattggtccattgaggaaagcactcttcacgtccatttggtaaagcttgaagccatggtaagtagcataggcaagtaaaatgcgaattgattctagcctagctacggatgcataggtttcaccaaaatccaaaccttcgacttgtgagtatcccttggccacaagtcgggctttgttccttgtcaccacaccatgctcatcttgcttattgcggaagacccacttggttcctacaacattttgattaggatgtggaactaaatgccatacctcattccttgtgaaattgttgagctcctcttgcatcgccaccacccaatctgaatcttgaagtgcttcctctaccttgtgtggttgttcttcttcctcatcttgatcatgggcatctcccccttgatcattgctctcctcttgaggtggctcatcttcttgatcttctccttcatcatcttgagcctcatcctcatcttgagttggtggagatgcttgcatggaggaagatggttgatcttgtgcttgtggaggctcttcggattccttaggacacacatccccaatggacatgttccttagcgcgacgcacggagcctcttcatcatctagctcatcaagatcaacttgctctacttgagagccgttagtctcatcaaacacaatgtcacaagaaacttcaactagtccaaaggacttgttaaagactctatatgcccttgtgtttgaatcatatcctagtaaaaagctttctacagccttaggagcaaatttggattttctacctcttttaacaagaataaagcatttgctaccaaagactctaaaatatgaaacgtttggctttttatcggttaggagttcatatgatgtcttcttgaggatttggtgtagatataaccggttgatggcgtagcatgcggtgttgactgcctccgcccaaaaccgatccgaagtcttgtattcatcaagcatggtccttgccatgtccaatagagttctattcttcctctccactacaccattttgttgtggcgtgtagggagaagagaactcatgcttgatgccctcctcctcaaggaagccttctatttgtgagttcttgaactccgttccgttatcgcttctaatctttttgatccttaagccgaactcattttgagcccgtctcaagaatccctttaaggtttcttgggtatgagatttttccaagtatagctgaccctctaacactcccttaaatgctactgaatcatcacttcttctaaagacagtaacaccttgatttccatccccgaatgtgatagctcgttggggatcttggtttttctcataggaggagaacatcttcttctcccctgtcatatggtttgtgcacccgctgtcgatgatccaacttgagcccccggatgcataaacccaaacggttttgggtccttcgacattagatacaagaactttgggtacccaaacacaagtctttgaccccttgtgcttgcccccaacatacttggcaactactttgccggatttgttagtcaaaacataagatgcatcaaaagtcttaaatgaaatgttagaaccatttgatgcaataggaattttctttttaggtaattttgcacaggttgattgcctaaagctagatatctcacccttatacataaaagcatgattagggccagagtgagacttcctagagtgaattctcctaattttgtgtttgggataaacgacagggtataagatgtaaccctcgttatcctgaaccatggaagccttgcccttaacaaaatcggacaatcttttaggtggggcattaagcttgacattgtctccctgttggaagccaatgtcatccttaatgccagagcgtctcccactatagagcatgcttctagcaaatttaaatttttcattttctaagtcatgctcattgattttggcattaagttgagctatgtgatcattttgttgtttaattaaagctaggtgatcatgaatagcatcaacattaatatctctacatctagtgcaaatagtaacatgctcaatggaagatgtagagggtttgcaagtatttaattcaacaatcttagcatgtaaaatatcattttcatctctaagattggaaatagaagcgttgcaaacatctagttccttagccttaacaattaatttttcattttcaatcttaaggctaaaaagagaagcattcaatttgtcaatcttagcatttaaattggcattatcatttctaagattaacaattgaatcatcacaattatttgaatcaaccttagcatttaacctagcattctcatttctaaggttggcaattaaatcatggcaagtgcttagctcactagttaatttctcacatttttcaacttctagagcgtaagcatttttaaccttaacatgcttcttgttttccttaattagaaattcctcttggctatccaagagttcatccttatcatgaatagtgctaatcaattcatttaatttctctttttgttgcatgttaagattggcaaaaagagttaacaaatcatcctcatcatcactataattagcctcattgctagatgtcgcatatttagtggaggatttagatttaaccttcttctttttgccgtcctttgccatgagacacttgtggccgacgttggggaagagaagacccttggtgacggcgatgtttgcgacgtcctcatcggaggaggagtcggtggagctctcgtcggagtcccactcctggcaaacatgggcatcgccacccttcttcttgtagtacctcttcttctcctttcttctccccttcacacttgtagcaaactttcttggagcggggcttgtaatccttcccctcctttgcttgaggatttggcggaagctcttgatgatgagcgacatttcctcgttgtcgagcttggaggcgtcgatggggattctacttggagtagaatcttctttcttctcctccgttgctttgaatgcaacgggttgtgcttcgggggtggaggagtcgccttgctcgatgatctttttggagcctttgatcattagctcaaagctcacaaattttcctatgacctcctcatgagacattagcgtgtatctaggatcacctcgaattaattgaacttgcgtagggttaaggaaaacgagggatcttagaataaccttgaccatctcatggtcatcccatttggtgctcccgaggttgcgcacttggttcaccaaggtcttcaagcggttgtacatggcttgtgggtcctcgccttggttgagtcggaatcgaccgagctccccctcgatcgtctccctcttggtgatcttggtcacctcgtctccttcgtgcgcggtcttaagcacgtcccaaatgtccttggcgctctttaacccttgcaccttgttatactcctgtactccaatctcaacaacatcccaaatgctagtgtggagtgaggttagatgatgcctcattttatcactccacatattataatcttcatccccattaaaaaccggtggtttgcctaatgggacagaaagtaaaggagtatgtttagaaatgtgagggtagcgtagggggatcttactaaatttcttgcgctcatggcgcttagaagtgatggacggcgcgtcgaagccggatgtggatggcgacaaagagttggtctcgtagtagaccactttcttcatcttcttcttcttgtcaccgctccgacgcgacttgtcgtgtgaaagggatcccttcaccttgttggcggactccccggatggagccttcccatggcttgtggcgggcttctcaccggtcccgatctccctcttagcggatgctcccaacat

SEQ ID NO: 29977 - DNA, 412 bp, Zea mays
  Clone ID: MRT4577_127351C.1
atagtaaatcatagtaccactgctgccacagtcccgacctttgcaattgatgatgcggtattggtcgaacggaataatggccggtggctccactcagccagtgggaggacctagcagtcacaatttgcacctccacagtcgccaggagttgatgatgtaaatggacagccattgagtcatcggagagatgataccgctgacgtcttgaactcaaggcttgaagctttccatagacgaagcgaacctgtgagtgagtagtactccaagaacggcttactggtgaacctgcgtggatacacatgaccgaacgacgtgacagctgatgtggagaaagccctctcgtgacgaaatgtccactcctgatgttaaacatgacatctaccagtacccctttgattgggtttcttcaaaa

SEQ ID NO: 29978 - DNA, 533 bp, Zea mays
  Clone ID: MRT4577_127352C.1
accccgtcatctcctactgtctatgccatacgccggccgccgcgacgctccctaggctccgagtcactccgagctgggaaggaagagcccgcgttgctcactcgctcgctcgcatgcagctttcccacacggcgccacgcatgcaggagcccgggcgccggcccgtaccgccgttcgcgggcgtcgacctccgccgccccaggggctaccccgctccggcggcgaaggaggcggaggaggagccggccccagctccggcgccgggcggcgacccgtgcccgcggtgcgggtcgcgggacaccaagttctgctactacaacaactacaacacgtcgcagccgcgccacttctgcaagtcgtgccgccgctactggaccaagggcgggtccctccgtaacgtccccgtcgggggcggcacccgcaagagcggctcctcgtcctcggcaacggcaacgccaacctcgaccggcgccgcacccaagagcccgaggtcgtccaagaactccaagcgtcgccgcgtcggccccgccccg

SEQ ID NO: 29979 - DNA, 5478 bp, Zea mays
  Clone ID: MRT4577_127353C.1
atgtcgggagatcacgccaagaaggagatggagaccggcgaaaagcccactacaagccacgggagcacttcatcggaagagtcccgcaccaagaggaaggagaagaagaaggactcctccaaacggaaggggaaaaagtcttcctcttctcaccacaaagagaagaaggagaaatcttcttcccacaagccgcatcggaaaggcgacaagcacaagaggatgaggaaagtggtctactacgagaccgacacttcatcaacatcgacctccgactccgatgtgccctccgtcacttctaagcgccaagagcgcaagaagtatagtaagatccccctacactaccctcgcatttccaaacatacacctttactttccgtcccattaggcaaaccaccaacttttgatggtgaagattacgctaggtggagcgatttaatgcgatttcatctaatctcgctccacaaaagtatatgggatgttgttgagtttggtgcacaggtaccgtcggtaggggatgagaactatgatgaggatgaggtggcccaaatcgagcacttcaactctcaagcaacgacaatactcctcgcctctctaagtagagaggagtataacaaagtacaagggttgaagagcgctaaggagatttgggatgtgctcaaaaccgcgcacgaaggagatgagctcaccaagatcaccaagcgggaaacgatcgagggggagctcggtcggttccggcttcgcaaaggggaggagccacaacacatgtacaaccggctcaagactttggtgaaccaagtgcgcaacctcgggagcaagaagtgggatgaccacgaagtggtaaatgttattttaagatctctcatttttcttaatcccactcaagttcaattgattcgtggtaatcctagatatactaaaatgacccccgaggaagttatcgggcattttgtaagttttgagtgcatgatagaaggctcgaggaaaatcaacgagcttggcgacccatccgaagcccaacccgttgcattcaaggcaacggaggagaagaaggaggagtctacaccaagtagacaaccaatagacgcctccaagctcgacaatgaggaaatggcgctcgtcatcaagagcttccgccaaatcctcaagcaaaggagggggaaggactacaagtcccgctccaagaaggtttgctacaagtgtggtaagcccggtcattttattgctaaatgtcctatatctagtgacagtgaccgaggcgacgacaagaaggggagaagaaaggagaagaaaaggtactacaagaagaagggcggcgatgcccatgtttgtcgggaatgggattccgacgaaagctcaagcgactcctccgacgacgaggacgccgccaacatcgccgtcaccaagggactcctcttccccaacgtcggccacaagtgcctcatggcaaaggacggcaaaaagaagaaggttaaatccaactcctccactaaatatgaatcttctagtgatgataatgctagtgatgaggaggataatttgcgttccctttttgccaaccttaacatagctcaaaaagagaaattaaatgaattagttagtgctattcatgaaaaggatgaccttttggatgcccaagaggattgtctaattaaagaaaacaagaaacatgttaatgttaaaaatgcttatgctctagaagtagaaaaatgtcaaaaactatctagtgagctaagcacttgtcgtgagatgattgacaaccttagaaatgaaaatgctattttaaatgctaaggttgattcacatgtttgtaatgtttcaattcccaatcttagagatgataatgttgacttgcttgctaagattgatgaattgaatgtatctcttgctagccttagattagagaatgaagatttaattgctaaggctaaagattttgatgtttgcaaagttacaatttccgatcttagagataaaaatgatattcttcatgctaagattgttgagcttaattcttgcaaaccctctacctctattgttgagcatgtatctatttgtactagatgtagaaatattgatattaatgctattcatgatcatatggctttaattaaacaacaaaatgatcatatagcaaaactagatgctaaaattgccgagcacaacttggaaaatgaaaaatttaaatttgctcgtagcatgctttataatgggagacgcccgggcattaaggatggcattggcttccaaaggggagacaatgtcaaaattagtgcccctcctaagagattgtccaactttgttaagggcaaggctcccatgcctcaggataacgagggttacattttgtaccctgccggttatcctgagaacaaaattaggaaaattcattctaggaagtctcactctggccctaatcatgcttttatatataagggtgagacatctagctctaggcaaccaacccgcgccaagttgcctagaaagaaaactcctaatgcatcaaatgatcatgccatttcatttaaaacttttgatgcttcttatatgcttactaacaaatccggcaaagtagttgccaagtttgttgggggaaaacacaagggttccaagacttgtgtttgggtacccaaagttcttgtgtctaatgccaaaggacccaaaaccgtttgggtttatgcatccgggggctcaagttggatactcgacagcgagtgcacaaaccacttgaccggggagaaaaggatgttctcctcatatgagaaaaaccaagatccccaacgagctatcacattcggggatggaaatcaaggtgtcactgtctttagaagaagtgatgattcaatagcatttaagggagtgttagagggtcagctatacttggtagattttgatagagctgaactcgacacttgcttaattgctaagactaacatgggctggctctggcatcgccgactagcacatgttgggatgaagaatcttcacaagcttctaaagggagaacacattttaggattaacaaatgttcattttgagaaagacagggtttgtagcgcatgccaggcgggaaagcaggttggagctcatcatccacacaagaacataatgacgaccgacaggccactggagctcctacacatggatctattcggcccgatcgcttacataagcatcggcgggaaaaaatctcaaacccaagagaccttaaagggattcctgagacgggctcaaaatgagttcggcttaaggatcaagaaaataagaagcgacaacgggacagagttcaagaactctcaaattgaaggctttcttgaggaggagggcatcaagcatgagttctcttctccctacacgccacaacaaaatggtgtagtggagaggaagaataggactctattggacatggcaagaaccatgcttgatgagtacaagacttcggatcggttttgggccgaggcggtcaacaccgcttgctactccatcaaccggttatatcttcaccgaatcctcaagaaaacatcgtatgaactcctgaccggtaaaaagcccaacatttcatattttagagtctttggtagcaaatgctttatacttgttaaaagaggtagaaaatctaaatttgctcctaagactgtagaaggctttttacttggttatgactcaaacacaagggcatatagagtctttaacaagtcctcaggacttgttgaagtttcttgtgacgttgtgtttgacgaaactaacggctctcaagtagagcaagttgatcttgatgagataggtgaagaacaggctccatgcatagcgctaaggaacatgtccattggggatgtgtgtcctaaggaatccgaagagcctccaattgctcaagatcaaccatcctcctccatgcaagcatctccaccgactgaaaatgaggatgaagctcaagttgatgaagttgaagatcaagcaaatgagccacctcaagatgatagcaatgatcaagggggagatacaaatgaggaagacaaggaggatgaagagcaaaggccgccacacccaagagtccaccaagcaatccaacgagatcaccccgtcaacaccatcctcggcgacattcataagggggtaactactcgatctcgtgttgctcatttctgtgaacattactcgtttgtttcctctattgagccacacagggtagaggaagcacttcaagattcggattgggtggtggcgatgcaagaggaactcaacaacttcacgaggaatgaggtatggcatttagttccacgtcctaatcaaaatgttgtaggaaccaaatgggtcttccgcaacaagcaagacgagcatggtgtggtgacaaggaacaaagctcgacttgtggccaagggatactcccaagtcgaaggtttggatttcggtgaaacctatgcacccgtagctaggcttgagtcaattcgcatattattggcctatgctacttaccatggctttaagctttatcaaatggacgtaaaaagtgccttcctcaatggaccaatcaaggaagaggtctatgttgagcaacctcccggctttgaagacagtgagtatcctaaccatgtctataagctctctaaggcgctttatgggctcaagcaagccccaagagcatggtatgaatgccttagagatttccttattgctaatggcttcaaagtcggaaaggccgatcctactttgttcactaaaactcttaacaatgatttgtttgtatgccaaatttatgttgatgatatcatatttgggtctactaacgaatcaacttgtgaagaatttagtaggatcatgacacaaaaattcgagatgtctatgatgggggagttgaagtatttcttaggattccaagtaaagcaactccaagagggcaccttcatcagccaaacaaagtacactcaagacattctaaccaagtttgggatgaaggatgccaaacccatcaagacacccatgggaactaatgggcatctcgacctcgacacgggaggtaagtccgtagatcaaaagattattccggacaggagaagctttttggaaaaacaggccaagcgcggaccgtccgggctcttgcggcggaccgtccgcgacatggggatacccctcggacagaaccaatgcaaaaactcaagtttccactacagactgtccggaggaaaagcgaagaccgtccgagccctcgcgcggaccgtccggcctcaggcgcggaccgtccggtcgccgttgatctacaggggcggaccgtccggacctggctcgcggaccgtccgcgctcagcagaatggcccaacggctaggaagtggttggtggctataaatacaaccccaaccacctccattcacttcatccaagcattccaaccttcaacattcaatacaagagctagcaatccattccaagacacattcaaagcctccatctctccaagtttcacaattgagaaaagagatcattag

SEQ ID NO: 29980 - DNA, 696 bp, Zea mays
  Clone ID: MRT4577_127354C.1
atgtcgggaggatccgccaagagggaaatgaaaacggccacaagccacgggaaggctccatcaagggagtccgacgccaaaggaagggaggaatcacctccccgtgtcaagtcgcaccggagtgacgacaagaagaagaaaatgaagaaagtagtctactacgagactgattcttcgtcgccctccacctccggctccgacgcaccgtccgtcacttctaaacgccatgagcgcaagaagtttagtaagattcccctacgctatcctcgcatttctaaacacactcctttactttccgtcccattaggcaaaccgccggtttttgatggtgaagattattgtatgtggagtgataaaatgaggcatcacctaacctcactccatgctagcatatgggacattgttgagtttggagtgcaggtaccatccgtgggggacgaaggctacgactcggacgaggttgcccaaatccggcactttaactcgcaagccactactatagtcctcgcctctctatgtcgagaggagtataataaggtgcaaggattaaagagcaccaaagagatttgggacgtgctaaagaccacgcacgaaagggatgaggtgaccaagatcaccaagcgagagacgatcgagggggagctcggtcgattcatcctcaaccaaggagaggagccacaagcgatgtacaactga

SEQ ID NO: 29981 - DNA, 507 bp, Zea mays
  Clone ID: MRT4577_127355C.1
atggtgaccggcgagaagcccgccacaagccacgggaaggctccatcgggagagttcggcaacaaaagggaggaatcacctccccgcgtcaagtctcaccggagtggcgataagaagaagaaaatgaagaaagtggtctactacaagaccgattcttcgtcgccttccacctccggctccgacgcaccgtccatcacttctaagcgccatgagcgcaagaagtttagtaagatccccttacgctatcctcgtatttccaaacgcactcctttactttctgtcccactaggcaaaccaccggtttttaacggtgaagattattgtatgtggagtgataaaatgaggcaccatctaacctcactccacgctagcatttgggacattgttgagtttggtgcgcaagaaccatccgtgggggatgaaggctatgactcgaacgaagtagcccaaatccggcacttcaactcccaagccactactatactcctcacctctctaagtcgatag

SEQ ID NO: 29982 - DNA, 4752 bp, Zea mays
  Clone ID: MRT4577_127356C.1
tcatccaaacttctttagaatgtcttgaatatactttgtttggctaatgaaggtgccctcttggagttgcttcacttgaaatcccaagaagtacttcaactcccccatcatagacatctcgaatttctgtgtcatgatcctactaaattcctcacatgtagactcgttagtagacccaaatatgatatcatcaacataaatttgacatacaaacaaatcattgtcaagagttttagtaaataaagtaggatcggcctttccgactttgaagccattagctataaggaaatctcttaggcattcataccatgctcttggggcttgcttgagcccataaagcgccttagagagttcgtggttagggtactcactatcttcaaagccgggaggttgctcaacatagacctcttccttgattggtccattgaggaaggcactcttcacatccatttgataaagcttgaagccatggtaagtagcataggctaataatatacgaattgactcaagcctagctacgggtgcataggtttcaccgaaattcaaaccttcgacttgggagtatcccttggccacaagtcgggctttgttccttgtcaccacaccatgctcatcttgcttgttgcggaaaacccacttggttcctacaacattttgattaggacgtggaaccaaatgccatacctcgttcctagtgaagttgttgagctcctcttgcatcgccaccacccaatccgaatcttgtagtgcttcctctaccctgtgtggctcaatagaggaaacaaaagagtaatgctcacaaaaatgtgcaacatgagatctagtggttacccccttatggatgtcgccgaggatggtgtcgacggggtgatctcgttggattgcttggtggactcttgggtgtggcggccttggttcttcatcctccttgtcttgatcatttacatctcccccttgatcattgccgtcatcttgaggtggctcaactctttgatcttctccttcatcaacttgagcctcatcctcattttgagttggtggagatgcttgcgtggaggaggatggttgatcttgtgcatttggaggctcttcggattccttaggacacacatccccaatggacatgttccttagcgcgatgcatggagcctcttcattacctatctcatcaagatcaacttgctctacttgagagccgttagtctcatcaaacacaacgtcacaagaaacttcaacttgtccagagaacttgttaaagactctatatgcccttgtgtttgaatcatatcctagtaaaaagccttctacaatcttaggagcaaatttagactttctacctcttttaacaagaataaagcatttgctaccaaagactctaaaatatgaaatatttggctttttaccggttaggagttcgtatgatgtcttcttgaggattcggtgtagatacaaccggttgatggtgtaacaggcggtgttgaccgcctcggcccaaaaccgatccgaagtcttgtactcatcaagcatggtccttgccatgtccaatagagttctattcttcctctccactacaccattttgttgtggcgtgtagggagaagagaactcatgcttgatgccttcctcctcaaggaagccttcaacttgagagttcttgaactctgtcccgttgtcgcttctaattttcttgatccttaagccgaactcattttgagcccgtctcaagaatccctttaaggtttcttgggtatgagatttttcctgcaaaaagaatacccaagtgaagcgagaatagtcatccacaataactagacagtacttactcccgccgatgcttctgtaagctatcgggccgaataggtccatgtgtaggagttccagtggcctgtcagtcgtcatgatgttcttgtgtggatgatgagcaccaacttgcttccctgcttggcatgcgctacaaatcctgtctttctcaaaatgaacatttgttaatcctaaaatgtgttctccctttagaagcttatgaagattcttcatcccaacatgggctagtcggcggtgccatagccaacccatgttagtcttagcaattaagcaagtgtcgggttcagctctatcaaaatctaccaagtatagctgaccctctaacactcccttaaatgctattgaatcatcacttcttctaaagacagtgacaccttggtttccatccccgaatgtgatagctcgttggggatcctggtttttctcgtaggaggagaacattttcttctcccctgtcatgtggtttgtgcacccgctatcaatgatccaacttgagcccccggatgcataaaccttgacggatttgttagttaacacataagatgcatcaaaagttttaaatgaaatgctatgttcatttgatgcactaggagttttcttcttaggcaacttagcatgggttggttgcctagaactagatgcctcacccttatacataaaagcatggttagggccagagtaagacttcctagaatgaattctcctaattttgctctcgggataaccggcagggtataaaatgtaaccctcgttatcctgaggcatgggagccttgcccttaacaaagttagataatcttttaggaggggcattaagtttgacattgtcccccttttggaagccaatgccatccttgatgcccaggcgtctcccactatagagcatgcttctagcaaatttaaatttttcattttctaagtcatgctcattaattttagcattaagttgagctatgtgatcattttgtttcttaattaaagctaggtgatcatggatagcatcaacattaatgtctctacatttagtgcaaatggcagtatgctcaacggtagatgtatagggtttgcaagattttaattctacaaccttagcatgcaatatatcatttttacttctaaggtcggaaatggaagcattgcaaacatcaaaatctttagccttagcaattaatttttcattttcatttctaaggctagtaagagacatgttcaattcttcaatcttagcaagcaaatcatcattatcattcctaagattgggaattgaaacatcacaaacatttgaatcaaccttagctaacaaattagcattctcattcctaaggttgtctatagtctcatggcaagtgcttagctcactagatagtttttcacatttttctacttctagagcataagcatttttaaccttaacatgctttttgttttctttaataaggaagtcctcttgggtgtccaagagatcatccttctcatgaatagcactaatcaattcatttaatttttctttttgttgcatgtttaagttggcaaaaagaatgcgcaagttatcctcctcattactagcattatcctcatcactagaggtttcatatttggtggatgatcttgattttaccttcttccttttgccgtcctttgccatgaggcacttgtggccgatgttggggaagagaagtcccttggtgacggcgatgtttgcggcgtcctcatcggaggaggagtcggtggagctctcatcggagtcccattcccggcaaacatgggcatcgccacccttcttcttgtagtacttcttcatctcctttcttctccccttcttgtcgtcgcccctatcactgtcactagaaataggacattttgctataaagtgatcgggcttaccacacttgtagcaaactttcttggagcagggcttgtaatctttccctttcctttgcttgaggatttggcggaagctcttgataatgatcgccatctcctcgttgtcgagcttggaggcgtcgatgggtgttcgacttggagtagattcctccttcttttcttccgtcgccttgaatgcgaccggttgtgcttcggatgtggaggggccatcaagctcgttgatcttctttgagcctttgatcatcatttcaaagctcacaaaattcccgattacttcctcgggagtcattagtgtatatctaggattgccacgaattaattgaacttgagtagggttaagaaaaacaagtgatcttagaataaccttaaccatttcgtggtcatcccattttttgctcccgaggttgcgcacttggttcaccaaggttttgagccggttatacatgtcttgtggctcctccccttggcgaagtcggaagcgaccgagctcccccttgatcgtttcccgcttggtgattttggtcacctcgtctccttcatgcgcggtctttagtgtgtcccaaatctccttggcacctttcaacccttgcaccttattatactctctcgactgtacaccaaactcaacaacatcccatatacttttgtggagtgaggttggatgaaatcgcatcaaatcactccacctagcataatcttcaccatcaaatgttggtggtttgcctaatgggacggaaagtaaaggcgtatgtttaggaatgcgaggatagcgtaaggggatcttactaaacttcttgcgctcatggcgcttagaagtaatggatggcgcgtcggagccggaggtggaaggtgatgaagtatcggtctcgtagtagaccaccttcctcatcttctttttcttgtcgccactccgatgcgacttgtgggaagaggatttcttctccttcccctttcccttgttgcgggactcttccgatgaagctttcccgtggcttgtagtgggcttgtcgcctgtctccatctccttcttggcgtgatctcccgacat

SEQ ID NO: 29983 - DNA, 445 bp, Zea mays
  Clone ID: MRT4577_127357C.1
ctcacgcccattgactagagcatattcagttcgtactgaaccaaaaagacactgggggctggagtcatgtaaggcttggtctgcagcttcctcgtattatgctgtatcacaatcaacactagcgccttctcaccttctggatggaccaatgcccatgccactttttatggacgtagcgatgcctaagggaccatgggaggagcttgtgggtatggaaatctgtattcgacagggtacggaactgatacagcggcattaagtactgccatatttaacgatggagcttcatgtgatgagtgttacaaaatcatatgcgattatcaaacagatcccagatggtgcttgaaaggagcatcagtaaccataactgccacaaactattgccctcccaattttgctattcccaacaacaactgatgatggtgcaacccacctgtcaaacatt

SEQ ID NO: 29984 - DNA, 582 bp, Zea mays
  Clone ID: MRT4577_127358C.1
ttttttttttttttttttttttttttttttttttttttttttttttttttttttttttttttttttttttttttttttttttttttttttttttttttaccggggaagaaaaacccccttaggatgggggcccctttccccggaaaaggcccccccacccctttaaaaaacccccggttttcccccccaaaaaaacccggagggggaccatcacaaaacggcgccagaatcttttttgaaaaccccccaaacccccgggcccacaaaaaccccaaaatggggccaaaagggagcggaaattaaccccttcccaaacttccaaaaaagggggggggccggacaaaaccgggggagaacaaaaggggtccttgcaaccccctaaaagaaaacacttcccgccgggggaaaagcccgggtttcctttgaccccggtttcccggggaccggggaaaaaaaaggaagtctttccccccgcgggggggggattttgggccccacggctcccgttttagaaaaccgcataagcaaaaagggacacccccccgtttaaagccccccaagagaagggaagggggcctttac

SEQ ID NO: 29985 - DNA, 223 bp, Zea mays
  Clone ID: MRT4577_127359C.1
attcggctcgaggagcagcaaagactatgtttttccgttcgtgtctggccgagaacacggaacacactttgcggaatctgaccccaatgatcctaaccagtagaagatggcagctgggtctgacctgaaaagtacgcatggagttcttcacctcaaccaggaagctgaagcgatactacacatagtgcagcacgactgcccatacaccccacttaaaaggcta

SEQ ID NO: 29986 - DNA, 194 bp, Zea mays
  Clone ID: MRT4577_12735C.1
accacaacgactcaacggactatgtgttcatattgattcggacgatttttaccaaaacgattctcatagagtttgggagtttagctgccagaagccgattccccgatggccagaatccaattctaagccgaaacaaacaccccgtcatcggcctgaatcggaaaacattttaaccaacatcatctaggctccct

SEQ ID NO: 29987 - DNA, 515 bp, Zea mays
  Clone ID: MRT4577_127360C.1
gcgtgaatggataatatattattgttatagaaaagcagaagcaagatcgaggcgagtccgtacaatcataatgtatcaacactacgacataaatgtatgattgttctacacactcctagacactagcctacgtcaggggatgtaactctggtcgacggaggcagtagcagcggcgcatcatgtcttgatagctccgggtaactgaagtggctacatttcttggtaggtcaggctcagcaacctcagctcgggccacggtttccttcagtactggtcgggccagaggaaggcgcccatggcgaactttcgcttgctggctagttcggcgacgacggggaggcctgactaccagagcatgcatggatactcgccactccggcatgctatcgtagtaacgcttcttgtaccgtgggtagcgcagcggcatgtggaaggtgtagctactgcaggtcatcgtcctggggccctctactttctgctgatcggcgacagcaacagcgccattattagcacca

SEQ ID NO: 29988 - DNA, 883 bp, Zea mays
  Clone ID: MRT4577_127361C.1
tttgtatatattctacacgggcgtcgtcgtatggagaagggcagtggtggcgggaatcgggcgccgccaccgattcacatggaggacttccatctggaggggaagaagcccgtcaagaacccctttgtgcccattgtcgcactacggtcagggctggccggggtgaacccgaagtgccggcaccgccgctgttgcagtggcagaagttgcctctccttttcgtcttgtttctcctccaccccggcgacgcgaatggagaagggcagtggaggcagcaatcctccgccgccaccgctccacatggaggacttccaactggaggggaagaagcccgtcaagaacccctttgtgcccatcggcgcactggttactgctggagttctgactgctggtctgatcagtttccgatatgggaactctcagctgggtcagaaactgatgagggcacgtgtagttgctcaaggcgctacagtcgctctgatgattggcagtgcttactactatggcgatcaaatcaagctgttcaagaaagggtcgagcccatgatcttcccatgaatattgctgtttttggtgtatggaggaatgccttgtatacgcataaatttcacctggactctgctgcccctttttaacatcattttggcctgacacgtggtagctaacaagaaatcgctgttggtccgatcggcaggattgaaaataaataattttgtttgttgatttttgtcaggatttgttggttgattaattaggctatatgcatcaattgttatatctttgtacaaacacgcgttctgttgtctgcaatcagcggctgaagtgaccatttcgcaattctggctaaaaaaaaaaaaaaaaaaaaaaaaaaaaaaaaaaactcg

SEQ ID NO: 29989 - DNA, 190 bp, Zea mays
  Clone ID: MRT4577_127362C.1
acgggttgttctgttccaggttcaaaggccaggtgacataaaggggtgcctggcaagatccaatggcgccacagggattgggaaccggtgccgtctacacccatgtgggccacctcgatcgtttggccaccatattacctatgtcatatgattgcaaaaggggcagttacatgaggtaaagtgccagaac

SEQ ID NO: 29990 - DNA, 220 bp, Zea mays
  Clone ID: MRT4577_127363C.1
ctttcctacattccgttcttgcaaccatgtccacgtgcctcccggctccaggccgaccagtcctgacggaaccctgcctctatctactacatgctccactgccccagttcgagctgctcccatggcgccgttagccggatctccctggacgcgtgcccctgagcccggtcggcctaactgcaaatcggtgttgtctacctccatctatctcaagcgctag

SEQ ID NO: 29991 - DNA, 369 bp, Zea mays
  Clone ID: MRT4577_127364C.1
gtggaagaaaaggtaaggcatcaagacctttttaaacaaaaacccttggtggtccaacaaacacacaaccaaccaattttggctcagttccggggaatcccaaatcactacggtattacacggggggacattaccactgacccactacacaagggaaaagctccatccgttgctctgatctccgccgggggcttaggacccgaaccttaaaagctccatccggtggtctactttccgccggtcgctaaggacccgaaccatccgccgccggaggcgaaatcgggggccgggtgggggtaccccccccacccgggggcggggcaggaagccacccacggttttgggggggggcccgcccccccctgttgg

SEQ ID NO: 29992 - DNA, 267 bp, Zea mays
  Clone ID: MRT4577_127365C.1
gcggcctttttttttttttttgggagcttataaaaaaaaatccaactgaaactgattggcgcattaaagcaaaataagtctggacctgggaccttagacatgaattggaaccaaaggtgcgcgcggcattgctactgggcacacaaagcactagtgtggggattgatcaaacagggggggggattgtccaaacacgggcctttttcgtacccaattgcaaggactgaacgcaagttttttctaaattttggggaaggcaactcttag

SEQ ID NO: 29993 - DNA, 356 bp, Zea mays
  unsure (1)..(356): unsure at all n locations
  Clone ID: MRT4577_127366C.1
cccacgcgttcgtacggctgcgagaagacgacagaagggctattttgttgtgcaaaactacaacgtnctttagtttagtancttttgatactttcatttccattttttctttngtgttacnaagtttcactgtctttgtgttttcgccagttggccggtcangatagcnaagatcgctcggatgaaattagcgaccttatctttacttagctcttattttaataaagatagtaaaggggactattaacctattacatgactatattatgtgttgattgtataaaggtgtaacatttacagggacgtgatggagtaaaacaaaggaagattgatttgctgtgcagtctgtgtgcaat

SEQ ID NO: 29994 - DNA, 4215 bp, Zea mays
  Clone ID: MRT4577_127367C.1
atgtcgggagatcacgccaagaaggagatggagaccggcgacaagcctactacaagccacgggaaagcttcatcggaagagtcccgcaacaaggggaagggaaaggagaagaaatcctcttcccacaagtcgcatcggagtggcgacaagaaaaagaagatgaggaaggtggtctactacgagaccgatacttcatcaccttccacctccggctccgatgcgccatccattacttctaagcgccatgagcggaagaagtttagtaagatccccctacgctatcctcgcattcataaacatacgcctttactttccgtcccattaggcaaaccaccaacgtttgatggtgaagattatgctaggtggagtgatttgatgcgatttcatctaacctcactccacaaaagtatatgtgatgttgttgagtttggtgtacaggtaccaaccgtaggggatgaagattatgatgaggacgaagtggcccaaatccaacacttcaactcccaagcctcaactatactcctcgcctctctaagtcgagaggagtataataaggtgcaagggttgaaaggtgctaaagaaatttgggacacgctaaaaaccgcgcacgaaggagacgaggtgaccaaaatcaccaagcgggaaacgatcgagggggagctcggtcgcttccgacttcgccaaggggaggagccacaagacatgtacaaccggctcaaaaccttggtgaaccaagtgcgcaacctcgggagcaaaaaatgggatgaccacgaaatggttaaggttattttaagatcacttgttttccttaaccctactcaagttcaattaattcgtggcaatcttagatatacactaatgactcccgaggaagtaatcgggaattttgtgagctttgaattgatgatcaaaggctcaaagaagatcaacgagcttgacgacccctccacgtccgaagcacaaccagtcgcattcaaggcgacggaagaaaagaaggagggcgacgacaagaaagggagaagaaaggagaagaagagatactataagaagaagggcggtgatgcccatgtttgccgggagtgggactccgacgagagctccactgactcctcctccgacgaggacgccacaaacatcgccgtcaccaagggtcttctcttccccaacgtcggccacaagtgcctcatggcaaaggacggcaaaacgaagaaggttaaatccaaatcctccactaaatatgagttctctagtgatgataatgctagtgatgaggaggataatttgcgtaccctttttgccaacctaaacatgcaacaaaaagaaaagttaaatgaattaattagtgccatccatgagaaggatgacctcttggacacccaagaggacttcctaatcaaggaaaacaaaaagcatgttaaggttaaaaatgcttatgctctagaagttgaaaaatgtgagagattaactagtgagctaagcacatgccatgatgttatcaacaaccttagaaatgaaaatgctagtttaattgctaaggttgattcaaatgcttgtaatgtttcaattcccaatcttaaagatgataatgttgatttgcttgctaagattgaagaagtgaacatttctcttgctagccttaggaatgaaaatgaaaaattgcttgctaaggctaaagaattagatgtttgcaatgttacaatttccgatcttagagataaaaatgatatattgcgtgctaagattgttgaacttaattcttgcaaaccctctacatctaccactgagcatgtcactatttgcactagatgtagagatgttgatgttaatgttatacatgatcacctttccatgattaaacaacaaaatgatcatatagctaaattagatgcaaaaattgccgagcatgaactagaaaatgaaaaatttaagtttgctcgtagtatgctttataatgggagacgccctggcatcaaggatggcattagcttccaacagggaggcaatggcaaggctcccatgcctcaggataacgagggttacattttataccctgccggttatcccgagagcaaaattaggagaattcattctaggaagtctcactctggccctaaccttgcttttatgtataagggtgaggcatctagttctaggcaaccaacccgtgctaagttgcctaagaagaaaactcctagtgcatcaaatgatcataacatttcatttaaaacttttgatgcatcttatgttttaactaacaaatccggcaaggtttatgcatccggaggctcaagttggatcatcgatagcgggtgcacaaaccacatgacaggggagaggaagatgttctcctcctatgagaaaaaccaagatccccaaagagtgatcacattcagggatggaaaccagggtttggttaaaggattgggtgtcactgtctttagaagaagtgatgattcaatagcatttaagggagtgttagagggtcagctatacttggaaaaatctcatacccaagagaccttaaaaggattcttgagacgggctcaaaatgagttcggcttaaggatcaagaaaattagaagcgacaacgggacagagttcaagaactctcaaattgaaggcttccttgaggaggaggacatcaatcatgagttctcttctccctacaccccacaacaaaatggtgtagtggagaggaagaatagaactctactggacatggcaagaaccatgcttgatgaatacaagactttggatcgattttgggccgaggcagtcaacaccgcctgctacgccatcaaccggttgtatctacaccgaatcctcaagaagacatcatatgaactcctaaccggtaaaaagcccaatatttcatattttagagtctttggtagcaaatgctttattcttgttaaaaaaagtagaaaatctaaatttgctcctaagactgtagaaggctttttactaggatatgattcaaacacaagggcatatagagtctttaacaagtccactggacaagttgaagtttcttgtgacgttgtgtttgatgagactaacggctctcaagtagagcaagttgatcttgatgagataggtgatgaagaggctccgtgcatcgcgctaagaaacatgtccattggggatgtgtgtcctaaggaatacgaagagcctccaaatgcacaagatcaaccatcctcctccatgcaagcatctccaccaactcaaaatgaggatgaggctcaaattgatgaaggagaagatcaacaagatgagccacctcaagatgacggcaatgatcaagggggagatgcaaatgatcaagacaaggaggatgaagaaccaaagccgccacacccaagagtccaccaagcaatccaacgagatcaccccgtagacaccatcctcggcgacattcataagggggagctcaacaacttcactaggaacgaggtatggcatttggttccatgtcctaatcaaaatgttgtaggaaccaagtgggtgttccgcaacaagcaagacgagcatggtgtggtgacaaggaacaaagcccgacttgtggccaagggatactcccaagtcgaaggtttggattttggtgaaacctatgcacccgtagctaggcttgagtcaattcgtatattattagcctatgctacttaccatggcttcaagctttaccaaatggacgttaagagtgccttcctcaatggaccgatcaaggaagaggtctatgttgagcaacctcctggctttgaagatagtgagtaccctaaccatgtttataaactctctaaggcgctttatgggctcaagcaagccccaagagcatggtatgaatgccttagagatttccttatcactaatggattcaaagtcggaaaggccgatcctacactctttaccaaaacacttgaaaatgatttgttttttagtaggatcatgacacaaaaattcgagatgtcaatgatgggggagttgaagtatttcttaggatttcaagtgaagcaactccaagagggcaccttcattagccaaactaagtatactcaagacattctaagcaagtttgggatgaaggatgccaagcccatcaagacacccatgggaaccaatgggcatctcgacctcgacacggaagggggagaaagtagcaccttcaaaaattggtatcttaaaaccctcttgaacactaagaggagaatttattga

SEQ ID NO: 29995 - DNA, 2031 bp, Zea mays
  Clone ID: MRT4577_127368C.1
atgacgaccgacaggccactggagctcctacacatggacctattcggcccgatcgcttacataagcatcggcgggagtaagtactgtctagttattgtggatgattattctcgcttcacttgggtattctttttgaaggaaaaatctcaaacccaagaaaccttaaagggattcttgagacgggctcaaaatgagttcgccttaaggatcaagaaaattagaagcgacaacgggacggagttcaagaactcacaaattgaaggcttccttgaagaggagggcatcaagcatgagttctcttctccctaccccccacaacaaaatggtgtagtggagaggaagaatagaactctattggacatggctagaaccatgcttgatgagtacaagacttcagatcggttttgggccgaggcgatcaacaccgcctgctacgccatcaaccgagatagaaaatctaaatttgctcctaagacagtagaaggctttttactaggatatgactcaaacacaagggcatatagggtctttaacaagtcctctggacaagttgaagtttcttgtgacgttgtgtttgatgagactaacggctctcaagtagagcaagttgatcttgatgagttaggtgatgaagaggctccgtgcatcgcgctaaggaacatgtccattggggatgtgtgtcctaaagaatccgaagagcctccaaatgcacaagatcaaccatcctcctccacgcaagcatctccaccaactcaaaatgaggatgaagctcaaattgatgaagaagaagatcacgcaaatgagccacctcaagatgacggcaatgatcaagggggagatgcaagtgatcaagacaaggaggatgaagaacaaaggccgccacacccaagagtccaccaagcaatccaacgagatcaccccgtcgacaccatcctcggcgacattcataagggggtaaccactagatctcgtgttgcacatttttgtgaacattactcttttgtttcctctattgagcctcacagggtagaggaagcactccaagattcggattgggtggtggcgatgcaagaggagctcaacaacttcactaggaatgaggtatggcatttagttccacgtcctaatcaaaatgttgtaggaaccaaatgggtcttccgcaacaagcaagatgagcatggtgtggtgacaaggaacaaagctcgacttgtggccaagggatactcccaagtcgaaggtttggatttcggtgaaacctatgcacccgtagctaggcttgagtcaattcaaatattattagcctatgctacttaccatggctttaagctttaccaaatggacgtgaaaagtgccttcctcaatggaccaatcaaggaagaggtctatgttgagcaacctcccggctttgaagatagtgagtaccctaaccatgtgtataaactctctaaggcgctttatgggctcaagcaagccccaagagcatggtatgaatgccttagagattttcttatcactaatggattcaaagttggaaaggccgatcctacactcttcactaagactcttgaaaatgacttgtttgtatgccaaatttatgttgatgatattatatttgggtctactaacgagtctacatgtgaagaatttagtaggatcatgacacaaaaattcgagatgtctatgatgggggagttgaaatatttcttaggatttcaagtgaagcaacttcaagagggcaccttcctaagccaaacgaagtatactcaagatattctaagcaagtttggaatgaaggatgccaaacccatcaagacacccatgggaaccaatgggcatctcgacctcgacgaaggaggtaaatccgtcgatcaaaagaaagagcacatcggggacttgccagttcttgggaagatccttggtgtcttgggcttcaaagaagcaaaattccgtagctctttctaccgccgaagccgagtacattgccgcaggacattgttgcgcgcaactactttggatgaggcaaacccttag

SEQ ID NO: 29996 - DNA, 452 bp, Zea mays
  Clone ID: MRT4577_127369C.1
ctaggaattaatcaccagcttccaaaatcctattgcccaaatattatatgtcccttacaactggtacattaaagaacttgattagcatgtaccccctgtggagatgtgccactccccgactacacgacccataactgtggaaactagacataccctatgtgggtagaccactcatagccaggccatcccatgcattactcacgaacgtagctcaccgagtattaatactccatgcctcagaatgcgggtaagacgtacacctccctgagcacttgagggtaacgaatcccaccaacttttctttaccacatacgcgatccaaattaccacttcctcctatatcatccttcgataaatccgactttttacttaacactgaccagaagccgatataaaaaaccaccagccccaaaagagctaaaacgcctatgttcatcattgaaagaattcaa

SEQ ID NO: 29997 - DNA, 327 bp, Zea mays
  Clone ID: MRT4577_12736C.1
ccgaaacctggtgcacgcacacagcatgctggccatctgggcgtgccaggtggtgctcatgggctgagccgagggctaccgggtccgacgctgctcgctcgattaagggctcgaccaggtatacaccggacgcgccttagagccgttgtgccgagactgcgacccggacaccggcggcgagctcaaggtgaaagagctcaagaacggccgccatgtcatgtaattcatgatcggcatgttcacacacgccattgagagctacaaggaccatatcgagaacctctccgaacacgtcgcctacccagtatcctacaacgcctgggcata

SEQ ID NO: 29998 - DNA, 2569 bp, Zea mays
  Clone ID: MRT4577_127370C.1
tcaatcaaagttacgagaatcgaggatattgagttcattcctaagcttgctaaaagtcttttcacccaggagcttagttaagatatcagctatttggttgtgggtgctaacataggcaatttcgatatcccccttttgctggtgatctctcagaaagtgatgtcggatgtctatgtgcttagtgcgactgtgttcaacgggattatctgccatgtggattgcactctcattatcacataggagagggacgttgctcaacttatagccatagtccctaagggtttgcctcatcttttgatctacagatttacctcttgtgtcgaggtcgagatgcccatttgttcccataggagtcttgatgggtttgacattcttcattccaaacttcttgagtatatctcgattgtacttagtttgacagatgaagatgccctcttggagttgattgatttggaatccaagaaaatacttcaaatcccccatcatagacatctcgaatttatcttcaaagccggaaggttgctcaacatatacctctcccttgataggaccattgaggaaggcacttttcacgtccatttgatataacttaaagccatggtaagtagcataggcaagtaatatacgaattgactcaagcctagctacaagtgtgtaggtttcatcaaaattcaaaccttcgacttgtgaataaccattggcaacaagtcgggctttgttcctagtcaccacaccatgctcatcttgtttgttgcggaatacccacttggtaccaagaatagagttgatgaggtgatctctttgaatttcttggtggactcttgggtgtggtggtctttgatcctgaatttcttgatcatcttccttatcttgattatcttcatctcccccttgatcaatgtccttctcttgaggtggctcatcgtcttcatcatcttcttcttgagctatttcctgcaaccacttcctagtcgttgctccttttatgccgaccgcggacggtctgcgcccctggtccagacggtcggcccaagtctctgatgtgctcttcctatcaattttacatctggtataatcggcatcagaatacccaattatatcaaaggtagatcccttggggtaccatggcccaaacttaggagtgtaaactaaatatctcatgattcttttcacggccctaaagtgaacttccttaggatttgcctggaaccttttgatctacagatttacctcttgtgtcaaggtcgagatgcccatttgttcccataggagtcttgatgggtttgacattcttcattccaaacttcttgagtatatctcgattgtacttagtttggcatgctcttggggcttgattgagcccataaagcgcctttgagagcttatagacatggttagggtactcactatcttcaaagccgggaggttgctcaacatagacctcttccttgatagggccattgaggaaggcacaattcacatccatttgataaagctcattcctcgtgaagttgttgatctcctcttgcatagccaccacccaatctgtatctcttagtgcatcctccactctgtatggctcaatagaggacacaaaagagtaatgttcacaaaaatgttcagcttgagatctagtggttacccccttgtgaatgtcaccaagaatggagttgacggggtgatctctttgaattgcttggtggactcttgggtgtggcggtctttgatcccgaatctcttgatcatcttcatctcccccttgatcaatgtcctcctcttgaggtggctcatcgtcttgatcttcatcttcttcttcttcttgagcctgatcctcatcttgagttggtggagatgcttgtatggaagatggtggttgatcttgtgcttgtgtaggctcttcggattcctttggacacacatccccaatggacatgttccttagtgcgatgcatggagcctcttcatcatctagttcattaagatcaacttgctccacttgggagccattagtctcatcaaacacaatgtcacaagaaacttcaactaatccaatggatttgttgaagactctatatgcccttgtgtttgagtcataaccaagtaaaaagccttctacaactttaggagcaaatttagaacttctacctcttttaataagaataaagcatttgctcccaaaaactataaaatatgaaacattgggatttttaccagtgatgagttcataagatgtcttcttgaggattcggtgaagatataaccggttgatggagtagcaggcggtgttaatcgcctcagcccaaaaccggtcatgtgtcttgtactcatcaagcatggttcttgccatgtccaatagatttctattcttcctctccactccacaattttgttgaggtgtgtagggagaagaaaactcatgcttgatgccctcctcctcaagaaatccttcaatttgtgaattcttgaactctgtcccattgtcgcttctaatctttttgattctcattccgaactcattttgagcttgtcttaagaatctctttagagtctcttggttttgagatttttc

SEQ ID NO: 29999 - DNA, 804 bp, Zea mays
  unsure (1)..(804): unsure at all n locations
  Clone ID: MRT4577_127371C.1
tggtcgggatcataggaattttgattatattgacataccaaatactgaaagtgttgttactgaggtggagagggtgttggccaatccaaatatgcctgaaatcgagaaggcaaggaaactgctgaaagatcaggagcagtcattacttgatgcaattgccagacttgatgaagcatctgatagcgatagtggtaactgtggtcagctaccaccaggcagggaccagcaagctgctagtacgtgtgcgtgcgcccgttgtctggcaaagcaaaatctacacgactgcactaggcaccggaataaactgatgctctgatggagctaagccaagtccaaagcatccaaaattcaatcgacgggaatagcttgatccggaaggtaaatcctggttgtacgagtccgtgccttgtgcccaatctaacatcgaccgtcgccctgaatgccctaattgaacataggattttcgaaagggtatcattgaaacaattcaaagttctattggagcatgtcggtggccatgccagatcattaagggggtgtttgcaaacaaagtttttctacagtattgaagtaatactgtagtattgagcaatactgtggtattatatactttgaggtgtttggcaactcatctgaaatctctgtatactaaactatagtattgtaaatactgcacttgttttgcagttttggaaactttggtctcagccaaagtttttctctgtnaagagagcgccagctaggtcccgctctgtcttaaactaagtttttccccaacacttgngcctgttttgggatgcagtt

SEQ ID NO: 30000 - DNA, 2869 bp, Zea mays
  Clone ID: MRT4577_127372C.1
atgtcgggagatcacgccaagaaggagatggagaccggcgaaaagcccactacaagccaagggagcacttcatcggaagagtcccgcaccaagaggaaggagaagaagaagatctcctccaacaaagggaaggagaagaaatcttcttctcaccacaaagagaagaaggaaaaatcttcttcccacaagccgcgtcggagtggggacaagcaaaagaggatgaggaaagtggtctactacgagaccgacacctcatcaacatcgacctccggctccgatgcgccctccgtaacttctaaacgccaagagcgtaagaagtttagtaagattcccctacactactctcgcatttccaaacatgcacctctactttccgtcccattaggcaaaccaccaacctttgatggtgaagattatgctaggtggagtgatttaatgcgttttcatctaacctcactccacaaaagtatatgggatgttgttgagtttggtgcacaggtaccatccgtaggggacaaagattatgatgaggatgaggtggcccaaatcgagcacttcaactctcaagcgacaacaatactcctcgcctctttaagtagagaggagtataacaaagttcaagggttgaagaacgccaaagaagtttgggatgtgctcaaaaccgcgcacgaaggagacgagctcacaaagatcaccaagcgggaaacgatcgagggggagctcggtcggtttcggcttcgcaaaggggaggagccacaacacatgtacaaccggctcaagaccttggtgaaccaagtgcgcaacctcgggagcgtaaagtgggacgaccacgaaatggttaaggttattctaagatctctcattttccttaaccccactcaagttcaattaattcgtggtaatcctagatatactaaaatgacccccgaggaagttatcgggaattttgtaagttttgagtgcatgatcgaaggctcgagaaagatcaacgagcttgacgaacccaccacatccgaagctcaacccgtcgcactcaaggcgacggaggaaaagaaggaggaggctacaccaagtcgacaaccaatagacgcctccaaactcgacaatgaggaaatggtgctcgtcatcaagagcttccgccaaatcctcaagcaaaggagggggaaagactacaagtcccgctccaaaaaggtttgctacaagtgtggtaagcccggtcattttattgctaaatgtcctatatctagtgacagtgaccgaggtgacgacaagaaggggagaagaagggaaaagaagaggtactacaagaagaagggcgacgatgcccatgtttgtcgggagtgggattccgacgaaagctcaagcgactcctccgacgacgaggacgccgccaacatcgccgtcaccaagggacttctcttccccaacgtcggccacaagtgcctcatggcaaaggacgacaagcggaagaaggttaaatctaactcctccactaaatatgagtcttctagtgatgataatgctagtgatgaggaggataatttgcgttccctttttgccaaccttaacatagctcaaaaggagaaattaaatgaattggttagtgctattcatgaaaaagatgacctcttggattcccaagaggacctccttattaaggagaataagaagcatgttaaggttaaaaaggcttatgctcttgaaattgagaaatgtgaaaagttatctagtgagctaagcacttgccgtgagatgattgacaaccttaaacatgaaaatgctagtttaaatgctaaggttgatttacatgtttgtaatgtttcaattcccaatcctagagataataatgatgatttgcttgctaggattgaagaattaaacatttctcttgctagtcttagagtagaaaatgaaagtttaattgctaaggctaaagaacttgatgtttgcaatactacaatttccgatcttagagataaaaatgatattcttcatgctaagatcgttgaacttaattcttgcaaaccctctacatctattgttgaacatgtatctatttgcactagatgtagagatattgatgttaatgctattcatgatcacatgtccttaattaaacaacaaaatgatcatatagcaaaactagatgctaaaattgccgagcacaacttagaagatgagaaatttaaatttgctcgtagcatgctttataatgggagacgcccgggcatcaaggatggcattggattccaaaggggagacattgtcaaacttagtgcccctcctaaaagattatctaattttgttaagggcaaggctcccatgcctcaggataccgagggttacattttataccctgccggttatcctgagagcaaaattaggagaattcattctaggaagtctcactctggccctaatcatgcatttatgtataagggtgagacatctagctctaggcaaccaacccgtgccaagttgcctaagaaaactcctaatgcatcaaatgatcataacatttcatttaagacttttgatgcatcttatgttttgactaacaaatccggcaaagtagttgccaaatatgttgggggcaagcacaagggttccaagacttgtgtttgggtacccaaagttcttgtgtctaatgccaaaggacccaaaaccatttgggtttatgcatccgggggctcaagttggatactcgacagcgggtgcacaaaccacatgacaggggagaaaaggatgttctcctcatatgagaaaaaccaagatccccaaagagcgatcacattcggggatggaaatcaaggtttggtcaaaggtgtcactgtctttagaagaagtgatgattcaatagcatttaagg

SEQ ID NO: 30001 - DNA, 3714 bp, Zea mays
  Clone ID: MRT4577_127373C.1
tcacgctgacttgacattcatttttgcgtcacgcttgtattctctttccttcaagccgaaggtacatttgtaatttgtctttatcttttgatctacggatttacctcccgtgtcgaggtcgagatgcccatttgttcccatgggtgtcttgatgggcttggcatctttcataccaaacttgttaagtatgtcttgaatgtactttgtttggctgatgaatgtgccgtcttggagttgcttgacttgaaatcctaggaaatacttcaactcccccatcatagacatctcgaatttttgtatcatgatcctactaaactcttcacaggaagatttgttagtagacccaaatatgatatcatcaacacaaatctttgagagtttataaacatggttagggtactgactatcttcaaagccgggaagttgctcaacatagacctcttccttgattggtccattgaggaaggcacttttcacgtccatttgataaagcttaaagccatggtaagtagcataggcaagtaatatacgaattgactcaagcctagctacgggtgcataagtttctccaaagtccaaaccttcgacttgtgaataacctttggccacaagtcgagctttgttccttgtcaccacaccatgctcatcttgcttgttacggaatacccatatggtaccgaggatggagttgacggggtggtctcgttgaattgcttggtggactcttgggtgtggtggtctttgaccctgtgtctcttgatcatcttccttgtcttgatcaacttcatctcccccttgatccttgtcctcctcttgaggtggctcatcctcttgatcttcatcttcattgtctggagcatgatcctcatcttgagttggtggagatgcttggttggaagatgacggttgatcttgtgcatgagtgggctcttcggattccttaggacacacatccccaatggacatgttccttagcgcgacgcacggagcctcttcatcatctagctcatcaagatcaacttgctccacttgggagccattagtattgggctttttatcggtgaggagttcataagatgtcttcttgaggattcggtgaaggtagagccggttgatggagtagcaggtggtgttaatcgcctcagcccaaaaccagtctggagtcttgtactcatcaagcatggtccttgccatgtccagtagagttctattcttcctcttcactacaccatttagacagtatttactcccgtcgatgcttatgtaagctatcgggccgaatagatccatgtggagtagttccagtggcctgtccgttgtcattatgttcttgtgtggatgatgggcgccaacttgctttcctgcttgacatgcgctacagacactgtctttctcaaaatgaacatttgttagtcccaaaatgtgttctccctttagaagctggttaagattcttcattccaacatgggctagtcgacgatgccagagccaacccatattagtcttagcaattaagcaagcatcgagtttagctttgttaaaatcaactaagtatagctgaccctctaatactcccttaaatgctactgaatcatcacttcttctaaagacagtaacacttatatcttgatttccatccccgaatgtgatagctcgttggggatcttcgtttttctcgtaggaggagaacattcttttctcccctgtcatgtggtttgtgcatccgctatcaattacaaaacttgagcccccggatgcataaacatatttggcaactaatttgcctgatttgttagtgagcacataagaagcatcaaaagttttgaatgaaatattatgatcatttgatgcagtaggagttttctttttaggcaatttaacatgggttgattgcctagagctagaagccttattcttatacataaaagcatggtgagaaacagaatgagatttcttagcatgaattctcctaatcttgtgctcaggataattagcaggatataaaatatagtcctcattatcatgaactatgggagctttgcccttaacaaagttagacaatttcttaggggcattaagtttgacattgctttcctgttggagaccaatgccatccttaatgccacggcgtctcccactatagagcatgcttctagcaaatttaaatttttcattttcaatttcatgctcattaattttagcagttaattgagctatatgatcattttgttgtttaattaaagcaaggtgatcatttataacatcgatattaacatctctacatctagtacaaatagtaacatgatcaacagtagatgtagagggtttgcaaacatttaattcatctatcttagcatgtaaaattgcattctcatctctaagacaggaaatagaatcattgcaaacatttaaatctttaaccatagaaattaaactagcattttcagttttaaggctaaaaattgattcattcaatttatcaatcttagcatttaaactagcattttcatttctaagattggtaattgaatcatggcaaatgctaagctccttagtcaagttttcatttttctctacttccttcttctttttgtcgtcctttgccatgaagcacttgtggccgacgtttgggaagaaaagtcccttgttgacggcgatgttggcggcatcctcgttggagtcccattcccgacacacgtgagcatcgccgcccttcttcttgtagtatctcttcttctccttcttcttcaccctcttgtcgtcgcccctgtcactatcactagacattggacatttagcaataaaatgaccgggcttaccacacttgtaccacaccctcttggagcagggtttgtaatccttctccctcctttgtttgaggatttgacgaaagctcttgatgatgagcgccatctcctcattgtcgagcttggaggtgtcgatggggagcctacttgatgtagactcttcttctcttccatcgctttgaatgcgacgggttgcacctcgggtgttgaggtggcgccttgctttggtgctcctgaggttgcacacttggttgaccaaggtcttgagccagttgtacattgcttgtggctcctctccttggttgaggacgaatcgatcgagctccccctcgatcgtctcccgcttggtgatcttggtcacctcatccccttcgtgcgcggtctttaggatgtcccaaatctctttggtactttttaacccttgcaccttattatactcctcgtctgagtcatagtcctcgtctcccaccgtaggtgcctgcgctccaaattcaacaatgtcccaaatgcttgcgtggagtgaggttaggtgatgcctcattttatcactccacatgcaataatcttcaccatcaaaatatggtggtttgcctaatggaacggaaagtagaggagcgcgcttataaatacggggataacgaagtggcatcttactatacttcttgtgctcatggcgcttagaagtggcggacgccacgtcagagccggatgtggagggcgtcgaagagtcggtctcgtagtagaccactttcttcatctttttcttcttgtcgctactccgatgcgacttgatgtggagaggggatccctctttggctttggtgccggactcccttgatggagccttcccgtggcttgtggccttctcgccggtttccatctccctcttggcggatcctcccgacat

SEQ ID NO: 30002 - DNA, 703 bp, Zea mays
  unsure (1)..(703): unsure at all n locations
  Clone ID: MRT4577_127374C.1
aattcggcacgaggtgcgcttggaaaaaggtccagcagccccaaactccccagcggggccatctcgcccacctctccctgcacgccggatccccgccgtccccaccatcgcctgtgttgggtccgacccagtccgctcatgcctcgacgcgcagttctcgcacaccgtccgcggcggcgtccgcctcgcgccggtctcgcacaccgtcccgcagcggatccaatcacgcctcctcaccctccgctgcctcctcccatcccctctcccatcgaatccgcgattccgcgtccacagtggataccgtgagctcgcccccgcctccatggctccatcctccgctcgcgattcccccgtgcccgttggaagggggtcacggatcctcacacggttcctgctgcactacctccgcgctgccacgcgcaggccgccgacgcttgagcgggagggcaccgcgctcgctggcctcgcggacacggccgtccacggcatggcgctcgtcgagggcacgacgttctcgtgccggggcctcttctgagtgctccggatcgtgtcggcggtggtgctgancagggagtgccgtcacaagctggagcggctcatggagctgatgctggtccaggccacgctcgacgacctccttgtctccagcgacgacggcggcgacgtgtacattgtcaacctggtcatgaggctggtcagggtg

SEQ ID NO: 30003 - DNA, 528 bp, Zea mays
  Clone ID: MRT4577_127375C.1
atacacatacagagagtatacctccatattaatggtgacaagaaagaagcggcctctgtgatggcggccatactggtggttctagaattcatgggagctccagccgacgaccatgggcgcccgctcatcgagcggagccgtgacagatggatccctcgccactagcacccaagggtgacgatagatgtcatcacacgactgtcgctgacacggcatgagacatgcaaatacactccctgcatcactcctagcttgctcctgcagctatagggatcgactctgctacaacatatttactcctggtgcttgaggtgaggccattccgccaagtcacaactcttacatgcatgcttcgggcgaggactacgacgctgcctctcgtgagcttctgctcaaacgatgcatgcatcaaggcatccatggatgctttacacatatgcgtactacttaaccgcgtcagggaaccggacataagggggtgctattgaataaactgacaatctttgttatggactgcctgactgtctt

SEQ ID NO: 30004 - DNA, 735 bp, Zea mays
  Clone ID: MRT4577_127376C.1
atgtcgggagatcacgccaagaaggagatggagaccggcgaaaagcccactacaagccacgccaagaaggagatggagaccggtgaagagtcccgcaccaagaggaaggagaagaagaaggactcctccaaagggaaggagaagaaatcttcttcacaccacaaagagaagaaggagaagtcctcttcccacaagtcgcatcagagtgaggacaagaaaaagaggatgaggaaggtggtctactacgagaccgattcttcatcggcatccacctccggctccgacgcggcgtccgtcacttctaagcgccaagagcgtaagaagtatagtaagattcccctacgctaccctcacatttccaaacatacacccttactttccgtcccattaggcaaaccaccaacttttgatggtgaagattacgctaggtggagtgatttaatgcgatttcatctaacctcactccacaaaagtatatgggatgttgttgagtttggtgcacaggtatcagccgtaggggatgaagactatgatgcggatgaagtagcccaaatcgagcacttcaactcccaagtcacaaccatactccttgcctctctaagtagagaggaatataacaaggtgcaagggttgaagaatgcaaaggagatttgggatctactcaagaccgcgcacgagggtgattgtaacgccccgaatttcgagttgaatttttatttctatatcgctcgctaa

SEQ ID NO: 30005 - DNA, 257 bp, Zea mays
  Clone ID: MRT4577_127377C.1
cgttcaaaaagatactactactccagggctatgtggacgctgaagacaaagccggagggggatagtatgactagaaaaaggatgaatgatcaaaattcttggtcttgaccgttgcacctgacgtgaaacgtacgtgaactggggacggatggacaagtatatccagagttagatgcgctgttatccgatcgcgtatttgttttatatgaaaaacatacactattttgattgcaagttaattaaaattacatttgtgt

SEQ ID NO: 30006 - DNA, 5079 bp, Zea mays
  Clone ID: MRT4577_127378C.1
atgtcgggagaacacgccaagagggagatggagaccggcgacaaacccatcggcgacaagcccactacaagccacgagaaggcttcatcagaagagtcccacaacaaaaagaaaggtaaggaaaagaaagcttcttcccacaagtcgcatcagagtggcgacaagaaaaagaagatgaggaaggtggtctactacgagaccgatacttcatcaccttccacctccggctccgacgcgtcgtccgttacttctaagtgtcatgagcgcaagaagtttagtaagatccccctacgctatcctcgcattcctaaacatacacctttactttccgtcccattaggcaaaccaccaacatttgatggtgaagattatgctaggtggagtgatatgatacgatatcacctaacctcactccacaaaagtatatgggatattgttgagtttggtgtacaggtaccatccgtaggggatgaggattatgatgaggacgaagtagcccaaatccaacacttcaactcccaagccacaactatactccttacctctctaagtcgggaggagtataataaggtgcaagggttgaagagtgctaaagagatttgggacgtgctaaagaccgcgcacgaaggagacgaggtgaccaaaatcaccaagcgggaaacgatcgagggggagctcggtcgctttcgtcttcgccaaggggaggagccacaagacatgtacaaccggctcaaaaccttggtgaaccaagtgcgcaacctcgggagcaaaaaatgggatgaccacgaagtggtaaaggttattcttagatcacttgttttccttaaccctactcaagttcaattaatttgtggcaatcctagatatacactaatgactcccgaggaagtaatcgggaattttgtgagctttgaattgatgatcaaaggctcaaagaagatcaacgagctcgatggcccctccacgcccgaggcacaaccggttgcattcaaggcaacggaggagaagaaggaggagtctacatcaagtagacaaccaatcgatgcctccaagctcgacaatgaggagatggctttaatcatcaaaagctttcgccaaatcctcaagcaacggaaggggaaggactacaaatcccgttccaagaaggtttgctacaagtgtggtaagcccggtcactttatagctaaatgtccattatcaagtgatagtgacagggacaacgacaagaaggggagaagaaaggagaagaagagatactacaagaagaagggcggcgatgcccatgtttgccgggagtgggactccgacgagagctccaccgactcctcctccgacgaggacgccgccaacatcgccgtcaccaaaggcctcctcttccccaacgttggccacaagtgcctcatggcaaaggacggcaaaaagaagaaggttaaatccaaatcctccactaaatatgagtcctctagtgatgataatgctagtgatgaggaggataatttacgtaccctttttgccaacctaaacatgcaacaaaaggaaaagttaaatgaattaattagtgccatccatgagaaggatgacctcttggacacccaagaggacttcctaatcaaggaaaacaaaaagcatgttaaggttaaaaatgcttatgctctagaagtagaaaaatgtgaaaaactatctagtgagctaagcacttgccatgagactattgacaaccttagaaaagagaatcctaatttgttagctaaggttgattcaaatgtttgtgatgtttcaattcccaatcttagaaatgataataatgatttgcttgctaagattgaagaattaaacacttctattgctagccttaggattgagaatgaaaaattgcttgctaaggctaaagaacttgatgtttgcaatgttacaatttccgatcttagagataaaaatgatatattgcgtgctaagattattgaacttaattcttgcaaaccctctacatctaccactgagcatgtcactatttgcactagatgtagagatgttgatattgatgctattcatgatcatatggtattaattaagcaacaaaatgatcatatagaaaaattagatgctaaaattgccgagcatgaacttgaaaatgaaaaatttaaatttgctcgtagtatgctttatagtgggagacgccctggcattaaggatgacattggcttccaaaagggggacaatgtcaaacttaatgcctctcctaaaaaattatctaactttgttaaggggaaggctcccatgcctcaggataacgagggttacattttatatcctgccggttatcccgagagcaagattaggagaattcattctaggaagtctcactctggccctaaccatgcttttatgtataagggagagacatctagttctaggcaaccaacccgtgctaagttgcctaagaagaaaactcctagtgcatcaaatgaccatagcatttcctttaaaacttttgatgcttcttatgtgttaactaacaaatccggcaaggtagttgccaagtatgttgggggcaaacacaaggtttatgcatctgggggctcaagttggatcatcgacagcgggtgcacaaaccacatgacaggggagaagaaaatgttctcctcctacgagaaaaaccaagatccccaacgagctatcacattcggggatggaaaccaaggtttggtcaaaggtgtcattgtctttagaagaagtgatgattcaatagcatttaagggagtgttagagggtcagctatacttggtagattttgatagagctgaactcgacacttgcttaattgctaagactaacataggttggctctggcatcaccgactagcccatgttgggatgaagaatcttcataagcttctaaaaggagagcacattttgggactaactaatgttcattttgagaaagacagggaaaaatctcatacccaagaaaccttaaagggattcttgagacgggctcaaaacgagttcggcttaagagtcaagaaaattagaagcgacaacgggacggagttcaagaactctcaaatcgaaggcttccttgaggaggagggcatcaagcatgagttctcttctccctacaccccacaacaaaatggtgtagtggagaggaagaatagaactctattggacatggcaagaaccatgcttgatgagtacaaaacttcggatcggttgggcggaggcggtagaaaaactaaatttgctcctaagactatagaaggctttttgctaggatatgattcaaacacaagggcatatagagtctttaacaagtcttcgggactagttgaagtttcttgtgacgttgtgtttgatgagactaacggctctcaagtagagcaagttgatcttgatgagataggtgatgaagaggctctgtgcatcgcgctaaggaacatgaccattggggatgtgtgtcctaaggaatccgaagagcctccaaatgcacaagatcaaccatcctcctccacgcaagcatctccaccaactcaaaatgaggatgaggctcaagttgatgaaggagaagatcaaagagatgagccacctcaagatgacggcaatgatcaagggggagatgcaaaggatcaaaacaaggaggatgaagaaccaaggccgccacacccaagagtccaccaagcaatccaacgagatcaccccgtcgacaccatcctcggcgacattcataagggggtaaccactagatcttgtgttgctcatttttgtgaacattactcttttgtttcctctattgagccacacagggtagaggaagcactacaagattcggattgggtggtggcgatgcaagaggagctcaacaacttcactaggaacgaggtatggcatttagttccacgtcctaatcaaaatgttgtaggaaccaaatgggtcttccgcaacaagcaagacgagcatggtgtggtgacaaggaacaaagcccgacttgtggacaagggatactcccaagtcgaaggtttggatttcggtgaaacctatgcacccgtagctaggcttgagtcaattcgtatattgttagcctatgctacttaccatggctttaagctttatcaaatggacgtgaaaagtgccttcctcaatggaccaatcaaggaagaggtctatgttgagcaatctcctggctttgaagatagtgagtatcctaaccatgtctacaaactctctaaggcgctttatgggctcaagcaagccccaagatcatggtatgaatgcctaagagatttccttattactaatggcttcaaagtcggaaaagtcgatcctactttatttactaaaactcttgacaatgatttgtttgtatgccaaatttatgttgacgatattatatttgggtctactaacgaatctacatgtgaagaattcagtaggattatgacacagaaattcgagatgtcaatgatgggggagttgaagtatttcttaggatttcaagtgaagcaactccaagagggcaccttcattagccaaacgaagtatacccaagacattctaaacaagtttggaatgaaggatgccaagcccatcaagacacccatgggaaccaatgggcatctcgacctcgacacggaagggtgtaaaataaatagaaagagcacatcggggacttgccaattcttgggaagatccttggtgtcttgggcttcaaagaagcaaaattccgtagctctttctaccgctgaagccgagtatattgtcgcaggccattgttgcgcgcaattgctttggatgaggcaaacccttagggactatggttacaaattaaccaaagttcctcttttatgtgataatgagagtgcaatccgcatggcggataatcgcgttgagcatagccgcactaaacacatagtcattcggtatcattttctaagggatcaccaacaaaagggagatatcgacattgcatatattaacactaaagatcaattagccgatatctttaccaagccactagatgaacaaacttttaacaaacttaggcatgagctaaatattcttgattctaggaatttcttttga

SEQ ID NO: 30007 - DNA, 1310 bp, Zea mays
  Clone ID: MRT4577_127379C.1
aattcggcacgaggccacaccggccggctcacacgcgccgcaaagcagagcacggggggctgagaccagagcagagcggagcgccaccagccaatcctttgcctgcccaagcagcagcagcagctggcccgatggctctgtctctctccggtacctccgcccgcttcgccctcgcgtcgctggtcccccgggccagggcctacgcggccgcgggcgaggccaaggaggccgggcgcgccgccgccgccgccgccgagggctcgtgggtgcccgaccccgtcacgggccactaccgccccgccaactgggccgccgccgtcgaccccgccgacctccgcgccgcgcacctcgcccgcacctacgcccgggcctgagcggccccggctcccttcaccctgctccgcctcgtctcgtatgacatacgcgcaccgtaccagggtgagacgaggtgggggctgggggttcgtgtggcgaacggcgtgttgagccacgcgcgcgtgcggccgcgctctgcgacgcccggaacgttcttgggagagcgcgagcgaggtcttctgtcttctcggtgcgggtcgctgtgccatgagatgtgacgctgggtcgttttgggtccgaccaacgggagaagagcggcctgtggtcggtggtcgccgccgtgtgtgggctggatggcctgctctcttgtgctcctcctatatatcagatgtacttcctccgaggagcagggtttcgccctttcgctaccttttcgtactcgctagtcgctacagctacagctagtacgtactatactatactaataaaagctacagtttcttccggttcttgtcctacctttcacgtcatctcgattacgtggtgaacttgtatgcagtatgctgtatttttttcatcggacaaaatatatctttttttattgaacaaaaaaaaaaaaaaacaaaaaaaaaaaaaaaaaaggcccctacgagcggaaaggtggtgtttatccctgtataaacaagcagtagtggttagggctggacgaaaaacacgtagctcgttaactcgctcgattcgatttgatagtggttcgactcgactcgtttataatttgtaacgagttgagtttgtattaacgagccagatcgaactggctcacgagctgactcgcgagccaaacgagttgaagtaattagtcaaatcacaataatctccgatccaaaatagttaatcttgtactctactatagttaattttgttctttgttgagtgtgaaatattaagttgcaaaatctattcttttttctaaatagatctccttttcttttgct

SEQ ID NO: 30008 - DNA, 290 bp, Zea mays
  Clone ID: MRT4577_12737C.1
gaagctgaaccaatttattggttgtgtttaggaaacacatgccggagtgagggaaccgttctggagggcctttaatatgtcatttaaaaggacgcaccctcaacatggggttgctgcctcaacaacacaggtgtctgaaaaaagaaccactcgcatggcagatattgttggtgcagacagaaggccccgaccaaggggttggcctctgtcaatggattaagttactgctgacgcttgtgtgggttcggcccaaagtctctcattgatagtgggcataattgaagcctgtg

SEQ ID NO: 30009 - DNA, 2526 bp, Zea mays
  Clone ID: MRT4577_127380C.1
gaaaaatctcaaacccaagagactttaaagggattcttgagacgggctcaaaatgagttcggcataaggatcaagaaaataagaagcgacaatgggattgagttcaagaactctcaaatcgaaggcttttttaaggaggagggcatcaagcatgagttctcttctccttacacaccacaacaaaatggtgtagtggagaggaagaatagaactctattggacatggcaagaaccatgcttgatgagtacaagacttcggatcggttttgggccgaggcggttaacaccgcttgctacgccatcaaccggttatatctacatcgaatcctcaagaagacatcgtatgaactcctcaccggtaaaaagccaaatgtttcatattttagagtctttggtagcaaatgctttattcttgttaaaagaggtagaaaatctaaatttgctcctaaggctgtagaaggctttttacttggttatgattcaaacacaagagcatatagagtctttaataagtcatttggactagttgaagtttcttgtgacattgtgtttgatgagattaacggctctcaagtagagcaagttgatcttgatgagctagatgatgaagaggctccgtgcgtcgcgctaaggaacatgtccattggggatgtgtgtcctaaggaatccgaagagcctccacaagcacaagatcaaccatcttcctccatgcaagcatctccaccaactcaagatgatgatcaagctcaagaggatgaaaatgatgatcaagaagatgagccacatcaagaggacggcaatgatcaagggggagatgcccatgatcaagacaaggaagatgacgacggtccaagaccgccacacccaagagtccaccaagcaatccaacgagatcaccctatgaacaccatcctcgacgatattcataagggggtaaccactcgatctcgtgttgctcatttttgtgaacattactcttttgtttcctctattgagccacacagggtagaggaagcacttcaagattcggattgggtgttggcgatgcaagaggagctcaacaacttcacggggaatgaggtatggcatttagttccacgtcctaaccaaaatgttgtaggaaccaagtgggttttccgcaacaaacaagatgagcatggtgtggtgacaaggaacaaagcccgacttgtggccaagggatattcacaagtcgaaggtttggacttcggtgaaacctatgcacccgtagctaggcttgagtcaattcgcattttacttgcctatgctacttaccatggcttcaagctttatcaaatggacgtaaagagtgccttcctcaatggaccaatcaaggaggaggtatatgttgagcaacctcccggctttgaagatagtgagtaccctaagcatgtttacaaactctctaaggcgctttatgggctcaagcaagccccaagagcatggtatgaatgcctaagagattttcttatcgctaatggcttcaaagtcggaaaagccgatcctactctctttactaaaacacttgcaaatgatttgtttgtatgccaaatttatgttgatgatatcatatttgggtctactaacaaatctacatgtgaagagtttagtaggatcatgactcaaatattcgagatgtctatgatgggggagttgaagtatttcttaggatttcaagtgaagcaattccaagagggcaccttcattagccaaacgaagtacattcaagacatactcacaaagtttgggatgaaggatgccaagcccatcaagacacccatgggaactaatgggcatctcgacctcgacacgggaggtaaatccgtagatcaaaaggtataccagtcgataataggttctttactctacttatgtgcatctcgactggatattatgctttctgtatgcatgtgtgcaagattccaagccgatcctaaggaagttcaccttagggccataaaacgaatcttgagatatttagtttatactcctaagtttggcctttggtaccctaggggatccacatttgatttaattggatattcagatgctgattgggcagggtgtaaaattaatagaaagagcacatcagggacttgccagttcttgggaagatatctgatgtcttgggcttcaaagaagcaaaattctgtcgctctttctaccgctgaagccaagtatattgccgcaggccattgttgcgcgcaattgctttggatgaggcaaaccctcagggactatggttacaaattaaccaaagttcctcttctatgtgataatgagagtgcaatctgcatggcggataatcccgttgaacatagccgcactaaacacatagccattcggtatcattttttaagggatcaccaacaaaagggggatatcgagattgcatatgttaacaccaaagaacaattagctgatatctttaccaaaccattagatgagcaaacgtttaccaaacttaggcatgagctaaatattcttgattctaggaattttgattga

SEQ ID NO: 30010 - DNA, 1618 bp, Zea mays
  Clone ID: MRT4577_127381C.1
tgttcattacttagatgtgataaattatgaaatgaagaacttgatgataatggaatttctggtggttcacttgatggtacatttaaatgttcttctggttgaggtgttatttgtttttcttccacttgccatgatgatgctaatgaatctagtgatgatgttccagatactacagaatcaatatctggactaccatgttttggtgtatgagtagaagaaggggaactttgaggagaagctgaaggtgcaggtgaaggcatcatttttgatagatagtttcaatatgagttaacttatttttttcactagtaaaataattgtacggactaattcgcaccacaccacaccggccggctcacacgcgccgcaaagcagagcacggggggctgagaccagagcagagcggagcgccaccagccatcctttgcctgcccaagcagcagcagcagctggcccgatggctctgtctctctccggcacctccgcccgcttcgccctcgcgtcgctggtcccccgggccagggcctacgcggcgtcggcggcgtccggggccatgaggcgcgcggcggagggcgcggccgcgggcgaggccaaggaggccgggcgcgccgccgccgccgccgccgagggctcgtgggtgcccgaccccgtcacgggccactaccgccccgccaactgggccgccgccgtcgaccccgccgacctccgcgccgcgcacctcgcccgcacctacgcccgggcctgagcggccccggctcccttcaccctgctccgcctcgtctcgtatgacatacgcgcaccgtacgtaccagggtgagacgaggtgaggggtcggggttcgtgtggcgaacggcgtgttgagccacgcgcgcgtgcgcccgcgctctgtgacgcccggaacgttcttgggagagcgcgagcgaggtcttgtctcttctcggtgcgggtcgctgactcgctgtgccctgtgatgtgatgtgacgctggatcgttttgggtccgaccaacgggagaagagcggcctgtggtcgccgtcgccgccgtgtgtgggctggatgatggcctgctttcttgtgctcctcctatatatcagatgtacttcctccgaggagcagggtttcgctaccttttcgtactcgctacagctacagctagtacgtactatactaataaaagctgcagtttcttccgcgtacggccgcgctctgcgacgcccggaacgttcttgggagagcgcgagcgaggtcttctgtcttctcggtgcgggtcgctgtgccatgagatgtgacgctgggtcgttttgggtccgaccaacgggagaagagcggcctgtggtcggtggtcgccgccgtgtgtgggctggatggcctgctctcttgtgctcctcctatatatcagatgtacttcctccgaggagcagggtttcgccctttcgctaccttttcgtactcgctagtcgctacagctacagctagtacgtactatactatactaataaaagctacagtttcttccgaaaaaaaaaaaaaaaaaaaaaaaaaaaaaaaaaaaaaaaaaaaaaaaaaaaaaaaaaaaaaaaaaaaaaaaaaaggggcggccgttcgcaatctaaaactag

SEQ ID NO: 30011 - DNA, 350 bp, Zea mays
  Clone ID: MRT4577_127382C.1
tcggacagataggattctgatgcacaagtattatcatcttgtctctgttctcattttctatcctgcaggtatattgcagacttctttcttggacttggcatttggtgcatcatttacagttctcttgatattgtctatgatacgaatttcgtaaatatactctcttggacatgttgtgcatcagtttatgaactactttactgatcatcgtgttactaagactcttattgtcaaccactattcactcttactgtgctgagctcttcctaattgtacatcatccagattacatgactgagcacttgtccctttagccagaattttcaacttagcgataggtcataccatag

SEQ ID NO: 30012 - DNA, 5535 bp, Zea mays
  Clone ID: MRT4577_127383C.1
tcacttgaagaacacattagtcatagtaatatgaaagagatgatcaaaggtatataactgagctatgtgtgcaaaatatctatataagtttctagaatcaagaatatttagctcatgcctaagtttggtaaatgttttctcatctaaaggcttggtaaagatattggcgagttgttctttggtgttaatgtaagcaatctcgatatctccccgttgttggtgatccctcaaaaaatgatactgaatggctatgtgtttagtgcggctatgctcaacaggattatccgccatgcggattgcactctcattatcacatagaagaggaactttggttaatttataaccatagtccctcagggtttgcctcatccaaagcaattgcgcgcaacaatggcctgcggcaatatactcggcttcggcggaagaaagagctacagaattttgcttctttgaagcccaagacaccagagatcttcccaagaactggcaaggccctgatgtgctctttatatcgatcttacaacccgcccaatcggcatccgaataaccaattaaatcaaaagtggatcccctaggataccaaagcccaaacttaggagtataagccaaatatctcaagattcgttttacaaccgtaaggtgagcttccttagggtcggcttggaatcttgcacacatgcatacggaaagcataatgtccggtcgagatgcacataaatagagtaatgaacctatcatcgaccggtataccttttgatctacggatttaccttccgtgtcgagatcgagatgcccattggttcccatgggtgtcttgatgggcttggcatccttcatcccaaacttgcttagaatgtcttgagtatacttcgtttggctaatgaaggttccctcttggagttgctttacttgaaatcctaagaaatacttcaactcccccatcattgacatctcgaatttctgtgtcatgatcctactaaactcttcacatgtagattcgttagtagacccaaatataatatcatcaacataaatttggcatacaaacaaatcattttcaagtgttttggtaaagagtgtaggatcggcctttccgactttgaatccattagtgataaggaaatttcttaggcattcataccatgctcttggagcttgcttgagcccataaagcgccttagagagtttatacacatggttagggtactcactatcttcaaagacgggaagttgctcaacatagacttcttccttgattggtccgttgaggaaggcactcttcacgtccatttgataaagcttgaagccatggtaggtagcataggctaataatatgcgaattgactcaagcctagctatgggtgcataggtttcaccgaaatccaaaccttcgacttgtgaataccccttggccacaagtcgggctttgttccttgtcaccacaccatgctcatcttgcttgttgcggaagacccatttggttcctacaacattttgattaggacatggaactaaatgccatacctcgttcctagtgaaattgttgagctcctcttgcatcgccaccacccaatccgaatcttgtagtgcttcctctaccctgtgtgactcaataggggaaacaaaagagtaatgctcacaaaaatgtgcaacacgagatctagtggttacccccttatgaatgtcgccgaggatggtgtcgacagggtgatctcgttggattgcttggtgggctcttgggtgtggcggccttggttcttcatcctccttgccttgatcatttgcatctcccccttgatcattgccgtcatcttgaggtggctcatctctttgatctcccccttcatcaacttgagcctcatcctcattttgagttggtggagatgcttgcgtggaggaggatggttgatcttgtgcatttggaggctcttcggattccttaggacacacatccccaatggacatgttccttagcgcgatgcatggagcctcttcatcacctatctcatcaagatcaacttgctctacttgagagccgttagtctcatcaaacacaacgtcacaagaaacttcaacttgtccagaggacttgttaaagactctatatgcccttgtgtttgaatcatatcctagtaaaaagccttctacagtcttaggagcaaatttagattttctacctcttttaacaagaataaagcatttgctaccaaagactctaaaatatgaaatattgggctttttaccggttaggagttcgtatgatgtcttcttgaggattcggtgtagatacaaccggttgatggcgtagcaggcggtgttgaccgcctcggcccaaaaccgatccgaagtcttgtactcatcaagcatggtccttgccatgtccaatagagttctattcttcctctccactacaccattttgttgtggcgtgtagggagaagagaactcatgcttgatgccctcctcctcaagaaagccttcaatttgagagttcttgaactccgtcccgttgtcgcttcttattttcttgatccttaagccgaactcattttgagcccgtctcaagaatccttttaaggtctcttgggtttgagatttttcctgcaaaaagaatacccaagtgaagcgagaataatcatccacaataactagacagtacttactcccgccgatgcttatgtaagctatcgggccgaataggtccatgtgtaggagctccagtggcctgtcagtcgtcatgatgttcttatgcggatgatgaacaccaacttgcttccctgcttggcatgcgctacaaatcctgtctttctcaaaatgaacatttgttaatcctaaaatgtgttctccctttagaagcttatgaagattcttcatcccaacatgggctagtcggcggtgccagagccagcccatgttagtcttagcaattaagcaagtgtcgagttcagctctatcaaaatctaccaagtatagctgaccctctaacactcccttaaatgctattgaatcatcactccttctaaagacagtgacacctttgaccaacccttggtttccatccccgaatgtgatagctctttggggatcttggtttttctcgtaggaggagaacatcttcttctccccagtcatatggtttgtgcacccgctatcgatgatccaacttgagtccccggatgcataaaccttgccggatttgttagttaaaacatacgatgcatcaaaagtcttaaatgagattttagaatcatttgaagcagtaggagtttttttcctaggcaattttgcatgagttgattgcctagagctagatgtctcacccttatacataaaagcatgattagggccagagtgagacttcctagagtgaattctcctaattttgctctcaggataaccgacagggtataaaatgtaaccctcgttgtcctgaggaatgggagccttgcccttaacaaaattagataatcttttaggaggggcattaagtttgacattgtctcccctttggaagccaatgccatccttgatgccagggcgtctcccactataaagcatactacgagcaaatttaaaattttcattttcaagttcatgctcggcaattttagcatctaattttgctatatgatcattttgttgcttaattaagaccatatgatcatgaatagcatcaatatcaacatctctacatctagtgcaaatagaaacatgctcaacggtagatgtagagggtttgcaagtttttagttcaacaatcttagcatgtaaaatatcattctcacttctaagatcggaaatagaagcattgcaaacatctaagtttttagccttagtaagcatttttttcattttcaatcctaaggtagacaatttttcacatttctcaacttctagagcgtaagcatttttgaccttaacatgctttttgttttccttgattaggaagtcctcttgggtgtccaaaagttcatctttttcatggatggcactaattaattcatttaatttttccttttgttgcatgtttaggttggcaaaaagggtacgcaaattatcctcctcatcactagcattatcatcactagaggactcatatttagtggaggatttggatttaaccttcttctttttgccgtcctttgccatgaggcacttgtggccgacgttggggaagagaagtcccttgttgacggcgatgttggcggcgtcctcgtcggaggaggagtcggtggagctctcatcggagtcccactcgtggcacacatgggcatcgccgcccttcttcttgtgatttctcttcttctcctttcttctccccttcttgtcgtcgcccctgtcactgtcactagaaataagacatttagcaataaagtgaccgggcttaccacacttgtagcaaaccttcttggagcagggcttataatccttcccccttctttgcttgaggatttggcggaaactcttgatgatgagcgtcatttcctcgttgtcgagcttggaggcgtcgatgggttgtctacttgatgtagactcctccttcttctcctccgtcgccttgaatgccaccggttgtgcttcgagcgttgaggaggtaccttgctcgatgattttctttgagcctttaatcgttagctcaaagctcacaaattttcctataacctcctcgggagacattagcttatatctaggatcacctcgaattaattgaacttgtgtagggttaagaaatacgagggatctaagaataaccttgaccatctcatggtcatcccatttttcgctcccgaggttgtgcacttgattcaccaaggtcttcaagcggttgtacatggcttgtgggtcctccccttggtgaagcatgaagcgaccgagctccccctcgatcatttcccgcttggtgatttttgtcacctcgtctccttcgtgcgcggtcttgagtacgtcccaaatttccttcgcactctttaacccttgcaccttattatactcctctcgagttagagaggcgaggagtatagtagtggcttgggagttaaagtggtgaatttgggccacttcgtccgagtcatagtcttcatcccctacggatggtacctgtacaccaaactcaacaacattccaaatgcttgtgtggagtgaggttagatgatgcctcattttgtcactccacatattataatcttcaccgtcaaacagtggtggtttgcctaatggaacggagagcaatggagtacgctttgaaatacgggggtagcgtagggggatcttactaaacttcttgcgctcatggcgcttagaagtaatggatgacgcgttggagccagaggtggaaggcgatgaagtatcggtctcgtagtagaccaccttcctcatcttctttttcttgtcgccactccgatgcgacttgtgggaagaggatttcttctccttccccttccccttgttgcgggactcttccgatgaagtcttcccgtggcttgtagtgggcttgtcgccggtctccatctccttcttggcgtgatctcccgacat

SEQ ID NO: 30013 - DNA, 5781 bp, Zea mays
  Clone ID: MRT4577_127384C.1
atgtcgggagatcacgccaagaaggagatggagaccggcgaaaagcccactacaagccacgggagcacttcatcggaagagtcccgcaccaaaaggagggagaagaagaagagctcctccaacaaagggaaggagaagaaatcttcttctcaccacaaagagaagaaggaaaaatcttcttcccacaagccgcatcggaaaggcgacaagcacaagaggatgaggaaggtggtctactacgagaccgacacttcatcaacatcgacctccgactccgatgcgccctccgtcacttctaagcgccaagagcgcaagaagtatagtaagatccccctacgctaccctcgcatttccaaacatacacctttactttccgtcccattaggcaaaccaccaactcttgatggtgaagattacgctaggtggagcgatttaatgcgatttcatctaacctcgctccacaaaagcatatgggatgttgttgagtttggcgcgcaggtaccatccgtaggggatgaggactatgatgaggatgaggtggcccaaatcgagcacttcaactctcaagcaacaacaatactcctcgcctctctaagtaaagaggagtataacaaagtacaagggttgaagagcgccaaggagatttgggatgtactcaaaaccgcgcatgagggagacgagctcaccaagatcaccaagcgggaaacgatcgagggggagctcggtcggttccggcttcacaaaggagaggagccacaacacatgtacaaccggctcaagactttggtgaaccaagtgcgcaacctcgggagcaagaagtgggacgatcacgaagtggtaaatgttattttaagatctctcatttttcttaatcccactcaagttcaattgattcgtggtaatcctagatatactaaaatgacccccgaggaagttatcgggcattttgtaagttttgagtgcatgatagaaggctcgaggaaaatcaacgagcttggcgactcatccgaagcccaacccgttgcattcaaggcaacggaggagaagaaggaggaggctacaccaagtcgacaaccaatcgacacctccaagctcgacaatgaggaaatggcgctcgtcatcaagagcttccgccaaatcctcaaacaaaggagggggaaagactacaagtcccgctccaagaaggtttgctacaagtgtggtaagcccggtcattttattgctaaatgtcctatatctagtgacagtgaccgaggtgacgacaagaaggggagacgaaaggaaaagaagaggtattacaagaagaagggcggcgatgcccatgtttgtcgcgagtgggactccgacgagagctcaagcgactcctccgacgacgaggacgccgccaacatcgccgtcaccaagggactcctcttccccaacgtcgaccacaaatgcctcatggcaaaggacggcaaaaagaaggttaaatctaaatcctccactaaatatgaatcctctagtgatgacaatgctagtgatgaggaagataatttgcgttccctttttgccaaccttaacatagctcaaaaagaaaaattaaatgaattggttagtgctattcatgaaaaggatgaccttttggattcccaagaagattgtctaattaaagaaaacaaaaaacatgttaaggttaaaaaggcttatgctcttgaaattgagaaatgtgaaaaattatctagtgagctaagcacttgtcgtgagatgattgacaaccttagaaatgaaaatgctattttaaatgctaaggttgattcacatgtttgtaatgtttcaattcccaatcttagaaatgataatgttgacttgcttgctaagattgatgaattgaatgtttctcttgctagccttagaaatgaaaatgaaaaattgcttgctaaggctaaggattttgatgtttgcaatactactatttccgatcttagagataagaatgatattcttcatgctaagattgttgaacttaattcttgcaaaccatctacatctattgttgagcatgtatctatttgtactagatgtagagatgttgatattaatgctattcatgatcatatggctttaattaaacaacaaaatgatcatatagcaaaactagatgcaaaaattgccgagcacaacttagagaatgagaaatttaaatttgctcgtagcatgctttataatgggagacgcccgggcattaaggatggcattggcttccaaaggggagacaatgtcaaaattagtgcccctcctaagagattgtccaactttgttaagggcaaggctcccatgcctcaggataacgagggctacattttgtaccctgccggttatcccgagagcaaaattaggaaaattcattctaggaagtctcactctggccctaatcatgcttttatgtataagggtgagacatctagttctaggcaaccaacccgtgctaaattgcctagaaagaaaactcctaatgcatcaaatgatcatgatatttcatttaaaacttttgatgcttcttatgtgcttacaaacaaatccggcaaagtagttgccaaatatgttgggggcaagcacaaggggtcaaagacttgtgtttgggtacccaaagttcttgtgtctaatgccaaaggacccaaaaccatttgggtttatgcatccgggggctcaagttggatactcgacagcgggtgcacaaaccacatgacaggggagaaaaggatgttctcctcatatgagaaaaaccaagatccccaaagagcaatcacattcggggatggaaatcaaggtttggtcaaaggtgtcactgtctttagaagaagtgatgattcaatagcatttaagggagtgttagagggtcagctatacttggtagactttgatagagctgaactcgacacttgcttaattgctaagactaacatgggctggctctggcatcgccgactagcacatgttgggatgaagaatcttcataagcttctaaagggagaacacattttgggactaacaaatgttcattttgagaaagacagaatttgtagtgcatgccaagcaggaaagcaagttggctctcatcatccacataagaacataatgacgaccgacaggccactggagctcctacacatggatcttttcggcccgattgcttacataagcatcggcgggagtaagtactgtctagttattgtggatgattattctcgcttcacttgggtattctttttacaggaaaaatcccaaacccaagagaccttaaagggattcttgagacgggctcaaaatgagtttgacttaaggatcaagaaaataagaagcgacaacgggacggagttcaagaactctcaaattgaaggcttccttgaggaggagggcatcaagcatgagttctcttctccctacacgccacaacaaaatggtgtagtggagaggaagaatagaactctattggacatggcaaggaccatgcttgatgagtacaaaacttcggatcggttttgggccgaggcggtcaacaccgcctgctacgccatcaaccgattgtatctacaccgaatcctcaagaagacatcatatgaactcctcaccggtaaaaagcccaacatttcatactttagagtttttggtagcaaatgctttattcttgttaaaagaggtagaaaatccaaatttgctcctaaaactgtagaaggctttttacttggttatgactcaaacacaagggcatatagggtctttaacaagtccactggactagttgaagtctcatgtgacgttgtgtttgatgaagctaacggctctcaagtagagcaagttgatcttgatgagataggtgaggaagaggctccatgcatcgcattaaggaacatgtccattggggatgtgtgtcctaaggaatccgaagagcctccaaatgcacaagatcaaccatcatcctccatgcaagcatctccaccaacccaagatcaggaagaggctcaagttgatgaagaaaaagatcaatcaaatgagccacctcaagatgatggcaatgatcaagggggagatacaaatgatcaagataaggaggatgaggaagaaccaaggccgccacacccaagagtccaccaagcaatccaacgagatcaccccgtcgatactatcctaggagacattcataagggggtaactactagatctcgggttgctcatttttgtgaacattactcttttgtttcctctattgagccaaacagggtagaggaagctctccaagattcggattgggtggtggcgatgcaagaggagctcaacaatttcacaaggaacgaggtatggcatttagttccacgtcctaaccaaaatgttgtaggaaccaaatgggtcttccgcaacaagcaagatgagcatggtgtggtgacaaggaacaaagctcgactcgtggccaaagggtattcacaagtcgaaggtttggatttcggtgaaacctatgcacccgtagctaggcttgagtcaattcgcatattattggcctatgctacttaccatggctttaagctctatcaaatggacgtgaaaagtgccttcctcaacggaccgatcaaggaagaggtctatgttgagcaacctcccggctttgaagacagtgagtatcctaaccatgtttataggctctctaaggcgctttatgggctcaagcaagccccaagagcatggtatgaatgccttagagatttccttattgctaatggcttcaaagtcggcaaggccgatcctacactctttactaaaactcttgaaaatgacttgtttgtatgccaaatttatgttgatgatattatatttgggtctactaacgagtctacatgtgaagagtttagtaggatcatgacacagaaattcgagatgtctatgatgggggagttgaagtattttctaggatttcaagtgaagcaactccaagagggcaccttcatcagccaaacgaagtacactcaagacatcctaagcaagtttggaatgaaggatgccaagcccatcaaaacacccatgggaacaaatgggcatctcgacctcgacacgggaggtaagtccgtggatcaaaaggtatatcggtcgatgattggttcattgctttatttatgtgcatctcgaccggacattatgctttccgtttgcatgtgtgcaagattccaatccgaccctaaggaatcccaccttacggccgtaaaacgaatcttgagatatttgacttacacacctaagtttgggctttggtaccctcggggatccacttttgatttgattggttattcggatgccgattgggcggggtgcaaaattaataggaagagcacatcggggacttgccagttcttgggaagatccttggtgtcttgggcttcaaagaagcaaaattcggtcgctctttccaccgccgaagccgagtatattgccgcaggtcattgttgcgcgcaattgctttggatgaggcaaaccctgcgggactacggttacaaattaaccaaagtccatttgctatgtgacaatgagagtgcaatcaaaatggccgacaatcccgtcgagcatagccgcactaagcacatagccattcggtatcattttcttagggatcaccaacaaaagggagatatcgagatttcttacattaatactaaagatcaattagccgatatctttaccaagcctcttgatgaacaaacttttaccagacttaggcatgagctcaatattcttgattctagaaatttcttttgctag

SEQ ID NO: 30014 - DNA, 885 bp, Zea mays
  Clone ID: MRT4577_127385C.1
ttttttttttttttttgccacgaatgaacattcgtattaattacttcatacacattgaccatttgtaaaatcggaagtggagaaaaggcagaggaaatgaagaagaaaaaaccccgaaacgaaacgaataaacaatttcacccgtgccggcccgtacgttcgatcatcacgtactgttctaatccaacaacagatcgaccgtgcattctcataaatgacatatatatatatatatatatatatatatatatatatatatatatatatatatatatatatatatatgtaggttgtcagttattgggtgccatggcggtctgtgagcgtatggtctgggggtagaggaacttcttcccgccgacggcctccaggatcttcttgctgagcgcgccgccgccgccgtcctggtcgccggacttggagacgtagaaggtgcgggagaaccagtccaccagctcgggcgcggcgcacatgaccatgtggaagggccagtaccagccgggccacgtgacgtagtagtcccgacggcgcacgctcgccaccaccacctcggccagcgactccgtcttgcccaccggcatcggccccacgttgatgtcgcgggcctcctcgtcgatgccgacatggccgtccttctggaggcccttgcccttggtgaggttggagacgacgtagccgggcgtgaggatggtgacgtgcacgtgggaccccagctcagccctcagcgtctcgtagaaacgtatcacggcgcctttgcttgcgttgtagaagctcatcctggctgtcggcaccctgccggcgacggaggcggtcaccacgatgttgccccggctagccttgaggtacggcagcgcgaagtaggtcgggtacacggcaccccagaag

SEQ ID NO: 30015 - DNA, 359 bp, Zea mays
  Clone ID: MRT4577_127386C.1
tcctcgggcggccttgtttattttttttttttgtttttttttgtttgttgtcgtggggcgacagagctctaccttgcatcaagctgtgtaaagaaagttttctcaaaaataccgaagttttgtcaaacgccctgtgtggggctccaacaaaaaggaaggcttttttaaacaaaggatcaacgtttcaaactccactggggggttttttttttttaaaaaatatggaataaaagctacaaacagtatgaggaaccaaagaatggttcattgctaaggatgactggtgcaagatttcggctgtggggactgcatgtacctttacgccgaggccccgtagccccctaattatccctctaaga

SEQ ID NO: 30016 - DNA, 355 bp, Zea mays
  Clone ID: MRT4577_127387C.1
ctctctctccctccctccccaccccacccaccgccgcgccgggccaccacccactccacccctctctctctctctctctctctctctctctctctctccacctccaccaccagcccccaccatcccggctcggagaccgcttccctccctccacccccgcaaccctctcccgccgcgcacgcgccaccctgcattcctccgctccccgcttcctcccgatcttaaccacccaccgcctctcattacgcataacgggatctaacacagacactggtacgcagtagaaatgcagacgcccgtctgctgattgcggaaccaatcgcgtcgcatggcaaccctactggctgcccggaaa

SEQ ID NO: 30017 - DNA, 727 bp, Zea mays
  Clone ID: MRT4577_127388C.1
ggcaagccaaccacgaatgaacatttgtattaattacttcatacacattgaccatttgtaaaatcggaagtggagaaaaggcagaggaaatgaaaaaaaaaaccccgaaacgaaacgaataaacaatttcaacagatcgaccgtgcattctcataaatgacatatatatataacacagtgcaatgcaagttgtcagttattgggtgccatggcggtctgtgagcgtatggtctgtgggtagaggaacttcttcccgccgacggcctccaggatcttcttgctgagcgcgccgccgccgccgtcctggtcgccggacttggagacgtagaaggtgcgggagaaccagtccaccagctcgggcgcggcgcacatgaccatgtggaagggccagtaccagccgggccacgtgacgtagtagtcccgacggcgcacgctggccaccaccacctcggccagcgactccgtcttgcccaccggcatcggccccacgttgatctgcaagcgcgcgcgcgcgcatgcatgccatttcgtcgctgtagctgtagtcgcgggcctcctcgtcgatgccgacatggccgtccttctggaggcccttgcccttggtgaggttggagacgacgtagccgggcgtgaggatggtgacgtgcacgtgggaccccagctcagccctcagcgtctcgtagaaacgtatcacggcgcctttgcttgcctctggaacccggccggc

SEQ ID NO: 30018 - DNA, 566 bp, Zea mays
  Clone ID: MRT4577_127389C.1
ccggccgggatatctatctctgccgccgatgacggctcgtctctcttcagctctcctgactgcctaatccctccggccaccccgatgccgctcaatcgctcgatcgctccccgcgcccagagacaagcccggagaccatggggggaccagctcactgacgaaccaaatgcgccgaggtcaaggaggacttcaacctcttcaataaggaggtggacgaccgcatcacaaacaaggagctggtcactgacgtgcgctcactgagtcaaaacccaacgtaggctgatctccaggacatgatcaatgaggtgcatggcgacggcaatgtaacgatcgactgccgcgaggtgctcaacctcatggtgcgcacgatgaaggacaccgactccaaggaggagctcaaggaggtgctcagggaggtcgacaaggacgcagaacggcttcgtctctgccgcggagctccgacacgagatgaccaacctagcgcgagaagcgtgaccgactaggaggacgacgagatgatccgcgatgacgacgttgaagacgatgcgcagatcagctacgaggag

SEQ ID NO: 30019 - DNA, 841 bp, Zea mays
  Clone ID: MRT4577_12738C.1
ggaaaagaactcaccatggcttcctcttcctcattgtttctccttgcagccctccttgcgctggcctcatggcaggccactgcctatgatcctagccctcttcaggacttctgcattgccgacatgaaggcgcctgtgcgagtaaatgggtttgcttgcaaggacccaatggccgcgaccccggaagacttcttcaacgcagccatgctcgatcagcctagggatactaaggccagcaaggtcaggtctaacgtcaccaacatcaatgtcataaatttccctggcctcaacaccctcggcatctcgctggctcgcatcgactatggaccattaggtgtgaacacgccacacatacacccccgtgccactgagctcctcacagtgcttgaggggacactctaccttggatttgtcacatccaacccaaacaggctcttctccaagatagttaagaagggcgatgtattcgtattcccaaaagcaatgatccacttccaaatgaacctagcgcatgacaagccagcagccgcgttgtcctcgctcagcagccaaaaccctggagttatttctattgccaatgcagtatttggatcaaagccaccgatttcggatgatgtcttagccacggcatttcaggtggagaaggatctcattcactggctccaatctcagttctgggggaacaccaactactaaatattctcttttatctgggcatatgggaagttaatatgtaatgatatatagaataaatgacatgcaatacgtatgcatgcatggttgcgagctgtgaatttttattttctttttgatcctgacaagaatgttttttgtcgatcat

SEQ ID NO: 30020 - DNA, 297 bp, Zea mays
  Clone ID: MRT4577_127390C.1
tggagagctcatctattttgagatggatatgactggtcagctcatggaggtagagaagcaggacatgtctggtgatgttgcgtgcctggccattgcaccggtccctgaggggaggcaaaggtccagatttcttgccgtaggatcctatgataacaccattcgtatcctctcattggatcctgatgattgcctgcagcctctaagcgtccagagtgtatcatcggcaccagagtcactcctattcttggaggtccaggcatcagttggtggtgaggatggtgcagattatccagccaa

SEQ ID NO: 30021 - DNA, 352 bp, Zea mays
  Clone ID: MRT4577_127391C.1
tcggcctcatgaactccttcatcaacgacttttttaaaagctctcccggtgcccgcagctggcccgtctacaaggatgcccccttacctcccggggatccagacctccgccgcttgtctccccgggagctgccaagcacgccgtttggagggtcctggccgtcaccaatttacctttttttccccctttagaagcttcgttgttgtggtttctaagcaagcctgtgattggccccttttaagggtataatgagtgggttggctgtgtttgttaaattgggccaagggcctttttgccctgggttttgaaatttagtccatggtgggaattgcattgcttttgggtttttttg

SEQ ID NO: 30022 - DNA, 268 bp, Zea mays
  Clone ID: MRT4577_127392C.1
gcaaagtcacatgtcgcagtggtttgtgacacttctactatttgtaacaatgctttcctggctaggctcctcctccatatccggcaacatggtcaggttcggcatgtggatcccagttccttggatgggggctttcacctgcaagccttaccctctttaggctagcgatcttgccatgaaatgcaacatgcagtaaatgtcgagttccataatatggttgacaattattccttctatgccatgaaacctacaacaatacattctgtac

SEQ ID NO: 30023 - DNA, 251 bp, Zea mays
  unsure (1)..(251): unsure at all n locations
  Clone ID: MRT4577_127393C.1
gaattctccttgggggggggggggggggactggcttatttgtgggaagccacaaacatnagacaaagaactttattattgaagtataacgtataagaaagctaaaagagggcacgaggaatgatggggtggtgggggaagggtggtgggtttgtgagagcaagttggntgaatggcagcaattgttgcaagttgtgagagggtgcccaggggtaggggcaggggtgctggtgagaacgggaaccaattggg

SEQ ID NO: 30024 - DNA, 600 bp, Zea mays
  Clone ID: MRT4577_127394C.1
gttcccctctctcttccccgtcctgcaggctccaggcgctgctgctctcgtcctccgctagcgagcgaatcgctggcccgacgccgcggcgggaggtatctcgctttcgatcagaaaaagcaggatggtttaaaagcagatggaactggcaaaactccacagaatgaactgacatgtagtgtttgcttagaacaagtcatggtgggtgatctgttgagaagcctaccatgcttgcatcagtttcacgtaaactgcatcgacccatggctgcgccaacagggtacatgcccaatctgcaagcaccaggtcagtgatgggtggcatgccacaggcaacggtgaagaggatgcttcatacatggtgtaagtagctgcccaggagtaggccataggtaactagtagtagatgctaacagaatccgtggaaacgctgttttggaggtgacggtttggacttgcaatctagggatgtggtctaatccctatctatcctaacaaaaaaccgagtgtggaatcagctgtccagtgcactgagttcttgtacaactcatgtttatttctctcattctctgtgatgttgatgcataaaaaggttgctaac

SEQ ID NO: 30025 - DNA, 436 bp, Zea mays
  Clone ID: MRT4577_127395C.1
aagcaagggtcaaaacaaaaaataataaaggggaaaacccgccagacatgataaattgggaacaattccatatcaaacaaaaactgggaaaacagcccctttctttgggcaaaggcccaaagctgaaaatttggtactatccccttgcaaggtcaacaacaggcccgcacatttcgcaaccaacacaaaagtttatctgactggtagttcaacagggtaaaactagaaacccccccccaaagcaaggacaaaaggggggacaaaccccccctcgatggtggagccctttgggggcttggcaaaaaaaagctgtttaccaacaaaaaagaacccttgctgcacgggaagaaagcctttttttttttaaaaaccctccttgaacccggcaatcgagacagggggttcaaaggcaatctcaatctctttcccaaggaga

SEQ ID NO: 30026 - DNA, 1068 bp, Zea mays
  Clone ID: MRT4577_127396C.1
tggacgcctttcgagctccggccgggctgctgttagtgctgttcccctctctcttccccgtcctgcaggctccaggcgctgctgctctcgtcctccgctagcgagcgaatcgctggcccgacgccgcggcgggaggtatctcgctttcgatcaggattttggtcggggcgtcgttctccggtgcttatctcatttctatttatcggtgcctcgggttcacggccaaattcgctgctgcgtggggctttggagattggagccaattttatcattgttcctgcgtggagaaaaagcaggatggtttaaaagcagatggaactggcaaaactccacagaatgaactgacatgtagtgtttgcttagaacaagtcatggtgggtgatctgttgagaagcctaccatgcttgcatcagtttcacgtaaactgcatcgacccatggctgcgccaacagggtacatgcccaatctgcaagcaccaggtcagtgatgggtggcatgccacaggcaacggtgaagaggatgcttcatacatggtgtaagtagctgcccaggagtaggccataggtaactagtagtagatgctaacagaatccgtggaaacgctgttttggaggtgacggtttggacttgcaatctagggatgtggtctaatccctatctaccctaacaaaaaaccgagtgtggaatcagctgtccagtgcactgagttcttgtacaactcatgtttatttctctcattctctgtgatgttgatgcataaaaaggttgctgataataaaaataactcaaattcagggggtagaggatgagaaatgattttatgcattattagaatttgtttctactctgtcatgtcacttacatgacactcttcgtctcagttctctatagtaaaatgtaccacaaatatctccgatatcttactaataatagtatacaaatatattttgcataaaaccgaattaacttaattgatatatgcctaaattactattattagaatggaattcaattccaataaaaattaagggctgaagtttagaccattttaactcatttgtttgaggt

SEQ ID NO: 30027 - DNA, 842 bp, Zea mays
  Clone ID: MRT4577_127397C.1
ggctggttctgtgtgccctcttggccgctgttctcctcaccgcgcgtgcgctctctctctctctctctcggcgccgactcggctaccgccgccgccctacggaagcttcccaggtcttcgtcaggcttttctccggcaacgagcaccctgcacagatcgtgaacctgcacacctcaacgatagatggcggggttcagaagccttgcacccaagaccaggaacctggtggtggccgggggactgtctgccttcgtgctcggggtctactactacaccatgagagcggtgggaggcacggacgagctccaggtggcgatcgacaagtttgaggagacgaagaagcaggatgccgctagaaactctagctccagcgcaggaggatcataattcataaacacgcggacacgccctggatctgctgcaggctgacatggtagtggtacgacgacagtcacgtcgctcagtaggccatgaccatgcgttctgcttgtactgtggaataaataaatgatgggttatggtactctttatctggtagagcttggcagcttgtgctttgagggatgtaatagtggccccgatgtttgtattttcctggcgagccggaaattttgtggagtatttgctaaaaaaaaaaggcccctagggccatagataaaaaaaaacaacttgaaaaaaaaaaaggaaccctagaaaaaaaaaatagcacacattaaaagtgaaactcccttttctctagtagcaacgactgttatgcaaacagtccttctatgcagacgtgcaagcaaacatttgatctattacattacgatacaaccatggtttgttaggggtttttttat

SEQ ID NO: 30028 - DNA, 714 bp, Zea mays
  Clone ID: MRT4577_127398C.1
atggtgatggtcgcctcaatgcgtgcgccattacgaagaggtcctcgcccccatcctcctacagggggcgacaacgaggccattaaagccaaagagtcggaggcccggcgacaggtggcactgacggtctcgctagcggaggcaaccacctctgcagtgggcagcctcaccagcggcggtgaccacctcagcaccgacgacagcggccacctccgcaccagtggcttaccggcgatggcggtcgcctcagcgcgcgtgaagaggtcctcgctcccgtccccccacgggagtgaggataagaccatccaagaacgcggctgccaccccccgcggcatacgacatcttgtacgaccccccggatggcggcggaacagtgcggccagcggcgcgggagaagccgtggatgtggcagacctgcgcacggcgcgaccgtcgcccgtgcggtcgacagacagacatgccccgaccaggcggcaggaggcagcgccggaggcagcaccaaagccatccaagccgaggagccagacacgcggcagctgacggtgcctacagctggccggccccgtgtagccgaagttcgcctcctccgcaaggcaggtgaatgcccttctcccccgaatgctggaggaagaagcgggtcgccagcccatgcggaaggtaggaccctaactcggctcgccttccaccctagcgaggatgatgaacatccttga

SEQ ID NO: 30029 - DNA, 362 bp, Zea mays
  unsure (1)..(362): unsure at all n locations
  Clone ID: MRT4577_127399C.1
tcatccctgatctcagagcaagcgcgtcgacgcgctgcgctctctcagcccctcggaggaggacgtgtgccgatgcacaatatctactctcgacgacactcgaatgatcgacgcgccgagaccaccgtctgtcaaggcactactgccgtgccacgctacgagggcgtccgtgatgagactgtgagcctcccatgcacangccatatcgccatatggttgtacgacgtgcatgaaggactcgtaggaagcattgccctccgttgatgcatcgctagagctgatgacgtacatgcaaggggctgccttcgcctttgcatagcgtgagtatactacctcaatggcagaggcagtcaggctgtgta

SEQ ID NO: 30030 - DNA, 259 bp, Zea mays
  Clone ID: MRT4577_12739C.1
gtacgcctcccctggtgaagaaacctgagttgctcaccgaacctgaccatcagcaggtggggattatccaaagggacggtcgactgtgatcctaactcaataactcgagttgtagcacgcctatagcaacacccaatgattgctaactatgattgtaccttacatacccagaagaatctttcgtcgcacgctaaatcaatactaatgtccaaacaactaatctctattaccaattgtgtcaatagactaatccattcat

SEQ ID NO: 30031 - DNA, 455 bp, Zea mays
  Clone ID: MRT4577_1273C.1
ttttaatgggcagcctcgctttccttcaggaccattacacagtttacacagacacgctctctggtgtgccacactctcaacacccatgtttcttacatggcgagccggcacatgcatgcacgagcgcctctgctcgtgggccgtcctcgctggtaggcttgatctagcagggcttgcctggcgagcaggccagggagccggcgtaacgcgtgagcctggtgacggaggacccgatcctgggcttgatgaggtccttcttgtagaactgtctgttgatctggccaccggtgacggtgaaggaggcgccctccatgaagaggtcgaatcttcggagtgccacacccagtgttaccacacggactacggcgtgtcatgccgcttgatgacctgcctcgaggcaaggctgggccgggctatgtaactgttgcccctggcttgataacggagggggcctt

SEQ ID NO: 30032 - DNA, 345 bp, Zea mays
  Clone ID: MRT4577_127400C.1
atcacgcacccacaggacaactcaatgtatggtttgatcgctggcgtgaccgccgtaggcggctacgtaagccgctacggcattcgccgacgtcttcgtcggcatgcactcacgaaggctctaaccatggattcagtcgaggcagatatggaagcaaatgtgtcaagctaagcgatgaagttagatagccaggtccacctgatgggcatggttatcattgagggtatcatggagcatgttacagacgatatgacttacaaggagcatggctacgaccatggttactacaatgctgatgctcaatttgaagggaaagctcaagggctaactcgagatcttactgga

SEQ ID NO: 30033 - DNA, 744 bp, Zea mays
  unsure (1)..(744): unsure at all n locations
  Clone ID: MRT4577_127401C.1
cccggggccaaaccaaggntatctgtacatgnaanattcatcagaacctgggagcttgcgtcgctgggatggtccattcctttgccagagctgtcaggaaaagaaagaagcaatggagggaaagcgtcgttcacgaggttcatcaagaacagtgggtcaagtgaatagctgccgtgtgtagagtgatcaggtaattactgatcaacaacaccccagcaccaccattttgcagcatttcttctgttgtgacactttcttgatcacatgtaatgtctgggagttctgatctagaactagattgaagtattgaaattgccattgtagaggtggctgctgcttatagctctcatcccaagcgaggagcatgtcttgtcctcagcaaggttcttgctgaggaatgtaggcagctctgctcagcccttgaccttgatggcacatacaggtttaaagattaacatgccaaaatgatatggcttgtctattctaaggtcaactgttgcaacacaaattactcttggtatagacttctgacaaatagcttggcactgtttctgaattaggcctaggtgcttacatcaattttctcttgttgaatccggctttaattcatgactagagactttagagtattatcagtccttgttgaggttcagcctttgctgacaccaatgtaattaacatctaaaaatattctttgaatcagcttgtgattcatcagcaagacgttagttgtcatgtacaana

SEQ ID NO: 30034 - DNA, 582 bp, Zea mays
  unsure (1)..(582): unsure at all n locations
  Clone ID: MRT4577_127402C.1
ccggccgggccgggacaattgtagagtggctcactggtttagttctatatatctaagagaggagggaaaaatggctgcgcttatcgtagctgagatgaagcacgctgtaggccgtcactggcctgtaggaggcaccgatgaggacccagcagtggagatgtctcacgacaccacctgtcgtaggtcttctccacagagtagcaagcgaaagggtatgcttatctttaatacacgatctgcaagagtaatgaatcaatatgaagtgctgatgtaggggctcgctcgtaaatagcactacgggagtggttagcgtctgacttcacctatcagagccgcacgagttcatcgtgaccaaattggctgcgcttggaatgaaaatgtgacgggtgaatgcatgtgggatcacttctgcctagatgatgctgagaggatactggactgtagcaagtcacacattgcagcgagtgctcaccatatgtacaaaagtgacggcgcattggtctatgaaatgggtctgaactcgtattggttcactatctcttgngccagagtactgtcggatgtaacgatgaaggaggtatt

SEQ ID NO: 30035 - DNA, 284 bp, Zea mays
  Clone ID: MRT4577_127403C.1
acaagattgaacaagaagagagacacagatgaaatggtggatatattgattgctgttgctttcagtgctttgcgtgataaatattctattgaaggacatgaagagtggatcacagagctagactcatccactgaagaaaagttttcacgccatctaatcattcgtatacccaagattgcatttaaagacaactcccatgttggtgcgtttgtctgtgaggtctgttcacaaattgcagctcagcggacaacaaatcatggacttgataaacttttatattacaa

SEQ ID NO: 30036 - DNA, 1428 bp, Zea mays
  Clone ID: MRT4577_127404C.1
cgactactcattgggtacctcgaggccggccgggatgactctctattagaatagccaggggcctcgctcctctccaccacgtactccactccatccatccatcatcgtctatccatgaagagcttgcaggaggagagggcggcgttggtgccgtcgccgtggccccagcaacagagaaaggacggcggcgagcatgatccggagcagctgatggatgaggatgacggtgacgatgaggaggatctgcaggatgagcagcacacaagaacaattaggacgtcgaccaagacggcggaagcatcgtcatcagcggagcggcgggtgccggcgtggtggaggctgcggcgggcgcagaagctggtgcccaccagaggtgttggcctggtcatcgccggtctcctcgtgctggtcttgctcctcgtcgtcggcggcggcggcaacaccagtcgtcgtcgctggatccacctcgactatgcatcgtcgtttctgcgcggcggcggcttgaggcagcatcaatggcctcctcaccacgtcccttcacccgcagccgacctcgtgcccatacccttcagctgcggcggcaacggctcggcatgtccccgtcgtcaaaccgcaacatcacccccctctccgtcgccatcatcgtcatcgccaccagcagccaccaagtcatcatcgtccaagaataaacaaccccctcctcagtgcccggattacttccgcttcatccactccgacctgtcgccgtggcgcgagacggggatcacgcgcgaggcggtggagcgggggcgccaccgggcggcgttccggctggtggtcgtggacggccgcgcgtacgtggagacgtaccaccgcgtgttccagacgcgtgacaccttcacgcagtggggcatcgcgcagctgctggcgcgctaccccggacgcgtcccggacctggacctcatgttcaactgcgaggacatgcccgaggtcaaggtcagccggtcgcggaggagtcgtccgcgccgccgctgttccgctactgcaaggacgactccacggccgacatcgcccacccggactggtccttctggggctggcccgaggtcaacatccgtccctgggcgccgctgctggaggagatggccgccgagatgggtcgcctgccgtgggcggaccgggagccgtacgcgtactggaagggcaaccccaccgtgtccgccgagcgcgccgacctccgccgctgcaacgactcctcgtcgtccggcggcacgcgcgtgttctggcaggactggggcgccgccatccgggacggcttccgggactccaacctggccaagcagtgccgctaccgctacaagatctacgtgcgtggccggtcctgatcggtcagcctcaagtacatcatcgcctgcgactcgccggtgctgctcatcgccacccccttca

SEQ ID NO: 30037 - DNA, 165 bp, Zea mays
  Clone ID: MRT4577_127405C.1
ggaccctcgggtctcggccggaaccgaccctggaggtgatccgttgcgctcggcaccgttccctcgcgcggtccggaatcttaacatggccgtgccggaggtggcgcgcgcgcgcgtcttctctacgacggtgggccgaccgaaggggtccgccggatctcactt

SEQ ID NO: 30038 - DNA, 376 bp, Zea mays
  Clone ID: MRT4577_127406C.1
gcgtgcataaccacctatctcaaggctgtttgtctaactctacatcttctgaatttcatactcacaactttgcacttcctggagcctaccataaacgggaggtacatctacctcaccgatcatatccataagagacacacatacgagaatatcaaaaaaactttcaagactaccttccaaaacccactcacaattcttatggcctatgtgaaagaaaatctccaaactacctacttcacattttacagtatattgctcatccaatactccttgatcgtgatcgctctaccccaccactttggaaagctcttcagcctgtactacatccaatggtgactcaggacccccttcctatacaccatccaacacatcttca

SEQ ID NO: 30039 - DNA, 365 bp, Zea mays
  Clone ID: MRT4577_127407C.1
ggtaccggcgcccctctcgagttttttttttttttttttttttttttttttttttttttttttttttttttttttttttttttttttttttaagggggcaaaaacgagctttctccaaaaaaaatggccactcttttgacaaaatctaggaacgaaacaaaaaatattaccctttatggcccctaggcaaccccctttggaaaaatcagggggactaaccaaagccccaacatattggggaggaggctttggggaaacatatcatacctcgcaataatcaaaggcatcaaaaaaggccttgggaggttcttgaagggggcctgttaatctctgatagccaaaaggaaggggccgtttcggctctt

SEQ ID NO: 30040 - DNA, 1557 bp, Zea mays
  Clone ID: MRT4577_127408C.1
atgtcaggagcatccgccaaaagggatctcgagaccggcgacaagtccgcatgctcggggagaacacactcaagggagtccgcccacaagcacaaggaggaatcctcttcctccatcaagtcccatcggatgggtgacaagaagaagaagatgaagaaggtggtctactacgagaccgactcttcgtcaccctccacctccggctcggaatcggcctccactacttcaaagcgccatgagcgcaagaagtatagcaaaccacctatgtttgaaggtgaagattattctatgtggagtgataaaatgaggcatcatctaacctcactccacaaaagcatatgggatattgttgagtatggagtgcaggaggtcgaacaaatccatcacttcaactcccaagccacaactatactcctcgcctctctaagtcgagaggagtataataaggtgcaagggttgaagagcgcaaaggaaatttgggacgtgctcaagaccgcgcacgaaggagatgaggtgaccaagatcaccaagcgcgagtcgatcgagggggagctcggtcgtttccgacttcgccaaggggaagagccacaagatatgtacaaccggcttaagaccttggtgaaccaagtgagcaacctcgggagtaaaaaatgggatgaccatgaaatggtcaaggttattcttagatcactcgtttttcttaaccctacgcaagttcaattaattcgtggtaatcctagatatacactaatgtctcccgaggaagtaataggaaactttgtgagctttgagttgatgatcaaaggctcaaagaaaattatcgagcacgatggcccctccacgcccgaagcacaaccggtcgcattcaaggctacggaggagaaggaggaggaatctacatcaagtagactacccatcgacgcctccaagctcgacaacgaggaaatggcgctcatcatcaagagcttccgccaaatcctcaagcaaaggagggggaaggactacaaatcccgctccaagaaagtgtgctacaagtgtggtaagcccggtcatttcattgctaaatgtccattatctagtgatagtgacaggggcgacgataagaagggaaagaagagagaaaagaagagatactacaagaagaaaggcggcgatgcacatgtgtgtcgcgagtgggactccgacgagagctcctccgactcatcctccgacgaggacgccgccaacatcgccgtcaccaagggactcctcttccccaacgtcggccacaagtgcctcatggcaaagtacggcaaaaggaagaaggatgaactcttggactctcaagaggacttccttattaaagaaaacaagaagcatgttaaggttaagaatgctcatgctctagaagtagaaaaatgtgaaaaattatctagtgagctaagcacttgtaatgatattattgtcaaccttagaaatgaaaatgctaaattaattgctaaggttgattctaatgttaatgatgtttcaattcccaatcttagagatgataatgttagtttacttgctaagatttga

SEQ ID NO: 30041 - DNA, 5409 bp, Zea mays
  Clone ID: MRT4577_127409C.1
atgtcgggagatcacgccaagaaggagatggagaccggcgaaaagcccactacaagccacgagagcacttcatcggaagagtcccgcaccaaacggagggagaagaagaagagctcctccaacaaagggaaggagaagaaatcttcttctcaccacaaagagaagaaggaaaaatcttcttcccacaagccgcatcggaaaggcgacaagcacaagaggatgaggaaggtggtctactacgagaccgacacttcatcaacatcgacctccgactccgatgcgccctccgtcacttctaagcgccaagagcgcaagaagtatagtaagatccccctacgctaccctcgcatttccaaacatacacctttactttccgtcccgttaggcaaaccaccaacttttgatggtgaagattacgctaggtggagcgatttaatgcagtttcatctaatctcgctccacaaaggtatatgggatgttgttgagtttggtgtacaggtaccgtcgataggggatgagaactatgatgaggatgaggtagcccaaatcgagcacttcaactcacaagccacaacaattctcctcgcctcactaagtaaagaggaatataacaaagtacaagggttgaagaacgccaaggagatttgggatgtactcaaaaccgcgcacgagggagacgagctcaccaagatcaccaagcgggaaacgatcgagggggagctcggtcgattccggcttcacaaaggggaggagccacaacacatgtacaaccggctcaagactttggtaaaccaagtgcgcaacctcgggagcaagaagtgggacgaccacgaagtggtaaatgtaattttaagatctctcatttttcttaatcccactcaagttcaattgattcgtggcaatcctagatatactaaaatgacccccgaggaagttatcgggcattttgtaagttttgagtgcatgatagaaggctcgaggaaaatcaacgagcttggcgaaccatccgaagctcaaccagttgcattcaaggcgacggaagaaaagaaggaggagtctacaccaagtcgacaaccaatagacgcctccaagcttgacaatgaggagatggcgctcgtcatcaagagcttccgccaaatcctcaaacaaaggagggggaaagactacaaatcccgctccaagaaggtttgctacaaatgtggtaagcccggtcattttattgctaaatgtcctatgtctagtgacagtgaccgaggcgacgacaagaaggggagaagaaaggagaagaagaggtactacaggaagaagggcggcgatgcccatgtttgtcgggagtgggactccgacgagagctcaagcgactcctccgacgacgaggacgccgccaacatcgccgtcaccaagggacttctcttccccaacgtcggccacaagtgcctcatggcaaaggacggcaaaaagaagaaggttaaatccatctcctccactaaatatgaatcgtctagtgatgataatgctagtgatgaggaggataatttgcgtattctctttgccaatcttaacatggagcaaaaagaaaaactaaatgaattgattagtgctattcatgaaaaggatgaccttttggactcccaagaggattgtctaattaaagaaaacaagaaacatgttaaggttaaaaaggcttatgctctagaagtagaaaaatgtgaaaaattatctagtgagctaagcacatgccgtgagatgatagacaaccttagaaatgaaaatgctattttaaatgctaaggttgattcacatgtttgtaatgtttcaattcccaatcttagagatgataatattgacttgcttgctaagattgatgaattgaatgtatctcttgctagccttagattagaaaatgaaaatttgattgctaaggctaaggattttgatgtttgcaaagttacaattgccgatcttagagataaaaatgacatacttcatgctaagatcgttgaacttaattcttgcaaaccctctacatctaccattgagcatgtcactatttgtgctagatgtagagatattgatattaatgctattcatgatcacatgtcgttaattaaacaacaaaatgatcacatagctaaattagatgctaaaattgccgagcataatttagaaaatgaaaaatttaaatttgctagaagtatgctctataatgggagacgccctggcatcaaggatggcattggcttccaaaggggagacaatgtcaaacttaatgctcctcctaagaacttgtctaactttgttaagggcaaagctcccatgcctcaggataacgagggctacattttgtaccctgccggttatcccgagagcaaaattaggaaaattcattctaggaagtctcactctggccctaattatgcttatatgtataagggtgagacatctagttctaggcaaccaacccatgccaagttgcctaagaagaaaattcctaatgcatcaaatgaacatagcatttcatttaaaacttttgatgcttcttatgtgcttactaacaaatccggcaaggtcgttgccaagtttgttgggaacaaacacaagggctccaagacttgtgtttgggtacccaaagttcttgtatctaatgccaaaggacccaaaacagtttgggtttatgcatccgggggctcaagttggatactcgacagcgggtgcacaaaccacatgaccggggagaaaaggatgttctcctcatatgagaaaaaccaagatccccaacgagctatcacattcggggatggaaatcaaggtgtcactgtctttagaagaagtgatgattcaatagcatttaagggagtgttagagggtcagctatacttggaaaaatctcaaacccaagagaccttaaagggattcttgagatgggctcaaaatgagttcggcttgaggatcaagaaaattagaagcgataacgggacagagttcaagaactcacaaattgaaggctttcttgaggaggagggcatcaagcatgagttctcctctccctacacgccacaacaaaatggtgtagtggaaaggaagaatcgaactctattggacatggcaagaaccatgcttgatgagtacaagacaccggaccggttttgggccgaagcggtcaacaccgcctgctacgccatcaaccggttatatcttcatcgaatcctcaagaagacatcatatgaactcctaattggtaaaaagcccaacatttcatactttagagtttttggtagcaaatgctttattcttgttaaaagaggtagaaaatctaaatttgctcctaaaactgtagaaggctttttacttggttatgactcaaacacaagggcatatagggtctttaacaagtccactggactagttgaagtctcatgtgacgttgtgtttgatgaaactaacggctctcaagtagagcaagttgatcttgatgagataggtaatgaagaggctccacgcatcgcgctaaggaacatgtccattggggatgtgtgtcctaaggaatccgaagagcctccaaatgcacaagatcaaccatcctcctccatgcaagcatctccaccaactcaaaatgaggatgaagctcaagttgatgaagggcaaaatcaagaagatgagccacctcaagatgatagcaatgatcaagggggagatgaaattgatcaagaaaaggaggatgaggaagaaccaagaccgccacacccaagagtccaccaagcaatccaacgagatcaccccgtcgacaccatcctcggcgacattcataagggggtaaccactcgatctcgtgttgctcatttttgtgaacattactcttttgtttcctctattgagccacacaggatagaggaagcacttaaagattcggattgggtggtggcgatgcaagaggagctcaacaatttcacgaggaatgaggtatggcatttagttccacgtcctaaccaaaatgttgtaggaaccaaatgggtcttccgcaacaagcaagatgagcatggtgtggtgacaaggaacaaagcacgacttgtggccaagggatattcccaagtcgaaggtttggatttcggtgaaacctatgcacccgtagctaggcttgagtcaattcgcatattattagcctatgctacttaccatggctttaagctttatcaaatggacgtgaaaagtgctttcctcaacggaccaatcaaggaagaggtctatgttgagcaacctcccggctttgaagacagtgagtatcctaaccatgtttataggctctctaaggcgctttatgggctcaagcaagccccaagagcatggtatgaatgccttagagatttccttattgctaatggcttcaaagtcggaaaagccgatcctacattctttactaaaactcttgaaaatgacttgtttgtatgccaaatttatgttgatgatattatatttgggtctactaacgagtctacatgtgaagagtttagtaggatcatgacacagaaattcgagatgtcaatgatgggggagttgaagtattttctaggattccaagtcaagcaactccaagagggcaccttcattagccaaacgaagtacactcaagacattcttgctaagtttgggatgaaggatgccaaacccatcaagacacccatgggaactaatgggcatctcgacctcgacacgggaggtaagtccgtggatcaaaaggtataccggtcgatgattggttcactgctttatttatgtgcatctcgaccggacattatgctttccgtttgcatgtgtgcaagattccaatccgaccctaaggaatcacaccttacagccgtaaaacgaatcttgagatatttggcttatacacctaagtttgggctttggtaccctcggggatccacatttgatttgattggttattcggatgccgattgggcggggtgtaaaatcaataggaagagcacatcggggacttgccagttcttgggaagatccttggtgtcttgggcttcaaagaagcaaaattcggtcgctctttccaccgccgaagccgagtacattgccgcaggtcattgttgcgcgcaattgctttggatgaggcaaaccctgcgggactacggttacaaattaaccaaagtccctttgctatgtgataatgagagtgcaatcaaaatggccgacaatcccgtcgagcatagccgcactaagcacatagccattcggtatcattttcttagggatcaccaacaaaagggggatatcgagatttcttacattaatactaaagatcaattagccgatatctttaccaagccacttgatgaacaatcttttaccagacttaggcatgagctcaatattcttgattctagaaatttcttttgctag

SEQ ID NO: 30042 - DNA, 1111 bp, Zea mays
  Clone ID: MRT4577_12740C.1
cggccggggtctcgtgcgcttttactacgtaaccttacggatgtatccgtctccccctccccacctattttatggtgtgagcgccggccggcagcactcaccaagatccagcatacacttctccaatccactagctaagcgcgccatggcaaagttcgctcttggtcaccaccgcgaggcctccgacgccggctgcgtccgtgccgtcctcgccgagctcatcctcaccttcctcttcgtcttcgccggcgttggctccgccatggcaacagggaagctggccggcggcggcggggacacggtggtgggcctgacggcggtggcgctggcgcacacgctggtggtggccgtcatggtgtcagcggggctgcacgtctccggcggccacatcaacccggccgtgacgctgggcctcgccgccacgggccgcatcacgctgttccgctccgcgctctacgtggccgcccagctgctcggctccacgctcgcctgcctcctcctcgctttcctcgcagttgccgacagcggcgtgcccgtgcacgcgctgggcgccggcgtcggcgcgctccggggcgtgctcatggaggccgtgctcaccttctcgctgctcttcgcggtctacgccaccgtcgtcgacccgcgccgcgccgtcggcggcatgggcccgctgctggtgggcctggtcgtcggcgccaacgtgctcgccggcgggcccttctccggcgcgtccatgaaccccgcgcgctccttcggccccgcgctcgtggctggggtgtgggccgaccactgggtctactgggtcgggcctcttatcggtgggccgctcgctgggctggtctatgacggcctcttcatggcccagggcggacacgaaccgcttcccagggatgacaccgacttctaggcagtaggtgtgtgttctcctgaataatttgaattgaaaacacatgtattgaagcctctaatgtttcggtttcgattcgaatggaatggaagcagcagtatcaaataaagtctcggtgaggtcgtaattcacttaaacatatgtttttaagacctgctttgaaagtaagttattaagagaaaaagaatcagaagctagcgcgctttt

SEQ ID NO: 30043 - DNA, 449 bp, Zea mays
  unsure (1)..(449): unsure at all n locations
  Clone ID: MRT4577_127410C.1
ggggggggcaaaaaaaaaaaaaaanaggggcagccgnacnaccnggggcacgcggacccgaacagcggcgagnaggcgggggggcggcaggggccggggcaggcgtatttgctttttttcanaaanacaacccacccagtgggtttgaaacggttcctcattttnanccncccncnncncncaaaaacgagggggaggagggggggcaggncccccgcgcaccccgccgnnnngcacgnnnncnncnnggcggcgccaccgccgcccccgcagccgaccgggggcnccaccacgaccggcaggcgggagccggccacgaggcggacggcgaagaagggcgggccgccggcgggggccagcgngaacccggccagcgncgccggcggcgccgcgnnccgcccggggcacgccagggaccccgagccgcagcccgccggggcgcacgccac

SEQ ID NO: 30044 - DNA, 1083 bp, Zea mays
  Clone ID: MRT4577_127411C.1
ctaagggtttgcctcatccaaagcaattacacgcaataatggcctacggcaatgtactcgacttcggcggtagaaagagctacggaattttgcttctttgaagcccaagacactagagatcttcccaagaactggcaagtcccagatgtgctcttccttttgatctacagatttacctcctgtgtcgaggtcgagatgcccattggttccgatgggtgtcttgaattgcttggcatccttccttccaaacttggtgagtatgtcttgaatatacattgtttggctaataaaggtgccctcgtggagttgcttcacttgaaatcccaagaagtacttcaactcccccatcatagacatctcgaacttttgtgtcatgatcctattaaattcttcacctgtagattcgttagtagacccaaatataatatcatcaacataaatttggcatacaaacaaatcattttcaagtgttttggtaaaaagagtaggatcgacctttccgactttgacttgtgaatatcccttggccacaagtcgggctttgttccttgtcaccataccatgctcatcttgcttgttgtggaagacccacttggttcctacaacattttggttaggacgtggaactaaatgccatacctcattcctagtgaagttgttgagctcttcttgcatcgcaaccacccaatccgaatcttgaagtgcttcctctatcctgtgtggctcaatagaggaaacaaaagagtaatgttcacaaaaatgagcaacacgagatcgagtagttacccccttttgaatatcgccgaggatggtgttcacggggtgatctcgttggattgcttggtggactcttgggtgtggctgtcttggaacttgttcatcttcctcatcttgatcatgggcatctcccccttgatcattgctctcctctagaggtggctcaacttcttgatcttctctttcatcattttgagcctcatcctcatcttgagttggtggagatgcttgcatggaggaagatggttgatcttgtgtttgtggtggctcttcagattccttaggacacacatccccaatggacat

SEQ ID NO: 30045 - DNA, 4077 bp, Zea mays
  Clone ID: MRT4577_127412C.1
tcaaatcaaatgtggatccccttccgtgtcaaggtcgagatgcccattagttcccatgggtgttttgatgggcttggcatccttcatcccaaacttgtttagaatatcttgaatatacttcgtttggctaatgaaggtgccctcttggagttgctttacttgaaatcccaagaagtacttcaactcccccatcatcgacatctcgaatttttgtgtcatgatcctactaaattcttcacatgtagattcgttagtagacccaaatataatatcatcaacataaatttggcatacaaacaaatcattttcaagtgttttggtaaagagtgtaggatcgacctttccgactttgaatccattagtgataaggaaatctctaaagcatttataccatgctcttggggcttgcttgagcccataaagcgccttagagagtttataaacatggttagggtactcactatcttcaaagccgggaggttgctcaacatagacctcttccttgattggtccattgaggaaggcacttttcacgtccatttgataaagcttgaagccatggtaagtagcataggctaataatatacgaattgactcaagcctagctacgggtgcataggtttcaccgaaattcaaaccttcgacttgtgaatatcctttggccacaagtcgtgctttgttccttgtcaccacaccatgctcgtcttgcttgttgtggaacacccacttggttcctacaacattttgattaggacgtggaactaaatgccaaacctcatttctagtgaagttgttgagctcctcttgcatcgccaccacccaatccgaatcttgaagtgcttcctctaccctgtgtggctcaatagaggaaacaaaagagtaatgttgacaaaaatgagcaacacgagatctagtggttacccccttatgaatgtcgtcgaggatggtgtcgacggggtgatctcgttggattgcttggtggactcttgggtgtggcggtcttggttcttcatcctctttgtcttgatcatttgcatctcccccttgattattgccatcatcttgaggtggctcatcttcttgattttctccttcatcaaattgagcctcattctcattttgagttggtggagatgcttgcggggaggaggatggttgatcttgtgcatttggaggctcttcggattccttaggacacacatccccaatggacatgttccttaacgtgatgcacgaagcctcttcatcacctatctcatcaagatcaacttgctcggttaggagttcatatgatgtcttcttgaggattcggtgtagatataatcggttgatggcgtagcaggcggtgttgaccgcctcggcccaaaaccgatccgaagtcttgtactcatcaagcatggttcttgccatgtccaaaagatttctatttttcctctccactacaccattttgttgtggtgtgtagagagagaagaactcatgcttgatgccctcctcctcaaggaagccttcgatttgtgagttcttgaactccgtcccgttgtcgcttcttattttcttgatccttaagccgaactcgttttgagcccgtctcaagaatccctttaaggtctcttgggtatgagatttttcatttgttagtcccaaaatgtgttctccctttagaagtttgtgaagattcttcattccaacatgtgctagtcgacgatgccagagccagcccatgttagtcttagcaattaagcaagtgtcgagttcagctctatcaaaatctactaagtatagctgaccctctaacactcccttaaatgctattgaatcatcactccttctaaagacagtaacaccttgatttccatccccgaatgtgatcgctctttggggatcttggtttttctcgtaggaggagaacattttcttctcccctgtcatgtggtttgtgcatccgctgtcgattatccaacttgagcccccggatgcataaaccttgccggatttgttagttaagacataagaggcatcaaaagttttaaataaaatgctatggtcatttgatgcactaggagttttcttcttaggcaacttagcacgggttggttgcctagagctagatgtctcacccttatacataaaagcatgatttgggccagagtgagacttcctagagtgaattctcctaatcttgtcctcgagataaccggcagggtacaaaatgtaaccctcgttatcctgaggcatgggagccttgcccttaacaaagttggacaattttttaggaggggcattaagtttgacattgcctccctgttggaagccaatgccatccttaatgccagggcgtctcccattataaagcatactacgagcgaacttaaatttttcattttctagttcatgctcggcaattttagcatctaatttggctatatgatcattttgttgtttaatcatggaaaggtgatcatgtatagcactaacatcaacatctctacatctagtgcaaatagtgacatgctcagtaatagatgtagagggtttgcaagaattgagttcaacaatcttagcacgcaatatatcatttttatctctaagatcggaaattgtaacattgcaaacatctagttctttagccttagcaattaatttctcattttcaatcctaaggctggcaagagtaacatttaattcttcaatcttagcaagtaaatcaacattatcatctctaagattggaaattgaaacattacaagcatttgaatcaaccttagcaattaaactagcattctcatttctaaggttgtcaatagtctcatggaaagtgcttagctcactagatagtttttcacatttttcaacttctagagcgtaagcatttttaattttaacatgcttcttgttttctttaataaggaagtcttcttgggtgtccaagagatcatccttctcatggatagcactaattaattcatttagtttttctttttgttgcatgtttagattggcaaaaagaatgcacaagttgtcctcctcattgctagcattttcctcatcactagaggtttcatatttagtggagaatcttgattttaccttcttccttttgccgtcttttgccatgaggcacttgtggccgacgttggggaagagaagacccttggtgacggccatgtttgcggcgtcctcgtcggaggaggagtcggtggagctctcgtcggagtcccactcccggcaaacatgggcatcgccgcccttcttgtagtacctcttcttttcctttcttctccccttcttgtcgtcgcccctgtcactgtcactagatagtggacattttgcaataaaatgaccgggcttaccacatttgtagcaaactttcttggagcggggcttgtaattcttccccctccttagcttgaggatttggcggaagctcttgatgacgagcgccatttcctcattgtcgagcttggaggcgtcgatgggtgttctactcgatgtagactcttccttcttctcctccgtcgccttaaatgcgaccggttgtgcttcgaacgtggaggggccatcaagctcgttgatcttctttgagcctttgatcatcaattcaaagctcacaaagtgtcctatcacttcctcgggagacattagtgtgtatctaggattaccacgaattaattgcacttgtgtagggttaaggaaaacaggtgatctaagaataaccttaaccatttcgtggtcatcccatttcttgctcccgaggttgcgcacttggttcaccaaggttttgagccggttgtacatgtcttgtggctcctccctaaacttcttgcgctcatggcgcttagaagtgatggacggcgtgtcagagccgaaggtggatggcgatgaggtgtcggtctcgtagtagaccactttcctcatcttcttcttcttgtcaccgctccgacacgacttgtgtgaaggggattccttttccttccccttccctttgttgtaggactctcccgatggagccttcccgtggcttgtagcgggcttcctgccggtcaccatatccttcttggcgtgatctcccgacat

SEQ ID NO: 30046 - DNA, 3924 bp, Zea mays
  Clone ID: MRT4577_127413C.1
ttattcttcatcaatttgagcctcatcctcattttgagttggtggagatgcttgcatggaggaggatggttgatcttgtgcatttggaggctcttcggattccttaggacacacatccccaatggacatgttccttaatgcgatgcacggagcctcttcatcacctatctcatcaagatcaacttgctctacttgagagccgttagtctcatcaaacacaacgtcacaagaaacttcaacttgtccagaggacttgttaaagactctatatgcccttgtgtttgaatcataccctagtaaaaagccttctacagttttaggagcaaatttagattttctacctcttttaacaagaataaagcatttgctaccaaaaactctaaaatatgaaatatttggctttttaccggttaggagttcgtatgatgtcttcttgaggattcggtgtagatataaccggttgatggcgtagcaagcggtgttgaccgcctcggcccaaaaccgatccgaagttttgtactcatcaagcatggtccttgccatgtccaatagagttctatttttcctctccactacaccgttttgctgtggcgtgtagggagaagagaactcatgcttgatgccctcctcctcaaggaagccttcgatttgagagttcttgaactccgttccgttgtcgcttcttattttcttgatccttaaggcgaactcattttgagcccgtctcaagaatccctttaaggtttcttgggtttgagatttttcctgcaaaaagaatacccaagtgaagcgagaataatcatccacaataactagacagtacttactcccgccgatgcttatgtaggcgatcgggccgaatagatccatgtgcaggagctccagtggcctgtcggtcgtcattatgttcttatgcggatgatgagtgccaacttgcttccctgcttggcatgcgctgcaaatcctgtctttctcaaaatgaacatttgttaatcctaaaatgtgttctccctttagaagcttgtgaagattcttcatcccaacatgggctagtcggtggtgccagagccaacccatgttagtcttagcaattaagcaagtgtcgagttcagctctatcaaaatctaccaagtatagctgaccttctaacactcccttaaatgctattgaatcatcacttcttctaaagacagtgacacctttgaccaaaccttgatttccatccccgaatgtgatcgctctttggggatcttggtttttctcatatgaggagaacatctttttctccccagtcatgtggttcgtgcacccgctgtcgagtatccaacttgagcccccggatgcataaaccttgccggatttgttagttaaaacataagatgcatcaaaagttttaaatgaaatgttatgatcatttgatgcactaggagttttctttctaggcaacttagcatgggttggttgcctagagctagatgtctcacccttatacataaaagcatgattagggccagagtgagacttcctagaatgaattctcctaattttgctctcgggataaccggcagggtataaaatgtaaccctcgttatcctgaggcatgggagccttgcccttaacaaagttggacaattttttaggaggggcattaattttgacattgtctcccttttggaagccaatgccttccttaatgcccgggcgtctcccattataaagcatgctacgagcaaatttaaatttctcattttctaagttgtgctcggcaattttagcatctagttttgctatgtgatcattttgttgtttaattaaagccatatgatcatgaatagcattaacatcaacatctctacatcttgtacaaatagatacatgctcaacaatagatgtagagggtttgcaagagttaagttcaacaatcttagcatgaagaatatcatttttatctctaagatcggagattgtagttttgcaaacatcaaaatctttagccttagcaagcaatttttcattctcaattctaaggctagcaagggaagcattcaactcatcaatcctagcatgtaaatcaacattatcatctctaggatttgaagttgaaatattgcaaacatgtgaatcaaccttagcatttaaactagcattttcattcctaaggttgtcaatcatctcacgacaagtacttagctcactagataacttttcacatttttcaatttcaagagcataagcccttttaaccttaacatgtttcttgttttctttaattagacaatcctcttgggaatccaaaaggtcatccttttcatgaatagcactaactaattcatttaatttttccttttgagctatgttaaggttggcaaaaagggaacgcaaattatcctcctcatcactagcattatcatcactagaagattcatatttagtggaggagttggatttaaccttctttcgtttgccgtcctttgccatgagacacttgtggccgacgttggggaagagaagtcccttggtgacggcgatgttggcggcgtcctcgtcgtcggaggagtcgcttgagctttcgccggaatcccactcccgacaaacatgggcatcgccgcccttcttcttgtagtacctcttcttttcctttcttctccccttcttgtcgtcgcctcggtcactgtcacttgttataggacatttagcaataaaatgaccgggcttaccacatttgtagcaaaccttcttggagcgggacttgtagtctttccctctcctttgcttgaggatttggcggaagcttttgatgacgagcgccatttcctcattgtcgagcttggaggcgtctattggttgtcgagttggtgtagcctcctccttcttttcctccgtcgccttgaatgcgacgggttgagcttcggatgtggatggatcatcaagctcgttgatcttcctcgagccttcgatcatgcactcaaaacttacaaaattcccgataacttcctcgggggtcattttagtatatctaggattaccacgaattaattgaacttgagtggggttaagaaaaatgagagatcttagaataaccttaaccacttcgtggtcgtcccactttacgctcccgaggttgcgcacttggttcaccaaggttttgagccggttgtacatgtgttgtggctcctctcctttgcgaagccggaaccgaccgagctccccctcgatcgtttcccgcttggtgatctttgtgagttcgtctccctcgtgtgcggttttgagcacatcccaaacttctttggcgctcttcaacccttgaactttgttatactcctctctacttaaaaaggcgaggagtattgttgtcgcttgagagttgaagtgctcgatttgggccacctcatcctcatcataatctttgtcccctacggatggtacctgtgcaccaaactcaacaacatcccatatacttttgtggagtgaggttagatgaaatcgcattaagtcactccacctagcataatcttcaccatcaaaagttggtggtttgcctaatgggacagaaagtaaaggtgcatgtttagaaatgcgagggtagtgtagggggatcttactaaacttcttacgctcttggcgtttagaagttacggagggcgcgtcggagccggaggtcgatgttgatgaagtgtcggtctcgtagtagaccactttcctcatcctcttttgcttgtccttactccgatgcggcttgtgggaagaagatttttccttcttctctttgtggtgagaagaagatttcttctccttccctttgttggaggagatcttcttcttctccttcctcttggtgcgggactcttccgatgaagtgctcccttggcttgtagtgggcttttcgccggtctccatctccttcttggcgtgatctcccgacat

SEQ ID NO: 30047 - DNA, 2106 bp, Zea mays
  Clone ID: MRT4577_127414C.1
atgtcgggagcacccgccaagagggagatcgggaccggcggcgacaagtccgcaagctcggggagaactcactcgagggagtccggccacaagcacaaggaggaatcctcttcctgcatcaagacacaacggagatgtgataagaagaagaagatgaagaaggtggtctactacgagaccgactctttgtcaccctccacctccggctccgaatcggcatccgccacttctaagcatcatgagcgcaagaagtatagtaagatgcccctctgctatcctcgcatttccaaacgcactccattactttctgtcccattaggcaaaccaccggtaccgaaggaaggggacaaagactatgattcagaggaggttgaacaaatccggcacttcaactcccaagccactactatactcctcgcctctctaagtcgagaggagtataataaggtgcaagggttgaaaagtgccaaagagatttgggacgtgctcaagaccgcgcacggaggagatgaggtgaccaagatcaccaagcgggaaacgatcaagggggagcttggtcgattcatgctcaaccaaggagaggagccacaagccatgtataaccggctcaagaccttggtgaatcaagtgcgcaacctcgagagcacaaaatgggatgaccatgaaatggtcaaggttattctaggatcactcgtttttcttaaccctactcaagttcaattgattcgtggtgatcctagatataagctaatgtctcccgaggaggttataggaaagtttgtgcaacccatcgccttcaaagcgacggaggagaagaaagaagagtctacgtcaagtaggctccccatcgacacctccaagctcgacaacgaggagatggcgctcatcatcaagagctttcgccaaatcctcaagcaaaggaaggggagagactacaaaccccgttccaagaaggtttgctacaagtgtggtaagctcggtcactttatagcaaaatgtcctatttctagtgacagtgataggggcgatgacaagaggggaaagaagaaggagaagaagagatactacaagaagaagggcggcgatgcccatgtgtgtcgggaatgggactccgatgagagctccaccgactcatcctccgacgaggacgccacaaacatcgccgtcaacaagggtctcctcttccccaacgtcggccacaagtgcctcatggcaaaggacggcaagaagaagccaagaggacttattaaggaaaacaagaagcatgttaaggttaaagatgcttatgctcaggaagtagaaaaatgtgaaaaattaactagtgagcttagcacttgccatgacactatctccaaccttaggaatgagaatgctaaattaattgctaaggttgagaaattaaatgtttgtgatgattctcttgtcaaacttaaaaatgataatgctagtttgattgctaagattgataagttgaatgaatctctttctagccttaagattgagaatgataaattaatttctaaggctaaggatttaaatgtttgcaatgtttctatttccaatcttagaaatgagaatgacatgttacatgctaagattgatgaattaaatgcttgcaaacccactacatccaccgttgagcatgtttctatttgtatgagatgtagagatattaatgttgatgctatccatgatcacctagctttaattaaacaagaaaatgatcacatagctcaacttagtgctaaaattaatgagcatgacttagaaaatgaaaaatttaaatttgctagaagtatgctctatagtgggagacgccctgacattaaggatgtcattggcttccaacagggagacaatgtcaagcttaattcccttaagaaattgtctaactttgttaagggaaaagctcccatggttcaggataacgagggctatattttatatcctattggttatcccgaacataagattaggagaattcattctaggaagtctcactctggctctcatcatgcttttatgtataagagtgaggcatctagttctaggcaatccactcatgttaaattgcctaaaaagaaatctcctattgcatcaatgtaa

SEQ ID NO: 30048 - DNA, 224 bp, Zea mays
  Clone ID: MRT4577_127415C.1
tctgccaaacacgcagtgatccatccggaaacaatgactgcatcgtaagttccaaataccagagactgaatcttcagccttgctaagggaacacctcgtttgaatctgttgtgttttgtacagggcaccattctctgtacacgtttgtggttataagattagtacaacagcttacatttgtatttattttctagtccatacttctgtagccccatttttttctc

SEQ ID NO: 30049 - DNA, 4239 bp, Zea mays
  Clone ID: MRT4577_127416C.1
ctaagggtttgcctcatccaaagtaattgcgcgcaacaatggcccgcggcaatatactcggcttcggcggtagaaagagctacggaattttgcttctttgaagcccaagacaccaaggatcttcccaagaactggcaagtccccgatgtgctctttctttggatcgacggttttacctcccgtgtcgaggtcgagatgcccattggttcccatgggtgtcttgatgggcttggcatccttcatcccaaacttgtttagaatgtcttgaatatacttcgtttggctaatgaaggtgccctcttggagttgctttacttgaaatcctaagaagtatttcaactcccccatcatcgatatcttgaacttctgtgtcatgatcctactaaattcttcacatgcagattcgtttgtagatccaaatatgatatcatcaacgtaaatttggcatacaaacaaatcattgtcaagagttttagtgaacaaagtaggatcggcttttccgactttgaagccattagtgataaggaaatctcttaggcattcataccatgctcttggggcttgcttgagcccataaagcgccttagagagtttatagacatggttagggtactcactatcttcaaagccgggaggttgctcgtcttgcttgttgcggaagacccacttggttcctacaacattttggttaggacgtggaactaaatgacatacctcattcctagtgaagttgttgagctcctcttgcatcgccaccacccaatccgaatcttgtagtgcttcctctaccctgtgtggttcaatagaggaaacaaaagagtaatgctcacaaaaatgtgcaacacgagatctagtggttacccccttatgaatgtcaccgaggatggtgtcgacggggtgatctcgttgtattgcttggtggactcttgggtgtggcggtcttggttcttcatcctccttgtcttggtcatttgcatctcccccttgattattgtcgtcatcttgaggtggctcatctgtttgatcttctccttcatcaacttgagcctcatcctcattttgagttggtggagatgcttgcgtggaggaggatggttgatcttgtgcatttggaggctcttcggattccttaggacacacatctccaatggacatgttccttagcgcgatgcatggagcctcttcatcacctatctcatcaagatcaacttgctctacttgagagccgttagtctcatcaaacacaatgtcacaagaaacttcaacttgtccagaggacttgttaaagactctatatgcccttgtgtttgaatcatatcctagtaaaaagccttctacagccttaggagcaaatttggattttctacctcttttaacaagaataaagcatttgctaccaaagactctaaaatatgaaacattgagctttttaccggttaggagttcgtatgatgtcttcttgaggatccggtgtagatataaccggttgatggcgtagcaagcggtgttgaccgcctcggcccaaaaccgatctgaaatcttatattcatcaagcatggttcttgccatgtccaatagagttctattcttcctctccactacaccattttgttgtggcgggtagggagaggagaactcatgcttgatgccctcctcctcaaggaagccttcaatttgagagttcttgaacttcgtcccgttgtcgcttctaattttcttgatccttaagccgaactcgttttgagcccgtctcaagaatccctttaaggtttcttgggtatgagatttttccagcaaaaataacacccaagtgaagcgataataatcatccacaataactagacagtacttactcccgccgatgcttatgtaagctatcgggccgaatacgtccatgtgtaggagctcgagtggcgtgtcagttgtcataatgttcttgtgtggatgatgaacaccaacttgctttcctgcctgacatgcactacaaaccctgtctttctcaaaatgaacatttgttagtcccaaaatgtgttctccctttagaagcttgtgaagattcttcattccaacatgtgctagtcggcggtgccagagccagcccatgttagtcttagcaattaagcaagtgtcgagttcagctctatcaaaatctactaagtatagctgaccctctaacactcccttaaatgctattgaatcatcacttcttctaaagacagtaacacctacatcttgatttccatccccgaatgtgatagctcgttggggatcctggtttttttcgtaggaggagaacatcttcttctcccctgtcatgtggtttgtgcacccgctatcgatgatccaacttgagcccccggatgcataaacccaaacacaagtctttgatcccttgtgtttgcccccaacatacttggcaactatcttgtcggatttgttagttaaaacataagatgcatcaaaagttttaaatgaaatgttatgatcatttgatgcactaggagttttcttcttaggcaattttgcacaggttgattgcctagagctagatgtctcacccttatacataaaagcatgattagggccagagtgagacttcctagagtgaattctcccaattttgctctcgggataaccggcagggtacaaaatgtaacccttgttatactgaggcatgggagccttgcccttaacaaaattagacaatcttttaggagggtcattaagtttgacattgtcccccttttggaagccaatgtcatcctttatgccagggcgtctcccactatagagcatgcttctagcaaatttaaatttttcgttttctaagtcatgctcggcaattttagcattaagttgagctatgtgatcattttgtttcttaattaaggctaggtgatcacggatagcatcaacattaatgtctctacatctagtacaaatggaagtatgttcaacggtagatgtagagggtttgcaggattttaattctacaaccttaccatgcaatatatcatttttacttctaaggtcggaaatggaagcattgcaaacatctaattctttagccttagcaagcaatttttcattctcaatcctaaggctagcaagagagatattcaattcttcaatcttagcaagcaaatcaacattatcatttctaagattgggaattgaaacatcacaaacatttgaatcaaccttggcaattaaattagcattctcatttctaaggttggtaatgacatcatggcaagtgcttagctcactagatagtttttcacaattttctacttctagagtgtaagcatttttaaccttaacatgcttcttgttttctttaatgaggaagtcctcttgggtgtctaagagatcatccttctcatgaatagcactaatcaattcattcaatttttctttttgttgcatgtttaggttggcaaaaaggatgcgcaagttatcctcctcattactagcattatcctcatcactagaggtttcatatttagtggaggatcttgattttaccttcttccttttgtcgtcctttgccatgaggcacttgtggccgacattggggaagagaagacccttggtgacggcgatgtttgcggcgtcctcgtcggaggaggagtcggtggagctctcatcggagtcccactcccggcaaacatgagcatcgccgcccttcttcttgtagtatctcttcttctcctttcttctccccttcttgtcgtcgcccctgtcactgtcactagatagtggacattttgcaataaaatgaccgggcttaccacatttgtagcacactttcttggagcggggcttgtaatccttccccttcctttgcttgaggatttggcggaagctcttgatgatgagcgtcatttcctcgttgtcgagcttggaggcgtcgatgggtgttctacttgatgtagattcctctttcttttctttcgtcgccttgaatgcgaccggttgtgcttcggacatggaggggccatctagctcgttgattttctttgagcctttgatcatcaactcaaagctcacaaagtttcctatcacttcctcgggagtcattagtgtatatctaggattaccacgaattaattgaacttgagtagggttaaggaaaacaagtgatctaagaataaccttaaccacttcgtggtcatcccattttttgctcctgaggttgtgcacttggttcaccaaggttttaggccggttgtacat

SEQ ID NO: 30050 - DNA, 231 bp, Zea mays
  Clone ID: MRT4577_127417C.1
gtcacgtgcacacccataccgtatgccgagtacctttgactctgcacagcatatttctcgctgtgactgtctcagtcgagaagcgcgggatcaggcatagagatttatgtctctgggtcaaccctttgttttgaggcgctggagcaccttgtcctgccttatgccagatctatgttcgtgcgcggtcacaatgatcctcatgcctctttacattggctacaagctgctcaa

SEQ ID NO: 30051 - DNA, 759 bp, Zea mays
  Clone ID: MRT4577_127418C.1
atgtcgggaggatccgccaagagggagatggaaatggacacaagccgcgggaaggctccatcaaaggagtccgacgccaaaggaagggaggactcacctccccgcgtcaagtcgcaccggagtggcgacaagaagaagaaaatgaagaaagtggtctactacgaggccgattcttcgtcgccctccacctccggctccgacgcaccgtccgtcacttctaagcgccatgagcgcaagaagtttagtaagatccccttacgctatccccgaatttccaaacacactcctttactttccgtcccattaggcaaaccaccggtttttgacggtgaagattattgtatgtggagtgataaaatgaggcatcatctaacctcactccacgctagcatttgggacattgttgagtttggagcacaggtaccatccgtgggggatgaaggatatgactcggacgaggtcgcccaaatccggcattttgactcccaagccaccactatactcctcgcctctctatgtcgagaggagtttaataaggtgcaagggcttaagagtgccaaagagatttgggacgtactaaagaccgcacatgaaggagatgaggtgaccaagatcaccaagcgggagacgatcgagggggagctcggtcgattcatcctcaaccatggagaggagccacaagcaatgtacaaccggctcaagaccttggtgaaagggaaatgtgcccttgggccatttctaagtgttttggtgatttag

SEQ ID NO: 30052 - DNA, 486 bp, Zea mays
  Clone ID: MRT4577_127419C.1
tgccagcaggtcgactctagagcttccactaaatatgcaacatctagtgatgaggctagctctagtgatgatgaggatgatttgctcacccttttgccaacttaaacatgcaacaaaaagaaaaattgaatgaattgattagtgctattcatgagaaggatgaactcttggatagccaagaggacttcctaattaaggaaaataagaagcatgttaaggttaaaaatgcttacgctcaggaagtagagaaatgtgaaaaattaactagtgagctaagcacttgccatgacactatttccaaccttagatttgagaatgataaattgattgctaaggttgagaaattaaatgttagtgatgattctcttgtcaaccttaaaaaagataatgctagcttaattgctaagattgacaagttgaatgaatccattgctagccctaagatagaaaatgataaattgattgctgaagcttaaaatttaaatg

SEQ ID NO: 30053 - DNA, 1071 bp, Zea mays
  Clone ID: MRT4577_12741C.1
gggtaccttccagccggccgctcaccaagatccagcatacacttcttccatccactagctaagcgcgccatggcaaagttcgctcttggtcaccaccgcgaggcctccgacgccggctgcgtccgtgccgtcctcgccgagctcatcctcaccttcctcttcgtcttcgccggcgttggctccgccatggcaacaggtacataccgtatagtataatatataacacatgcaccgtggcaatcatgcatgcacgcacgcagggaagctggccggcggcggcggggacacggtagtgggcctgacggcggtggcgctggcgcacacgctggtggtggccgtcatggtgtcagcggggctgcacgtctccggcggccacatcaacccggccgtgacgctgggcctcgccgccacgggccgcatcacgctgttccgctccgcgctctacgtggccgcccagctgctcggctccacgctcgcctgcctcctcctcgctttcctcgcagttgccgacagcgggcgtgcccgtgcacgcgctgggcaccggcgtcggcgcgctccggggcgtgctcatggaggccgtgctcaccttctcgctgctcttcgcggtctacgccaccgtcgtcgacccgcgccgcgccgtcggcggcatgggcccgctgctggtgggcctggtcgtcggcgccaacgtgctcgccggcgggcccttctccggcgcgtccatgaaccccgcgcgctccttcggccccgcgctcgtggctggggtgtgggccgaccactgggtctactgggtcgggcctcttatcggtgggccgctcgctgggctggtctatgacggcctcttcatggcccagggcggacacgaaccgcttcccagggatgacaccgacttctaggcagtaggtgtgtgttctcctgaataatttgaattgaaaacacatgtattgaagcctctaatgtttcggtttcgattcaaatggaatggaagcagcagtatcaaataaagtctcggtgaggtcgtaattcattttaaaaaaaaaaaaaaaaaagaaaaaaaaaaaaaaaaaagcggcc

SEQ ID NO: 30054 - DNA, 4080 bp, Zea mays
  Clone ID: MRT4577_127420C.1
ctaagagccaccgtcgtcacagagcttggggggcgccatcattgcccatccggcggagctggccagatgggacgccggtcttgtccttcgtgtcccaagtcggctcggggtaggttggtgatggcgcttcctgttgacgtggcgggtctgtgccctaggcagggtgacgtgggggctcctccgaagccgaggttgagtctgtcctctgttgccgaggccgagcccgagccatggggtcgggcgaggcggaagtcgttcggccgaggccagggcggagtccgagccctggggtcgggcgaggcggagtttcgtcgtcttccgggtcttagcccgagtccgagccctggggtcgggcggagcggagttcgccgtcttccgggtcttagcccgagtccgagccctggggtcgggcggagcggagttcgccgtcttccgggtcttagcccgagtccgagccctggggtcgggcggagcggagttcgccgtcttccgggtcttagcctgagtccgagccctggggtcgggcggagcggagttcgccgtcttccgggtcttagcccgagtccgagccctggggtcgggcggaatggagtttgccgtcttccgggtcttagcccgagtccgagccctggggtcgggcggagcggagttcgccgtggcgcctttggcaaggcctgactgccggtcagactcactctgtcgagtggcaccgcagtcggagtggcgcaggcggcgctgtccttctgtcagcccggtcagaggagcggtggagtgacggcggtcacttcggctcttttgatccacggacttacctcccgtgtcgaggtcgagatgcccatttgttcccatgggagtcttgatgggcttggcatccttcattccaaacttgcttaaaatgtcttgagtatacttcgtttggcaaatgaaggtgccctcttggagttgcttgacttgaaatcctagaaaatacttcaactcccccatcatagacatctcgaatttctgtgtcataatcctactaaactcttcacacgtagactcgttagtagacccaaatataatatcatcaacataaatttggcatacaaacaagtcattttcaagagttttagtaaagagtgtaggatcggcttttccgactttgaagccattagtaataagaaaatctctaaggcattcataccatgctcttggggcttgcttgagcccataaagcgccttagagagcttatagacatggttaggatactcactgtcttcaaagccgggaggttgctcaacatagacctcctccttgattggtccattgaggaaggcacttttcacgtccatttgataaagcttaaagccatggtaagtagcataggctaataatatgcgaattgactcaagtctagctacgggtgcataggtttcaccgaaatccaaaccttcgacttgggagtatcccttggccacaagtcgtgctttgttccttgtcaccacaccatgctcatcttgcttgttgcggaagacccatttggttcctacaacattttgattaggacgtggaactaaatgccatacctcattccttgtgaaattgttgagctcctcttgcatcgccatcacccaatccgcatcttggagtgcttcctctaccctgtgtggctcaatagaggaaacaaaggagtaatgttcacaaaaatgtgcaacccgagatcgagtagttacccccttatgaatgtcgccaaggatggtgtcgacggggtgatctcgttggattgcttggtggactcttgggtgtggcggtcttggttgttcgtcctccttgtcttcatcatttgcatctcccccttgattgttgccatcattttgaggtgactcatcttcttgatcttcttgttcaacatcttgagcctcatcctcaatttgagttggtggagatgcttgcatggaggaggatggttgatcttgtgcatgtggaggctcttcggattccttaggacacacatccccaatggacatgttccttagcgctatgcatggagcctgttcttcacctatctcatcaagatcaacttgctccacttgagagccgttagtttcgtcaaacacaacgtcacaagaaacttcaacaagtcctgaggacttgttaaagactctatatgcccttgtgtttgagtcataacctagtaaaaagccttctacagttttaggtgcaaatttagattttctacctctcttaacaagaataaagcatttgctaccaaaaactctaaaatatgaaacattgggctttttaccggttaggagttcataggatgtcttcttgaggattcggtgaagatataaccgattgatggcgtagcaggcggtgttgaccgcctcggcccaaaaccggtccggtgtcttgtactcatcaagcatggttcttgccatgtccaaaagagttcgattcttcctctccactacaccattttgttgtggagtgtagggagaagagaactcatgcttgatgccctcctcctcaaggaagctttcaatttgagagttcttgaactccgtcccgttgtcgcttctaattttcttgatccttaagccgaactcattttgagcccgtctcaagaatccctttaaggtttcttgggtatgagatttgtccttgccggatttgctagtaagcacataagaagcatcaaaagttttaaatgaaatagcatgatcatttgatgcattaggagttttctttctaggcaacttggcacgggtaggttgcctagaactagatgtctcacccttatacataaaagcatggttagggccagagtgagacttcctagaatgagttctcctaattttgctctcaggatagccggcagggtacaaaatgtaaccctcgttatcctgaggcatgggagccttgctcttaacaaagttagacaagtttttaggaggggcattaagtttgacattgtctcccctttggtagccaatgccatccttgatgccagggcgtctcccattatagagcatacttctagcaaatttaaatttttcattttctaagttatgctcggcaattttagcatctaattttgctatatgatcattttgttgcttaattaaaatcatgtgatcatgaatagcattgatatcaacatctctacatctagtacaaatggaaacatgctcaacactagatgtagagggtttgcatgaattaagttcaatgatcttagcacgcaagatatcattattatctctaagatcggaaatagtgacatcaaagtttttagccttagcaatcaaattttcattttctactttaaggctagcaagagaaatgtttaattcttcaatcctagcaagcaaatcatcattattatctctaggattgggaattaaaacatcacaaacatgagaatcaaccttagcatttaatctagcattttcatttctaaggttgtcaatggtctcatggcaagtgcttagcttactagacaatttttcacatttttctacttctagagcataagcattcttaaccttaacatgcttcttgttttctttaattaggaaatcctcttgggaatccaaaaggtcatctttttcatgaatagcactaatcaattcatttagtttttctttttgttccatgttaaggttggcaaaaaggatacgcaaattatcttcctcaccactagcattatcatcactagaagattcatatttagtggaggagttagatttaacctttttccttttgccgtcctttgccatgaggcacttgtggccgacgttgggaaagagaagtcccttggtgacggcgatgttggcggcgtcctcgtcgtcggaggagtcgcttgagctttcgtcggagtcccactcccgacaaacatgagcatcgccgcccttcttcttgtagtacctcttcttctctttgtgatgcgaagaagatttcttctcctttcctttgttggaggagctcttcttcctctccttcctcttggtgcgggactcttccgatgaagtgctcccgtggcttgtagtgggcttttcgccggtctccatctccttcttggcgtgatctcccgacat

SEQ ID NO: 30055 - DNA, 644 bp, Zea mays
  Clone ID: MRT4577_127421C.1
ttgggaccctcgaggccggccgggaatgaccaccttagggattcagcgtagctaattagtaattacactgctcgaccagttggagacaatcggggtccacggcgagacggagccgtgacacctcgtggtcgcgacgtacccgggacgcgtccacgtgaacgcgatgatgaacctatgtcgcctcctggcatctcgagacggggtcaccatcaccatcatagagaccgatgagcggctcagactcctcggcgtcccgacggcgctgccatacctcgaactgcgcgtccgctttgaggccataccaaacgggatcccctcggagcacggccgctgcaacgacatgcacggattcatggagggcgtgccacaccaagatggcggcgacgttacgagtcggcttctcgacaggatcgcggtgtctgacgacccacggatattgtgggcgacatgatcgcgtcgtggaacataagagtacccaaaagaagacttgagcctgtgtgcatcatgggcccgattatggccaccatgttcacgctgcagtacaacttacacctgctaccacccgcggcgaccggcattgcttggagaacggatatcactgtatcttgatatgttgaaactacattcctgtgacaaatcaatca

SEQ ID NO: 30056 - DNA, 250 bp, Zea mays
  Clone ID: MRT4577_127422C.1
attcggctcgagctggatgcttctgccctggacgcttgctaaaagaaaaaaaaaaatataaaaaaaaaaaaaaaaaaaaaaaaaaaaaaaaaaaaaaaaaaaaaaaaaaaaaaaaaaaaaaaaaaaaaaaaaaaaaaaaaaaaaggggcggcccccaactagtgagctcatcaacccggaaataaattcccaaccggtccctgaaggcgtaccaattttccttatagggagtcaaataaaactttggcga

SEQ ID NO: 30057 - DNA, 582 bp, Zea mays
  unsure (1)..(582): unsure at all n locations
  Clone ID: MRT4577_127423C.1
gagtaccgttgcttcgttggcggcctcgcctgggccaccgccgccccctccctcaacaacgccttcaagcmctccggcgaggtcctcgagtcgaagctcctcctggvtagggagacgccrgmggtccccgcggcttcgggcttcgtccccnttctcccccggcgggmgcgcgattgcscrcgcgcccctcggrgggccctgmaccggcrarggmgtctcgccggccgcgmccctcccncgttccacggggcncccctcccgcggcggccgcggcgcgcgcgcgcgtgcgcggntccggtggcgggcgccgtgctggcggcsgctccsgcggtggcgstsgcggctccggccsycsycgtggcsgctccgscgscggcggtgggggctccggtggtggccccccgcggcggcggctccgscccccccgccgggccctgggggccctgggcggtggggtccgctgcggcctggttctkcttgttcgcttctgctcccgtgttccccctbgtctsgcgggggtttctcttcgtctgtggtsgtctcgtgtccgtttgtttcgtttcgtgttccttgttgttgttg

SEQ ID NO: 30058 - DNA, 523 bp, Zea mays
  Clone ID: MRT4577_127424C.1
atgattcttacaggagaaaataaacaaacttcaaacatttaaaaagtatttttcatttacctttgcattagtacttaaaatacacatttctatttcaagatgacatttaaaaattctaatacaacagcagcataaatataactgcaattacaaaaaaagctaaactgggatccacagttaagttattctcatgtttacaagtatgattctgaaataaatactacttctaagcagctgtctcggttttgttggtggtgcttgctttttagttaggtatctcatagtgagtttttgtttatgttgaaaataaatcatttgaatgggtcagacaataatatggtaatttaaatattggcttttttttcttgcaggtttgatttgcctggtaaccaaattacttgtgaccaattaactagctaggtcattcacgggagtcaaattagcacaaaagaaacatgtcacttttaaatgtagtgataaaatatgctccttcttaaactcttctgttaaaattagttgtaaa

SEQ ID NO: 30059 - DNA, 265 bp, Zea mays
  Clone ID: MRT4577_127425C.1
accgtctcctgttcctgcttctgatgatgtggcgccattgtgtcaaccagtagcaccatcttcaggttcggcgctccctctgtcgtcacctcatcatgatgtgtctgaagcctctacacaattgaatcagtagcgcctgcagatcaagagcagggtgatctgacctttgctaatcctcgaccgactataccagacttcagcggggaattgtaaagtcaaaatagtatactgatggcacaattcgttatgggctctcctctgctat

SEQ ID NO: 30060 - DNA, 224 bp, Zea mays
  unsure (1)..(224): unsure at all n locations
  Clone ID: MRT4577_127426C.1
atanttttttacaacaatctcccagatctgngggatgctaccaaaaatcagggatgctacgaacaagaagaaaccaaaggagcgagcaagcaatgtgttacaaagggggagggggagagagatcctaagctaaaccagcgaggggcggtatgcagttgccaccacgagcatgcacgatggaccgcatcttgatagctagacgccttctccgaaggcgcagggac

SEQ ID NO: 30061 - DNA, 222 bp, Zea mays
  Clone ID: MRT4577_127427C.1
ttctatatcacattcctccccctttatttttccaaactcacatacccccacgggcgagttataaaatatctgtccccccacaaaaaaccaactcactcaccctccctttacaacatcaacactggtaaaacccagccaccccccaccttacatctatcgccgcccatgcatctaccaccttctgtcgaactatcaaatacgtccacacccatcccccttccc

SEQ ID NO: 30062 - DNA, 329 bp, Zea mays
  Clone ID: MRT4577_127428C.1
agggaacgtaaattaaaatttttaaccaaattacccccccataaagaaaaaaaaggggcaaaaagcccgggggccccatttaaggaccccccaaataatcccccaaacatataagaaaaaacttccccaaatttttccatacggggggggcttcagctggcaaaaaaaaaattccaattcccagggaaccggaaccggttaacagcctgatttgttaacccctgttgaatgggggccccctccccgggggcctccataacccggggaagggccagcccccccccctttttggcccgaaaggacccgttggccatgagggccgaaaactc

SEQ ID NO: 30063 - DNA, 351 bp, Zea mays
  Clone ID: MRT4577_127429C.1
cccgggtcgacgccatagtgctcggccgcccacagcaacagcccgccccagcccgcgcccacgtcgagaaagcgctcgcccggccgcagccgcagcttgcggcagatgtggtcgagcttggcttcctgggcctgcgccaggttcatgcccggctcgcggtaataggcgcaggaatagacccggcgcggatccagccacagggcatagaaatcgtcggacaggtcgtaatggaattcgatctggcgggcgtcgcgctccaccgagtgacgccacaccgacatcaccttgcgcaccagctcggtcagccagccgccgcgcgccgcgtccaccggtgaacccggcagcagcgcc

SEQ ID NO: 30064 - DNA, 826 bp, Zea mays
  Clone ID: MRT4577_12742C.1
cccgggtcttcgaagggcccatgggacctgtgtttagcagctcgctgtacggggaagacgaagggaatgattcagaacttgctgacatccatgttttagcgagggaaggagcaactgaggatatagtgaagtttctggcagcgggtgtggaagtcaacatgagagatactgaaggtagaactccgctgcactgggctgttgaccgtggccatcttagtgctgttgaggttcttgcaaaagcaaatgcggacctgaatgccaaggacaacgaagggcaaacggcactccactacgctgctgtttgtgaaagagaagacatcgcagaattgctcgtgaagcatcatgccgaccttcagatcaaggatgaggatgggaacacggcacaggacctgtgccctccgagctggtcttttatgaaccgggcgaactgacaaccaacatgctaccttacattagctgtactctaagctggtaccgcacttggtcaatgtgttttttatttatgggggacatatggtgtgccctgtgtgaagtgccgtgcgtggcgcccgctatgacgattgggaaatcagatgagctgttttattttatccacctcatctaactagttgtcaaaactcaaaagtcgagtggttgaagtgttagtgctgggagatacatgtgttgccttacaccaatggtctgttactgttagtgaaaaggaactacaatcatacatgtccttgttgtaccttgtttcctttgtatttattggaccgccgtttgtgtgtttcgatggggttggaggcgacagagttccaaaattgatacaagtttttctttttgg

SEQ ID NO: 30065 - DNA, 151 bp, Zea mays
  Clone ID: MRT4577_127430C.1
cggacgcgtgccgccgggggccgggccttcctcccggtcgttgtcctgcctggcggacgctttgcggcatccctggcgctgggtgtgaaccctaccaccgggggtccggcggacgtccttcggtccgggagagggtcatctgtgctggaga

SEQ ID NO: 30066 - DNA, 392 bp, Zea mays
  Clone ID: MRT4577_127431C.1
ggaaccgggaaaaaacatgttttggccccggcccggtccatggatctttaagggcccccggggccatgaaaataatcccccccaggattagggggggtttcaatgggggatcgacctgcccccggacacatttatctttggccgcaaccgtttattctttattggccggggggggagccaggaccccctgcgacccaattgttccccccttttggcagccccccaacagggcctgggaatacgggctccacaaccatgcccaattggagcggccccccccgtggccctgatcctggcagggcccccccccatctttgggaaaacaaatagggggggggtgagattccttccaacactttttgtaatgagcagtccacccccttgcgctgggg

SEQ ID NO: 30067 - DNA, 253 bp, Zea mays
  Clone ID: MRT4577_127432C.1
acccacgcgtccggggatctctggcttctccccgtcccgttcctgcttaccttccttgtatagccgaatagcgaaacgactgctctcgcgagctcgacgctagatgtaccttctgctgcgcccactgcccgcttgtgtactataatgtcacagcgcccctgagccgccacctgacccaaactatacgttcccttcggcccttagacgctgaagccgctcaagtaaacttcacccaccggatactacttctaca

SEQ ID NO: 30068 - DNA, 343 bp, Zea mays
  Clone ID: MRT4577_127433C.1
gggggtggggttttttttttttttttttttttttttttttttttttggttgaggcgaccgccggggattccttccttctgctggtgggggcatctcgaatgggtttttctctctacttttattttttttggtagcggcggccggggcccgggggggggggggggggttcaaaatggacagggcaaccacctgcgcccactggttgagccgcattttcaccggctccggggtgtcgtctggagagagtatggacatggggctgccgaggggggacttcttggacgaggacgctttcgacgcggggacgtatgagcacggggggtcttttgtagacctgccgtgg

SEQ ID NO: 30069 - DNA, 1934 bp, Zea mays
  unsure (1)..(1934): unsure at all n locations
  Clone ID: MRT4577_127434C.1
ctcatttgtacttctgcgttttatactcagatcatgacattactagcggaaactcctgcaccatataatttattggtacaatgcattgtagaataatcccataacatattggaggaagcttgttgaggaccattttgcacacccagcaagagaaagatggtgtgtgtcatcttacgaaaagagagcgaatgcttcagtttctactgcacaaacggctcaggacgtgtggcgatgcaacatatgcaaaacacatggtgcaaaaggatatgaatctacctatgaagagcttcctagactctggcaaattagatttgatcatggtgttatagacgaatacctattccttgacatggcccagcccaacgaattccaattgcctaatggactaatggtgctggagcatacaaaagttgttcaaaagagcgtttatgaacacctacatgttatacatgaggggcatttgagaatcatattcacaccagaattaaagatcatgtcatgggagttctgttcacgacgacatgaagagtatatcactcgccgggttctggcaccgaaggtcaataatttgctacaggttgcccagaaattccaaaccgctgccactgaaaatggtcctgctggggtttcaaataatgatgcacaaaccatttgcaacatgtttgtggctgcatcacgacaactagcgaagaatctggagcaccacaccttgaatgaacatggcctttctaaacgatatgttcgctgcctgcagatatcggaggtggtgaataacatgaaggacttgattgagttcaccaacaaaaacaatcttggtcctatagagggcctgaagagttatccaaaaccaaatgtgtcggagcttccaggacagaatccgcgtgagacaaaacaaatatcggctgctggtggtcttccgaatgaccagaacaacactgaagctatgggtaccaagcaagaaataagcgctggtgcggacaacggagcttctgttgctggagccgtcggtaatagtgctccgcagaacgctgcagcactaaacagttaccaaaatttaccgagaagctccagcgcaaatcagagtcagcttcagcaggaggcatccagtgccttcgaaggtcctgccgcgacgcgcaatgccatgcagatggaagcatctaggtccttctgtggacctaaccnaagtgcagctagcacgattccaacatcctgggtcatttcagcacccaatgccccagnacaacaacctccagggcttggggttgcaaaacaatcaccggggcctgggcgtgagcccacagtntcagcngcatgctttaaatcagctgattcaagaagttaagaacgctaaaaggcacacactgccacagcaaccacctctagatatccctaacataagcagtggtataacatcaggaggtgctaacaccaacagtgctggtacaggagatcagggacagcgcatggccgtaaatggtgctgccaccatctataccgggcctactagtgtgatcaataacagcacagccagaagtaacaatttcaagtcggtaagcagcaatctggctgttgctgctgctcctgctggaggcaatgccgcgactttgaaggccaagcccttccatgaatttgatgacctggagcatctcatcgctaatgaattggtggggagcgggctgctcaacggtaacgagttggcgtggaacagttgacagagtacaaagacatctcgctgctcagacttgagcgttaaagtgttgagaacagccttcttggtagattttgctagcatggaaactagtatgtgtcggtggaaagctaccccagatcctagtttctgtttctcttttggtagattttgtattgccggtcgggacagttaactgataggagttggatttggcttgtaaatgtgagataggagttgcattgcc

SEQ ID NO: 30070 - DNA, 791 bp, Zea mays
  Clone ID: MRT4577_127435C.1
aaccccagaggactgatgttggtatcttctgaatgagcggtgtaactccaatacaaccagcaatcaacagtgactgcaacagattgcttactctctgctcattcacccggacaggcaagtaagcatctacatgcttttcaggatcaaatacttcaggcactgttcctgatccattcccttctggaataattgcatccttcaggtctttcagttctttgtgagcagaaatagtgtcgcctccgtggtccatttttatgaaaacatattgcattttgacataaacttcggaactggtagcattattcatcatgccctccttggcagtttggaccatcttcttgcgaagcaactgcctcttgaggaccgctaggcttcttgtatgcatcggagattgggggagtactccattagatggaggaatgccaagaagaccccagatcaaggttgtcaagctcaggaccaaaatgtcataatggtaggctgatgggttcttcaaattaaattccttctgctgactcatctgggaagctaccctgtggtcaaagaaatagagccctgcgaccatggtggcaggcacaatagccaggaatatatgtactgtagggactgaaaacaaatcttttgctactgtccaatgctggagcgacttgggttcccaaggaagtggggtgaagagcctcctagggacccctgaagggatcctgcttggcaatgaatatgccaatgctgtccaaagtatcaccatcagtggaacaccgtagtccgcaattaagctcctttgccactcgtgc

SEQ ID NO: 30071 - DNA, 530 bp, Zea mays
  Clone ID: MRT4577_127436C.1
ggcggacgggcactctgttgcatcaatttgttgttgcttgtttggaactgcaaagatcaaagcgaagcggtctaatatacaaggcaagtggcgcatgttgtaggtgggaaattatgtttcccatggttagcttactgaacgctgaaaaagactgcaccaacggtgggtgtgggtgattaggagctacgattgccaaaaaagaggtggttaagcgggcaactgttgtggcgaggaagcaaggggacatagcatggcataagtctggtgagtagcatatggaagaatatgtgtgtgtggtgtgtcgcagaaggcatgtaatggtataccacaaacggggcgaggaatggcggtgcaagtggtagattgcgataaagcaagacggttggcaacaacgcttgtacgaaacgataggctcggacagttgaatgataaaggcccattgctcccaccgaggggaggaactgggaaaaactggaactcctagcaagagaccattggggtaaaccgaactcatttgttgaactgaaaaa

SEQ ID NO: 30072 - DNA, 807 bp, Zea mays
  Clone ID: MRT4577_127437C.1
cccgggggtgtgggggttttttttttttttttttggcaatgcaactcctatctcacatttataagccaaatccaactcctatcttaagaagttacatcagttaactgtcccgaccggcaattcaatatctaccaaaagagaaacagaaactaggatctggggtagctttccaccgccacatactagtttccatgctagcagccaagaaggctgtttctcaacactttaacgctgaagtctgagcagcgagatgtctttgtactctgtcaactgttccacgccaactcgttaccgttgagcggcccgctccccaccaattcattagcgatgagatgctccaggtcatcaaattcatggaagggcttggccttcaaagtcgcggcattgcccagattgctgcttaccgacttgaaactgttacttctgctggggacaacgctggctgtgctgttgttgatcacattagtaggcccggtatagatggtggcggcaccatttacggcgctgttattcatgcgctgtccctgatctcctgtaccagcactgttggtgttagcacctcctgatgtgataccactgcttacgttagggatatctagaggtggttgctgtggcagtgtgtgccttttagcgttcttaacttcttgaatcagctgatttaaagcatgctgctgatactgtgggctcacgcccaggccccggtgattgttttgcaaccccaagccctggaggttgttgtgctggggcattgggtgctgaaatgacccaggatgttggaatcgtgctagctgcacttggttaggtcca

SEQ ID NO: 30073 - DNA, 1122 bp, Zea mays
  Clone ID: MRT4577_127438C.1
atgaagaaagtggtctactacgagaccgactcttcatcgccctccacatccggctccgacgcggcgtccgtcacttctaagcgccatgagcgcaagaagtttagcaagatgccccttcgatatccccgtatctctaagcgcactcctctacttttcgttcccttaggcaaaccaccatattttgatggtgaggatttatggatgtggagtgacaaaatgaggcatcatctaacctcactccacacaagcatttgggatattgttgagtttggagcgcaggtacctacggtgggggacgaaggctacgactcggacgaggttgcgcaaatacgacactttaactctcaagcaaccactatactcctcacctctttatgtcgagaggaatataataaggtgcaagggttaaagagcgccaaggagatttgggacgtccttaaaaccgtgcacgaaggggatgaggtgaccaagatcaccaagagggagacgatcgagggggagctcggtcgattcgtcctcaacaagggagaggagccacaagcaatgtacaatcggctcaagaccttggtcaaccaagtgcgcaacctcgggaacaccaagtgggatgaccatgaaatggtcaaggttattcttagatcacttgtttttcgtaatcccactcaagtgcaactaatccgtggagatcctagatataaacagatgtctcccgaggaggttattggcaagtttgtgagctttgaacttatgatcaaagacgccaaacatattgtcaacttggagcaaggcgccacctcaacacccgaggtgcaacacgtcgcattcaaaacgacggaagagaagaaagaggagtctacatcaagtaggcttcccatcgacgccttcaagcttgacaacgaggaaatggcgctcatcatcaagagcttccgccaaatcctcaagcaaaggagggggaaaactacaaaccccgctccaagagggtgttctacaaatgtggacaagaaggggaataagaaggaaaagaagagatactacaagaagaagggtgtgacaccccagtatcaccttgggtttcttctcagagctaactcaaaaccattatcacatgtgaaccaaattgagtaa

SEQ ID NO: 30074 - DNA, 1563 bp, Zea mays
  unsure (1)..(1563): unsure at all n locations
  Clone ID: MRT4577_127439C.1
gaaactgccactttgccaggcgggcgggttctgcggtcaacagagagaacagcactgtctccgtctatactcgtcaggcatcatcaccgccttctcccgaggctttcgagatggcggcggcggaagcttcgaggacttcggaggcccgccgtgacgccgtgttcgggcggtgggtcgtcttctcgccggcgcgctcgcgccgccccaccgacctcaagtcccacaaccccaccaaccctagcccgggcccaggggccgacgcgccgcccaagccgtcctgccccttctgcgccggccgcgagtccgagtgcgcgccccagatcttccgcgtgccgcccgacggctcgctgccgtggcggatccgcgtcatccagaacctctaccccgcgctgcgccgcgacgtggacccgccgccgcgccgcgacgtggacccgccgcctgtgccagaggcagagggggatgtctcctcggacgagcctggggagcgcgccgtccccggcttcggcttccacgatgtggtcatcgagacaccgcgccacgacgtgcgcctctgggacctggacgccgagggggtccgcgacgtgctgctcgcctacgcggagcgcgtgcggcagctcggggagcaccctgcggtgcagtatgttcaggtgtttaagaaccatggggcatccgctggagcttcgatggcgcattcacacagccaaatgttgggaactccctttgtccctccctctgttacaactcggcttaactgcatgaaggagatttttgacagatcagggaactgtagcctttgtgagattaggcccaaagatatcctgatcagtgaaacacctaatttttctgccattgttccttttgcagcatcatatccatttgagatatggattattcctcgacaacatatttcttattttcatgaaatagatcaagataaggcactggaccttgggtctctgttaaagactatgctgcaaaagttgtctaagcagcttaatgacccaccattcaattttatggtccacagcgcaccatttaagatttcatcatcctgcctgccttatacacactggttcctccagattgtgccccagttaagtgtagtaggcggatttgagcttggaagtgggtgctacatcaacccagttttccctgaggatgctgcaaagattctcagggaactcgactgctcagtctagtggtggtcgacgtctaaccttttaactagataggaacgagggatgtgttcctctgtacttttctgggaagcaaaaataccgtgctaataattcaagcagacagctaacttgattatgtaacatcaggccctgctttggcgagggtgatctgctggggtatctttcttgcccttgcttcaaacaggaagcatgccaagttgggctttcttttttggccctgagattgatgttgcctgtctgtacagactagagagtggttataaacagagttttcgtttgacgattaataagttgtttgatatctttttacctgagaccttggtttatgctaaaaaaaaaaanaaaaaanaaaaaaaaaccaccc

SEQ ID NO: 30075 - DNA, 215 bp, Zea mays
  unsure (1)..(215): unsure at all n locations
  Clone ID: MRT4577_12743C.1
tcgtccttnttaactaatctttccnanaaaaacncccccagggagggcttttttgggaaaagcgtgcccacacccacccgacacaggacacgaacagcaggtactatgcccacctccaaacagaacgggcacccgaccacacaagcacattgggggcaaaaacgacccctgaattaatgaccaccagagaaaccgagcacaaggcagagggcgct

SEQ ID NO: 30076 - DNA, 284 bp, Zea mays
  Clone ID: MRT4577_127440C.1
acaaaaaggggaaaacccgggggggcaaacatttccacacgaggtccacgggcacctatttttttgaccccttagccctcccatttgggcggtggaacccaagaaagtttcaacaaaacccaggtccctcttttggcgggtaacaaaccaagttttgtgtttcctttccaaacaggggggcctctaatccctgtgttctgaagggaacttctaaaggccactcagtaaaagtggggcatggcctttactacactgggcaaaagaaggcatttagaaagcccccc

SEQ ID NO: 30077 - DNA, 2835 bp, Zea mays
  Clone ID: MRT4577_127441C.1
atgacgaggaggaatatgaggatgatagcgaggatgagtcttcatcaccacaagaccggcgatgtggaagaagaggagattcgccggttctacacccatctcaataaagaagacaaagtgttcttggttaagctgttgaggaggaacaaggaacaaggcgagacgcttctcaggctagaggaaactctcatcaaaaccaacaacagcctggagaagatgaccaaagaacatgaggagctaaagtgctctcatgataatttggtccaacaatatgaatctgttttatttgagcaaagaaataatcatgatgtattatctgatgttgctcaacttaaaactgagatttctatgcttaagagtcaagtagaaatgataaatttagaaaaaaaaattgctttaagtgaaaaatatgatatgctatcttattctcataatgaattagttgatgaccatatcatgcttgatgttgctcatgaggttgtaattgcgaacttaaattcatgtgaacctcattcttgcacacgtgcgcatttagataatatatcaccatgtgctaacctctgttgctcaaaagaaagccaatttttgaatgagcatcaagctgcaggatcaaaagaaaagcttctcatcaataaagaaaggaacaagaaagcaaaacaactaaggagaagacgcattgctcaacctcctcaagatatccatggacgcgtggtgaagaagcttgagacgggagaaaccgcagcaagtgtccataagaaggatgttcccaaagcaataaatgaagaaatcaacatgaacaaggaaaaaggtaaaaattcaattactcatgttgtttgcattgatcatctctctatgtcatctaagagcaaaaagggaagaggaaaaaggaggtgcttcaagtgcaaggaattaggtcacttcattgcgtcttgtccacacaaagacaaggatgaaggaatgaggagatgttttggatgcaacgataaggaccatatgttcacttcatgtccactcatgaagaatcaaagatgtgcaccctccaagatgaccctcactaagaaaaaagacaaacagcaagtgtcatgtcaggttgagcgatgcttctgctacatgtgtggtgagcatggtcatctacctaaggtaaaaggcaaagagacaaccgatcaagccaatgatggaggcaagaagagcttcaaggtaccgagtgcacgggagaaggtcaaggagaccaggaacccaaagccaggggtgaagaagaagacttgcaaagtcaaggttgatcaagttaagaagagttatgggaccaatgtgagtcaaatccaaaagagcaaaggaagtccagctgaaaggccagtggagtacctgctgcgggtgcaccgtccgattgtaagcagccatgacatcgttgtaactgacatcaacatagtggaaggctctatctgtcacactgacatatctgagcaaacggaggaaggagttgaaatagactccaagccaaggcgacatccagatcctgttcccgggcatagggaactttcatcttctccctacacaccccaacaaaatggtgtagtggagaggaagaatagaactctactggacatggcaaggaccatgcttgatgagtacaagactccggaccgagtctttggaagcaaatgttttattcttgttaaaagaggtagaaaatctaaatttgctcctaaggctatagagggctttttatttggttatgactcaaacacaagggcatatagagtcttcaacaaatccactagattagttgaggtttcttgtgacattgtgtttgatgagactaatggctcccaagtggagcaagttgatcttgatgagctagatgatgaagaggctccgtgcgtcgcgctaaggaacatgtccattggggatgtgtgtcctaaggaatccgaagagcccactcatgcgcaagatcaaccgtcatcttccaatcaagcatctccaccaactcaagatgaggatcaggctcaaaacaatgaagatgaagatcaagaggatgagccacctcaagaggaggacaataatcaagggggagatgaagttgatcaagacaaggaagatgatcaagaaattcagggtcaaagaccaccacacccaagagtccaccaagcgattcaaagagatcaccctgtgaactcaattctctgtgatattcataagggggtaaccactccatctcgagtcgctcatttttgtgaatattactcttttgttttctctattgagccatacagggtggaggatgcactaagagattcggattgggtgctggcaatgcaagaggaactcaacaacttcacgaggaatgagtgggtattccgcaacaagcaagttgagcatggtgtggtgacaaggaacaaagcccgacttgtggccaagggatattcacaagtcgaaggtttggattttggtgaaacttatgcacccatagctaggcttgagtcaattcgtatattacttgcctatgctactcaccatggctttaagctttaccaaatggacgtgaaaagtgccttcctcaatggaccaatcaaggaagaggtctatgttgagcagcctcccggcttcgaagataagtttagtaggataatgattcaaaaattcgagatgtcaatgatgggagagttgaaatattttctgggatttcaagtcaagcaactccaagagggcaccttcatcagccaaacaaagtatattcaagacatactcaacaagtttggaatgaaggatgtcaagcccatcaagacaccctgggaactaatgggcatctcgaccttgacacgggaggtaagtccgtag

SEQ ID NO: 30078 - DNA, 811 bp, Zea mays
  Clone ID: MRT4577_127442C.1
gccggccgggtcgggaagagctgaaagagctaaactactactacacacacacacacacacacatcctacgcatcttctcgcagccatctttgtggaagcaaggcgggcaacatcgtgtggctagccagcaagggagagaaacaagcacaagcatggcctcaaaacctggccctctgagtcgctggccatggcaagatcttggaaactacaagtacgcgctggtggctccatgggcggtgcgcagcacgtacaggttcgtgaggagcgggagcggggagcgggacctgctcgccttcgccgtgctgccggtgctcctcctccgcctcctctacagccagctctggatcaccgtgtcccgccaccagacggcccggagcaggcacaggatcgtcaacaagagcctcgacttcgagcaggtcgacagggagaggaactggtaatgactaggcggagagccagaaggaaggccgcagcagtatactgttttgcgtgcgtttaatttatatagtatatggcaacgaacgacaacaaataatgtgcagggacgaccagatcctgctgacggcgctgctcttctacgcggtgaacgtggcggtgccggtggcgcagtcggtgccgtggtgggactcgagggggctgctggtggcggcgctcctccacgtgggtcccgtggagttcctctactactggctccaccgcgcgctgcaccaccactacctctacgcccggtaccactcgcaccaccacgcctccatcgtcaccgagcccatcacatcggtgatccatccgttcgcggaggagctggtgtact

SEQ ID NO: 30079 - DNA, 237 bp, Zea mays
  Clone ID: MRT4577_127443C.1
gatgacacgacaacagttgatcccagctacactatctcccttatacggcagctactaccccagggttccaatgtggagaaagagttcagtgtgaagcaatgtgccccggacgagaaggatgcaaattctggtaatggggaatcagcgcaacctgattataaggatccatgggaagagtgtggttgcattctgtgggaccttgcagctagtaaaccacaagcagaactgatgatgaac

SEQ ID NO: 30080 - DNA, 2523 bp, Zea mays
  Clone ID: MRT4577_127444C.1
gcgaatcacagtcgcgcctatctcagcttgctgcactgccctgccatcatatcaatatcatatcgtacgtgagcccggccgagagcgagggagaggcatggctgctccgaagctcgcgacgctggcgctggccgtgctcctggcggcgacacgggtggctacccctgccgcggtgcgcgcggtgatgtagtgctccaccgggtacagcacgctcatgtcgtgcgtgccgatcgttcatattggcaaagccatgccagcctatattaggtacggaaaaaaaagggttgcatatgggttgcggggctgaaagctaaaaactactactacacacacacacacacacacatcctacgcatcttctcgcagccatctttgtggaagcaaggcgggcaacatcgtgtggctagccagcaagggagagaaacaagcacaagcatggcctcaaaacctggccctctgagtcgctggccatgcgcaagatcttggaaactacaagtacgcgctggtggctccatgggcggtgcgcagcacgtacaggttcgtgaggagcgggagcggggagcgggacctgctcgccttcgccgtgctgccggtgctcctcctccgcctcctctacagccagctctggatcaccgtgtcccgccaccagacggcccggagcaggcacaggatcgtcaacaagagcctcgacttcgagcaggtcgacagggagaggaactgggacgaccagatcctgctgacggcgctgctcttctacgcggtgaacgcggcggtgccggtggcgcagtcggtgccgtggtgggactcgagggggctgctggtggcggcgctcctccacgtgggtcccgtggagttcctctactactggctccaccgcgcgctgcaccaccactacctctacgcccggtaccactcgcaccaccacgcctccatcgtcaccgagcccatcacatcggtgatccatccgttcgcggaggagctggtgtacttcaccctgttcgccatcccgctgctcaccatggtgggcaccggcaccgcctccgtggccgtggccaacggctacctcgcctacatcgacttcatgaactacctcggccactgcaacttcgagctcgtccccaggctgctcttcgacgtcttccctcccctcaagtacctcatgtacacgccatcgttccactcgctgcaccacacgcagttccgcagcaactactcgctcttcatgccgctctacgaccacctgtacggcacggcggacaagtcaagcgacgacctgtacgagcgcgcgctgcagggccgcgccggggaggacgcgcccgacgtcgtccacctcacgcacctcaccacgccggcctccctcctccgcctccgcctcggcttcgcgtccctcgccgccgcgccggcgccgcccgcgtcccgctacggcgccggcagcagcagcagcagcagcagcagcctggcggcggtggcgtgcccgctggccgcgctcctcggctggacccggaccgccttcaggtccgaggccaacaggctccacaagctcaagctcgagacgtgggtcgttccaagatacacctctcagtacctgtccaagcaaggcctgtacgcagtggggcgtgtggtggagaaggcggtggcggacgcggaggcgagtggcgcgagagtactcacgctgggtctactgaaccaggcaaacgagctgaacaaaaacggcgagctgtacgtcatcaggaagcccagcatgaggaccaagatcgtcgacgggacaagcctggccgccgccgccgtgctccacatgatccctgagggcaccgacgaggtgctcctcctgggagacgccggcggcaataagatggcgggcgtgctggcttcggcgctctgcgaacgcgagattcaggttcacgtggtcgacaaggacctgtacgagtccgtgaagcagcagctgcgcccagagacgcacgagcatctcctccacctcgctgagtggtggagtcacagcgccaagacgaccaaggtatggctcgtcggcgacaggctgacgggcgaggagcagaggagggcgcagggcggcgcccacttcgttccctactcgcagttccctcctggcgccgtcgtccgcgccgactgcgtctaccacagcaccccggcgctggtggtgccggacgccttcgaggacctccacgcatgcgagaactggctgccgcggagggtgatgagcgcgtggcgcgcggcgggcatcgtgcacgcgctcgaaggctgggacgcgcacgagtgcggcgccagggtcaccggcgtcgacaaggcctggcgcgccgcgctcgcccacggcttccgcccctacgaccgctatggcgccaactaatacgtgaagtgaccattacgaacgacgacgactacgaagcgtacctgtgcatggaatgatgagtagcatctatctatgaagacgagggaaaaaaacacttctttgtttatcgttcaagatgcaaaaagaaaaacaaagattcgtctttgacagttcaaaaa

SEQ ID NO: 30081 - DNA, 4920 bp, Zea mays
  Clone ID: MRT4577_127445C.1
atgtcgggagaacatgccaagaaggagatggagaccggcgacaagcccgctacaagccacgggaaagcttcatcggaagagtcccgcaaaaagggaaaggggaaggagaagaaagcctcttcccacaagttgcatcggagtggggacaagaaaaagaagatgaggaaggtggtctactacgagaccgacacctcatcgccatctacctccgactccgacgcgccctccataacttctaagcgccatgagcgcaagaagtttagtaagatccccttacattaccctcgcacttctagacatactccattactttccgttccattaggcaaaccgccaacctttgacggtgaagattatgctaggtggagtgatttaatgaaatttcatctaacctcactccacaaaagtatatggaatgttgttgagtttggagcacaggtaccatctgtaggggatgtggattatgatgaggacgaggtggcccaaatcgagcacttcaactcccaagccacaaccatactcctcgcctttctaagtagggaggagtacaacaaggtgcaaggattaaaaagcgccaaggaagtttgggacgtgctcaagaccgcacacgagggtgatgaactcaccaagatcaccaagcgggaaacgatcgagggggagctcggtcgcttccgtcttcgccaaggggaggagccacaagatatgtacaaccagctcaaaaccttggtgaaccaagtgcgcaacctcgggagcaagaaatgggatgaccacgaggtggttaaggttattctaagatcacttattttccttaaccctactcaagtacaattaattcgtggcaacccaagatatacactaatgacccccgaggaagtaatcgggaattttgtgagctttgaattcatgatcaagggctcacggaagatcaacgagcttgacggtccttctacgtccgaagctcaaccggtcgcattcaaagcgacagaagagaagaaggaggagtctacaccgagtagaacacccatcgacgcctccaagctcgacaacgaggaaatggcgctcgtcatcaagagcttccgccaaatcctcaagcaaaggagggggaaagattacaagccccgctccaagaaggtttgctacaaatgtggtaagcccggtcattttattgcaaaatgtcctatatccagtgatagtgacaggggtgacgacaagaaggggagaagaaaggagaagaggtactacaagaagaagggcggcgatgcccatgtttgtcgcgagtgggactccgacgaaagctctagcgactcctccgacgacgaggacgccaccaacatcgccgtcaccaagggacttctcttccccaacgtcggccacaagtgcctcatggcaaaggacggcaaaaagaagaaggttaaatctaaatcctccactagatatgagtcctctagtgatgataatgctagtgatgaggaagacaatttacgtactctttttgccaacttaaacatgcaacaaaaagagaaattaaatgaattaattagtgccatccatgagaaggatgatctcttggactcccaagaggacttcctaatcaaggaaaacaaaaagcatgttaaagttaaaaatgcttacgctctagaagttgaaaaatatgaaaaaatatctagtgagctaagcacttgccatgagactatagacaaccttagaaatgagaattctaatttgttagctaaggttgattctattgcttgtaatgtttcaattcccaatcttagaaatgataatgatgatttgcttgctaagattgaagaattaaacatgtctcttgctagccttaggattgaaaatgaaaaattgcttgctaaggctaaagaattagatgtttgcaatgctaccatttccgaccttagaagtagaaatgatatattacatgctaaggttgtagaattaaaatcttgcaaaccctctacatctaccgttgaacacactactatttgcactagatgtagagatgttgatattgatgctattcatgatcacatggttttaattaaacaacaaaatgatcatatagcaaaattagatgctaaaattgccgagcatgaacttgaaaatgaaaaatttaaatttgctcgtagtatgctctatagtgggagacgccctggcattaaggatggcattggcttccaaaagggggacaatgtcaaacttaatgctcctcctaagaaattgtctaattttgttaagggcaaggctcccatgtctcaggataacgagggttacattttgtaccctgccggttatcctgagagcaaaattaggagaattcactctaggaagtctcactctggccctaatcatgcttttatgtataagggtaagacatctagttctaggcaaccaacccgtgctaagttgcctaagaagaaaactcctagtgcatcaaatgatcatgacatttcatttaaaacttttgatgcatcatatgtattaactaacaaatccggcaaggtttatgcatccgggggctcaagttggataatcgacagcgggtgcacaaaccatatgacaggggagaagaagatgttctcctcctacgagaaaaaccaagatccccaaagagcgatcacattcgaggatggaaatcaaggtgtcactgtctttagaagaagtgatgattcaatagcatttaaaggtgtgttagagggtcagctatacttggtagattttgatagagctgaactcgacacatgcttaattgcaaagactaacatgggttggctctggcaccgccgactagcccatattgggatgaagaatcttcataagcttctaaagggagagcacattttaggattaacaaatgttcattttgagaaagacaggatttctagcgcatgccaagcagggaagcaagttggtgctcaccatccacataagaacatcatgacgactgacaggccactggagctcctacacatggatctattcggcccgatcgcttacataagcatcggcggaagtaagtactgtctagttattgtggatgattattcttgcttcacttgggtattctttttgcaggaaaaatctcacacccaagagaccttaaagggattcttgagacgggctcaaaatgagttcggcttaaggatcaagaaaattagaagcgacaacgggacggagttcaagaactctcaaattgaaggcttccttgaggaggagggcatcaagcatgagttctcctctccctacacgccacaacaaaatggtgtagtggaaaggaagaatagaactctattggacatggcaagaaccatgcttgatgagtacaagacttcggatcggttttgggccgaggcggtcaacaccgcctgctacgccatcaactggttatatctacaccgaatcctcaagaagacatcatacaaactccttatcggtaaaaagcccaatatttcatattttagagtctttggtagcaaatgctttatacttgttaaaagaggtagaaaatctaaatttgctcctaagactgtagaaggctttttactaggatatgattcaaacacaagggcatatagagtctttaacaagtccactggacaagttgaagtttcttgtgacgttgtgtttgatgagactaacggctctcaagtagagcaagttgatcttgatgagataggtgatgaagaggctccgtacatcgcgctaaggaacatgtccattagggatgtgtgtcctaaagaatccgaagagcctccaaatgcacaagatcaaccatcctcctccacgcaagcatctccaccaactcaaaatgaggatgaggctcaagttgatgaagggcaagatcaagaagatgagccacctcaagatgacggcaatgatcaagggggagatgcaaacgatcaggacaaggaggatgaagaacaaagacctccacacccaagagtccaccaagcaatccaacgagatcaccccgtcgacaccatccttggcgacattcataagggggtaaccactagatctcgaaccaaatgggtcttccgcaacaagcaagatgagcatggtgtggtgataaggaacaaagcccgacttgtggccacaggatactcccaagtcaaaggtttggatttcggtgaaacctatgcacccgtagctaggcttgagtcaattcgtatactattggcctatgctacttaccatggcttcaagctctatcaaatggacgtgaaaagcgccttcatcaatggaccaatcaaggaagaggtctatgttgagcaacctcccgactttgaagatagtgagtaccctaaccatgtttataaactctctaaggcgctttatgggctcaagcaagccccaagagcatggtatgaatgccttagagatttccttatcactaatggattcaaagtcggaaaggccgatcctacactctttaccaaaacacttgaaaatgatttgtttgtatgccaaatttatgttgatgatattatatttgggtctactaacgaatctacatgtgaagagtttagtaggatcatgacacaaaaattcgagatgtcaatgatgggggagttgaagtatttcttaggatttcaagtgaagcaactccaagagggcaccttcctaagccaaacgaagtatactcaagatattctaagcaagtttgggatgaaggatgctaaacccatcaagacacccatgggaaccaatgggcatctcgacctcgacgaaggaggtaaatctgtcgatcaaaagaaagagcacatcggggacttgccagttcttgggaagatccttggtgtcttgggcttcaaagaagcaaaattccgtagctctttctaccgccgaagccgagtacattgccgcaggccattgttgcgcgcaactactttggatgaggcaaacccttag

SEQ ID NO: 30082 - DNA, 279 bp, Zea mays
  unsure (1)..(279): unsure at all n locations
  Clone ID: MRT4577_127446C.1
tnattattttttttttttttttttttttttttttggttttttttttttttatgtccttgttttgtaaaataacaagggaaaaaaagggaaaaggatggaaaaattcggaaaacaaaaaggcaatgagaacctgagtgggatgggaaacaacacatgaagaaaactgggaaagaataggccgttgatgcgcgacgtgtatccgggtttatggacaaagccatgggaaacgtgtataattttcacgacacccgtgacattataaaaaagggctagagatgg

SEQ ID NO: 30083 - DNA, 931 bp, Zea mays
  Clone ID: MRT4577_127447C.1
gtaccaaaagggtattccgcaacaagaatatgagcatggtgtggtgataaggaacaaagcgcgacttgtggccaagggttattcacaagtcgaaggtttggatttcgatgaaacttatgcacccgtagctaggcttgagtcacttcgcatattacttgcctatgctacttaccatggctttaagctcgatcaaatggacgtgaagagtgccttccttaatggaccaatcaaggaagaggtctatgttgagcaacctcctggctttgaagataccccaagagcatggtatgaatgcctgcgagatttccttatcactaatggattcaaagtcggcaaggtcgatcctactctctttactaaaactgttgcaaatgatttgtttgtgtgccaaatttatgttgatgatattatatttgggtctactaacaaatctacttgtgaagagtttagtaggattatggttcaaaaattcgagatgtcgatgatgggggagttgagatatttcttaggatttcaaatcaagcaactccaagagggcaccttcatcagccaaaccaagtacattcaagacatacttaacaagtttggaatgaaggatgccaagcccatcaagacacccatgggaaccaatgggcatctcgacctcgacatgggaggtaaatccgtagatcaaaaggtatactggtcgatgataggatctttaatctatttatatgcatctcgaccggatattatgctttttgtatgcatgtgtgcaaggttccaagtcgatcctaaggaagttcatcttagggtcgtgaagagaatcatgaggtatttagtttacactcctaagtttgggctttggtaccccaagggatccacctttgatttaataggatattccgatgtcgattgggcagggtgtaaaattgataggaagagcacataa

SEQ ID NO: 30084 - DNA, 612 bp, Zea mays
  Clone ID: MRT4577_127448C.1
ccggccgggccgggcttcttcttctgcttctgacacggcaacctctcctcctcctctgacctctacacaatctgtccccacacgagcagtctcgtaagacacactgcaaagacacactggatgctacaacctcctcccctcttattctgcggacatgaatcatgtatgatgcaaaacgcgaggaccatggctcacacggtggatatcccccatgggaaggtcgacagacttccggatcccaccattccattggtaccgggattcaccgctcgcaagtattcggtatcaccatgaagccataagaaaattactgagattcaaatatatgacaatatctctgaggtgtacgatcaacctcatgcctgacctatatggtccatcccgcctttcacgaaaaagataaaagaagaaggaccttaggtgcatcggagcgtctgcgccatcatcctgtgcagcgaggtctaaccggtcgcctgccggaccgacggacatacgtggttcctgggcgcaaatgtcatgcggtgatgatacatgtgaccatgcgagctggacggaaggaacatcttcctgtacctggctaataaaggatcttactccatgtaatggcggtac

SEQ ID NO: 30085 - DNA, 5073 bp, Zea mays
  Clone ID: MRT4577_127449C.1
ttacggccgtaaggtgagcttccttagggtcggcttggaatctcccgtgtcgaggtcgagatgcccattggttcccatgggtgtcttgatgggcttggcatccttcattccaaacttggttagaatgtcttgagtgtacttcgtttggcaaatgaaggtgccctcttggagttgcttgacttggaatcctagaaaatacttcaactcccccatcatcgacatctcgaatttttgtgtcatgatcctactaaactcttcacatgtagactcgttagtagacccaaatataatatcatcaacataaatttggcatacaaacaagtcattttcaagagttttagtaaagagtgtaggatcggccttgccgacatgctcttgggcttgtttgagcccataaagcgccttagagagcctatagacatgattaggatactcactgtcttcaaagccaggaggttgctcaacatagacctcttccttgattggtccgttgaggaaggcacttttcacgtccatttgataaagcttaaagccatggtaagtagcataggctaataatatgcgaattgactcaagcctagctacgggtgcataggtttcaccgaaatccaaaccttcgacttgggaatatcccttggccacaagtcgtgctttgttccttgtcaccacaccatgctcatcttgcttgttgcggaagacccatttggttcctacaacattttggttaggacgtgaaactaaatgccatacctcgttcctcgtgaaattgttgagctcctcttgcatcgccaccacccaatccgaatcttgaagtgcttcctctatcctgtgtggctcaatagaggaaacaaaagagtaatgttcacaaaaatgtgcaacacgagatcgagtggttacccccttatgaatatcgccgaggatggtgtcgacggggtgatctctttgtattgcttggtggactcttgggtgtggcggccttggttcttcctcgtcctccttttcttgatcatttgcatctcccccttgatcattgccgtcatcttgaggtggctcatttgcttgatcttctacttcatcaacttgagcttcatcctcattttgagttggtggagatgctagcgtggaggaggatggttgatcttgtgtagttggaggctcttcggattccttaggacacacatccccaatggacatgttccttagcgctatgcatggagcctgttcttcacttatctcatcaagatcaacttgctctacttgagagccgttagtttcatcaaacacaacgtcacatgagacttcaactagtccagtggacttgttaaagaccctatatgcccttgtgtttgagtcataaccaagtaaaaagccttctacagttttaggagcaaatttagattttctacctcttttaacaagaataaagcatttgctaccaaaaactctaaaatatgaaatgttgggctttttaccggttaggagttcatatgatgtcttcttgaggattcggtgaagatataaccggttgatggcgtagcaggcggtgttgactgcttcggcccaaaaccggtccggtgtcttgtactcatcaagcatggttcttgccatgtccaatagagttcgattctttctctccactataccattttgttgtggcgtgtagggagaggagaactcatgcttgatgccctcctcctcaaggaagccttcgatttgagagttcttgaactccgtcccgttatcgcttctaattttcttgatccttaagccgaactcattttgagcccgtctcaagaatccctttaaggtctcttgggtttgagatttttcctgcaaaaagaatacccaagtgaagcgagaataatcatccacaataacaagacaatacttactcccgccgatgcttatgtaagcaatcgggccgaatagatccatgtggagtagctcaagcggcctgtcggtcgtcatgatgttcttgtgtggatgatggactccaacctgcttccctgcctgacatgcgctacaaatcctgtctttctcaaaatgaacatttgttaatcctaaaatgtgctctccctttagaagcttatgaagattcttcatcccaacatgggctagtcggcggtgccagagccaacccatgttagtcttagcaattaagcatgtgtcaagttcagctctatcaaaatctactaagtatagctgaccctctaacacacccttaaatgctattgaatcatcacttcttctaaagacagtgacaccttgatttccatccccgaatgtgatagctcgttgaggatcttggtttttctcatatgaggagaacatccttttctcccctgtcatgtggtttgtgcacccgctgtcgagtatccaacttgagcccccggatgcataaacccaaacggttttgggtcctttggcattagacacaagaactttaggtacccaaacacaagtctttgaccccttgtgtttgcccccaacaaacttggcaacgaccttgccggatttgttagtcaaaacataggatgcatcaaaagtcttaaatgaaatgttatgttcatttgatgcattaggagttttctttctaggcaatttagcatgggttggttgcctagagctagatgtctcacccttatacatgaaagcatgattagggccagagtgagacttcctagagggaattctcctaattttgctctcgggataaccggcagggtataaaatgtaaccctcgttatcctgaggcatgggagccttgcccttaacaaagttggacaatctcttaggaggggcactaattttgacattgtctcccctttggaagccaatgccatccttaatgccagggcgtctcccattataaagcatgctacgagcaaatttaaatttctcattttctaagttgtgctcggcaattttagcatctagttttgctatatgatcattttgttgtttaattaaagccatgtgatcatgaatagcattaacatcaatatctctacatctagtacaaatagatacatgctcaacaatagatgtagagggtttgcaagattttaattctacaaccttagcatgcaacatatcatttttagttctaaggtcggaaattgcaacattgcaaacgtctagttctttagccttagtaatcaatttttcattttctactctaaggctagcaagagaaatgtttaattctttaatcctagcaagcaaatcatcattattatctctaggattgggaattgaaacattacaaacatgagaatcaaccttagcatttaaactagcattttcacttctaaggttgtcaattatctcacggcaagtgcttagctcactagataatttttcacatttttctacttctagagcataagcctttttaaccttaacatgtttcttgttttctttaattagacaatcctcttgggagtccaaaaggtcatccttttcatgaatagcactaactaattcatttaatttttctttttgagctatgttaaggttggcaaaaagggaacgcaaattattttcctcatcactagcattatcatcactagaagattcatatttagtggaggagttagatttaacctttttccgtttgccgtcctttgccatgaggcacttgtggccgacgttggggaagaggagtcccttggtgacggcgatgttggcggcgtcctcgtcgtcggaggagtcgcttgagctctcgtcggaatcccattcccgacaaacatgggcatcgccgcccttgttcttgtagtaccttttcttctcctttcttctccccttcttgtcgtcgcctcggtcactgtcactagatataggacatttagcaataaaatgaccgggcttaccacatttgtagcaaaccatcttggagcgggacttgtagtctttccccctcctttgtttgaggatttggtggaagctcttgatgacgagcgccatctcctcattgtcaagcttggaggcgtctattggttgtcgacttggtgtagactcctccttcttctcctccgttgccttgaatgcaacgggttgggcttcggatgagtcgccaagctcgttgattttcctcgagccttctatcatgcactcaaaacttacaaaatgcccgataacttcctcgggggtcattttagtatatctaggattaccacgaatcaattgaacttgagtgggattaagaaaaatgagagatcttaaaataacatttaccacttcgtggtcatcccacttcttgctcccgaggttgcgcacttggttcaccaaagtcttgagccggttgtacatgtgttgtggctcctcccctttgtgaagccggaaccgaccgagctccccctcgatcgtttcccgcttggtgatcttggtgagctcatctccttcgtgcgcggttttgagcacatcccaaatctccttagcgctcttcaacccttgtactttgttatactcctctctacttagagaggcgaggagtattgtcgttgcttgtgagttgaagtgctcgatttgggccacctcatcctcatcatagttctcatcccctaccgacggtacctgtgcaccaaactcaacaacatcccatatacttttgtggagcgagattagatgaaatcgcattaaatcgctccacctagcgtaatcttcaccatcaaaagttggtggtttgcctaatgggacggaaagtaaaggtgtatgtttggaaatgcgagggtagcgtaaggggatcttactatacttcttgcgctcttggcgcttagaagtgacggagggcgcatcggagtcggaggtcgatgttgatgaagtgtcggtctcgtagtagaccaccttcctcatcctcttgtgcttgtcgcctttccgatgcggcttgtgggaagaagatttttccttcttctctttgtggtgagaagaagatttcttctccttccctttgttggaggagctcttcttcttctccctccttttggtgcgggactcttccgatgaagtgctcttgtagcttgtagtgggcttttcgccggtctccatctccttcttggcgtaatctcccgacat

SEQ ID NO: 30086 - DNA, 294 bp, Zea mays
  Clone ID: MRT4577_12744C.1
ctggagctcgaggccgcgggtcttttttttttttttttgttttttttttttttttttttcttgttagcattaaaacagaaagaaggaaaaaaaccacgggggatagcaagcgcgagctttgtgggggtggaacattatgggcgtgggacgagaagcccctcttctgacacccgttttttccccccacccccgggggggggggccttcaggatgttccgccgtcgccctcttcccacctgtcgtttgccccccctttctctgctgggcttttctcctgggtagcctcccctgggc

SEQ ID NO: 30087 - DNA, 234 bp, Zea mays
  Clone ID: MRT4577_127450C.1
actggagcatcctggagcgcacgccagacatcccgaaacagtggccggtcgatggacggacgggccagcgcggctgcggcgtacgtgtggcgtgggattcctatatatttcttttgtgtgcacatttctttctccgcaacaatccagaagaagaaaacaaacaaacaaaaataaaggctgggagacctgatcagagcagcagagagaagaagcaggaaaagaaaagaagaaaaa

SEQ ID NO: 30088 - DNA, 4311 bp, Zea mays
  Clone ID: MRT4577_127451C.1
tcaacaaaagaagttcctagaatcaaggatatttagctcatgcctaagtttgttaaaagtttgttcatcaagtggcttggtaaagatatcggctaattgatctttagtgttaatgtatgcaatttcgatgtctcccttttgttggtgatcccttagaaaatgataccgaatggctatgtgtttagtgcgactatactcaacgggattatccgccatgcggattgcactctcattatcacatagaagaggaactttggttaatttgtaaccgtagtccctaagggtttgcctcatccaaagtagttgcgcgcaacaatggcctgaggcaatgtactcggcttcggcggtagaaagagctacggaattttgcttctttgaagcccaagacaccaaggatcttcccaagaactggcaagtccccgatgtgctctttctattaattttacacccttccgtgtcgaggtcgagatgcccattggttcccatgggtgtcttgatgggtttggcatccttcatcccaaacttgcttagaatatcttgagtatacttcgtttggctaaggaatgtgccctcttggagttgctttacttgaaatcccaagaaatacttcaactcccccatcatagacatctcgaatttttgtgtcatgatcctactaaacttatcttcaaagtcgggaggttgctcaacatagacctcttccttgattggtccattgaggaaggcactcttcacgtccatttggtaaagctcgttcctagtgaagttgttgagctcctcttgcatcgccaccacccaatctgaatcttgaagtgcttcctctaccccccttatgaatgtcgccgaggatggtgtcgacggggtgatctcgttggattgcttggtggactcttgggtgtggcggcctttgctcttcatcctccttgtcttgatcatttgcatctccccttgatcattgtcgtcatcttgaggtggctcatctctttgatcttctacttcatcaacttgagcctcatcctcattttgagttggtggagatgcttgcgtggaggaggatggttgatcttgtgcatttggaggctcttcggattccttaggacacacatccccaatggacatgttccttagcgcgatgcacggagcctcttcatcacctatctcatcaagatcaacttgctctacttgagagtcgttagtctcatcaaacacgacgtcacacgaaacttcaacttgtccggaggacttgttaaagactctatatgcccttgtgtttgaatcatatcctagtaaaaatccttctacagtcttaggagcaaatttagattttctacctcttttaacaagaataaagcatttgctaccaaagactctaaaatatgaaatgttgggctttttaccggttaggagttcgtatgaggtcttcttgaggattcggtgtagatacaaccggttgatggtgtagcaggcggtgttgaccgcctcggcccaaaaccgatccgaagtcttgtactcatcaagcatggttcttgccatgtccaatagagttctattcttcctctccactacaccattttgttgtggggtgtatggagaaaagaactcatgcttgatgccctcctcctcaaggaagccttcaatttgacagttcttgaactccgtcccgttgtcgcttctaattttcttgatccttaagccgaactcattttgagcccgtctcaagaatccttttaaggtctcttgggtatgagatttttcattagtaaaaagacagttgtagcccatttgacataattgagatacggaaagcaaattgtaatctaaggaatcttgatttccatccccgaatgtgatagctcgttggggatcttggtttttctcataggaggagaacatcttcttctccccagtcatgtggtttgtgcacccgctatctatgatccaacttgagcccccggatgcataaaccttgccggatttgttagttaacacataagttgcatcaaaagttttaaatgaaatgctatgttcatttgatgcattaggagttttcttcttaggcaacttagcacgggttggttgcctagaactagatgcctcacccttatacataaaagcatggttagggccagagtgagacttcctagagtgaattctcctaatcttgctctcgggataaccgacagggtataaaatgtaaccctcgttatcctgaggcatgggagccttgcccttaacaaagttggacaatttcttaggaggggcattaagtttgacattgcctccctgttggaagccaatgccatccttaatgccagggcgtctccctctatagagcatgcttctagcaaatttaaatttttcgttttctaagtcatgctcggcaattttagcatctaattttgctatatgatcattttgttgtttaattaaagccatgtgatcatgaatagcatcaatgttaacatctctacatctagtgcaaatagtagtatgttcaacggtagatgtagagggtttgcaagattttaattctacaaccttagcatgtaatatatcatttttacttctaaggtcggaaatggaagcattgcaaacatctaattctttagccttagcaagcaatttttcattttcatttctaaggctagcaagagaaatattcaattcttcaatcttagcaagtaaatcaacattatcatttctaagatttggaattgaaacatcacaaacatttgaatcaaccttagctaacaaattagcattcttatttctaaggttgtcaatggtctcatggcaagtgcttagctcactagatagtttctcacatttttcaacttctagagcataagcatttttaaccttaacatgctttttattttccttaatgaggaagtcctcttgggtatccaagagatcatccttttcatgaatagcactaatcaattcatttaatttttctttttgttgcatgtttaggttggcaaaaagaatacgcaagttatcctcctcattactagcattttcctcatcactagaggtttcatatttggtggaggatcttgattttaccttcttccttttgccgtccgttgccatgaggcacttgtggccgacgttggggaagagaagtcccttggtgacggcgatgtttacggcgtcctcgtcggaggaggagtcggtggagctctcttcggagtcccactcccggcaaacatgggcatcgccgcccttcttcttgtagtatttcttcttctcctttcttctccccttcttgtcgtcgcccctgtcactgtcactataaataggatattttgctataaagtgaccgggcttaccacacttgtagcaaactttcttggagcggggtttgtaatcttcccccctcctttgcttgaggatttggcggaagctcttgatgatgagcgtcatttcctcgttgtcgagcttggaggcgtcgatgggagttcgacttggagtagattcctccttttcttccatcgccttgaatgcgaccggttgtgcttcggacgtggaggggccgtcaagctcgttgatcttctttgagcctttgatcatcaattcaaagctcacaaaattcccgattacttcctcgcgagtcattagtgtatatctaggattgccacgaattaattgaacttgagtagggttaaggaaaacaagtgatcttaaaataaccttaaccatttcgtggtcatcccattttttgctcccgaggttgcgcacttggttcaccaaggttttgagccggttgtacatgtcttgtggctcctcccctgggcgaagtcggaagcgaccgagctccccctcgatcgtttcccgcttggtgattttggtcacctcgtctccttcgtgcgcggtctttagtatgtcccaaatctccttggcatttttcaacccttgcaccttattatactcctgtacaccaaactcaacaacatcccatatacttttgtggagtgaggttagatgaaatcgcattaagtcactccacctagcataatcttcaccatcaaacgttggtggtttgctaaacttcttgcgctcatggcacttagaagtgatggacggcgcgtcggagccggaggtggatggtgatgaggtgtcggtctcgtagtagaccactttcctcatcttctttttcttgtccccactccgatgcgacttgtgggaagaggatttcttctccttccccttccctttgttgtgggactcttccgatgaagccttcccgtggcttgtagtgggcttgttgccggtcaccatttccttcttggtgtgatctcccgacat

SEQ ID NO: 30089 - DNA, 1809 bp, Zea mays
  Clone ID: MRT4577_127452C.1
tcaatcaaaattccgagaatcaagaatatttagctcatttctaagttcggtaaaggttttctcatctaatggtttggtaaagatatcggctaattgttctttggagctaacataagctacctcgatatcccccctttgttggtgatccctcaaaaagtgataccaaatgtctatgtgcttagtgcggatgtgttcaacgggattatccgacatgcagattgtactctcattatcatataggagagggactttgctcaacttgtagccatagtccctgagggtttgcctcatcaaaagtaattgcgcacaacaatggcctgcggcaatgtactcggcttcggcggtagaaagagctactgagttttgtttctttgaagcccaagacaccagggatcttcctagaaactgacaagtccctaatgtgctcttcctatcaattttacaccctgcccaatcagcatctgaatatcttattaaatcaaaagtggatcccttggggtaccaaaggccaaacttaggagtataaactaaatatctcatgattcttttcatggccctaaggtgaacttccttaggatcggcttggaaccttgcacacatgcatatggaaagcataatatccggtcgagatgcacataaatagagtaaagatcctatcatcgaccggtataccttttgatctacggatttacctcccgtatcgaggtcgagatgcccatttgttcccatgggtgtcttgatgggcatggcatccttcattccaaacttggtaagtatgtcttgaatgtattttgtttggctaatgaaggtgtcatcttgaagttgattgacttgaaatcctaggaaatacttcaactcccccatcataaacatcttgaatttttgtatcatgatcctactaaactcattcctcgtaaagttgttgagctcctcttgcattgccaacacccaatccgaatctcttagtgcatcctccactctgtatggccccttatgaatgtcaccgagaatggagttcacggggtgatctcgttgtattgcttggtggactcttgggtgtggcggtctttgaccctgaatttcttgctcgtcttccttgtcatggtcatctcccccttgatcattgtcctcctcttgaggtggctcatcatcttgattttcatcttcatcttgagccggtggagatgcatgatttgaagatgacggttgatcttgaacttgtgtgggctcttcggattccttaggacgcacatccccaatggacatgttcctaagtgcgacgcatggagcctcttcatcatctagttcatcaagatcaacttgctccacttgggagccattagtctcatcaaacacgatgtcacaagaaacctcaactaatccagtggatttgttgaagactttatatgccattgtgtttgagtcatatcctagtaaaaagccttctacaaccttaggagtaaatttagattttttacctcttttgacaagaataaaacatttgctaccaaatactctaaaatatgaaacattgggctttttaccggtaaggagttcgtatgatctcttcttgaggattcggtgaagatataaccagttgatggagtagcaggcagtgttaatcgcattggcccaaaactggtctggtgtcttgtactcatcaagcatggtccttgccatgtccagtagagttctattcttcctctccactacaccattttgttgaggtgtgtagggagaaaagaactcatgcttgatgccctcctcctcaagaaagccttcaatttgagagttcttgaactccgtcat

SEQ ID NO: 30090 - DNA, 4810 bp, Zea mays
  Clone ID: MRT4577_127453C.1
ctacttcaactcccccatcatcgacatctcaaatttctgtgtcatgatcctactaaattcttcacaagtagactcgttagtagacccaaatatgatatcatcaacataaatttggcatacaaacaaatcattgtcaagagttttagtaaataaagtaggatcggccttgccgactttgaagccattagcaataaggaaatctcttaggcattcataccatgctcttggggcttgcttgagcccataaagcgccttagagagcctatagacatggttagggtactcactgtcttcaaagccgggaggttgctcaacgtagacctcttccttgattggtccattgaggaaagcactcttcacgtccatttgataaagcttgaagccatggtaagtagcataggctaataatatgcgaattgactcaagcctagctacgggtgcataggtttcaccgaaatccaaaccttcgacttgggagtatccgttggccacaagtcgagctttgttccttgtcaccacaccatgctcatcttgcttgttgcggaagacccatttggttcctacaacattttggttaggacgtggaactaaatgccatacctcgttccttgtgaaattgttgagctcctcttgcatcgccatcacccaatccgaatcttggagtgcttcctctaccctgtgtggcttaatagaggaaacaaaagagtaatgctcacaaaaatgtgcaacacgagatttagtgcttacccccttatgaatgtcgtcgaggatggtgtcgacagggtgatctcgttggattgcttggtggactcttgggtgtggcggtcttggttcttcatcctccttgtcttgatcatttgtatctcccccttgatcattgccgtcatcttgaggtggttgagcctcatcctcaatttgagttggtggagatgcttgcgtggaggaggatggttgatcttgttcatttggaggctcttcggattccttaggacacacatccccaatggacatgttccttagcgcgatgcacggagcctcttcctcacctatctcatcaagatcaacttgctctacttgagagccgttagtttcatcaaacacaacgtcacaagaaacttcaactagtccagaggacttgttaaagactctatatgcccttgtgtttgaattatatcctagtaaaaagccttctacagtcttaggagcaaatttagatttcctacctcttttaacaagaataaaacatttgctaccaaagactctaaaatatgaaatgttgggctttttaccggttaggagttcataggatgtcttcttgaggattcgatgtagatataatcggttgatggcgtagcaggcggtgttaaccgcctcggcccaaaaccgatccggcgtcttgtactcatcaagcatggttcttgtcatgtccaatagagttcgattcttcctctccactacaccattttgttgtggggtgtagggagaagagaattcatgcttgatgccctcctcctcaaggaagccttcaatttgtgaattcttgaactccgtcccgttgtcgcttcttattttcttgatccttaagccgaactcattttgagcccgtctcaagaatccctttaaggtctcttgggtttgagatttttccgatgccggtgagcccgccacggcggtggacacgaaaccgtggcgccagagtccttccccatctccggccgccagcacgaccttgcgaaattgaacaccaccgtcgatgggatctataaattgagtgtgccacagtctccgtagggcagtaaatgcggccagctcgattccggttagctcgcgtccctctgttccttgttctagcgtcctcatgtgcccttgatgctcaccaaaccgtccaattacactagaagcccacccatcgtcaggaacatccccctccatccgcaacctgttaacgaaggcaagccccggtgcatttgccaccttccttgatgtttttaaaatctttctcacttgcttgcttgactcccacataaccagcatacccttgagagtcttttctttagtcgggtaagacttgctgagtattccatactcagggtttatcccctctaacactcccttaaatgctattgaatcatcacttcttctaaagacagtgacacctttgaccaaaccttggtttccatccccgaatgtgatagctcgttggggatcttggtttttctcgtaggaggagaacatcttcttctcccctgtcatgtggtttgtgcacccgctgtcgattatccaacttgagcccccggatgcataaaccttgccggatttgttagtaggcacatatgatgcatcaaaagttttgaatgaaatgttatgatcatttgatgcattaggagttttcttcttaggcaacttagcacgggttggttgcctagaactagatgtctcacccttatacataaaagtatggttagggccagagtgagacttcctagaatgaattctcctaattttgctctcgggataaccggcagggtacaaaatgtaaccctcgttatcctgaggcatgagagccttgcccttaacaaaattagacaatcttttaggaggggcattaagtttgacattgtctcccctttggaagccaatgccatccttgatgccagggcatctcccattatagagcatacttctagcaaatttaaatttttcattttctaagttatgctcgacaattttagcatctaatattgctatatgatcattttgttgtttaattaaagtcatttgatcatgaatagcatcaacatcaatatctctacatctagtacaaatagacacatgcttaacggtagatgtagagggtttgcaagattttaattctacaaccttagcatgtaatacatcattttcacttctaaggttagaaatagtaacatcaaaatctttggccttagcaagcaatttttcattttcaatcctaaggctagcaagagaaacattcaactcatcagtcttagcaagtaaatcaacattatcatctctaggattgggagttgaaacatcacaaacatgtgaatcaaccttagctaacaaattagcattctcatttctaaggttgtcaatggtctcctggcaagtgcttagctcacaagacaatttttcacatttttcaacttctagagcgtaagcatttttaaccttaacatgcttcttattttctttaataaggaagtcctcttgggagtctaagagatcatccttttcatgaatagcactaattagttcatttaacttttccttttgttgcatgtttaggttggcaaaaaggatgcgcaagttatcctcctcattactagcattatcctcatcactagaggtttcatatttagtggaggatcttgattttaccttcttctttttgccgtccttggccatgaggcacttgtggccgacgttggggaagaggaggcctttggtgacggcgatgttggtggcgtcctcgtcggaggaggagtcggtggagctctcctcggagtcccactcgcggcacacatgggcatcgccacccctcttcttgtagtgcttcttcttctcctttcttctccccttcttgtcgtcgcccctatcactatcactagacaatggacatttagcaatgaaatgaccgggcttaccacatttgtagcacactttcttggagcggggcttgtaatctttccccctcctttgcttgaggatttggcggaagctcttgatgatgagtgtcatttcctcgttgtcgagcttggaggcgtcgatgggtgttcgacttggagtagattcctccttcttttcttccgtcgccttgaatgcgaccggttgtgcttcggacgtggaggggtcgtcaagctcgttgatcttctttgagcctttgatcatcaactcaaagctcacaaaattacctataacttcctcgggggtcatttgagtatatcttaaccacttcgtggtcatcccactttacgctcccgaggttacgcacttggttcaccaaggtcttgagccggttgtacatatgttgtggctcctcccctttgcgaagccggaatcgaccgagctccccctcgatcgttttccgcttggtgatcttggtgagctcgtctccctcgtgcgcggttttgagcacatcccaaacctccttggcactcttcaacccttgtactttgttatactcctctctacttagtgaggcgaggagtattgttgtcgcttgagagttgaagtgctcgatttgggtcacctcatcctcatcatagtctttatcccctacggatggtacctgtgcaccaaactcaacaacatcccatatgcttttgtggagcgaggttagatgaaatcgcattaaatcgctccacctagcgtaatcttcaccatcaaaagttggtggtttgcctaatgggacggaaagtaaaggtgtatgtttggaaatgcgagggtagcgtagggggatcttactatacttcttgcgctcttggcgcttagaagtgacggatgccgcgtcggagccggatgtggatgccgatgaagaatcggtctcgtagtagaccaccttcctcattcttttcttcttgtccccactccgatgcggcttgtgggaagaagatttttccttcttatctttgtggtgagaagaagatttcttctccttccctttgttggaggagatcttcttcttctccttcctcttggtgcgggactcttccgatgaagtgctcccatggcttgtagtgggcttttcgccggtctccatctccttcttggcgtgatctcccgacat

SEQ ID NO: 30091 - DNA, 4653 bp, Zea mays
  Clone ID: MRT4577_127454C.1
ctaagtttggtaaaggtttttctcatctaatgacttggtaaagatatcggctaattgttcttttgtgctaacataagcaatctcgatatcccccctttgttggtgatccctcaaaaagtgataccgaatggctatgtgcttagtgcggctgtgttcaacgagattatccgccatgcggattgcactctcattgtcatataggggagggactttgcttaatttgtagccatagtccctaagggtttgcctcatccaaagtaattgcgcgcaataatgacctgcgacaatatactcggcttcggcggtagaaatagctactgaattttgcttctttgaagcccaagacaccagggatctccctagaaactgacaagtccctgatgtgctcttcctatcaattttacaccctctcgtgtcgaggtcgagatgcccattggttcccatgggtgtcttgatgggcttggcatccttcattccaaacttggtaagtatatcttgaatgtacttagtttggctgatgaaggtgccctcttggagttgcctcacttgaaatcctaggaaatacttcaactcccccatcatcgacatctcgaatttttgaatcataatcctactaaactcttcacaagttgatttgttagtagacccaaatatgatatcatcaacataaatttggcatacaaacaaatcatttgcaatagttttagtaaagagagtaggattagcttttctgactttgaagccattagtgataaggaaatctcttaggcattcataccatgctcttggggcttgcttgagcccataaagcgccttagagagtttatacacatggttagggtactcactatcttcaaagccaggaggttgctcaacatagacttcttccttgattggtccattgaggaaggcacttttcacgtccatttgatagagcttaaagccatggtaagtagcataggcaagtaatatatgaattgactcaagcctagctatgggtgcataggtttcaccaaaatccaaaccttcgacttgtgaatatcccttggccacaagtcgggctttgttccttgtcaccacaacatgctcatcttgcttgttgcggaaaacccactcattccttatgaagttgttgagttcctcttgcattgccaacactcgattcgaatctcttaatgcgtcttccaccctgtatggcctgtacttcttgctcatcttccttttcttgatcattatcatctccccttgatcattgtcctcctcttgaggtggctcatcctcttgatcttcattttcatcatcttgagcttgatcctcatcttgggttggtggagatgcttgcatggaagatgacgcttgatcttgagcttgagtgggctctttggattccttaggacacacatatccaatggacatgttccttagcacgacgcatggagcctcttcatcatctagctcatcaagatcaacttgctccacttgggagccataagtctcatcaaacacaatatcacaagaaacctcaactaatccagtggatttgttgaagactctatatgcccttgtgtttgaatcatatcctagtaaaaaggcttctacagccttaggagcaaatttagattttctacctcttttaacaagaataaagcatttgctaccaaagactctaaaatatgaaacactgggctttttaccggttaggagttcatatgatgtcttcttgatgattcggtggagatacaatcggttgatggcgtagcaggtggtgttgaccgcctcggcccaaaaccgatctgaagttttgtactcatcaagcatggtccttgccatgtccaatagagttctattcttcctctccactacaccattttgttgtggcgtgtagggagaagagaactcatgcttgatgccctcctcctcaaggaagccttcaatttgagagttcttgaactccgtcccgttgtcgcttcggattttcttgatccttaagccgaactcgttttgagccatctcaagaatccttttaaggtctcttgggtatgagatttttccctctaacactcccttaaatgctattgaatcatcacttcttctaaagacagtgacaccttgatttccatccccgaatgtgatagctcgttggggatcttggtttttctcataggaggagaacatctttttctcccttgtcatgtggtttgtgcacccgctatcgatgatccaacttgagcccccggatgcataaaccttgcctgatttgttagttaaaacataggatgcatcaaaagttttaaatgaaatattatgatcatttgatgcaataggagttttctttctaggcaatttagcacgagttgattgcctagaactagatgtctcacccttatacataaaagcatgattagggccagagtgagactttctagagtgaattctcctaatcttgctctcgggataaccggcagggtacaaaatgtaaccctcgttatcctgaggcatgggagccttgccctttacaaagttagacaatctcttaggaggggcgttaagtttgacattgtcccccttttggaagccaatgccatccttgatgccagggcgtctcccattatagagcatgcttctagcaaatttaaaattttcattttctaagtcatgctcattaattttagcattaagttgagctatgtgatcattttgtttcttaattaaagctaggtgatcatgagtagcatcaacattaatgtctctacatctagtgcaaatggaaacatgctcaatggtagatgtagagggtttgcaagaattaagttcaacaatcttagcacgtaaaatatcattcttatctctaagatcagaaatggaagcattgcaaacatctaaatccttagccttagcaatcaaattttcattttcatttctaaggctagcaagagaaacattcaattcttcaatcttagcaagtaaattaacattatcatctctaagattgggaattgaaacataactaacattagaatcaaccttagcaattaatttagcattttcatttctaaggttggcaattatatcaatacaagtgcttagctcactagataatttttcacatttttctacttctagagcgtaagcatttttaaccttaacatgcttcttgttttccttgattaggaagtcctcttgagagtccaagaggtcatccttctcatgaatagcactaattaattcatttaatttttccttttgttgcatgttgaggttggcaaaaagggtgcgcaaattatcctcctcatcacaacagttatcctcatcactagaggtttcatatttagtggaggattttgattttaccttcttccttttgccgttcttggccatgaggcacttgtggccgacgttggggaagaggagtcccttggtgacggcgatgttggcggcgtcctcgtcggaggaggagtcggaggagctctcgtcggagtcccacttgcggcacacatgggcatcgccgcccctcttcttgtggtacctcttcttttctctcctcttgcccttcttgtcttcacccctgtcactatcactagataatagacatttagcaatgaaatgaccgggcttaccacatttgtagcatactttcttggagcggggcttgtaatccttcccccttctttgcttcaggatttggcggaagctcttgatgatgagcgccatttcctcgttgtcgagcttagatgcatcgatgggttgtctacttgatgtagactcctcctttttctcctctgttgccttgaatgcgaccggttgtgctttggacgtggaggggccatctagctcgatgattttctttgagcctttgatcatcaactcaaagctcacaaagtttcctattacctcctcaggagacattagtgtatatctaggattacctaggattaattgaacttgcgtaggattaagaaaaacgagggatcttagaataaccttgaccatctcatggtcatcccatttggtgctcccgaggttgcgcacttgattcaccaaggtcttcaagcggttgtacatggcttgagggtcctcgccttggttgagtcggaacagaccgagctcctcctcgatcgtctcctgcttggtgattttagtcacctcatctccttcgtgcgcggttttaagcacgtcccaaatttccttggcgctctttaacccttgcaccttgttatactcctctcgctgtactccaatctcaacaacatcccaaatgctagtgtggagtgaggttagatgatgcctcattttatcactccacatattataatcttcaccatcaaacataggtggtttgcctagtgggacggaaagtaatggagtacatttggaaatacgtggatagcgtaggggaatcttactaaacttcttgcgctcatggagcttagaagttacggagggcgtgtcggagccggaggtggatggcgacaaagagtcggtctcgtagtagaccaccttcctcatcttcttcttgtcaccgctccaccccgacttgttgtgtgaaggggatcccttcaccttgttggtggactcctcggatggagccttcccatggcttgtagcgggcttctcgccggtcccgaactccctcttggcggatgctcccgacat

SEQ ID NO: 30092 - DNA, 233 bp, Zea mays
  Clone ID: MRT4577_127455C.1
gggagaaatcgtatttctttgccgctcaactcaagacaaaagttaaaacgaacagctccacaaaatctaggctactacacagaaacagacatgcattccccatggtcctgctcattaaacggaaggaaacttccactctaaagtgttatgctccaatcccaaccgagagccggtgccagcaatcttcttcccgattcctaacaacaaggttcctgtcaacaaatttaccacct

SEQ ID NO: 30093 - DNA, 1655 bp, Zea mays
  Clone ID: MRT4577_127456C.1
cgaagaggagcctcggttgcagttgcagtagcatcccaacttccaacctccaaatccaaagtgggttccagttccagagagaggaagcccaacggcggcggcggcggcgacggccgacgtgctcagagacgcggcgtggaggggcgcgccgccgtggcttcgtgcagggggtcggcccgaccgtgtgcccgtgagaggttgacgtcgctgatgggggagccgccgccggaccggaggaggctgtaccaggtttggaagggaagcaataaattcctcttcggcgggcggctgatttcggtcctgacgcgggctccctcttcctgtccacggtcctgatagcaagcccgctggccggcctgtgcttccagtgcgtcaccaagctcagcagctccggcggcagctcaccgctcggcctgccggtcctcctggccaccatactccttgggctatcggatctggcgttcctgttcctgacatcgagcagggaccccgggatcgtgccgaggaacgcgcgcccgccggagcagcaggagcgcggtggggtcgacgaccccgtcgtcgccgatgacgacgacatcgtctcggcgtcgaccgagtgggtggcgatgagcgccgcgaataacccgcacctccggctgccgcgcaacagggacgtggtcgtcgccggcggccatgtcgtccgggtcaagtactgcgacacgtgcctgctgtaccggccgccgcgggcgtcgcactgctccatctgcaacaactgcgtccggaagttcgaccaccactgcccctgggtcggccagtgcatcggcctgcgcaactaccgcttcttcttcctcttcatctcgacgtccacgttcctgtgcctctacgtcttcgtgctgtcctggctcaacatcgccgcgcagagggcgagccacggcgggtcgctgctgaggtccgtcaccggcgagccgctgtctctcgtgctcatcgtttactccttcgtcgtcgcgtggttcgtcggcggcctcaccgtcttccacatctacctcatgagcaccaaccagacgacgtacgagaacttcaggtaccggtacgaggagaaggagaacccgtacaacaggggcgtgctggctaacatgtccgaggtcttctgcaccgggatgccgccgtcgatgaacaacttccgggcatggatggagctgccggcgccggcaccggaggcgttcgacgccgggccgccgctcgcttctagggacaagatcgacctggagatggggcacaagggcggcgtgcaacaccatactggtgttccacccatcttgcaggggctgcattacgcgcaaatggagaagaattacagtgccagcgtccacatcaaggaccggcgatccgcggaggcgccggaccccttcatgatcccggaggcgccgcgacacgctgcagcaggagaagcttggcctccagctgtgtttcatgacgacggagtctaatgatgttacgagcagcgggcaagagtccgtggtgattgtgattataattgtaggaataggaattgtgtggtacacaacatagtgaggcgcttgcgatccatttttgtacatcttggaactcgagaggttaaacctcgtgatagtcaactgcatgtattgaaacatatatttatacacatttttttttgc

SEQ ID NO: 30094 - DNA, 433 bp, Zea mays
  Clone ID: MRT4577_127457C.1
gttctgatcgcgagggccgcccttttttttttttttttttttttttttttttttttggttggattttttttttttttttttttttttttttttttttgttttttttgaaagggacattgataactttttttcatataaaacacattcactggaaaaaagattgtaacacaagcgtttccacggcaaataaaggctactctctagtaaaaagatttacaattccaaaagggaatgctccgaacggggctacaagcattttggcaaatgaacaccttttaacgaccctttggttaaaataaaggtcataacacaatagctggtccaggcttttaacctaatccacaaatttggtggaaaaaaaataggcctgacaaccgggttaaccgaaaagcccaagaaccctttgcaaaacccctcagaaaaaacaattaaa

SEQ ID NO: 30095 - DNA, 554 bp, Zea mays
  unsure (1)..(554): unsure at all n locations
  Clone ID: MRT4577_127458C.1
ggagagcaaaagatgaggtaatcacttcccattttgaagaagctgcttttgcttcggttacatgctatactctcttttggtttattactggcagcgaacttggttggtgtgaaggaaattgttttctacaaaaggaattataatatgtggattcccttgtcatgaagtattacagtcaaccttatcaacatcatgagtatcgtataggtctacgatcatatcactttggctctttgtgtgtacttggttggcaatggatggtttgaaacctcaacgattattactgaaaaaatataagttttctgaatttgtggtttccgagacttgttggcacgagaaatgtcattgtccattggcagctaccgatacccagggagttctgagttcaaactataagtctatcatgcccatagatttgactcaagcaataccttatatgtgaagtaaacctgtngagaaactggaaaacgattaaggacaagacgtgtggatgtgattaattgtgttttcttacaactggcgctaggtggtagcatttaagctggttaaatgta

SEQ ID NO: 30096 - DNA, 273 bp, Zea mays
  Clone ID: MRT4577_127459C.1
gggggacccaacagcagcatttgatatatatatttaacataataacacgaccaaccaaccggtaattattttatacaacaacaatatcacatacgatatacttggagttttgagtattctaaaccacagcaacagagctgttagttagttagttagtacatgcctgctgtgtgtgtcctaggaggaggattcgacttttggcacagagctctttattcaacccaaccaggcaacaacttgctacccttatctaccccgggggtcggggttgat

SEQ ID NO: 30097 - DNA, 483 bp, Zea mays
  Clone ID: MRT4577_12745C.1
aattcggcacgagggtcgaagaccatggaagaaagttgactgaaagcaatggaggtagtatgacaccgcaccaacctgattgctttctgtgagcatgttgcatagaatagtgcatgcctttgaggattgtctaaatctcaaacattatttcgttggcctaccaaaaagaaaagcaaggtgcaatccactatgattattttagaatctactcatcatggagtttgatgcaacatcacatcaagggccattattaagttggcacttatcattttaattcccaaaatgttagaatctaaccatcatggagtttgatgcgacatccactatgatttgtggacaagctttactatcgtctaatgttatgaagcaagtatgttgaatttgcagtgtgatcaaaataacttagatatatagctatattatttttgaagggctgaatatttagtattatcttatttgcaactgcacaattgtggatggggt

SEQ ID NO: 30098 - DNA, 593 bp, Zea mays
  unsure (1)..(593): unsure at all n locations
  Clone ID: MRT4577_127460C.1
gctcgacactaacatgtccaccgccagttccgccggacaccatggagngaggtgcactctcggatcctagatggcggcagaggcagccatcacagccgccgaacacacacgaaggcgactcatactgccgcgacgcatgcctagtccgcgctccanagccgagacgcgccgcgtgacaactaccattaccacgtgcagctcatctactcccacacctctcaagtgatactgcggctcagaaccacctccctcaagcagtatgtgttctgcttgaaccaactggcgtcgaagaagcgaggactgctaactaccgacagctctttcaccctgaacagcttatcagaggcgatcatcatgctccaaaccaattcgaccgtgctcactataccattgtacacgagaatgttcacgtgcgccttgatcacatcatgaaacttgtcgacaactgtacaggactccagggacttcctcgctatcaacactgtagcccggaggaacaggcgtctggtcttcgtgtccctcctcctgcgagcgtctgtctcgttcactaccgaaaaaatcctaatgttgaattcactgtgtacccatccccc

SEQ ID NO: 30099 - DNA, 317 bp, Zea mays
  Clone ID: MRT4577_127461C.1
ccgggtggcccagctctttcgacccccaaccctagctcccgggcacgccccttccccgcttccgggcgctggtgacacccgctcgtacgaaacactgggcggggtgcctacggcggccatggcgtaacgggctggaggcaacgcgggcggccatgagaccggaaggtggagcggttggggcgcgagctcaacgggcccgtacccggtgacgcttttagcccaccggtcgcacatgctgactcgcgtctcacctcgcagctcgggaattacgggacaggacatgctggaagatgagatcacactatttactgacccac

SEQ ID NO: 30100 - DNA, 161 bp, Zea mays
  Clone ID: MRT4577_127462C.1
ggacgcgatgaaaatttcatctcaaatttgcgaacatgtccagagcgcggggctacgggtccaacacccgagtggatgagctaaactcagaacctgctattcctgaggtattacctgctccggaagagatcatggattactgtagatctaaaatgataaca

SEQ ID NO: 30101 - DNA, 214 bp, Zea mays
  Clone ID: MRT4577_127463C.1
gtgaatgcatgttgttcgctgcaatcgcgacgagtttagtgacgtatctcaccaatgtgctccacgatagcaagttggatgcagccgaaaatatctccgcctggtccgtagtgtggttcctcacgccgcttctgtgggctgtgcgttgcggacaggtacttgggaaggtactggagcattgttactgttccgcgcggtctacatcgtgggagtg

SEQ ID NO: 30102 - DNA, 241 bp, Zea mays
  Clone ID: MRT4577_127464C.1
cacgtctaagttgaagaccaattttttgggaaatccagtggaaattcacccacttggaaggactggagtgacactaaaaaaatcttgtgtcgaatttgattttgtgccaccactaacagaagttgaccgccgggctatatgtgcacacttgggttgattttcctggagagatggttacgacaaacctacaactgtagacaaagttgtgcttttatttccagtcatgctgctggtttggggc

SEQ ID NO: 30103 - DNA, 551 bp, Zea mays
  Clone ID: MRT4577_127465C.1
tgtcagggcgtctcccattataaagcatactacaagcaaatttaaaattttcattttctagttcatgctcggcaattttagcatctaattttgctatatgatcattctgttgtttaattaaaatcatgtgatcatgaatagcatcaatgtcaacatctctacatctagtgcaaatagaaacatgctcaacggtagatgtagagggtttgcaagtttttagttcaacaatcttagcatgcaaaatgtcattttcacttctaagatcggaaatggaagcattgcaaacatctaagtctttagccttagcaatcaatttttcattttcagatttaaggctagcaagagaggcattcaatttctcaatcttagcaatagaaatagcatgatcatttctaagattggcatataaatcatcacaaacatttgaatcaaccttagcaattaatctagcattttcatttctaaggttggcaatcaaatcatgacaagtgcttagctcactagttaatttttcacatttttccagtgttctagagtcgacctgcgaggca

SEQ ID NO: 30104 - DNA, 446 bp, Zea mays
  Clone ID: MRT4577_127466C.1
gctgtagctgctatcactcttacttgcccgtgacatgcaaccgcctatgttttttatcgggtcacctaatggggggttactgtgcacgacccttacaccaatgcgtctgtgaaacaccctgcaagtgacccacattaataggcttgctggacatacacatttcaggcgctggattaggctggttaaccaacacaaaaatcgtccttcacaaccaattaccaatctgtttggcgattgaccaacacgctgtaactgcacattaaatatctgctatgataggggtacatacagtttttgcttttcactactctctgacttgccaccgattcgttcttaaattgcctgaccaactatgcagctggctactgtattcgacttatgtttgattggcgggctctctatatgcgtgcgttttataacgagtctgaaggcaatgctcaagacac

SEQ ID NO: 30105 - DNA, 2763 bp, Zea mays
  Clone ID: MRT4577_127467C.1
atgtcgggagatcacgccaagaaggagatggagaccggcgaaaagcccactacaagccatgggagcacttcatcggaagagtcccgcaccaagaggaaggagaagaagaactcctccaaagggaaggagaagaagtcttcttcacaccaaaaggagaagaaggagaaatcctcttctcacaagacgcgtcggagtggggacaagaaaaagaggatgaggaaagtggtctactacgagaccgattcttcatcaacctccggctccgacgcggcatccgtcacttctaagcgccaagagcgcaagaagtatagtaagatccccctacgctaccctcgcatttctaaacatacacctttactttctgtcccattaggcaaaccaccaacttttgatggtgaagattatgctaggtggagtgatttaatgcgatttcatctaacctcactccacaaaagtatatgggatgttgttgagtttggtgcacaggtaccattcgtaggggatgaagactatgatgaggatgaggtggcccaaatcgagcacttcaactctcaagcaacaacaatactcctcgcctctctaagtagagaggagtataacaaagtgcaagggtggaagagcgccaaggaggtttgggatgtgctcaaaaccgcacacgaaggagatgagctcacaaagatcaccaagcgggagacgatcgagggggagcttggtcggttccggcttcgcaaaggggaggagccacaaaacatgtacaaccggctcaagaccttggtgaatcaagtgcgcaacctcgggagcaaaaagtgggatgaccacgaggtggttaaggttattctaagatctcttattttccttaaccctactcaagttcaattaatctgtggcaacccaagatatacactaatgacccccgaggaagtaatcgggaattttgtaagttttgagtgcatgatcgaaggctcgaggaagatcaacgagcttgatgaaccctccacgtccgaagcacaaccggtggcatttaaggcgacggaggagaagaaggaggagtctacaccgagtagacaaccaattgacgcctccaagctcgacaatgaggagatggccttaatcatcaaaagctttcgccaaatcctcaaacaacgaaaggggaaggactacaaatcccgttccaaaaaggtttgctacaagtgtggtaagcccggtcactttattgctaaatgtccattatcaagtgacagtgacagggacaacgacaagaagggaaagaggagagaaaagaagaggtactacaagaagaagggcggcgatgcccatgtttgccgggagtgggactcggacgagagctccaccgactcctcctccgacgaggacgccgccaacatcgtcgtcaccaagggactcctcttccccaacgtcggccacaagtgcctcatggcaaaggacggcaaaaagaaaaaggttaaatctaaatcttccactagatatgagtcctctagtgataataatgctagtgatgaggaagataatttgcgtaccctttttgccaaccttaacatggaacaaaaggaaaaattaaatgaattaattagtgctattcatgaaaaggatgaccttttggattctcaagaggacttcctaattaaggaaaataagaaacatgttaaggttaaaaatgcttatgctctagaaattgagaaatgtgaaaaactatctagtgagctaagcacttgccatgagacaatagacaaccttagaaatgaaaatgctaatttgttagctaaggttgattctcatgtttgtaatgtttcaattgccaattctagaaataatgatgatgatttacttgctaggattgaagaattgaacatttctcttgctagccttaggattgaaaatgaaaaattgcttgctaaggctaaagattttgatgtttgcaatgctactatttctgaccttataactaagaatgacatgttacatgctaaggttgtagaattaaaatcttgcaaacccgctacatctattgttgagcatgtatctatttgtactagatgtagagatgttgatattaatgctattcatgatcacatgtctttaattaaacaacaaaatgatcatatagcaaaattagatgctaaaattgccgagcataacttagaaaatgaaaattttaaatttgctagaagtatgctctatagtgggagacgccctggcatcaaggatgacattggcttccaaaagggagacaatgtcaaacttaatacccctcctaaaagattgtttaactttgttaagggcaaggctcccatgcctcaggataacgagggttacattttataccctgccggttatcctgaggacaaaattaggagaattcattctaggaagtctcactctggccctaaccatgcttttatgtataagggtgagacatctagttctaggcaaccaactcgtgctaagctgcctaagaagaaaactcctagtgcatcaaatgaacatagtgtttcatttaaaacttttgatgcatcttatgtgttgactaacaaatccggcaaagtagttgccaaatatgttgggggcaaacacaaggggtcaaagacttgtgtttgggtacccaaagttcttgtatctaatgccaaaggacccaaaaccatttgggtttatgcatccgggggctcaagttggatcatcgacagcgggtgcacaaaccacatgacaggggagaagaaaatgttctcctcctacgagaaaaactaa

SEQ ID NO: 30106 - DNA, 525 bp, Zea mays
  Clone ID: MRT4577_127468C.1
gaaatttgggagccactggtcaagaaaggacttcatagtaactggtgttggaatctcccttggaagtcttttttcatgacttcttatgggcactgagcatattgtcatgtcttcttcctgaggcgaagttatttccgcagaaagatataggagatttggcatttagagatccaaggaaaaggaaagtctctgagtacaatgccatctcatattctgaccaaatgagattaataacagcagttgaacttttaaaagccacgaaggacattgaatcacagttggaaaagatctcctctacattgctgattcttcacggagccgcagacatggtaaccgatcctcaggtcagcaaattcctttatgagaaagccagcacgaaggacatgaccctcaagctctatgaaggcagctaccattcaatcttagagggagaaccagatgaccggatttcaactgccattaacgacatcatttcatggctagattcacactgttaaatacccctttgtctatagcctctcatgt

SEQ ID NO: 30107 - DNA, 491 bp, Zea mays
  Clone ID: MRT4577_127469C.1
acccttatctagaaagattctttcattcttatcctatcactttctggtagtctctcacctggtaaagttagggtaatagagtgcaatatataggaagttggggatcaacgaaggttgattccgtatttattaggttatgcatgcatcatgattaaaattatactaataaatcttcccctcttatggagacatggtgcgtacaaggaaaactgcacacaaatctactggacctgttggcgtgcctcgtcatcagctagccccaggacatgaggaaagtagttgcggcagcaatgacccaatcggagacttggaggccatggtggaacaactccggacagagctacgtcatcggaataggatatgggcgtaggacagccaacgtatagctgaattgtcagctgacgtcagccgcttgcagtacgagatttcagaacaagattcagccattgattgggccgtcaactcacgttcgatcgcttgggaccgcgaag

SEQ ID NO: 30108 - DNA, 133 bp, Zea mays
  Clone ID: MRT4577_12746C.1
cttgtgcagggtatttatattttctacgttccatctcgaccgaacccaggcaacagcagcaacaaatgcctgtgctttccggcctctacaagtattatttccatcttcaatggaccctacgaatgcgttcctg

SEQ ID NO: 30109 - DNA, 4644 bp, Zea mays
  Clone ID: MRT4577_127470C.1
ttagcaaaagaaattgcgcgaatcaagaatattgagctcatgcctaagtttgttaaaagattgttcatcaagaggcttggtaaagatatcggctaattgatctttagtattaatgtaagaaatctcgatatctcccttttgttggtgatccctaagaaaatgataccgaatggctatgtgtttagtgcggctatgctcgacaggattatccgccatcttgattgcactttcattatcacatagcaaagggactttggttaatttgtaaccgtagtcccgcagggtttgcctcatccaaagcaattgcgcgcaacaatggcctgcggcaatgtactcggcctcggcggtggaaagagcggccgaattttgtttctttgaagcccaagacactaaggatcttcccaagaactggcaagtccccgatgtgctcttcctattgattttgcaccccgcccaatcggcatccgaataaccaatcaaatcaaatgtggatccccgagggtaccaaagcccaaacttaggagtataagccaaatatctcaagattcgttttacggacgtaaggtgagcttccttagggtcggcttggaatcttgcacacatgcatatggaaagcataatatccggtcgagatgcacataaatagagtaaagaacctatcatcgaccggtataccttttgatccacggacttacctcccgtgtcgaggtcgagatgcccattagttcccatgggtgtcttgatgggtttggcatccttcatcccaaacttggttagaatgtcttgagtgtacttcgtttggctgatgaaggtgccctcttggagttgtttgacttggaatcctagaaaatactttaactcccccatcatagacatctcgaacttttgtgtcatgatcctactaaattcttcacatgtagactcgttagtagacccaaatataatatcatcaacataaatttgacatacgaacaagtcattttcaagagttttagtgaataaagtaggatcggcctttccgactttgaagccattagcgataaggaaatctctaaggcattcataccatgctcttggggcttgcttgagcccataaagcgccttatagagtttatagacatggttagggtactcactatcttcaaagccgggaggttgctcaacatagacctcttccttgattggtccattgaggaaggcacttttcacgtccatttgataaagcttaaagccatggtaagtagcataggccaataatatgcgaattgactcaagcctagctacgggtgcataggtttcaccgaaatccaaacctttgacttgggagtatcctttggccacaagtcgagctttgttccttgtcaccacaccatgctcatcttgcttgttgcggaagacccatttggttcctacaacattttgattaggacgtggaactaaatgccatacctcattccttgtgaagttgttgagctcctcttgcatcgccactacccaatccgaatcttggagtgcttcctctaccctgtgtggctcaatagaggaaacaaaagagtaatgctcacaaaaatgtgcaacacgagatctagtagttacccccttatgaatgtcgccgaggatggtgtcgatggggtgatctcgttggattgcttggtggactcttgggtgtggcggcctttgctcttcatcctccttgtcttgatcatttgcatctcccccttgatctatgtcgttatcttgaggtggcttatttgattgatcttcttcttcatcaacttgagcctcttcctcattttgagttggtggagatgcttgcatggaggaggacggttgatcttgtgcttttggaggctcttcggattccttaggacacacatccccaatggacatgttccttagcgcgatgtacggagcctcttcaatacctatctcatcaagatcaacttgctctacttgagagccgttagtctcatcaaacacaacgtcacaagaaacttcaacttgtccagtggacttgttaaagactctatatgcccttgtgtttgaatcatatcctagtaaaaagccttctacagtcttaggagcaaatttagattttctacctcttttaacaagaataaaacatttgctaccaaagactctaaaatatgaaatgttgggctttttaccggttaggagttcatatgatgtcttcttgaggattcggtgaagatataaccggttgatggcgtagcaagcggtgttgaccgcctcggcccaaaaccgatccgaagtcttgtactcatcaagcatggttcttgccatgtccaatagagttcggttcttcctctccactacaccattttgttgtggcgtgtagggagaagagaactcatgcttgatgccctcctcctcaaggaagccttcgatttgagagttcttgaactccgtcccgttgtcgcttctaattttcttgatccttaagccgaactcattttgagcccgtcttaagaatccctttaaggtctcttgggtttgtgatttttcctgcaaaaagaacacccaagtgaagcgagaataatcatccacaataactagacagtacttactcccgccgatgcttatgtaagcgatcgggccgaatagatccatgtgtaggagctccagtggcctgtcggtcgtcattatgttcttgtgtggatgatgagcaccaacttgctttcctgcctggcatgcgctacaaatcctgtctttctcaaaatgaacatttgttaatcctaaaatgtgttctccctttagaagcttgtgaagattcttcatcccaacatgggctagtcggcggtgccagagccaacccatgttagtcttagcaattaagcaagtgtcgagttcagctctatcaaaatctactaagtatagctgaccctctaacactcccttaaatgctattgaatcatcacttcttctaaagacagtgacaccaatatcagtaaaaagacagttgtagcccatttgacataattgagatacagaaagcaagttgtaatctaaagaatcttgatttctatccccgaatgtgatagctcgttggggatcttggtttttctcatatgaggagaacatctttttctcccctgtcatgtggtttgtgcacccgctgtcgagtatccaacttgagcccccggatgcataaacccaaatggttttgggtcctttggcattagacacaagaactttgggtacccaaacacaagtctttgaccccttgtgcttgcccccaacatatttggcaactactttgccggatttgttagtcaacacataagaagcatcaaaagttttaaatgaaatgtcatgatcatttgatgcaataggagttttctttctaggcaacttggcacgggttggttgcctagagctagatgtctctcccttatacataaaagcatacttagggccagagtgagacttcctagaatgagttctcctaattttgctctcaggatagccggcagggtacaaaatgtaaccttcgttatcctgaggcatgggagccttgcccttaacaaagttagacaagttcttaggaggggcattaagtttgacattgtctcccctttggaagccaatgccatccttgatgccagggcgtctcccattatagagcatacttctagcaaatttaaatttttcattttctaagttatgctcagcaattttagcatctaatttagctatatgatcattttgttgtttaattaaagccatgtgatcatgtatagcatcaatgttaacatctctacatctagtgcaaatagaaacatgctcaacattagatgtagagagtttgcaagattttagttctacaaccttagcatgcaacatatcattcttagttctaaggtcggaaatagtagtattgcaaacatcaaaatccttagccttagcaatcaaattttcattttctattctaaggctagcaagagaatcattcaattccttaatcttagcaagcaaatcatcattatcatttctaagattgggaattgaagcattacaaacatgaaaatcaaccttagcaattaatatagtattttcatttctaaggttgtcaatagtctcatggcaggtgcttagctcactagacaatttttcacatttttcaacttgtagagcataagcatttttgaccttaacatgctttttgttttccttaataaggaagtcctcttgagagtccaagagatcatccttctcatgaatagcactaatcaattcatttaatttttctttttgttgcatgtttaggtcggcaaaaagggtacgcaaattatcttcctcatcactagcattatcatcactagaggattcatatctagtggaggatttagatttaaccttctttttgccgtcctttgccatgaggcacttgtggccgacgttggggaagaggagtcccttggtgacggcgatgttggcggcgtcctcctcgtcggaggagtcgcttgagctttcgtcggagtcccactcccgacaaacatgggcatcgccgcccttcttcttgtagtacctcttggtgcgggactcttccgatgaagtgctcccgtggcttgtagtgggcttttcgccggtctccatctccttcttggcgtgatctcccgacat

SEQ ID NO: 30110 - DNA, 1407 bp, Zea mays
  Clone ID: MRT4577_127471C.1
tagttacagttgacagtaggtggaaatatagtgcttggtgaaatttgggagccactggtcaagaaatgacttcttatggatatgtttgcaaaacaattttattcatagttactgataactgctaagtccatgccaaatttatttatttttcttgcaatctagcatattcccagttttacttcatggtagggcaactaacctgaagaatgcatgaagaaatttgggagccactggtcaagaaaggacttcatagtaactggtgttggaatctcccttggaagtcttttttcctgacttcttatgggtatatttttgtctcatctttcttgttcagtgattttataagactggcttctctttgcacgaggattctcaggtcagcaaattcctttacgagaaagccagcacgaaggacaagaccctcaagctctatgaaggcagctaccattcaatcttagagggagaaccagatgaccggatttcaactgccattaacgacatcatttcatggctagattcacactgttaaatacccctttgtctatagcctctcatgtcctcatccattgttttggatttatagttccttattagagtaccatgggtctctactctctagtgctttaaattttgccatggtgtgcacagataagtatctctctaattaattaccagtgcttgccccactggccctatggtgtgcttcttgtcgcacctatgtgcaagatttcagaagatgtaacaccacctgcacctgtattgaaggcactgagcatattgtcatgtcttcttcctgaggcgaagttatttccgcagaaagatataggagatttggcatttagagatccaaggaaaaggaaagtagctgagtacaatgccatctcatattctgaccaaatgagattaagaacagcagttgaacttttaaaagccacgaaggacattgaatcacagttggaaaagatctcctctccattgctgattcttcacggagccgcagacatggtaaccgatcctcaggtcagcaaattcctttatgagaaagccagcacgaaggacaagaccctcaagctctatgaaggcagctaccattcaatcttagagggagaaccagatgaccggatttcaactgccattaacgacatcatttcatggctagattcacactgttaaatacccctttgtctatagcctctcatgtcctcatccattgttttggatttatagttccttattagagtaccatgggtctctagtgctttaaattttgccatggtgtgcagagataagtatctctcgaattaattagttgtgcttgctatcttgacactgttggttttatgttaattgcggacaccgcattcaatagcttggatcctgtcaacaagtatcagcattaccaggtcc

SEQ ID NO: 30111 - DNA, 619 bp, Zea mays
  unsure (1)..(619): unsure at all n locations
  Clone ID: MRT4577_127472C.1
tactgccactagcctctgaccgaactcttcctctgtccgcagcgctaccctcttatttgcgaatatgtcgagaccattcctacatttgcctctgacaagagttccttcgtggtctgatccttacacaaagaaatgatcctgatggagttnaacaaaggcattgctatcaccagctaatcttcaatggaaataagcgtctccttatccaggttacatataacatatcgtggaggcacaatggcgctacgctcgcgagaaacagatgactcacanagatgggtcttccacaaacccgatgtattcgctaacctgcactacatctatatgctaggccaggcgatgaagcgtcaaggacacctgatcataggaccatctgactgggtacacaatgtatattccccttcagagtcaaccaccagtatgcatctgggctacaggctgtagccagtgtcgcagctgctataaaggctggttactatgacatnggtactttagatctatatatacatgctcctttcgctcttgtgcctgtaanttggctgctgaatccctgctctccctctaaaccggattggagcctgtttggaatccctgtccataaattcccttgctaggggaa

SEQ ID NO: 30112 - DNA, 2664 bp, Zea mays
  Clone ID: MRT4577_127473C.1
atgacgaccgacaggccgtttgagctactccacatggatctattcggcccgattgcttacataagcatcggcgggagtaagtattgtcttgttattgtggatgattattctcgcttcacttgggtgttctttttacaggaaaaatctcaaacccaagagaccttaaagggattcttgagacgggctcaaaatgagttcgacttaaggatcaagaaaataagaagcgacaacgggacggagttcaagaactctcaaatcgaaggttttcttgaggaagagggcatcaagcatgagttctcttctccctacacacctcaacaaaatggtgtagtggagaggaagaatcgaactctattggacatggcaaggaccatgcttgatgaatataagacttcggatcggttttgggccgaggcagtcaacaccgcctgctacgccatcaaccgattatatctacaccgaatcctcaagaagacatcatatgaactcctaatcggtaaaaagcccaacatctcatattttagagtctttggtagcaaatgctttattcttgttaaaagaggtagaaaatctaaatttgctcctaagactgtagaaggctttttacttggttatgactcaaacacaagggcatatagggtctttaacaagtccactggactagttgaagtctcatgtgacgttgtgtttgatgaaactaacggctctcaagtagagcaagttgatcttgatgagataggtgatgaagaggctccatgcatagcgctaaggaacatgtccattggggatgtgtgtcctaaggaatccgaagagtctccaaatacacaagatcaaccatcctcctccatgcaagcatctccaccgactgaaaatgaggatgaagctcaagttgatgaagtagaagatcaagcaaatgagccacctcaagatgatagtaatgatcaagggggagatacaaatgaggaagacaaggaggatgaagagcagaggccgccacacccaagagtccaccaagcaatccaacgagatcaccccgtcgacaccatcctcggcgacattcataagggggtaactacaagatctcgggttgcacatttttgtgaacattactcgtttgtttcctctattgagccacacaggatagaggaagcactccaagattcggattgggtggtggcaatgcaagaggagctcaacaacttcactagaaatgaggtatggcatttagttccacgtcctaatcaaaatgttgtaggaaccaaatgggtcttccgcaacaagcaagatgagcatggtgtggtgacaaggaacaaagcccgacttgtggccaagggatactcccaagtcgaaggtttggatttcggtgaaacctatgcacctgtagctaggcttgagtcaattcgcatattattggcctatgctacttaccatggctttaagctttatcaaatggacgtgaaaagtgccttcctcaatggaccaatcaaggaagaggtctatgttgagcaacctcccggctttgaagacagtgagtatcctaaccatgtctataagctctctaaggcgctttatgggctcaagcaagccccaagagcatggtatgaatgccttagagatttccttattgctaatggcttcaaagtcggtaaagccgatcctacactctttactaaaactcttgaaaatgacttgtttgtatgccaaatttatgttgatgatattatatttgggtctactaacgagtctacttgtgaagagtttagtaggattatgacacagaaattcgagatgtctatgatgggggagttgaagtatttcttaggattccaagtaaagcaactccaagagggcaccttcattagccaaacgaagtacactcaagacattctaaacaagtttgggatgaaggatgccaagcccatcaagacacccatgggaactaatgggcatctcgacctcgacacgggaggtaagtccgtggatcaaaaggtataccggtcgatgataggctctttactttacttatgtgcatctcgaccggatattatgctttccgtatgcatgtgtgcaagattccaagccgaccctaaggaagctcaccttacggccgtgaaacgaatcttgagatatttggcttatactcctaagtttgggctttggtatcctaagggatccacatttgatttgattggttattcggatgccgattgggcggggtgcaaaatcaataggaagagcacatcggggacttgccagttcttgggaaggtccctggtgtcttgggcttcaaagaagcaaaattcggtcgctctttccaccgccgaagccgagtacattgccgcaggccattgttgcgcgcaattgctttggatgaggcaaaccctgcgggactacggttacaaattgaccaaagtccccttgctatgtgataatgagagtgcaatcaaaatggccgacaatcccgtcgagcatagccgcactaaacacatagccattcggtatcattttcttagggatcaccaacaaaagggagatatcgagatttcttacattaacactaaagatcaattagccgatatctttaccaagcctcttgatgaacaatcttttaacaaacttaggcatgagctcaatattcttgattcgcgcaatttcttttgttag

SEQ ID NO: 30113 - DNA, 450 bp, Zea mays
  Clone ID: MRT4577_127474C.1
tctaccgcgtgcaccatcggccgccggcgaccgccaccgccaccgtacgtactagcagctagctagttagctagcagcgccatgggcactactgccgcgcatcgtcgaccgggcagtataccatccgccgtcgcgctcgcgctgctgttcttgtcgacgacccttcgcttcgccgccgccgtccagccgtacggcggcggcggcggaccctgcgcgctggccgtggcgccgctcggctacccctgcgaagagcaccaggtgacgacggaggaccgggtacatcctgagcctgcaaaggatccccagtggcgggcgttggcgggcaccggcaggcgtgcccgtgcccgtggccggtggcctgaccttgcgcgcggggcagacggtgctcctgcagcacggggtcttcgtggacggcatgtaatggctgctggcctcgcggaggaggcgctg

SEQ ID NO: 30114 - DNA, 1500 bp, Zea mays
  Clone ID: MRT4577_127475C.1
atgtcgggagatcacgccaagaaagagatggggaccagcgaaaagtccatttcaagccacgggaaggctccatcgggagagtcctacaacaaagggaaggggaaggaaaaggaatccccttcacataagtcgcgtcggagcggtgacaagaagaagatgatgaggaaggtggtctactacgagaccgactcctcatcgccatccacctccggctccgacacgccgtccgtaacttctaagcgccatgagcgcaagaagtttagtaagatccccctacgctaccctcgcattcctaaacatacgcccttactttccgtcccattgggcaaaccaccaacatttgatggtgaagattatgctaggtggagtgatatgatgcgatatcacctaacctcactccacaaaagggatcaagactatgatgaggacgaagttgcccaaattgtgcacttcaactcccaagccaccactatactcctcgtctctctaagtcgagaggagtataataaggtgcaagggttgaagagcgcaaaggagatttgggacgtgctaaagaccgcgcacgaaggagacgaggtgaccaagatcaccaagcgggagacgatcgagggggagctcggtcgcttctggcttcgccaaggggaggagccacaagacatgtacaaccggctcaaaaccttggtgaaccaagtgcgcaacctcgggagcaaaaaatgggatgaccacgaaatggttaaggttattcttagatcacttgttttccttaaccctactcaagttcaattaattcgtggtaatcctagatatacactaatgactcccgaggaagtgataggaaactttgtaagctttgagctaatgatcaaaggctcaaagaaaatcaacgagcttgatggcccctccacgtccgaagcacaaccggtcgcattcaaggcgacgaagaaaagaaggaggaatctacatcaagtagaacacccatcgacgcctccaagctcgacaacgaggaaatggtgctcatcatcaagagcttccgccaaatcctcaagcaaaggagggggaaggattacaagacccgctccaagaaagtatggctacaagtgtggtaagcccggtcatttcattgctaaatgtccattatctagtgatagtgacaggggcgacgacaagaagggaagaagaaaggaaaagaagaggtattacaagaagaagggtggcgatgcccatgtgtgccgcgagtgggactccgatgagagttcctccgactcctcctctgatgaggatgccgccaacatcgctgtcaccaagggactcctcttccccaacgtcgaccacaagtgcctctgttggaacttgctctctgctgcaaggggatccaacggtgggagtagtgacgtaaacagggttctcgcgcaagatggcaatagctctgttaatctagcctctcacgggcactgtgcgggggtatttataggtatccgagtgcccagcgtcttgtgttaa

SEQ ID NO: 30115 - DNA, 693 bp, Zea mays
  Clone ID: MRT4577_127476C.1
atggaagaaaagaagaagtctacaccaagtaggcttccaatcgacgcctccaagctcgacaacgaggagatgtctctcatcattaagagctttcgccaaatccttaagaaaaggaggggggaggactacaagccccgctccaaaagggtatggtaccggtgtggtaagtccagtcactttatagctaaatgtccatattctagtgaaagtgatagggacgaagacaagaaggggaagaagaagatggagaagaagaagtactacaagaagaaaggcagcgaagcgcacatgggcgggaatgggactctgacgagagctccactaactcctcctccgacgaggacgccgccaacatcaccgtcaacaagggacttctcttccccaacgtcggccacaaaagtagaaaaatatgaaaatttgtctaaggagcttagcatgtgcaatgattcaatttctagtcttagaattgagaacgataatttaattactaagattgaagaattgaatgattgcgaagcatctacatctactattgaacatgttactatttgcactagatatagatatgttaatgttgaagctattgatgatcaccttgccatgattaaacaacaaaatgatcacatagctacattaaatgctaaaattgccgagcatgagctagaaaatggaaattttaaattgtcgagctga

SEQ ID NO: 30116 - DNA, 4596 bp, Zea mays
  Clone ID: MRT4577_127477C.1
ctaatgcctaagtttggtaaatgtttgttcatctaatggcttggtaaagatatcggctaattgttctttggtgttaatatatgcaatctcgatatcccccttttgttggtgatcccttagaaaatgataccgaatgactatgtgtttagtgcggctatgctcaacgggattatccgccatgcggattgcactctcattatcacatagaagaggaactttggttaatttgtaaccatagtccctaagggtttgcctcatccaaagtaattgcgcgcaacaatgaccggtggcaatatactcggcttcggcggtagaaagagctacggaattttgcttctttgaagcccaagacaccagagaccttcccaagaactggcaagtccccgatgtgctctttctattaattttacaccctcccgtgtcgaggtcgagatgcccattggttcccatgggtgtcttgatgggcttggcatccttcatcccaaacttgtttagaatgtcttgaatatacttcgtttggctaatgaaggtgccctcttggagttgcttcacttcaaatcctaagaagtacttcaactcccccatcatagacatctcgaatttttgtgtcatgatcctactaaattctttacatgtagattcgttagtagacccaaaaatgatatcatcaacataaatttggcatataaacaaatcattttcaagtgttttggtaaagagtgtagaatcggcctttccgactttgaagccattagtgataagaaaatctcttagggattcataccatgctcttggggcttgtttgagcccataaagcgccttagagagtttgtaaacatggttagggtactcactatcttcaaagccgggaggttgctcaacatagacctcttccttgatcggtccattgaggaaggcacttttcacgtccatttgataaagcttaaagccatggtaagtagcataggaaagtaaaatgcgaattgactcaagcctagctacaggtgcataggtttcaccgaaattcaaaccttcgacttgtgaatatcccttggccacaagtcgggctttgttccttgtcaccacaccatgctcatcttgcttgttgcggaagacccacttggttcctacaacattttgattaggacgtggaactaaatgccatacctcattcctagtgaagttgttgagctcctcttgcatcgccaccacccaatccgaatcttgaagtgcttcctctaccttatgtggtcttgggtgtgtcggtcttgtagcttgttcatcttcctcatcttgatcatgggcatctcccccttgatcattgctctcctcttgaggtggctcaacttcttgatcttctccttcatcattttgagccttaccctcatcttgagttggtggagatgcttgtgtggaggaagatggttgatcttgtgcttgtggtggctcttcggattccttaggacacacatccccaatggacatgttccttagcgcgacgcacggagcctcttcatcatctagctcatcaagatcaacttgctctacttgagagccgttagtctcatcaaacacaatgtcacaagaaacttcaactagtccagaggacttgttaaagactctatatgcccttgtgtttgaatcatatcctagtaaaaagccttctacagccttaggagcaaatttggattttctacctcttttaacaagaataaagcatttgctaccaaagactctaaaatatgaaacatttggctttttaccggttaggagttcatatgatgtcttcttgaggattcggtgtagatataaccggttgatggcgtagcaggcagtgttgaccgcctcggcccaaaaccgatccgaagtcttgtattcatcaagcatggtccttgccatgtccaatagagttctattcttcctctccactacaccattttgttgtggcatgtagggagaagagaactcatgcttgatgccctcctcctcaaggaagccttcgatttgagagttcttgaactccgtcccgttatcgcttctaatctttttgatcctcaagccgaactcattttgagcccgtctcaagaatccctttaaggtttcttgggtatgagatttttcccaaacgattttgggtcctttgacattagatacaagaactttgggtacccaaacacaagtctttgatcccttgtgtttgcccccaacatacttggcaactattttgccggatttgttagtcaaaacatagtatgcatcaaaagttttaaatgaaatgttagaatcatttgatgcaataggagttttcttcttaggcaatttagcacgggttgattgcctagagctagatgtctcacccttatacataaaagcatgattagggccagagtgagacttcctagagtgatttctcctaattttgtgctcgggataaccggcagggttcaaaatgtaaccctcgttatcctgaggcatgggagccttgcccttaacaaagttagacaatcttttaggaggggcattaagtttgacattgtctcccttttggaagccaatgccatccttgatgccagggcatctcccactatagagcatgcttctagcaaatttaattttttcattttctaagtcatgctcattaatcttagcattgagttgagctatgtgatcatttttcttcttaattaaggctaggtgatcatgaatagcttcaacattaatgtctctacatctagtgcaaatggaaacatgctcaatggtagatgtagagggtttgcaagattttagttcaacaatcttagcatgtaaaatgtcattttcatttctaagattggaaatggtaacattgcaaacatctaagtccttagccttagcaattgattttacattctcatttctaaggctagcaagagagacattcaattcttcaatcttagcaagtaaattaacattatcatctctaatattggaaattgaatcatcacaagcatttgaatcaaccttaacatgcttcttattttccttaattaggaagtcctcttgggagtccaagagttcatccttctcatgaatagcactaattagttcatttaatttttccttttgttgcatgtttaggttggcaaaaagggtgcgcaaattatcctcctcatcgctagaattatcctcatcactagaggttgcatatttactggaggattttgattttaccttcttccttttgccgtcctcggccatgaggcacttgtggccgacgttggggaagaggagtcccttggtgatggcgatgttggcggcgtcctcgtcggaggaggagtcggaggagctctcgttggagttccactcgcggcacacatgggcatcgctgcccctcttcttgtggtacctcttcttttctctcctctttcccttcttgtcgttatccctgtcactgtcactacataatggacattttgcaataaagtgaccgggcttaccacacttgtagcacactttcttggagcgggacttgtagtccttccctctcatttgcttgaggatttggcggaagctcttgatgatgagcgccatttcctcgttgtcgagcttggaggcgtcgatgggtgttctacttgatgtagattcctccttcttctcctccgtcgccttgaatgcgaccggttgtgcttcggacgtggaggggccatcaagctcgacgattttctttgagcctttgatcatcaactcaaagctcacaaaattccctattacttcctcgggagtcattagtgtatatctaggattgccacgaattaattgaacttgagtagggttaaggaaaacaagtgatctaagaataaccttaaccattttgtggtcatcccattttttgctcccgaggttgcgcacttggttcaccaaggtcttgagctggttgtacatatcttgtggctcctccccttggcgaagtcggaagcgaccgagttccccctcgatcatctcccgcttggtgatcttggtcacctcgtctccttcgtgcgcggtctttagcacgtcccaaatttcctttgcgctcttcaacccttgcaccttattatactcctctcgacttagagaggcgaggagtatagttgtggcttgggagttgaagtgttggatttgtttgacctcctccgagtcgtaatcctcgtctcccttctttggtacctgcactccatactcaacaatatcccatatgcttttgtggagtgaggttaggtgatgcctcattttatcactccacataggataatcttcaccttcaaacataggtggtttgcctaatggaacagagagtaatggagtgcgtctagaaatgtgaggatagcgaaggggcatcttactatacttcttgcgctcctggctctttgaagtggtggaggccgattccgagccggaggtggagggtgacgaagagtcggtctcgtagtagaccaccttcctcatcttcttcttcttgtcacccatccgatgggacttgatggaggaagaggatttctccttgtgcttgtgggcggactcccttgagtgtgttcttctcgagcttgcggtcttgtcgccggtcccgagatccctcat

SEQ ID NO: 30117 - DNA, 315 bp, Zea mays
  Clone ID: MRT4577_127478C.1
aaaaaaaaaaaaaaaaaaaaaaaaaaaaaaaaaaaaaaaaaaaaaaaaaaaaaaaaaaaggggaaaaaaaaaaaaaaaaaaaaaaaaaaaaaaaaaaaaaaaaaaaaaaaaaaaaaaagggggcggcccttttaagggacccaattttccttccccgtgtttgcaactttttattttttttttggggcccctaaatttaatttcccggcccggttttttccaccttggggcttggaaaaccctgggcttccccaaatttaatcccttgggagcaattccttttttccccacttgggttaatagcaagagggcccc

SEQ ID NO: 30118 - DNA, 5331 bp, Zea mays
  Clone ID: MRT4577_127479C.1
tcaaaagaaattcctagaatcaagaatatttagctcatgcctaagtttgttaaaagattgttcatctagtggcttggtaaagatatcggctaattgttccttggtgttaatatatgcaatctcgatatctcccttttgttggtgatccctaagaaaatgataccgaatggctatgtgtttagtgcggctatgctcaacgggattatccgccatgcggattgcactctcattatcacatagaagaggaactttggttaatttgtaaccgtagtccctaagggtttgcctcatccaaagtagttgcgcgcaacaatgacctgcgacaatgtactcagcctcggcggtagaaagagctatggaatttttcttctttgaagcccaagacaccaaggaccttcccaagaactggcaagttcccgatgtgctctttctattgattttacaccccgcccaatcggcatccgaataaccaattaaatcaaatgtggatccccgagggtaccaaagcccaaacttaggagtatgaactaagtatctcaagattcgttttacggccataaggtgagcttccttagggtcggcttggaatcttgcacacatgcatacggaaagcataatatccggtcgagatgcacataaatagagtaaagaaccaatcatcgaccgatataccttttgatcgacggatttaccttccgtgtcgaggtcgagatgcccattggttcccatgggtgtcttgatgggcttggcatccttcatcccaaacttgtttagaatgtcttgaatatacttcgtttggctaatgaaggtgccctcttggagttgcttcaattgaaatcctaggaagtacttcaactcccccatcattgacatctcgaatttctgtgtcatgatcctactaaattcctcacatgtagattcgttagtagacccaaatataatatcatcaacataaatttggcatacaaacaaatcattgttaagagttttagtgaatataataggatcggcttttccaactttgaatccattagtgataagaaaatctcttaggcattcataccatgctcttggggcttgcttgagcccataaagcgccttagagagtttatatacatggttagggtactcactatctttaaagccgggaggttgctctacatagacctcttccttgattggtccgttgaggaaggcactcttcacgtccatttgataaagcttgaagccatggtaagtagcataggccaataatatacgaattgactcaagcctagctacgagtgcataggtttcaccgaaatccaaaccttcgacttgtgaataccccttggccacaagtcgggctttgttccttgtcaccacaccatgctcgtcttgcttgttgcggaacacccactttgttcctacaacattttgattaggacgtgggaccaaatgccatacctcgttcctagtgaagttgttgagctcctcttgcatcgccaccacccaatccgagtcttgtagtgcttcctctaccctatgtggctcaatagaggaaacaaaatagtaatgctcacaaaaatgtgcaacacgagatctagtggttacccccttatgaatgtcgccgaggatggtgtcgacagggtgatctcgttggattgcttggtggactcttgggtgtggcggtcttggttcttcatcctccttgtcttgatcatttgcatctcccccttgatcattgtcgtcatcttgaggtggctcatctcttggatcttgtccttcatcaactttagcctcatcctcattttgagtcggtggagatgcttgcgtggaggaggatggttgatcttgtgcatttggaggctcttcgaattccttaggacacacatccccaatggacatgttcctaagttcgatgcatggagcctcttcattacctatctcatcaagatcaacttgctctacttgagagccgttagtctcaccaaacacaacgtcacaagaaacttcaactagtcctgaggacttgttaaagactctatatgcccttgtgtttgaatcatatcctagtaaaaagtcttctacagtcttaggagcaaatttagattttctacctcttttaacaagaataaagcatttgctaccaaagactctaaaatatgaaatattgggctttttaccgattaggagttcgtatgatgtcttcttgaggattcggtgtagatacaaccgattgatggcgtagcaggcggtgttgaccgcctcgacccaaaaccgatccgatgtcttgtactcatcaagcatggttcttgccatgtccaatagagttctattcttcctctgcactacaccattttgttgtggggtgtagggagaagagaactcatgcttgatgccctcctcctcaaggaagccttcgatttgtgagttcttgaactccgtcccgttgtcgcttctaattttcttgattcttaagccgaactcattttgagcccgtctcaagaatccttttaaggtttcttgggtatgagatttttcctgcaaaaagaatacccaagtgaagcgggaataatcatccacaataactagacagtacttactcccgccgatgcttatgtaggctatcgggccgaataggtccatgtgtaagagctcgagtggcctgtcagttgtcatgatgttcttatgtggatgatgaatcccaacttgtttccctgcctgacatgcgctacaaatcctgtctttctcaaaatgaacattcgttagtcccaaaatgtgttctccctttagaagcttatgaagattcttcattccaacatgtgctagccggcgatgccagagccagcccatgttagtcttagcaattaagcaagtgtcgagttcagctttatcaaaatctactaagtatagctgaccctctaacactcccttaaatgctattgaatcatcacttcttctaaagacagtgacaccttggtttccatccccgaatgtgatagctcgttgaggatcttggtttttctcataggaggagaacatattcttctcccctgtcatatggtttgtgcacccgctatcgatgatccagcttgagcccccggatgcataaacccaaactgttttgggtcctttggcattagatacaagaactttgggtacccaaacacaagtttttgatcccttgtgtttgcccccaacaaacttggcaactactttgtcggatttgttagtcaaaacataagatgcatcaaaagttttaaatgaaatgtcatgatcatttgatgcactaggagttttcttcttaggcaatttagcacgggttgattccctagaactagatgtctcacccttatacataaaagcatgattagggccagagtgagacttcctagagtgaattctcctaattttgctctcgggataaccggcagggtacaaaatgtaaccctcgttatcctgaggcatgggagccttgcccttaacaaaattagataatcttttaggaggggcattaagtttgacattgtctcccttttggaagccaatgccatccttgatgccagggcgtctcccgctatagagcatgcttctagcaaatttaaatttttcattttctaagtcatgctcattgattttagcattaagttgagctatgtgatcattttgtttcttaattaaagtggataatttttcacatttttctacttctagagcataagcattcttaaccttaacatgcttcttattttctttaataaggaagtcctcttgtgaatccaagagatcatccttatcatgaatagcactaattagttcatttagtttttccttttgttgcatgttgaggttagcaaaaagagtacgcaaattatcttcctcatcactagcattttcttcatcactagaggattcatatctagtggaggatttagatttaaccttcttatttttgctgtcctttgccatgaggcacttgtggccgacgttggggaagaggagtcccttggtgacggtgatgtttgcggcgtcctcgtcggaggaggagtcggaggagctctcgtcggagtcccattcccggcaaacatgggcatcgtcgcccttcttcttgtagtatctcttcttctcctttcttctccccttcttgtcgtcgcccctgtcactatcactagataatggacatttagcaatgaaatgaccgggcttaccacatttgtagcaaacttttttggagcggggtctgtaatcctcccccctcctttgcttgaggatttgacggaagctcttgatgatgagcgccatctcctcattgtagagctttgaggcgtcgattggttgtctacttgatgtagactcctccttcttcttctccgtcgctttgaatgcaaccggttgtgcctcggacgtggaggggccatcaagctcgttgatcttctttgagcctttgatcatcaattcaaagctcacaaaattcccgattacttcctcgggagtcattagtgtatatctaggattgccacgaattaattgaacttgagtagggttaaggaaaacaagtgatcttagaataaccttaaccatttcgtggtcatcccattttttgctcccgaggttgcgcacttggttcaccaaggttttgagccggttgtacatgtcttgtggctcctccccttggcgaagtcgaaagcgaccgagctcccccttgatcgtttcccgcttggtgattttggtcacctcgtctccttcgtgcgcggtctttagcgtgtcccaaatctccttagcacgtttcaacccttgcaccttattatactcctctcgacttagagaggcgaggagtatagttgtggcttgggcgttgaagtgttggatttgggccacttcgtcctcatcataatcttcatcccctacggatggtacctgtacaccaaactcaataacatcccatatacttttgtggagtgaggttaggtgatatcgcatcaaatcactccacctagcataatcttcaccatcaaacgttggtggtttgcccaatgggacggaaagtaaaggtgtatgtttaggaaagcgaggatagcgtagggggatcttactaaacttcttgcgctcatggcgcttagaagtgacggacggcgtgtcggagccggaggtggatggcgacgaggagtcggtctcgtagtagaccaccttcctcatcttcttcttcttgtcaccgctccgatgcgacttgtgtgaaggggattccttctccttccccttgttgcaggactctcctgatggagctttctcatggcttgtagcgggcttctcgccggtcaccatctccttcttggtgtgatctcccgacat

SEQ ID NO: 30119 - DNA, 126 bp, Zea mays
  Clone ID: MRT4577_12747C.1
aggtaccggactctgcagccgcagagatgttgatgcctaagaagaaccggattgcgatttatgagatcctttttaaggagtggttcatggtggccaagaaggatgtccacatgtctaagcacccgg

SEQ ID NO: 30120 - DNA, 1671 bp, Zea mays
  Clone ID: MRT4577_127480C.1
ttacaaattggtggcggtgcggtccttttgctttgggctcatactttctccccctttggcatgaatcgccaaaaacggaatcattagagccctcagaattactctctcccccttttgatcgacggatttacctccctcgtcgaggtcgagatgcccattggttcccatgggtgtcttgatgggtttggcatccttcattccaaacttgcttagaatatcttgagtatactttgtttggcttaggaaggtgccctcttggagttgcttcacttgaaatcctaagaaatacttcaactcccccatcatagacatctcgaatttttgtgtcatgatcctactaaattcttcacatgtagactcgttagtagacccaaatataatatcatcaacataaatttggcatacaaacaagtcattttcaagagttttagtgaatagagtaggatcggcctttccgacttcgacttgggagtatcctttggccacaagtcgagctttgttccttgtcaccacaccatgctcatcttgcttgttgcggaaaacccatttggttcctacaacattttgattaggacgtggaaccaaatgccatacctcattcctagtgaagttgttgagttcctcttgcatcgccaccacccaatccgaatcttgaagtgcttcctctaccctgtgtggctcaatagaggaaacaaaagagtaatgctcacaaaaatgtgcaacacgagatctagtggttacccccttatgaatgtcgccaaggatggtgtcgacggggtgatctcgttgaattgcttggtggactcttgggtgtggcggctttggttcatcatcctccttatcttgatcatttgcatctcccccttgatcattgtcgtcatcttgaggtggctcatctgcttgatctcctccttcatcaacttgagcctcatcctcattttgagttggtggagatgcttgcgtggaggaggatggttgatcttgtgcatttggaggctcttcggattccttaggacacacatccccaatggacatgttccttagcgcgatgcacggagcctcttcaatacctatctcatcaagatcaacttgctctacttgagagccgttagtctcatcaaacacaacgtcacaagaaacttcaacttgcccagaggacttgttaaagactctatatgcccttgtgtttgaatcatatcctagtaaaaagccttctacagtcttaggagcaaatttagattttctacctcttttaacaagaataaagcatttgctaccaaaggctctaaaatatgaaatattgggctttttaccggttaggagttcatatgatgtcttcttgaggactcggtgaagatataaccggttgatggcgtagcaggcggtgttgaccgcctcggcccaaaaccgatccgatgtcttgtactcatcaagcatggttcttgccatgtccaatagagttctattcttcctctccactacaccattttgttgtggggtgtagggagaagagaactcatgcttgatgccctcctcctcaaggaagccttcaatttgtgagttcttgaactccgtcccgttgtcgcttctaattttcttgatccttaagccgaacttattttgagcccgtctcaagaatccctttaaggtctcttgggtttgagatttttc

SEQ ID NO: 30121 - DNA, 326 bp, Zea mays
  Clone ID: MRT4577_127481C.1
ggaaaacagttggaagcaagtaattaacatgcttggttttgggggaacaaaagctgggtagtagctagatcccccgtttttttaattgtgcaggtttgtcctttaacagtcacatgacattgatcatggatcatgggtggaccttgatgacaccacgggctccgatttttttgccaaccttgtagtcggagaacccagccttggtaaaaatggggccccagtctttttccccgcgctgcctgcccttggggttaaccattatgggcattttcattaagagttgggccttgttctttaccggccctattttcggccccaggagtttt

SEQ ID NO: 30122 - DNA, 2691 bp, Zea mays
  Clone ID: MRT4577_127482C.1
ttagtgggcccaggggatatctatcccccacactttggcattagaaacaagaactttgggtacccaaacacaagtcttggagcccttgtgtttgcccccaacaaacttggcaactaccttgccggatttgtcagtcaaaacataagatgcatcaaaagtcttaaatgaaatgctatgatcatttgatgcattaggagttttcttcttaggcaacttggcacgggttggttgcctagagctagatgtctcacccttatacataaaagcatgattagggccagagtgagacttcctagaatgagttctcctaattttgctctcgggataaccggcagggtacaaaatgtaaccctcgttatcctgaggcatgggagctttgcccttaacaaagttagacaagttcttagggggagcattaagtttgacattgtctcccctttggaagccaatgccatccttaatgccagggcgcctcccattatagagcatacttctagcaaatttaaacttttcattctctaagttatgctcggcaattttagcatctaataatgctatatgatcattttgttgtttaattaaagtcatgtgatcatgaatagcattgatatcaacatctctacatctagtacaaatagaagtgtgctcaacggtagatgtagagggtttgcaagattttagttctacaaccttagcatgcaacatatcattcttagttctaaggtcggaaatagtagtattgcaaacatcaaaatctttagccttagcaatcaaattttcattttctactctaaggctatcaagagaatcattcaattccttaatcttagcaagcaaatcatcattatcatttctaagatttggaattgagacatcacatacatgagaatcaaccttagcaattaatctagcattttcatttctaaggttgtcaatagtgtcatggcatgtgcttagcttactagataatttgttacatttttctacctctagagcataagcatttttaaccttaacatgctttttgttttccttaataaggaagtcctcttgagagtccaagagatcatccttctcatgaatagcactaatcaattcatttaatttttccttttgttgcatgttaagatcggcaaaaagggtacgcaaattattctcctcatcactagcattatcatcactagaggattcatatttagtagaggatttagatttaaccttcttccttttgccgtcctttgccatgaggcacttgtggccgatgttggggaagaggagtcccttggtgacggcgatgttggcggcgtcctcgtcggaagaggactcggtggagctctcgtcggagtcccactcccggcaaacatgggcatcgccgcccttcttcttgtagtacttcttcttttctctcctctttcccttcttgtcgttgcccctgtcactgtcactagatataggacattttgcaataaaatgaccgggcttaccacatttgtagcacactttcttggagcgaggtttgtagtccttccccctccgttgcttgaggatttggcgaaagcttttgatgattaaagccatttcctcattgtcgagcttggaggcgtcaattggttgtctactcggtgtagactcctccttcttctcctccgtcgccttaaatgccactggttgtgcttcggacgtggagggttcgtcaagctcgttgatcttctttgatcccttgatcatatattcaaagctcacaaaattcccgattacttcctcgggagtcattagtgtgtatctaggattaccacgaattaattgaacttgagtggggttaaggaaaataagagatcttagaataaccttaaccacctcgtggtcatcccacttcttactcccgaggttgcgcacttggttcaccaaggttttgagccggttgtacataccttgtggctcctccccttggcgaagacgaaagcgaccgagctccccctcgatcgtttcccgcttggtgatcttggtgagttcatcaccctcgtgcgcggtcttgagaaggtcccaaatttcctttgcattcttcaacccttgcaccttgttgtattcctccttgcttagagaggcgaggagtatggttgtagcttgggagttgatgtgctcgatttgggccacttcgtccgtatcataatcctcatcccctatggatggtacctgtgctccaaactcaacaacattccatatacttttgtggagtgaggttagatgaaatttcattaaatcactccacctagcataatcttcgccatcaaaagttggcggtttgcctaatggaacggaaagtaatggagtatgtctagatgtacgagaatagtgtgaggggatcttactgaacttcttgcgctcttggcgcttagaagttacggacggcgcatcggagtcggaggtcgatgttgatgaagtgtcggtctcgtagtagaccaccttcctcatcctcttgtgcttgtcgcctttccgatgcgacttgtgggaagaagatttttccttcttctctttgtggcgtgaggaagaagatcttttctccttccgtttggaggagtccttcttcttctccttcctcttggtgcgggactcttccgatgaagtgctcccttggctcgtagtgggcttgtcgccggtctccatctccctcttggtgtgatctcccgacat

SEQ ID NO: 30123 - DNA, 4154 bp, Zea mays
  Clone ID: MRT4577_127483C.1
ggttgctcaatatagacctctttcttgattggtccattgaggaaggcactcttcacgtccatttgataaagcttaaagccatggtaagtagcataggcaagtaatatacgaattgactcaagcctagctatgagtgcataggtttcaccaaaatccaaaccttcgacttgtgaataccctttggccataagtcaggctttgttccttgtcaccacaccatgctcatcttgtttgttgcggaagacccatttggttcctagaacattttggttaggacgtggaactaaattccatacctcattccttgtgaagttgttgagctcctcttgcgtcgccagcacctaatccgaatcttaaagtgcttcctctaccctgtgtggctcaatagaggaaacaaaagtgtagtgttcacaaaaatgagcaatacgagatcgagtggttacccccttatgaatatcgccgaggatggtgttcacggggtgatctcgttggattgctgggtggactcttgggtgtggcggccttggatcttgctcatcctccttgtcttgatcattggcatctcccccttgatcattgccgccctcttgaggtggctcatcttcttgatcttctccttcatcatcttgagcctcatcctcaccttgagttggtggagatgcttgcatggaggaagatggttgatcttgtgcttgtggaggctcttcagattccttaggacacacatccccaatggacatgttccttagcgcgacgcatagagcctcttcatcatctagttcatcaagatcaacttgctctacttgagagccgttagtctcatcaaacacaatgtcacatgagacttcaacaagtccagtggacttattaaagactctatatgcccttgtgtttgagtcataaccaagtaaaaagccttctacagccttaggagcaaatttagatttcctacctcttttaacaagaataaagcatttgctaccaaagactctaaaatgagaaacattgggctttttaccgataaggagttcataagatgtcttcttgaggattcgatgtagatacaaccggttgatggcgtagcaagcggtgttgactgccttggcccaaaaccgatctgaagtcttgtactcatcaagcatggtccttgccatgtataatagagttctattcttcctctccactacaccattttgttgtggtgtgtagggagaagagaactcatgcttgatgccctcctcctcaaggaagccttcaatttgagagttcttgaactccgttccgttgtcgcttcttattttcttgatcctcaagccaaactcattttgagctcgtctcaagaatcctttcaaggtctcttgggtttgagatttatcctgtaaaaagaatacccaagtgaagcgagaataatcatccacaataactagacagtacttactcccgccgatgcttatataagctatcgggccgaataggtccatgtggaggagttccagtggcttgtcagtcgtcatgatgttcttgtgtggatgatgaacaccaacttgcttccctgcttggcatgcgctacaaatcctgtttttctcaaaatgaacattggttagtcccaaaatgtgctctccctttagaagcttgtgaagattcttcattccaacgtgggctagttggcgatgccagagccagcccatgttagttttagcaattaagcaagtatcgcgttcagctctattgaaatcaactaagtatagctgaccctctaatactcccttaaaagctactgaatcatcacttcttctaaagacagtaacacctgtatccgtaaaaagacagttgtaacccattttgcatatttgagaaacagaaagcaagttgtaatctaatgaatctacaagaaaaacattggaaatagagtggtcaggtgatatagcaattttacccaatcctttgaccaaaccttgatttccatccccgaatgtgatagctctttgggaatcttggtttttctcataggaggagaacatcttcttctccccagtcatatggtttgtgcacccgctgtcgatgatccaacttgagcccccggatgcataaaccttgggtacccaaacacaagtcttggagcccttgtgtttgcccccaacatatttggcaactaccttgccagcagggtataaaatataaccctcattatcctgaggcatgggagccttgcccttaacaaaattagacaatcttttaggaggggcattaagcttgacattgtctccctgttggaagccaatgccatccttaatgccagggcgtctcccactataaagcatactacgagcaaatttaaatttttcattctctagttcatgctcggcaatttttgcatctagtttagctatatgatcattttgttgtttaatcatagcaaggtgattatgaatagcatctactacataatcatttagttcaacaatcttagcatgtaaaataacattctcatctctaagattggaaatagaaacattgcaaacatctaagtctttagccttagcaattaaattttcattctcattcttaaggctagcaagagaggcattcaatttatcaatcttagcaattaggttagcattatcatttctaagattggtaattgaatcaccacaaatatttgacttctcaaccttagcaatcaaattagcattctcaattctaaggttggagatagtgtcatggcaagtacttagctcactagttaatttttcatttttatctacctcctgagcataagcatttttagtcttaacatgctttttgtttttcttaataaggaagtcctcttggctatccaagagttcatccttctcatgaatagcactaatcaattcatttaatttctctttttgttgcatgttaagattggcaaaaagagtaagcaagttatcctcatcatcactagaattttcctcatcactagaggttacatacttagtggaggatcttgattttaccttcttcttcttgccatcctttgccatgaggcacttgtggccgacgttggggaagaggaggcctttgttgatggcgatgttagcagcgtcctcgtcgtcagaggagtcggtggagctctcgtcggagtcccactcccggcaaacatgggcatcgccacccttcttcttgtagtacctcttcttttccttcttcttccccctcctgtcgttatccctgtcactatcattggcttctttcttctcctccgttgccttgaatgcaacgagttgtgtctcgggtacggaagaggcaccttgctcgatgatcttctttgagcctttgatcatcaactcaaagctcataaattttcctattacttcctcgggagacattagtttatatcttggatcaccacgaattaattgaacttgagtggggttaagaaatacgagtgatctaagaataaccttgaccatttcatggtcatcccacttggtgctctcgaggttgcacacttgatttaccaaggtctttagccggttgtacatggcttgtgggtcttctccttggttgagcatgaaacgatcgagctccctctcgatcgtttccctcttggtgatcttggtcacctcgtctccttcgtgcgcggttttgagcacatcccaaatctctttagcgctcttcaacccttgcaccttgttatactcctcttgacttagagaggcgaggagtatagtggtggcttgggagttgaagtgctgaatttgggcaacttcatccgagtcatagtcttcatcccctacggatggtacctgtacaccaaactcaacaacgtcccaaatactagtgtggagtgaggttaggcgatgcctcattttatcactccacatgttataatcttcaccgtaaaaaaccggtggtttgctaaacttcttgcgctcatggcgcttagaagttacggacggcgcgtcggagccgaaggtggatggcgacgaagaatcggccttgtagtagaccaccttcttcatcttcttcttgtcgccactccgatgcgacttgtgggagtgtgattctccctttcctttggagccggactcccttgatggagccttcccgtgacttgtagcgggcttctcgccggtcatgacctccttcttagcgtgatctcccgacat

SEQ ID NO: 30124 - DNA, 381 bp, Zea mays
  Clone ID: MRT4577_127484C.1
atgtggagcgcctttttttttttttttttttttttttttttttttttttgttttgttttttttttttttttttttttttttttttttttttcccccaggcaggttttgttcccccccgtttataagcaaattcaatgtttcgccaacagtttggggaatgaattgggcaggagggccaatataaggcccggggcgtcgggctgcccaaaaaaaaatatttttgcacagcccaaccattgttggggagagctaccccccgttgttaatttttaacgcggggcaagtccgttttaagtaagattttccaaaaatttttttatggggtggggccaggcacctttgggggagaagttggaaaactggggatggggtgttttaaaa

SEQ ID NO: 30125 - DNA, 561 bp, Zea mays
  Clone ID: MRT4577_127485C.1
ttttttttttttttttttttttggccgcaggaatagcagggaaacgccacattcaattgttgcatatgcatggcatagccagccactaacgtcatgtgccctctttcctcacgactagggaggggagcccacggggaccggctcatttttatccctcgcgagtctcacgccaaacgaaataaaaaaacggcatgcgcatgacccggtcatacacgagcgctgggtccagcgcccacaagggtgaacatgccctgtgtgctgtacctagggatgaaaacggtttcggaaattttcggattttcgaaaaccgttttcgatttttttcgatccgattcaccggttacggtaattttcgaaaacgaaatcggtaatcggaattttattccagaatcggtatcagaatcggtttaacgttttaccgaccgttttgatcgattaccgattttaatcggaatttaccgaatttaaatctcggaattttccgaaggcaaaaaacaaataggcggcccggggcagcaccctccactccagcccacttgcccgttgtccggcgtcgacgcg

SEQ ID NO: 30126 - DNA, 593 bp, Zea mays
  Clone ID: MRT4577_127486C.1
gtcttttcttatttccgtgtcccacttcgctccccgaccgagcgctgccgtggtccacttcttcactggctgccggctacgaaccagagcgagctgcgtatggcttcggcggaggcgccggcggcaaggccgattctgtactcgtactggcgcagctcctgctcccaccgcgtccgcatcgcactcaacctcaaaggtatcgattatgagtacagggcggtgaacctcctcaagggcgagcagtctgatcccgagttcatgaagcttaatcctatgaagttcgtccctgccttggtcgacggcgacgcagtaatcggcgactcttacgcaatagcattgtatttggaggacaagtacccccaacgtcctcttttgcctcaagaccttaaaaagaaggccctgaatatccagatagcaagcattgtgtgttctggtattcaacctcttcacaatctcaccttggtgagatttatcgagcaaaaggttggaacaggggagagcatcccgtgggtccaacaacagattgatagaggtttcacagctgttgagaacatgatcaaaggctgtgctgggaagtttgctatgggagatga

SEQ ID NO: 30127 - DNA, 223 bp, Zea mays
  Clone ID: MRT4577_127487C.1
ctcccacactccttacctcatttgctttaatatcatcattcacaccttatggggctggttttaaaatagggtgggcccatcctactccatccacccaaccaaagtttaccacatcatatcctatttctcaagaacatcttccaacatcatccacaccaccatcctttctctcctctccatcatacatacatcctactccatccttctaccctaacctctcttc

SEQ ID NO: 30128 - DNA, 318 bp, Zea mays
  Clone ID: MRT4577_127488C.1
tagatcgcgacggccgccctttttttattacacatttactgcactgtattgcaaaacattgaggggaagtcttactagattgggaggcaaactcatctaatcccgctcaatccacatgtattgagagctatacctacaagctcgcaatgtattccttgatttctgcttcccctaactcttaggtgcttaatgccaaactttatgaatctctttaaatagatcctatctagttcaatacactctggtcctttttaaatgcacagacatatttttatatgtctactttatacaattcaataactcatgagaactttacaa

SEQ ID NO: 30129 - DNA, 588 bp, Zea mays
  Clone ID: MRT4577_127489C.1
gtctctaaacacatatactgcaacggatgtggaatatgtagaatcggagggagggagaatttcttccactgttcaaaatgtggtaatgcttcatgcctgtagtgtcttacatttcattttaaagccaataaatatactgtatatactgccatatgatacttatatatttgatcattctctgtacttatttggactaagtgtttctctgcatgcatttgccattaatcctatgatgagacatgcatgtttgtgtgtatgtaaggctacatgattatagcttctcaattacagtttgcattctttgtagtttgtagatgactagctgaacaatgatgtagaattagagatggcaatgggtaaaaacccgctgggtattacttgcacaaacccatacccgtgaagaaaaaaacgcccgctaaaaaactacccatgacgggtatgaaattttgctcaaacccatacccatgcgggtttcgggtacccaacgggtttcccatacccactaacatcaacataaaaaataattcatcatgtaaatgacaatcaatacattaataagctagcataaaagtaacaagtgataactaa

SEQ ID NO: 30130 - DNA, 408 bp, Zea mays
  Clone ID: MRT4577_12748C.1
cccaggggtcaaattttttttggtaaccccgttttctcaaaccccaacgcaggaaaacccggggcccctttccaaaaggggggagggggaggagaaaaacccccaggaaaaaccaaggggggccccaccccaccctaacaaccagggttggggacccaaacccccaacacaacaggaccagatccaccggggggagagaaagtttccccccaaaaaacggggggaaaaaccccccccggaacaagccaaacggagcccgcacccacaaaacacctaacctatagggcgacccataagggctcggcgtaaccatgggccaaaaggagccccgggggaaaatgggccccccccacaagaccacccccctcccttgccgggggcaaaaaggatcccaacccggggggccca

SEQ ID NO: 30131 - DNA, 347 bp, Zea mays
  Clone ID: MRT4577_127490C.1
ggggaaaaaaatttttttttttttatttaaatgggtcattcaggggattggtaaaactgaccctgccccccagggggaggggggaaaaatttttttttaattatcgccgttaaaagactcaaataggtgggtggcccggggtttttttaaaaaaaatattttttttagggggggaccccccccgcacaaacctaggggcatggagtcggttttttgaagcccaaaattgccggaagttggtgggttttttgggcccgaaaaaacccccaaaactgggcctttttgggtttttttttccagatggactgggggacccaacccaaaattccctgggacccggggttggg

SEQ ID NO: 30132 - DNA, 327 bp, Zea mays
  Clone ID: MRT4577_127491C.1
gcattcagatgttgcagcatcatatatcgagactcagctaattaaagcaagggaacaacaacaccagcagccacctcaacaacagcaacagcagcagcaaatacaaatgcaacaaatgctgttacatagagctgcacagcagcagcaacagcagcagcgtagagatggttctcttctcaatggtactgcaagtggattttctgggaatgatcctttaatccgacaaaatccagctaatgcgaattcgatggcagcaaaaatgtatgaagagaggttaaagctccctccccagcgggattctctggatgaggcgtcaataaagttgca

SEQ ID NO: 30133 - DNA, 2095 bp, Zea mays
  unsure (1)..(2095): unsure at all n locations
  Clone ID: MRT4577_127492C.1
ctcgtccccgcctgccattcgcgagcatccaaagctgtagttgctgcaaagctctcgcaaaatcctactcccaccgccgactcgaacagtcgaacctcggctcccctcctccccaacccgtcatcttccttctacacttgtttctgcgggagcgggagagaaggcaccagggaggccgcccccgtcacccatagccaaagtcacgcgccaccaaactttgttctctcacccagtcgctttcgcgttcagcgcgagccgagcccagccggtgggtcggtcgctgaaggcggagccataaaggcgtcggcgacggcaggatgatgagcggcagatcgggcggcagggacggcgaggcggccggccccgtcatcaggatcagggtttcccacggagccaccttccgcgaggtcgtcgtgccggcgcaggctaccttcggtgagttgaagaggatccttgttcagactactggcttggagcctgagaggcagaggctcttcttccgtgggaaggagaagagtgacagagagttcctgcacacggcaggtgttaaggatggagcaaagctgcttctgctcgagaagcctgcccctgccaacatagagcagaaggttgagcctgtgattatggatgaaagcatgatgaaggcatgtgcggctgttgctcgtgttagagttgaagttgataagctgtctgctaaggtgtgtgacttggagaagaatgtactaggagggagaaaggttgaggataaagaatttgttgtcttgacggagctgcttatgatgcagctgctgaaactcgatggcattgaagctgaaggagaagcaagggcacagaggaaggctgaggtgcgccgagtccagtcccttgtggagaccttggataagctgaaggcaagaaatgcgaaccccttcagcgatcataacaacgctgtttcagtgacgacgcagtgggagacgtttgagaacggtatgggcagcttcagcgctcccccgccccacgttccttcagagcaagttaacactgactgggagcagttcgactaggctcagctgaagctgttgatgtatcgtgagatcggtatgggcattccttttcccaggcagcgaggtgttttgtgtatatgcaccgcgtttggtgcctttggtgtcctaactgcctgtgaatgttaccagatcataccatactaccatgtgaattgcattgcaccgctcaacgctcattgagggccatgtttcgatatgctcctgccaatgccattcgcatgatatttattggctaggttcagcaaggttggtggtaacggccctggccagatccctttacagcagtagctcatccgtgaatgcaattgaatcagtcatgtacacgttgacgctgtagctgttccgaaagtcctgtacagcactagctcatcggcgaatgcatctgtaccatgtacacgctgacgctgtagctgcatttgtagtgcccctttgtaatgcaggaatttaagagaaattatacaggaatttcacaggatggcngncngnnaaaggnttttttttttttgnnngnnnnnnnnnnnnnnncttttttttttttnccctttggggctttttttggggagagagaaaaagaagaggccccccccctttttttttttttcccccccccccccccccctttttggggggccccccccccccaaaaaacccccccttttatttttaaagaggggnngaaagagaaggccccccacaagagaggnnaaaaaaaaagggnggggggggggtttttttttttggggggaaagaaaagagacccccccccccccccccccttggggggggggggngggggggggggaaaaaaattttttttaaaaaaataaaggggggggggggggattttttttgggggnaggaagaaaaaaaaaaaaaaaagaagccccccccccccgctggggttgntattattttttgggggggaaaaaaanaaaaaaagaggggggggggcccccccacaatatttgggggggggggngagaaaaaaaaagagggagggggcgccttctttttgtttttnttnnttttttntggggggggggttttttttt

SEQ ID NO: 30134 - DNA, 2004 bp, Zea mays
  Clone ID: MRT4577_127493C.1
cattgggtacctcgaggccggccgggcggtactccggcgctgggggacggcaggcgcgaactacaagaggagaggagaagagagaggagaattttcaatgctgccgcgcaccgtcatcactagctagtggaggggcggacgagaaggcgaggagctgaggggagagaggcttcacagagcttgcttgagcctggagggggctgccgctgtttgtctctccactccacccaccagcagttacctcgggagggcatggcaaaatctggtgcctcctttccggagtccagttggatggagagggatttcctggccgcgatcggcaaggagcagcagcacccgcacaaggaggaggcaggcgcggaggaatctgcttacttcggcggagcaggagcagcagcagcagccccggcaatggactggtccttcgctagcaagcccggcgccgccccggcgttgatgtcgttccggtcagcttcgttcccccagttctcctccttcgacggcgccaagaacccggcccctcgtatcctcacgcaccagaggtcgttcggccccgacagcacgcactacgccgccgcgcaccgcacgcagcatgcgctgaacggggctagagtcactccggtctcgtcgccgttcaaccagaacagtccgatgttcagggtccagagctcgcctagccttccgaacggtactgcgttcaagcagccgccttttgccatcaacaacaacgctgcggccagttctactgttggtttctatggaacaagggatgtggtgaggccaaagacagcacaattgacgatcttctatgctggttctgtcaacgtattcgacaacgtctcagctgagaaggctcaggagctcatgctcttagccagcagagggtctcttccaagctcagcccccgtggcccgtaagccagaagctcctattctcgctccagcaaaagtcacagcgcctgaggttttgcatgcaacacagatgctgtttcaaaaaccacaacacgtttctccaccttcgtctgccatctccaaaccaatccctggcatcttgcaagctgcaagtctccccaggagcgcctcgagctctaaccttgactccccatttccaaaatcttcagtgccatttcctgtttctcctgtaagtcaggctccgagagctcagcctgcaaccattgccgctacaactgcagcagcaataatgcctagagctgtccctcaagctagaaaggcgtcccttgctcgattcttggagaaaagaaaggaaagggtgacaactgctgcaccttacccatcagccaagagcccgatggagagcagtgacacgtttggcagtgggagcgccaacgacaagtcatcatgcacagacattgccctctcaagcaaccatgaggagtccctatgtttagggcagcccaggaacatcagcttcatccaagagtcccccagtacaaaactacagatctgatctgaatatctgatcatgcccaatgttcatagatttgtccaggctgactgatgcaaggaccatacaatacttttgcattcaggcaaggactcgagaggaagagattacgtatgttatcggtgccgctagctgttgtttatgatgatgttttgttgtgctagtttactgtgatgctggtggtgcccccacctaactaacaagagagctgtcacttgcagactcttgaattttttttgtcctagcgccatttctttagcggtatcaagtcaatttatataggcttacaaattctgcgccttttgtatggccaaagtgtaatattcttgttcttgtattatgaacctccatgctgcagaatgcaagagcaaatcttattgtcaaaaaaaaaaaaaaaaaaacaaccgcggcctgcggttcttgtttttgtgttttaatacaaaagtaaaaaaaaaaaaaaaaaaaaaaaaaaaaaaaaaaagaaaaaaaaaaaaaaaaaaggcccctagggcccgcccccaattccccttttaggggggc

SEQ ID NO: 30135 - DNA, 1326 bp, Zea mays
  Clone ID: MRT4577_127494C.1
tagtccttccgtccacccatccatcgtccccgcctgcacctcgcgagcatccaaagctgtacttgcggcaagttctcgcaaaatcctactcccaccgccgactcgtacctccgctcccctcctccccaacccttccacgcttgcttctccgggagggaaggcacacgggaggtcgccccgccacccatcgcaaaagccacgcgccaccaaactcttttttccctcacccagtcgctttcgcgttcagcgcgagctgagccagccagtgggtcggtcgctggaggcggagccataaaggcgtcagcgacggcagcatgatgagcggcagatcgggcgggagggacgccgagggcgagtgggaggttcggcccggcgggatgctggtgcagcgcagggacggtgaggcggccggccccgtcatcaggatcagggtctcccacggcgccaacttccgcgaggtcgtcgtgccggcgcaggctaccttcggtgagttgaagaggatccttgttcagactactggcttggagcctgagaggcagaggctcttcttccgtgggaaggagaagagtgacagagagttcctgcacacggcaggtgttaaggatggagcaaagctgcttctgctcgagaagcctgcccctgccaacatagagcagaaggttgagcctgtgattatggatgaaagcatgatgaaggcatgtgcggctgttgctcgtgttagagttgaagttgataagctgtctgctaaggtgtgtgacttggagaagaatgtactaggagggagaaaggttgaggataaagaatttgttgtcttgacggagctgcttatgatgcagctgctgaaactcgatggcattgaagctgaaggagaagcaagggcacagaggaaggctgaggtgcgccgagttcagtcccttgtggagaccttggataagctgaaagcaagaaatgcaaaccccttcagcgatcataataaggctgtttcagtaacaacgcagtgggagacgtttgagaacggcatgggcagcttgagtgctccacctccccgtgtttcttcaacgcaagctaacactgactgggagcagttcgactaggctcagatgaagctgttgatgtatcatgaaatctgtgagatcggtatggacattcctttccgaggcagcgaggtgttgtgtatatgcaccacgtttgataacttttggcgtcccaagtgcctgtgattctgtgaatgttaccagatcgtgccactgccatactaccatgtgaattgcatcgctcattgagggtcatatttcaatatgctcctgccagtgccattcgcgtgct

SEQ ID NO: 30136 - DNA, 760 bp, Zea mays
  unsure (1)..(760): unsure at all n locations
  Clone ID: MRT4577_127495C.1
gaccctcgaggttcggccgggacaagaggagaggagaagagagaggagaattttaatgctgccgcgcaccgtcatcactagctagtggaggggcggacgagaaggcgaggaactgaggggagagagagaggcttcacagagcttgcttgagcctggagggggctgccgagctgtttgtctctccactccacccaccagcagttacctcgggagggcatggcaaaatctggtgcctcctttccggagcccagttggatggagagggatttcctggccgcgatcggcaaggagcagcagcacccgcacaaggaggaggcaggcgcggaggaatctgcttacttcggcggagcagcagcagccccggcaatggactggtccttcgctagcaagcccggcgccgccccggcgttgatgtcgttccggtcagcttcgttcccccagttctcctccttcgacggcgccaagaacccggcccctcgtatcctcacgcaccaggtcccttttcgggcctctgatgatgcttttgcagaggtcgttcggccccgacagcacgcactacgccgccgcgcaccgcacgcagcatgcgctgaacggngctagagtcactccggtctcgtcgccgttcaaccagaacactccgatgttcagggtccagagctcgcctagccttccgaacggtactgcgttcaagcagccgncttttgccatcaacaacaacgctgcggccagttctactggtggtttctatggaacaagggat

SEQ ID NO: 30137 - DNA, 350 bp, Zea mays
  Clone ID: MRT4577_127496C.1
attcggctcgagggcaaactatttgttctctttttacaatagctgctgttactgctagataggtaggatctgactccatgctgtcatcctggatcgtgattaactgaaagggatagcggtcaatcgtgaaaggttcaggtaagtgctcgtttgcacaacacggtgaaggcagcagctgcatgtagaaaaccagtgcgcgggcatctctgtacttgatgacgaccatctgtatgtagtgaatgtctctcaagctcaatgtaaactctttgagatagaagcttgaatggattgaccaaagcggagatgtaaagttcttgaatcaatttgctggaatataccgatccctttac

SEQ ID NO: 30138 - DNA, 870 bp, Zea mays
  Clone ID: MRT4577_127497C.1
aattcggcacgaggtgtccctcaagctagaaaggcgtcccttgctcgattcttggagaaaagaaaggaaaggtagaatccatattcttgctcccagtgtcctaaaaacagggcatttgtttctgagtgcatcgcagcaccttaattccttaggacatatttgcatttgcgctccaaagctggttttgatctgtgtatacttctcttgcagggtgacaacctgctgcaccttacccatcagccaagagcccgatggagagcagtgacacgtttggcagtgggagcgccaacgacaagtcatcatgcacagacattgccctctcaagcaaccacgaagagtccctatgtttagggcagcccaggaacatcagcttcatccaagagtcccccagtacaaaactacagatctgatctgaatatctgatcatgcccaatgttcatagatttgtccaggctgactgatgcaaggaccatacaatacttttgcattcaggcaaggactcgagaggaagagattacgtatgttatcggtgccgctagctgttgtttatgatgatgttttgttgtgctagtttactgtgatgctggtggtgcccccacctaactaacaagagagctgtcacttgcagactcttgaattttttttgtcctagcgccatttctttagcggtatcaagtcaatttatataggcttacaaattctgcgccttttgtatggccaaagtgtaatattcttgttcttgtattatgaacctccatgctgcagaatgcaagagcaaatcttattgtcgatggtgttctcattgccagcatgtgtacacagtagcggttcatgttgttttgagctgttctgttttaataatatctcaaa

SEQ ID NO: 30139 - DNA, 755 bp, Zea mays
  Clone ID: MRT4577_127498C.1
ctcctcccatcgcgtctgtccgctacccctccccgaccagatcgctacgagacgccgcgcgatccgacccaggccgacgccgacgacccctctcgccgccggcggccatggcgtacggcgaccgcgtcaccaccttcgaggactccgagaaggagagcgagtacggctatgtccgcaaggtctctggacctgtggttgtggctgatggaatgggtggtgctgccatgtatgaacttgttcgtgtcggacatgataacctcattggggaaattatccgtcttgagggcgattcagctacaatccaagtttatgaattgggacctggaattcttggaaacatttttgacggtatccagcgacctctaaaaaccatcgctattaagtcaggagatgtgtatattcctcgtggtgtttcagttcctgcccttgacaaagatgtattgtgggaatttcagccaacgaagctaggtgttggagatgtcatcacaggtggagatctatacgctactgtttttgagaacacattgatgcagcaccatgttgctcttccaccgggttctatggggaaaataagttacattgcaccagctggccagtacaacctgcaggacacagtgctagaattggaatttcagggcataaaaaagaaatttaccatgcttcagacatggcctgtgcgttcaccaaggcctgttgcatcgaagcttgctgcggatacacctcttctgacagggcagcgtgtactggatgcacta

SEQ ID NO: 30140 - DNA, 514 bp, Zea mays
  Clone ID: MRT4577_127499C.1
aattcggcacgaggcgcataggtagtgtctcggccatctgcgtacgcgctcacgtaacagagcaccacatgctccaccgtagtcctactcttcgccattcatgggggcatgggtgagaatctccatatgcaatgattgctagggcgcccatgcaccgtggccctgttatgggaggcagaaaagcgatcagctcggaagccggcactaggtaaagaacgcgggcgtctgcctcatatacctacagcggaatgccagggaataacaagaaggcagcgctgggcgcttagagcctcgcgccggacgcatggtccttaagccattcactatggcgtgacatcgctgaaaacgagtatggccacatctttacctcctacaacttgccgtttatggactccggactggcccaacgctgacaccttggcccttacactgtagtcgcagagcatcgcgactgcgtagtgcgctatcccacgcgagggacgcgatgactgctatggactcgaggtgtcgatgt

SEQ ID NO: 30141 - DNA, 340 bp, Zea mays
  Clone ID: MRT4577_12749C.1
gagctaatacggggaaagcacgcggagcgcaagctcggaatatcggcatcgtggattacaggacccggcttatacgtccccaggggcaagccaggaccaccacaggcacatgttcggcaggcgcccagccaagaaccctaagaacacggggaactatgccgaaagcgcgaccgagagcacgctcggacgcagtaaccaccgcagccgacccctacatacctttcccttctacatccataaccccccacttcccccctcttctcaccctcccctctctcccccccccccccaccccctcacccgatgatgagccccccccccccttccccttccccctccc

SEQ ID NO: 30142 - DNA, 120 bp, Zea mays
  Clone ID: MRT4577_1274C.1
agcaataatgtagtgtgggcagccatccataacgacggtgtttaattacccagtggctcagcggggcggacataaccagaaaggcgtacatcatcaggtgttgtataccacaactgggac

SEQ ID NO: 30143 - DNA, 496 bp, Zea mays
  Clone ID: MRT4577_127501C.1
caaaaaacagaacaaataatagcccaaacggggggcgggggaaaacagtagtaacataaaggttttcgacacacacaaaaacgggggtccaactaactccagggggaccagggggggcaaaaaggataaggcatcgggtttttttttaaaacaaatccgacggccaaatatactgggaatactccattaactcaaagcgctaaaaaaaaccaaaagggtttaatattttatggaaacccttaggcttaggaggggtgggcttgggccttgttgaggatcacaccctcgtacttgaccgggaaccacttaatggggtcctccttagggaccctgggctggatcccaacacgggacttgcacctggggggacgggggacacggtccccagcacgctaaaggacgacgtaaaagtccatgccgtaaataccagtagagggatcatacttgatgccaaaatctatgggcttttggataccaaatccaaagcagccagggt

SEQ ID NO: 30144 - DNA, 464 bp, Zea mays
  Clone ID: MRT4577_127504C.1
tagacagctccagcgccagatctgctacctcttgtgttgagccttcgccatgtcggagtccatacagctactaccacagtgcctgttctagttccatgataaccgacgaggacgtcttgaaggtgcagaccttgatgctgtcactctacatacactgcgacgggtgcgagaagaatgtcaagaagaccctccacaagatcgacggtgtctaccacatcaggatcgacgcggaacaggccaaggtgacggtgtccgcttagctggatccggataccatcatcacgaagctcaacatggccggcaagccgactcagatgtagggtgccaagcccgtcctcactcagaacgcctaccatggcggcggctacgcccattccaaggacgctgtcgtcggcaagagccatcacaaggactccggatgtggccagggccattccaaggatgccggcgatggcaaggaccac

SEQ ID NO: 30145 - DNA, 670 bp, Zea mays
  Clone ID: MRT4577_127505C.1
cattgggaccctcgaggccggccgggaacaaacttcacagactctctccggctatcctcttatctatcacgagccacaggcacagggatgatctcgagctcagactactcataccacgggatgtcgtcctcgtttgccgtgtgaaccgacatgtcgatggccgtccataacggacaagaagaggtacggtatcgtcacgtacgtggagggcctgaacgtctacagccctctcaaggccgtgaacgacgagaagatgatgggggtgcgcaagaccgacgactacttgttcccgaatatcgaccggaccctcatccccgagatcatcgtagtcgtcgagtcgcgcgttcggcgtgtacatgaacgccgacgacaacatatatacgatcagcgtctccatgaacgaactcgttgtacccactctcactgtggagatcctgctggtctgcgagcaagtcttccacgaggacatcgagtactactactgtctctggcatctgtaccgctgtagcaccctgatgctcagtctagcttccgaaaccgaagactatatgtaaccaaaagcaagcttacgaaacaagtaacttcagtatgcatgcatgacatgtgctgcatactgaagaaacatgcatttggagtgtagctctggaagcgcattagctacgcactttct

SEQ ID NO: 30146 - DNA, 304 bp, Zea mays
  Clone ID: MRT4577_127506C.1
tgttattgttgtttttgttttttttttgagaaggttgctacttaggggcataagtgggaaacagtctccaaaacacccaagcagatagtcgccaccgaaagcaggaaacggatggtcgccacacgaaacgatggctgtgttgaaagaacaacaccgatggccatgggggggccacaaagggggccaccacaggtgtattgtggggaaattacaacaaaagaaatccactgaggcacaacgactgaggccagggcataaaattagaacacagtgacgcagaattataccaggtggccccgcacga

SEQ ID NO: 30147 - DNA, 186 bp, Zea mays
  Clone ID: MRT4577_127507C.1
tcgttcacacatccatctcaatcagcacaagaaggttactcttcaagatacacacttgcatcacccgtggtatgtcattacctttagggtctacctattcccacttatcataagcataaccctcagacttatcatctacacccacacccacacacgatctacaaacacataccgtcaatactgacc

SEQ ID NO: 30148 - DNA, 334 bp, Zea mays
  Clone ID: MRT4577_127508C.1
ccggaccggcaggcccggcccgacccacgcgatatgtactcgaccaaggggaaaggcccgcaaggggggggatcaagcaaaacaacgagggccagggccgagccggcggaggacaacgaaggcacgccgccaccgacccctgcggccccagccgagggcgccccagacacgcccctgcagcctgaagcagacggcgccacaacggagaaggaggcagccccggcgccggagggaagggcccggggattcaggctgcacggagaggacacaaccgcgcacaaagcccttgggggcggcaaaaccgcagacgatcaggtatggaaagacaagaaaa

SEQ ID NO: 30149 - DNA, 573 bp, Zea mays
  unsure (1)..(573): unsure at all n locations
  Clone ID: MRT4577_127509C.1
ccggcttcaccccgcctccgcctccactcccccaactccaccggccgcggatctacccgagcggtcagatccgcccccactccctccctccgtccctcctcgcgctggaaaccctagaccccccggccatggcgacccaggcttcgagagggatctgctgctccctcctcctcctccaacggtggcaggttgaggctgagggcagcggccggtgaccggggcagccaaaggaaggaacggctgttgcggtcttctgctccttctccgccggtacagaggagaggcgccgacggcaggcatggaagtttgggattcttccttcttcaccaccatctcctcctccccaagaacaggaccttcaccaagggattcgtgaggtgagaaccgtttggccagcccgcaagtcgtggtgtttgatgaatataaactaggccttgcccctaaaatttaaccagccgccgtccggatccaagaatccccaccccaccccacccaaaacgnaagcaggagtaaggaaggaggcttgtggccttgcgggtcgcctctccttcgtcggnggcgccgccgaccgct

SEQ ID NO: 30150 - DNA, 306 bp, Zea mays
  Clone ID: MRT4577_12750C.1
gcagcagtgcgttgagaggaacgccaaacatttcattatgagcatagttatcggtctctaccagagcttgtctcgtgcagctgtcagcggctttgcaacgcatatgccatgcacatgcactgctctagaagacttctacaagagcttgaaccggcctgacgacgataatgacgagcagagaagcctcaacccttactcggagtatctgaggaagtcgtaatgcagccggatgacagcacccttgtactacatcttttgtgcacagactatcgccatgtaacagacactctggaatcactgctgcta

SEQ ID NO: 30151 - DNA, 438 bp, Zea mays
  Clone ID: MRT4577_127510C.1
ggaagcaccgtttgcatcgaatgatctggcctgtcaccactcacgagtcaccgacagagcgtgccaatggcacatgagaacgtgtgactcacaacacacgcgtacgataatcagccgctcgcaggccaacactagcatgtcgagaagccaaggactggagtgagatgtgtcagcgccacagcgctaggacaggacatgagcctcggtagtcctggctaggatgacctataaccgttgcgcggacgcattcacataactttaatagaaagtttgattaataattaattatctaggaagtaggatccctattgctaccttaaaatataatgctacttattatcaaaaatatattttactactctatcacgctgaaaacattattcataggctgagagatgggtatttatttttagggtgaactaagtattcctactaagt

SEQ ID NO: 30152 - DNA, 282 bp, Zea mays
  Clone ID: MRT4577_127511C.1
tcgcacgcacacagcaacaaatacctagctactaacaatggtctccaggtcctacatggtacttgcaacagttatgctggctgggctgaatgcggttggctcagtgcactatccagctcaccttccaggatggcaagggatccaagcctgtacacctgatactcacactcaatgttgcaaccatatgcgacgtggatatcaaagatcactgtggctatgacttatcctttacgctcaaagaaggcccaacctgcacctggacgctttacaccaatgcccggc

SEQ ID NO: 30153 - DNA, 4950 bp, Zea mays
  Clone ID: MRT4577_127512C.1
tcatttctccccctttttggcatgaatcgccaaaaacggaaccgttagagccctagaagtagtttcttcccctcccgtgtcgaggtcgagatgcccattggttcccatgggtgtcttgatgggtttggcatccttcatcccaaacttggttagaatgtcttgagtgtactttgtttggctgatgaaggtgccctcttggagttgcttcacttggaatcctaagaaatacttcaactcccccatcatagacatctcgaatttctgtgtcatgatcctactaaactcttcacatgtagactcgttagtagacccaaatataatatcatcaacataaatttggcatacaaacaagtcattttcaagagttttagtaaagagtgtaggatcagcctttccaactttgaagccattagcaataaggaaatctctaaggcattcataccatgctcttggggcttgcttgagcccataaagcgccttagagagcttatagacatggttaggatacttactgtcttcaaagccgggaggttgctcaacatagacctcttccttgattggtccattgaggaaggcacttttcacgtccatttgataaagcttaaagccatggtaagtagcataggccaataatatgcgaattgactcaagcctagctacgggtgcataggtttcaccgaaatccaaaccttcaacttgggagtatcccttggccacaagtcgagctttgttccttgtcaccacaccatgctcatcttgcttgttgcggaagacccacttggttcctacaacattttggttaggacgtggaactaaatgccataccttattcctagtgaagttgttgagctcctcttgcatcgccaccacccaatccgaatcttggagtgcttcctctaccctgtgtggctcaatagaggaaacaaacgagtaatgttcacaaaaatgggcaacacgagatcgagtagttacccccttatgaatgtcaccgaggatggtgtcgacggggtgatctcgttgtattgcttggtggactcttgggtgtagcggcctttgttcctcatcctccttgttttcctcatttgcatctcccccttgatcaataccatcatcttgaggtggctcatttgcttgatcttctaccttatcaacttgagcttgatcctcaatttgagtcggtggagatgcttgcattgaggaggatggttgatcttgtgcaattggaggctcttcggattccttaggacacacatccccaatggacatgttccttagcgcgatgcatggagcctcttcttcacctatctcatcaagatcaacttgctctatttgagagccattagtctcatcaaacacaacgtcacatgagacttcaactagtccagtggacttgttaaagaccctatatgcccttgtgtttgagtcataaccaagtaaaaaaccttctacagtcttaggagcaaatttagattttctacctcttttaacaagtataaagcatttgctaccaaagactctaaaatatgaaatgttgggctttttaccggttaggagttcgtatgatgtcttcttgaggattcggtgtagatataaccggttgatggcgtagcaagcggtgttgaccgcctcggcccaaaaccgatccgaagtcttgtattcatcaagcatggttcttgccatgtccaatagagttctattcttcctctccactacaccattttgttgaggtgtgtagggagaagagaactcatgcttgatgccctcctcctcaaggaagccttcgatttgagagttcttgaactccgttccgttgtcgcttcttattttcttgatccttaaggcgaactcattttgagcccgtctcaagaatctctttaaggtctcttgggtttgagatttttccctgtctttctcaaaatgaacatttgttaatcctaaaatgtgttctccctttagaagcttgtgaagattcttcatcccaacatgggctagtcggcggtgccagagccaacccatgttagtcttagcaattaagcaagtgtcgagttcagctctatcaaaatctaccaagtatagctgaccctctaacactcccttaaatgctattgaatcatcacttcttctaaagacagtgacaccttgatttccatccccgaatgtgacagctcgttggggatcttggtttttctcatatgaggagaacatcttcttctcccctgtcatgtggtttgtgcacccgctgtcgagtatccaacttgagcccccggatgcataaacccaaactgttttgggtcctttggcattagaaacaagaactttgggtacccaaacacaagtctttgaccccttgtgtttgcccccaacaaacttggcaacgaccttgccggatttgttagtcaaaacataggatgcatcaaaagttttaaatgaaatgctatgttcatttgatgcattaggaattttcttcttaggcaacttggcatgggttggttgcctagagctagatgtctcacccttatacatgaaagcatgattagggccagagtgagacctcctagaatgaattctcctaatcttgctctcaggataaccggcaggatataaaatgtaaccctcgttatcctgaggcatgggagccttgcccttaacaaaattagacaatctcttaggaggggcactaagtttgacattgtctcccctttggaagccaatgccatccttgatgccagggcgtctcccactatagagcatacttctagcaaatttaaatttttcattttctaagttatgctcggcaatttttgcatctaatattgctatatgatcattttgttgtttaattaaggtcatgtgatcatgaatagcattaatatcaacatctctacatctagtacaaatggaaacatgctcaatactagatgtagagggtttgcatgaattaagttcaacgatcttagcacgcaagatatcattgttatctctaagatcggaaattgtaacattgcaagcatctatttctttagccttagcaattaaattttcattttctactctaaggctagcaagagacatattcaattcttcaatcctagcaagcaaatcattattatttttaggattgaaagttgagacaatgcaaacatgagaatcaaccttagtatttaaactagcattttcattcctaaggttgtcaatcatctcacggcaagtgcttagctcactagataatttttcacatttttctacttctagagcataagcctttttaaccttaacatgtttcttgttttctttaattagacaatcctcttgggagtccaaaaggtcatctttttcatgaatagcactaatcaattcatttaatttttctttttgctccatgttaagattggcaaagagaacacgcaaattatcctcctcatcactagcattatcgtcactagaagattcatatttagtggaggagttagatttaaccttcttccgtttgccgtcctttgccatgagacacttgtggccgacgttggggaagagaagtcccttggtgacggcgatgttggcggcgtcctcgtcgtcggaggagtcgcttgagctttcgtcggaatcccactcccgacaaacatgggcatcgccgcccttcttcttgtagtatctcttcttctcctttcttctccccttcttgtcgtcgcctcggtcaccgtcactagatacgggacatttagcaataaaatgaccgggcttaccacatttgtagcaaaccttcttggagcgggacttgtagtctttccccctcctttgtttgaggatttggcggaagctcttgatgacgagcgacatctcctcattgtcaagcttggaggcgtcgattggttgtctacttggtgtagactcctccttcttgtcctccgtcgccttgaatgcgacgggttgagcctcggatgtagatggatcatcaagctcgttgatcttcctcgagccttcgatcatgcactcaaaacttacaaaattcccgataacttcctcgggggtcattttagtatatctaggattaccacgaattaattgaacttgagtggggttaaggaaaatgagagatcttagaataaccttaaccatttcgtggtcgtcccacttgatgctcccgaggttgcgcacttggttcaccaaagtcttgagccggttgtacatgtgttgtggctcttcccctttgcgaagccggaaccgaccgagctccccctcgatcgtttcccgcttggtgatcttggtgagctcatctccttcgtgtgcggttttgagcacatcccaaacctccttggcgctcttcaacccttgaactttgttatactcctctctacttaaagaggcgaggagtattgttgtcgcttgagagttgaagtgctcgatttgggccacctcatcctcatcataatccttgtcccctacggatggtacctgtgcaccaaactcaacaacatcccatatacttttgtggagtgaggttagatgaaatcgcattaaatcactccacctagcataatcttcaccatcgaaagttggtggtttgcctaatgggacggaaagtaaaggtgcatttttagaaatgcgagggtaatgtagggggatcttactaaacttcttacgctcttggtgtttagaagttacggagggcgcatcggagtcggaggtcgatgttgatgaagtgtcggtctcgtagtagaccactttcctcatccttttgtgcttgtcccctctccgatgtggtttgtgggaggaagatctctccttcttctctttgtggtgcgaagaagatttcttctcctttcctttgtgggaggagctcttcttcttctccttcctcttggtgcgggactcttccgatgaagtgctcccgtggcttgtagtgggcttttcgccggtctccatctccttcttggcgggatctcccgacat

SEQ ID NO: 30154 - DNA, 4194 bp, Zea mays
  Clone ID: MRT4577_127513C.1
tcaatcaaagttccgagaatcaagtatatttagctcattcctaagtttgctaaaggttttctcatctaatgggttggtaaagatattggctaattgttctttggtgctaacataagctatctcgatatcctccctttgttggtgatccctcaaaaagtgataccgaatgtctatgtgcttagtgcggttgtgttcaacgggattatccgccatgcggattgcactctcattatcacataggagaaggactttgctcaatttgtagccataatccctgagggtttgccccatccaaagtaattgcgcacaacaatggcctgcggcaatgtactcagcttcggcagtaaaaagagctactgagttttgtttctttgaagcccaagacaccagggatcttcccagaaactgacaagtcccggatgtgctcttcttatcaattttacaccctctcgtatcgaggtcgagatgcccattagttcccatgggtgtcttgatgggcttagcatccttcattccaaacttgttgagtatgtcttgaatatactttgtttggcagatgaaggtgccctcttggagttgcttgacttgaaatcctagaaagtacttcaactcccccatcatagacatctcgaatttctgaatcatgatcctactaaactcttcacaagtagatttgttagtagacccaaatatgatatcatcaacataaatttggcatacaaacaaatcttttgcaatgtttttagtaaagataataggatcggctttaccgactttgaagctattagtgataaggaaatctcttaggcattcataccatgctcttggggcttgcttgagcccataaagcgcctttgagagtttgtaaacatagttagggtactcactatcttcaaagccgggaggttgctcaacatagacctcttccttgattggtccattgaggaaggcacttttcacgtccatttggtaaaacttaaagccatggtaagtagcataggcaagtaaaatgcgaattgactcaagcctagctacgggtgcataggtttcaccgaaatccaaacctttgacttgtgaatatcccttggctacaagtcgggctttgttccttgtcaccacaccatgctcatcttgtttgttgcggaagacccatttggttcctacaacattttggttaggatgtggagctaaatgccatacctcattcctcgtgaagttgttgagttcctcttgcatcgccaacacccaatctgaatcccttaatgcgtcttccaccctgtatggctcaatagaagacacaaaggagtaatgttcacaaaaatgagcaacacgagatcgagtggttacccccttatgaatatcgtcgaggatggagttcacggggtgatctctttgtattgcttggtggactcttgggtatggcggtcttggaccgtcattatcatccttgtcttgatcacgggcatctcccccttgatcattgccctcctcttgaggtggctcatcttcttgatcctcattctcatcatcttgagcttgatcctcatcttgggttggtggagatgcttgatttgaagatgatggttgatcttgtgcttgtggagaatctttggattctttaggacacacatccccaatggacatgttccttagcgtgacgcacagagtctcttcatcatctagctcatcaagatcaacttgctcaacttgagagccgttagtctcatcaaacacaatgtcaccagaaacttcaactagtctggtggacttgttaaagactctatatgcccttgtgtttgaatcatatcctagtaaaaagccttctacagccttaggagcaaaattagattttctacctcttttaacaagaataaaacatttgctaccaaagactctaaaatatgaaacattgggctttttaccggttaggagttcatacgatgtcttcttgaggattcggtgaaggtagaggcagttgatggcgtagcaagcggtgttgatcgcttccgcccaaaaccggtccgaagtcttgtactcatcaagcatggttcttgccatgtcaagtagagatctattcttcctttccactacaccattttgttgtggtgtgtagggagaagagaactcatgcttgatgccctcatcctcaagaaagccttcaatttgagagttcttgaactccgtcccgttgtcgcttctaatctttttgatccttaagccaaactcattttgagctcgtctcaagaatccctttaaggtctcttgggtttgtgatttttccaaaccttgatttccatccccgaatgtgatagctctttggggatcatggtttttctcgtaggaggagaacatctttttctccccaatcatgtggtttgtgcacccgctatcaatgatccaacttgatcccccggatgcataaacattgtctcccttttggaagccaatgccatccttaatgcctgggcatctcccactataaagcatactacgagcaaatttaaatttctcattttctaattcatgctcggcaattttagcatctaattttgctatattatcattttgttgtttaatcatagcaatgtgatcatggatagcatcaacattaacatctctacatctagtgcaaatggagacatgactaacggtagatgtagagggtttgcaagtatttaattcaacaatcttagcatgtaaaatagcattctcatctctaagattggaaatggaaacattgcaaacatttaagtctttagccttagcaatcaatttttcattctcaactttaaggctagagagagatgcattcaacttgtcaatcttagcaattaaactagcattatcatttctaagattaacaattgaatcatcacaaacatttaatttctcaaccttagcaatcaatttgtcattttcaaatctaaggttggaaatagtgtcatggcaagtgcttagctcactagttaaattttcacatttttctatctcttgagcataagcatttttaactttaacatgctttttattttccttaataaggaagtcctcttgggtatccaaaagttcatccttgtcatgaatagcactaatcaattcatttaatttttctttttgttgcatgtttaagttggcaaaaagggtgagcaaatcatcctcatcatcactagagctagcctcatcactagaagttgcatacttagtggaagatctagattttaccttcttccttttgccgtcctttgccatgaggcacttgtggccgacgttggggaagagaagacctttggtgacggcgatgtttgtggcgtcctcgtcggaggagtcggtggagctctcgtcggagtcccactcccggcaaacatgggcatcgccgcccttcttcttgtagtacctcttcttttctcttctctttcccttcttgtcgtcgccactgtcactatcactagataatggacatttagcaatcaaatgatcaggcttaccacacttgtagcacaccttcttggaacggggcttgtaatctttccccttcctttgcttgaggatttggcgaaatcttttgatgattaaagtcatctcctcattgtcgagcttggaggcgtcgatagggagcctacttgatgtagactcttccttcttctcctccgtcgctttgaaggcgacgggttgcacctcgggtgtggaggtggcgcctcgctcaatgatttgtttggagcctttgatcattagttcaaagctcacaaactttcctatcacttcctcgggagacattagttgatatcttggatcaccacgaattaattgtacttgtgtagggttaagaaaaacgagtgatctaaaaataaccttgaccatttcatggtcatcccatttggtgctcccgaggttgcgcacttggttcaccaaggttttgagccggttgtacatggcttgtggctcctctccttggtgaagcatgaagcgaccgagctccccctcgatcgtatccctcttggtgatcttggtaacctcgtctccttcgtgcgcggtcttgagcacgtcccaaatatcctttgcactcttcaacccttgcaccttattatactcctcccgacttagagaggcgaggactatagtagtggtttgggagttgaagtgttggatttgttcgacctcctccgaatcataatccttgtcccctttctttggtac

SEQ ID NO: 30155 - DNA, 254 bp, Zea mays
  unsure (1)..(254): unsure at all n locations
  Clone ID: MRT4577_127514C.1
tttncttttttttttttttttttttttttaaactgggtgaacaagtagggggatcgaagcaactcgcactggaggccacacatacatatataatagagtcctacagcccagtttatatatagatcgatcaataatgcatgctgctcctggcaatacagttagctgaacacactttcttgcctggcttcataactcgcgcagcgcgcgggacgtacgtgtacgctcggtaggcttatcaacctggtcagaaaaac

SEQ ID NO: 30156 - DNA, 3645 bp, Zea mays
  Clone ID: MRT4577_127515C.1
cttgttcctagtgaagttgttgagctcctcttgcatcgccaccacccaatccgaatcttgaagtgcttcctctaccctgtgtggctcaatagaggaaacaaaagagtaatgctcacaaaaatgtgcaacacgagatctagtggttacccccttatgaatgtcgccaaggatggtgtcgatgaggtgatctcgttggattgcttggtggactcttgggtgcggcggtcttggttcttcatcctccttgtcttgatcatttgcatctcccccttgatcattgtcgtcatcttgaggtggctcattctcttgatcttctccttcatcaacttgagcctcattctcattttgagttggtggagatgcttgcgtggaggaggatggttgatcttgtgcatttggaggctcttcggattccttaggacacacatccccaatggacatgttccttagtgcgatgcacggagcctcttcatcacctatctcatcaagataaacttgctctacttgagagccgttagtctcatcaaacacaacgtcacaagaaacttcaactagtcctgaggacttgttaaagactctatatgcccttgtgtttgaattatatcctagtaaaaagccttctacagtcttaggagcaaatttagattttctacctcttttaacaagaataaagcatttgctaccaaagactataaaatatgaaatattgggctttttaccggttaggagttcgtatgatgtcttcttgaggattcggtgtagatataaccggttgatagcgtagcaagcggtgttaaccgcctccgcccaaaaccgatccgacgtcttgtactcatcaagcatggttcttgccatgtccaatagagttctattcttcctctccactacaccattttgttgtggggtgtagggagaagagaactcatgcttgatgccctcctcctcaaggaagccttcgatttgtgagttcttgaactccgtcccgttgtcacttctaattttcttgatccttaagccgaactcgttttgagctcgtctcaagaatccttttaaggtctcttgggtatgagatttttccaagtatagctgaccctctaacactcccttaaatgttattgaatcatcacttcttctaaagacagtgacaccttgatttccatccccgaatgtgatcgctctttggggatcctggtttttctcataggaggagaacatcttcttctcccctgtcatgtggattgtgtacccgctgtcgatgatccaacttgagcccccggatgcataaaccttgccggatttgttagttaaaacataggatgcatcaaaagttttaaaggagatgtcatgatcatttgatgcactaggagttttcttcttaggcaacttagcacgggttggttgcctcgaactagatgtctcacccttatacataaaagcatggttagggccagagtgagactttctagaatgaattctcctaattttgctctcgggataaccggcagggtacaaaatgtaaccctcgttatcctgaggcatgggagccttgcccttaacaaagttggacaatttcttaggaggggcattaagtttgacattgcctccccgttggaagccaatgccatccttaatgccagggcgtctcccattataaagcatactacgagcaaacttaaattttttattttctagttcatgctcggcaattttagcatctaatttagctatatgatcattttgttgtttaatcatggaaaggtgatcatgtatagcattaacatcaacatctctacatctagtacaaatagtgacatgctcagtggtagatgtagagggtttgcaagaattaagttcaacaatcttagcacacaatatatcatttttatctctaagatcggaaattgtaatattgcaaacatcaagttctttagccttagcaagcaattttccattctcaatcctaaggctagcgagagaaatgtttaattcttcaatcttagcaagcaaatcatcattatcatttctaagattgggaattgaaacatcacaaacatttgaatcaaccttagctaacaaattagcattctcatttctaaggttgtctatagtctcatggcaagtgcttagctcactagatagtttttcacatttttctacttctagagcgtaagcatttttaaccttaacatgctttttgttctctttaataaggaagtcctcttgggtgtccaagagatcatccttctcatgaatagcactaatcaattcatttaatttttctttttgttgcatgtttaggttggcaaaaagaatgcgcaagttatcctcctcattgctagcatcatcctcatcactagaggtttcatatttagtggaggatcttgattttaccttcttctttttgtcgtcctttgccatgaggcacttgtggccgacgttggggaagagaagacccttggtgacggagatgtttgcggcgtcctcgtcggaggaggagtcggtggagctctcgtcggagtcccattcccggcaaacatgggcatcgccgcccttcttcttgtagtacttcttcttctcctttcttctccccttcttgtcgtcgcccctgtcactgtcactggaaataggacattttgctataaagtgtccgggcttaccacacttgtagcaaactttcttggagcggggcttgtaatctttccccctcctttgcttgaggatttgacggaagctcttgatgatgagtgccatctcctcgttgtcgagcttggaggcgtcgatgggtgttctacttggagtagattcctccttcttttcttccgtcgtcttgaatgcgaccggttgtgcttcggacgtggaggggccatcaagctcgttgatcttctttgagcctttgatcattaattcaaaactcacaaaattcccgattacttcctcgggagtcattagtgtatatctaggattgccacgaattaattgaacatgagtagggttaaggaaaacaagtgatcttagaataaccttaaccatttcgtggtcatcccattttttgctcccgaggttgcgcacttggttcaccaaggttttgagccggttgtacatgtcttgtggctcctccccttggcgaagtcggaagcgaccgagctccccctcgatcgtttcccgcttggtgattttagtcacctcatctccttcgtgcgcggtctttagtgtgtcccaaatctccttagcacctttcaacccttgcaccttattatactcctctcgacttagagaggcgaggagtatagttgaggcttgggagttgaagtgttggatttgggccacttcgtcctcatcatagtcttcatcccctacggatggtacctgtacaccaaactcaacaacgtcccatatacttttgtggagtgatgatagatgaaatcgcatcaaatcactccatctagcataatcttcaccatcaaacattggtggtttgcctaatgggatggaaagtaaaggcgtatgtttaggaatgcgaggatagcgtaggggtatcttactaaacttcttgcgctcatggcgcttagaagtaatggatgacgcgtcggagccggaggtagaaggtgatgaagtatcggtctcgtagtagaccaccttcctcat

SEQ ID NO: 30157 - DNA, 5031 bp, Zea mays
  Clone ID: MRT4577_127516C.1
tcatttctccccctttttggcatgaatcgccaaaaacggaaccattagagccctcgaagtgctatcttcccctcccgtgtcgaggtcgagatgcccattagttcccatgggtgtcttgatgggtttggcatccttcatcccaaacttggttagaatgtcttgagtgtactttgtttggctaatgaaggtgccctcttggagttgtttgacttggaatcctagaaaatacttcaactcccccatcatagacatctcgaatttctgtgtcatgatcctactaaactcttcacatgtagactcgttagtagacccaaatataatatcatcaacataaatttggcatacaaacaagtcattttcaagtgttttagtaaagagtgtaggatcagctttgccgactttgaatccatttgcaataagaaaatctctaaggcattcataccatgctcttggggcttgcttgagcccataaagcgccttagagagcttatagacatggttaggatactcactgtcttcaaagccgggaggttgctcaacatagacttcttccttgattggtccattgaggaaggcacttttcacgtccatttgataaagcttaaagccatggtaagtagcataggctaataatatgcgaattgactcaagcctagctacgggtgcataggtttcaccgaaatccaaaccttcgacttgggagtaccctttggccacaagtcgagctttgttccttgtcaccacaccatgctcatcttgcttgttgcggaagacccatttggttcctacaacattttgattaggacgtggaactaaatgccatacctcatttctagtgaagttgttgagctcctcttgcatcgccaccacccaatccgaatcttgaagtgcttcctctaccctgtgtggctcgatagaggaaacaaaagagtaatgttcacaaaaatgtgcaacacgagatctagtagttacccccttatgaatgtcgcctaggatggtgtcgacggggtgatctcgttgaattgcttggtggactcttgggtgtggcggcctttgttcctcttcctccttgtcttcctcatttgcatctcccccttgatcattgccattatcttgaggtggctcatttgcttgatcttctacttcatcaacttgagcttcatcctcattttgagttggtggagatacttgcgtggaggaggaaggttgatcttgtgcatttggaggctcctcggattccttaggacacacatccccaatggacatgtttcttagtgcgatgcatggagcctcttcttcacctatctcatcaagatcaacttgctctacttgagagccgttagtttcatcaaacacaacgtcacatgagacttcaactagtccagtggacttgttaaagaccctatatgcccttgtgtttgagtcataaccaagaaaaaaaccttctacagtcttaggagcaaatttagattttctacctcttttaacaagaataaagcatttgctaccaaagactctaaaatatgaaatgttgggctttttaccggttaggagttcatatgatgtcttcttgaggattcggtgtagatataaccggttgatggcgtagcaagcagtgttgaccgcctcggcccaaaaccgatccgaagtcttgtactcatcaagcatggtccttgccatatccaatagagttctattcttcctctccactacaccattttgttgtggagtgtagggagaagagaactcatgcttgatgccctcctcctcaaggaagccttcgatttgagagttcttgaactccgttccgttgtcgcttcttattttcttgatccttaagccgaactcattttgagcccgtctcaagaatccctttaaggtttcttgggtttgagatttttccctgtctttctcaaaatgaacatttgttagtcctaagatgtgttctccctttagaagtttatgaagattcttcatcccaacatgagccagtcggcggtgccagagccaacccatgttagtcttagcgattaagcaagtgtcgagttcagctctatcaaaatctaccaagtatagctgaccctctaacactcccttaaatgctattgaatcatcacttcttctaaagacagtgacaccaatatcagtaaaaagacagttgtagcccatttgacataattgagatacagagagcaagttgtaatctttgaccaaaccttgatttccatccccgaatgtgatcgctctttggggatcttggtttttctcatatgaggagaacatctttttctccccagtcatgtggtttgtgcacccgctgtcgagtatccaacttgagcccccggatgcataaacccaaatggttttgggtcctttggcattagacacaagaactttgggtacccaaacacaagtcttggagcccttgtgcttgcccccaacgtatttggcaactaccttgccggatttgttagtcaaaacataagatgcatcaaaggttttaaatgaaatgctatgttcatttgatgcaataggagttttctttctaggcaactttgcatgggttggttgcctagagctagatgtctcacccttatacataaatgcatgattagggccagagtgagacttcctagaatgaattctcctaattttgctctcaggataaccggcagggtataaaatgtaaccctcgttatcctgaggcatgggagccttgcccttaacaaagttggacaatcttttaggaggggcactaattttgacattgtctcccctttggaagccaatgccatccttgatgcccgggcgtctcccgttataaagcatgctacgagcaaatttaaatttctcattttctaagttgtgctcggcaattttagcatctagttttgctatatgatcattttgttgtttaattaaagccatatgatcataaatagcattgatatcaacatctctacatctagtacaaatagatacatgctcaacaatagatgtagagggtttgcaagaattaagttcaacaatcttagcatgaagaatatcatttttatctctaagattggaaatggtagcattgcaaacatctagttctttagccttagcaattaaatcttcattttctactttaaggctagcaagagaaatgtttaattcttcaatcctagcaagcaaattatcattattatctctaggattgggaattgaaacattacaaacatgtgaatcaaccttagcatttaaactagcattttcattcctaaggttgtcaatcatctcacggcaagtgcttagctcacaagatagtttttcacatttttctacttctaaagcataagcctttttaaccttaacatgtttcttgttttctttaattagacaatcctcttgggaatccaagaggtcatccttttcatgaatagcactaattaattcatttaatttttccttttgttctatgttaaggttggcaaaaagagtacgcaagttatcctcctcatcactagcattatcatcactagaagactcatatttagtggaggagttggatttaaccttcttccgtttgacgtcctttgccatgaggcacttgtggccgacgttggggaagagaagtcccttggtgacggcgatgttggcggcgtcctcgtcgtcggaggagtcgctggagctttcgtcggaatcccattcccgacaaacatgggcatcgccgcccttcttcttgtagtacctcttcttctcctttcttctccccttcttgtcgtcgcctcggtcactgtcacttgatataggacatttagcaataaaatgaccgggcttaccacatttgtagcaaaccttcttggagcgggacttgtagtctttccccctcctttgtttgaggatttggcggaagctcttgatgacgagcgccatttcctcattgtcgagcttggaggcgtctattggttgtcgagttggtgtagcctcctccttcttttcttccgtcgccttgaatgcgacaggttgagcttcggatgtggatggatcatcaagctcgttgatcttcctcgagccttcgatcatgcactcaaaacttacaaaattcccgataacttcctcgggggtcattttagtatatctaggattaccacgaattaattgaacttgagtaggattaaggaaaatgagagatcttagaataaccttaaccatttcgtggtcgtcccactttacgctcccgaggttgcgcacttggttcaccaaggtcttgagccggttgtacatgtgttgtggctcctctcctttgcgaagccggaaccgaccgagctccccctcgatcgtttcgcgcttggtgatctttgtgagttcgtctccctcgtgcgcggttttgagcacatcccaaacttctttggcgctcttcaacccttgaactttgttatactcctctctacttaaagaggcgaggagtattgttgtcgcttgagagttgaagtgctcgatttgggccacctcatcctcatcataatctttgtcccctacggatggtacctgtgcaccaaactcaacaacatcccatatacttttgtggagtgaggttagatgaaatcgcattaaatcactccacctagcataatcttcaccatcaaaagttggtggtttgcctaatgggacggaaagtaaaggtgcatgtttagaaatgcgagggtagtgtagggggatcttactaaacttcttacgctcttggcgtttagaagttacggagggcgcgtcggagccggaggtcgatgttgatgaagtgtcggtctcgtagtagaccactttcctcatcctcttttgcttgtccttactccgatgcggcttgtgggaagaagacttttccttcttctctttgtggtgagaagaagatttcttctccttccctttgttggaggagatcttcttcttctccttcctcttggtgcgggactcttccgatgaagtgctcccttggcttgtagtgggcttttcgccggtctccatctccttcttggcgtgatctcccgacat

SEQ ID NO: 30158 - DNA, 2841 bp, Zea mays
  Clone ID: MRT4577_127517C.1
tcaatcaaagttccgagaatcaagaatgtttagctcattcctatgtttggtaaaggttttctcatctaatggtttggtaaagatatcgactaattgttctttggtgctaacataagcaatctcgatatcccccctttgttggtgatccctcaaaaagtgataccgaatggctatgtgcttagtgcggctgtgttcaacgggattatccgccatgcggattgcactctcattatcacataggagagggactttgctcaatttgtagccatagtccctaagggtttgcctcatccaaagtaattgcgcaaagcaatggcctgcggcaatgtactcggctttggcggtagaaagagctactgagttttgtttctttgaagcccaagacaccagggatctccccagaaactgacaagtccctgatgtgctcttcctatcaattttacaccctgcccaatcagcatctgaatagcctattaaatcaaaggtggatcccttggggtaccaaagaccaaacttaggtgtatgaactaaatatctcaaaattcttttcatgaccctaaggtgaacttctttaggatcggcttggaaccttgcacacatgcatacggaaagcataatattcggtcgagatgcacataaatacagtaaagatcctatcatcgaccggtataccttttgatctacggatttatctctcgtgtcgaggtcgagatgcccattagttcccatgggtatcttgatgggcttggcatccttcattccaaacttggtaagtatatcttgaatgtacttggtttggctgatgaaggtaccctcttggagttgcttcacttgaaatcctaggaaatacttcaactcccccatcatagacatcttgaatttttgaatcattatcctactaaactcttcacaagtagatttgttagtagacccaaatatgatatcatcaacataaatttggcatacgaataaatcatttgcaatggttttagtaaagagcgtaggatcggcattaccgactttgaagccattagtgataaggaaatctcttaggcattcataccatgctcttggggcttgcttgagcccataaagcgcctttgagagtttatagacatggttagggtactcactatcttcaaagccgggaggttgctcaacatagacctcttccttgatcggtccattgaggaaggcacttttcacgtccatttgataaatcttaaagtcatggcaagtagcataggcaagtaatatgcgaattgactcaagcctagctacggatgcataggtttcaccaaaatccaaaccttcgacttgtgaatatcccttggccacaagtcgggctttgttccttgtcaccacaccatgctcatcttgcttgttgcagaatacccactttgttcctacaacattttggttaggacgtggaacaagatgccatacctcattcctcgtgaagttgttgagttcctcttgcattgccaacacccaaaccgaatctcttaatgcatcttccatcctgtatggctcaatagaagacaaaaaagagtaatgttcacaaaaatgtgcgacacgagatcgagtggttacccccttatgaatatcgccgaggatggagttcacggggtgatctctttgtatcgcttggtggactcttgggtgtggcggtctttgaccctgaatttcttgatcatcttccttgtctttgtcatggtcatctcccccttgatcattgctctcctcttgaggtggctcatcttcttgatcatcttcttcattgtcttgagcctggtcctcatcttgagttggtggagatgcttgatttgaagatgatggttgatcttgagcttgtggaggctcttcgaattccttaggacacacatccgcagtggacatgttccttagcgcgacgcatggagcctcttcatcatctagttcatcaagattaacttgttccacttgggagccattagtctcatcaaacataatgtcacaagaaacctcaactaatccagtggatttgttgaagactctatatgcctttgtgtttgaatcatatcctagtaaaaagccttctacacccttaggagcaaatttagattttatacctcttttaacaagaataaaacatttgctaccaaagactctaaaatatgaaacattgggatttttaccggttaggagttcatatgatgttttcttgaggattcgatgaaggtagagccggttgatggagtagcaagcagtgttgattgcttccgcccaaaaccggtctggagtcttgtactcatcaagcatggtcctcgacatgtccaataaagttctattctttctctccactacaccattttgctgaggtgtgtagggagaagagaactcatgcttgatgccctcttcctcaagaaagccttcgatttgtgagttcttgaactttgtcccgttgtcgcttcttattttcttgatccttaatccgaactcattttgagctcgtctcaagaatccctttaaggtcttcctgctgatgcttatgtaagcgatcgggccgaatagatccatgtggagtagttcaagcgacctgtcggtcatcatgatgttcttgtgtggatggtgagtaccaacttgcttccctgcttgacatgcgctacacaccctgtctttctcaaaatgaacatttgtttgtcccaaaatgtgttctccctttagaagcttgtggagattcttcatcccaacatggtctagtcggcgatgcattaccagagtcaaaaaccaagaaccatcaatctcattgccacccacaagccgtgattccctttctgcccggagagagctactccccat

SEQ ID NO: 30159 - DNA, 345 bp, Zea mays
  Clone ID: MRT4577_127518C.1
cccccacaaaacaagcttttcagttggaaatttgctaacaacaaaatatgattttgtcccacaaaccgggagaaagggggacttaaaaaaaaaaaaaccaacctttgctgcctactgttattgataaaaagggcccgggttttattcacaggggacttttcgatgctccggcccaaaaaaaaaatttcaccgatttttgtaaaaaaaaagggcggacgggggaaaaaaccccgggatttcacctttttagctagatggccaaaaccgaattcacccaaaaattgcttaggaaaaggggtgggaacgatgtgcaacaacaattgttttttaacaaagccagttttt

SEQ ID NO: 30160 - DNA, 3648 bp, Zea mays
  Clone ID: MRT4577_127519C.1
ttaggcattcataccatgctcttggggcttgcttgagaccataaagcgccttaagagtttatagacgtgattagggtactcactatcttcaaagctgggaggttgctcaacatagacctcttccttgattggtccattgaggaaggcactcttcacgtccatttgataaagcttgaagccatggtaagtagcataggcaagtaatatacgaattgactccagcctagctacgggtgcataggtttcaccgaaatccaaaccttcgacttgtgaataccccttggccacaagtcgggctttgttccttgtcaccacaccatgctcatcttgcttgttgcggaagacccacttggttccctcatcatcttccttgtcttgatcattagcatctcccctttgatcattgtcctcctcttgaggtggctcctcttgatcttcatcatcattatcttgatcttgatcctcatcttgagttggtggagatgcttgcattggggaagatggttgatcttgtgcttgtggaggctcttcggatttcttaggacacacatccccaatggacatgttccttagcgcgatgcacagagcctcttcatcatctagctcatcaagatcaacttgctctacttgagagccgttagtctcatcaaacacaatgtcacaagaaacttcaactagtccagtggacttgttaaagactctatatgcccttgtgtttgaatcatatcctagtaaaaggccttctacagccttaggagcaaatttagattttctacctcttttgacaagaataaagcatttgctaccaaagactctaaaatatgaaacattgggctttttaccgatgaggagttcatacaatgtcttcttgaggattcggtgaagatataaccggttgatggcgtagcaagcggtgttgaccgcctcggcccaaaaccgatccgaagtcttgtactcatcaagcatggtccttgccatgtccaatagagttctattcttcctctccaccgtctcaagaatccctttaaggtctcttgagtttgagatttttctcccgccgatgcttatgtaagctatcgggccgaataggtccatgtggagtagctcaagtggcctgtcggtcgtcatgatgttcttgtatggatgatgaacaccaacttgctttcctgcttgacatgcactacgtaccctgtctttctcaaaatgaacattggttagtcccaaaatgtgctctccctttagaagcttatgaagattcttcatcccaacatgggctagtcggcggtgccagagccaacccatgttagtcttagcaattaagaaagtgtcgagttcagctctatcaaaatctactaagtatagctgaccctctagcactcccttaaatgctactgaatcatcacttcttctaaagacagtaacaccttgatttccatccacgaatgtgatagctctttggggatcatggtttttctcgtaggaggagaacatcttcttctcccctgtcatgtggtttgtgcacccgcccttgtgtttgcccccaacatatttggcaactactttgcctgatttgttagttagcacataagatgcatcaaaagtcttgaatgaaatgttatgatcatttgatgcaataggagttttcttcttaggcaatttagcatgagtagattgcctagaactagatgtctcactcttatatataaaagcatgattagggccagagtgagacttcctagagtgaattctcctaattttgtgctcgggataaccgatagggtataaaatgtaaccctcgttatcctgaggcatgggagctttgcccttaacaaagttggacaatcttttaggaggggcattaagcttgacattgtctccctgttggaagccaatgccatccgtaatgccagggcgtctcccactataaagcatgctacgagcaaatttaaatttctcattttctagttcatgctcgacaattttagcatctagtttagctatatgatcattttgttgtttaatcatagcaaggtgaccatgaatagcatcaatgttaatatctctacatctagtacaaatagagacatgatctatgctagatgtagagggtttgcaatcatttaattcaacaatcttagcatgtaaaatagcattctcatctctaagattggaaatagaagcattgcacacatctaagtctttagccttagcagttaatttatcattctcaattctaaggctagcaagagaggcattcaatttttcaatcttagcaattgaactagcattatcatttctaagattgtcaattgaatcatcacaaacatttgatttctcaaccttagcaattaatttggcattttcatttctaaggttggaaataacatcatggcaagtgcttagctcactagataaattttcacatttttctaccttcttcttcttaccgttctttgccatgaggcacttgtggccgacgttggggaagaggaggcctttggtgacggcgatgttggcggcatcctcgtcggaggaggagtaggtggagctctcatcggagtcccactctcggcatacatgggcatcgtcacccttcttcttgtagtacttcttcttttccttcctccttcccttcttgtcgtcgcccctgtcactatcacttgataatggacatttagcaataaaatgaccgggcttaccacacttgtagcacactttcttgaagcgagatttataatccttccccctcctttgcttgaggatttggcggaagctcttgatgatgagcgccatttcctcgttgtcgagcttggaggcatcgatggggagcctacttgacatagactcttctttcttctcctccgtcgctttgaatgcgacgggttgcacctcgggtgtggaggtgccgccttgctcgacgatttgtttggagcctttgatcatcaattcaaagctcacaaactttcctatcacttcctcgggagacattagcttatatctaggatcaccacgaattaattgaacttgcataggattacgaaaaacgagtgatcttagaataaccttgaccatttcatggtcatcccattttgtgctcccgaggttgcgcacttgattcaccaaggtcttgaggcggttgtacatggcttgtggctcctctccttggttgaggatgaatcgaccgagcttcccctcgatcgtctcccgcttggtgatcttggtcacctcatctccctcgtgcacggtcttgagcacgtcccaaatctccttggcacttttcaacccttgcaccttattatactcctctcgacttagagaggcaaggagtatagtggtggcttgggagtcaaaatgccgaatttgggcaacctcgtccgaatcatatgcttcatccctaaacttcttgcgctcatggcgcttagaagtgacggacggagtgtcggagccggaggtggatggcgacgaggaatcggtctcgtagtagaccaccttcttcatcttctttttcttgtcgccactccgatgcgacttggtatgtgaaggggctcccttcattttgttgtcggactcccctgatggagctttcccgtggattgtagacttgtcatcgccggtcatgatctccttcttggcgtgttctcccgacat

SEQ ID NO: 30161 - DNA, 399 bp, Zea mays
  Clone ID: MRT4577_12751C.1
cccacgcgtccgtgatcacggtaagacatgtctgatgtatcatatacgctagatgaaggtgcttgcatatgaaactcggggcgcaacgcactggaatcacgcatatccctgtctatgaccagagaagagatgctatcactgctgcgcatgtgtggatacttcaggacactatgcatgtggctcattctgagctgcaaccgctagctgacccgctgtccgaactggtgtggtccatgcagagtatcgagctcatgcacgacacagataaagcaagttcacgtgctaggacacgtggcgtgtcctgtatggtcactattcacaggatcatcgtggcataagctcctgcatacatacttatgctagatctttcccaatttactataccgcctgaagaggata

SEQ ID NO: 30162 - DNA, 4944 bp, Zea mays
  Clone ID: MRT4577_127520C.1
ttaggtggtggtgcggtccttttgctttgggctcatactttctccccctttggcatgaatcgccaaaaacggaatcattagagcccttacattactttcttcccctcccgtgtcgaggtcgagatgcccattggttcccatgggtgtcttgatgggcttggcatccttcatcccaaacttgtttagaatgtcttgagtgtacttcgtttggctaatgaaggtgccctcttggagttgcttcacttgaaatcctaggaaatacttcaactcccccatcatagacatctcgaacttttgtgtcatgatcctactaaattcttcacatgttgactcgttagtagacccaaatataatatcatcaacgtaaatttggcatacaaacaagtcattttcaagagttttagtgaataaagtaggatcggcctttccgactttgaagccattagtgataaggaaatctctaaggcattcataccatgctcttggggcttgcttgagcccataaagcgccttagagagtttgtaaacatggttagggtactcactgtcttcaaagccgggaggttgctcaacatagacctcttccttgattggtccattgaggaaggcacttttcacgtccatttgataaagcttaaagccatggtaagtagcataggctaataatatttgaattgactcaagcctagctacgggtgcataggtttcaccgaaatccaaaccttcgacttgggagtatcccttggccacaagtcgagctttgttccttgtcaccacaccatgctcatcttgcttgttgcggaagacccatttggttcctacaacattttggttaggacgtggaactaaatgccatacctcattcctagtgaagttgttgagctcctcttgcatcgccaccacccaatccgaatcttggagtgcttcctctaccctgtgtggctcaatagaggaaacaaaggagtaatgctcacaaaaatgtgcaacacgagatctagtggttacccccttatgaatgtcaccgaggatggtgtcgacggggtgatctcgttggattgcttggtggactcttgggtgtggcggcctttgttcttcatcctccttatcttgatcatttgcatctcccccttgatcattgccatcatattgaggtggctcatttgcttgatcttctccttcatcaatttgagcctcatcctcattttgagtcggtggagatgcttgcgtggaggaggatggttgatcttgtgcatttggaggttcttcggatttcttaggacacacatccccaatggacatgttccttagcgcgatgcacggagcctcttcatcacctatctcatcaagatcaacttgctctacttgagagccgttagtctcatcaaacacaacgtcacaagaaacttcaacttgtccagaggacttgttaaagactctatatgcccttgtgtttgaatcatatcctagtaaaaagccttctacagtcttaggagcaaatttagattttctacctcttttaacaagaataaagcatttgctaccaaagactcggttgatggcgtagcaagcggtgttgaccgcctcggcccaaaaccgatccgaagtcttgtactcatcaagcatggttcttgccatgtctaatagagttctattcttcctctccactacaccattttgttgtggcatgtagggagaagagaactcatgcttgatgccctcctcctcaaggaagccttcaatttgagagttcttgaactccgtcccgttgtcgcttctaattttcttgatccttagggtgaactcgttttgagcccgtctcaagaatccttttaaggtctcttgggtttgatatttttcaagacaatacttactcccgccgatgcttatgtaagcaatcgggccgaatagatccatgtgaagtagctccagtggcctgtcggtcgtcataatgttcttgtgtggatgatgggcaccaacttgctttcctgcttggcatgcgctacaaatcctgtctttctcaaagtgaacatttgttagtcctaaaatgtgttctccctttagaagcttgtgaagattcttcatcccaacatgggctagtcggcggtgccagagccaacccatgttagtcttagcaattaagcaagtgtcgagttcagctctatcaaaatctaccaagtatagctgaccctctaacactcccttaaatgctattgaatcatcacttcttctaaagacagtgacaccttggtttccatccccgaatgtgatagctcgttggggatcctggtttttctcgtaggaggagaacattttcttctccccagtcatgtggtttgtgcacccgctgtcgatgatccaacttgagcccccggatgcataaaccttgctggatttgttagttaaaacatatgatgcatcaaaagttttgaatgaaatgtcatgatcatttgatgcactaggagttttcttcttaggcaacttagcacgggttggttgcctagagctagaagtctcactcttatacataaaagcatggttagaaccagagtgagacttcctagaatgagttctcctaattttgtcctcgggataaccggcagggtataaaatgtaaccctcattatccggaggcatgggagccttgccctttacaaaattggacaatcttttaggaggggcattaagtttgacattgtctcccctttggaagccaatgccatccttgatgccagggcgtctcctactatagagcatacttctagcaaatttaaatttttcattttctaagttatgctcggcaattttagcatctaattttgctatatgatcattttgttgtttaattaaagtcatgtgatcatgaatagcattaacatcaatatctctacatctagtgcaaatagaagtgtgctcaacggtagatgtagagggtttgcaagattttaattctacaaccttagcatgcaatatatcattcttagttctaaggtcggaaatggtagcattgcaaacatcaaaatctttagccttagcaattaatttttcattttcattcttaaggctaacaagagataagttcaattcttcaatcttagcaagcaaatcatcattatcatttctaagattgggaattgaaacattacaagcaatagaatcaaccttagctaataaattagaattctcatttctaaggttgtctatagtctcatggcaagtgcttagctcattagacaatttttcacatttttcaacttctagagcataagcatttttaaccttaacatgcttcttattttctttaataaggaagtcctcttgggtgtccaagagatcatccttttcatgaatggcactaatcaattcattaagtttctctttttgttgcatgttgaggttggcaaaaagagtgcgcaagttatcttcctcatcactaacattttcatcactagaggattcatatctagtggaggatttagatttaaccttcttctttttgccgtcctttgccatgaggcacttgtggccgacgttggggaagagaagtcccttggtgacggcgatgttggcggcgtcctcgtcgtcggaggagtcgctagagctttcgtcggagtcccactcccgacaaacatgggcatcgccgcccctcttcttgtagtattttttcttctcctttcttctccccttcttgtcatcgccccggtcactgtcactagatataggacattttgcaataaaatgatcgggcttaccacatttgtagcaaaccttcttggagcggagcttgtagtctttccccctcctttgtttgaggatttggcggaaactcttgatgacgagcgccatttcctcattgtcgagcttggaggcgtcgattggttgtctacttggtgtagactccttcttctcctctgttgccttgaatgcaaccggttgagcttcggacgtggagggatcatcaagctcgttgatcttcctcgagccttcgatcatgcactcaaaacttacaaaattcccgattacttcctcgggagtcattagtgtatatctagggttgccacaaattaattgaacttgagtagggttaagaaaaataagtgatcttaaaataaccttaaccatttcgtggtcatcccatttcttgctcccgaggttgcgcacttgattcaccaaggtcttgagccggttgtacatgttttgtggctcctcccctttgcgaagccggaaccgaccgagctccccctcgatcgtctcccgcttggtgatctttgtgagctcatctccttcgtgtgcggttttgagcacatcccaaacctccttggcgctcttcaacccttgcactttgttatactcctctctacttagagaagcgaggagtattgttgttgcttgagagttgaagtgctcgatttgagcaacctcgtcctcatcataatcttcatcccctacggatggtacctgtgcaccaaactcaacaacatcccatatacttttgtggagtgaggttagatgaaatcgcattaaatcactccacctagcgtaatcttcaccatcaaatgttggtggtttacctaatgggacgaaaagtaaaggtgtatgtttagaaatgtgagggtagcgtagggggatcttactatacttcttgcgctcttggcgcttagaagtgacggacgccgcgtcggagccggaggtggatgttgatgaagaatcggtctcgtagtagaccactttcctcatcttctttttcttgtccccactccgatgcggcttgtgagaagaggatttttccttcttctctttgtgtgaagaagatttcttctccttccctttggaggagtctttcttctccttcctcttgttgcgggactcttccgatgaagtcttcccgtggcttgtagtgggcttttcgccggtctccatctccttcttggtgtgatctcccgacat

SEQ ID NO: 30163 - DNA, 365 bp, Zea mays
  Clone ID: MRT4577_127521C.1
agattttgctcgaccgctcgccctacccggcgggcttcatgctcgttttttgaccgactcctacaccttcttcctcttcgacaagggcaccaacaacctgctccacacatttgaccgcgagggcaacgcgcccctcttatgggggatcaccgcccacggttgattagccccctccgactacatccacatgctcaaaggctcatgcggcaagtcactcgcgccgaacccgcaaggctgctcatactacaacgccctcggagggctcaagtgctacgagaaccccacacacaaggtcacccctcaccccggcgacaaagaagagatctgcggagccactttcaaggtggaggaagggtctactgtcc

SEQ ID NO: 30164 - DNA, 4866 bp, Zea mays
  Clone ID: MRT4577_127522C.1
ttagatggtggtgcggtccttttgctttgggctaatactttctccccctttggcatgaatcgccaaaaatggagtcattagagccctcagaattattctctcacccttttgatccacggaattaccttccgtgtcgaggtcgagatgcccatttgttcccatgggtgtcttgatgggtttggcatccttcatcccaaacttgcttagaatatcttgagtatacttcgtttggcttaggaaggtgccctcttggagttgcttcacttgaaatcctaagaaatacttcaactcccccatcatagacatctcgaactttcgtgtcatgatcctactaaactcttcacatgtagactcgttagtagacccaaatataatatcatcaacataaatttggcatacaaacaagtcattttcaagtgttttggtaaagagcgtaggatcgacttttccaactttgaagccattagtgataagaaaatctctaaggcattcataccatgctcttggggcttgcttgagcccataaagcgccttagagagtttatacacatggttagggtactcactatcttcaaagccggggggttgctcaacatagacctcttccttgattggtccattgaggaaggcacttttcaagtccatttggtaaagcttgaagccatggtaagtagcataggccaataatatacgaattgactcaagcctagctacgggtgcataggtttcaccgaaatccaaaccttcgacttgggagtatcccttggccacaagtcgagctttgttccttgtcaccacaccatgctcgtcttgctcattcctggtgaagttgttgagctcctcttgcatcgccaccacccaatccgaatcttgtagtgcttcctctaccctgtgtggctcaatagaggaaataaaagagtaatgctcacaaaaatgtgcaacacgagatctagtggttacccccttatgaatgtcgccgagaatggtgtcgacggggtgatctcgttggattgcttggtggactcttgggtgtggaggccttggttcatcatcctccttgtcttgatcatttgcatctcccccttgatcattgccgtcatcttgaggtggctcatttgtttgatcttctccttcatcaacttgagcctcatcctcattttgagttggtggacatgcttgcgtggaggaggatggttgatcttgtgcatttggaggctctttggattctttaggacacacatccccaatggacatgctccttagcgcgatgcacggagcctcttcatcacctatctcatcaagatcaacttgctctacttgagagccgttagtctcatcaaacacaacgtcacaagaaacttcaacttgtccagaggacttgttaaagactctatatgcctttgtgtttgaatcatatcctagtaaaaaaccttctacagtcttaggagcaaatttagattttctacctcttttaacaagaataaagcatttgctaccaaagactctaaaatatgaaatattgggctttttaccggttaggagttcgtatgatgtctttttgaggattcggtgtagatacaaccggttgatggcgtagcaagcggtgttaaccgcctcggcccaaaaccgatccgaattcttgtactcatcaagcatggttcttgccatgtccaataaagttctattcttcctttccactgcaccattttgttgtggcgtgtagggagaggataactcatgcttgatgccctcctcctcaaggaagccttcaatttgagagttcttgaactccgtcccgttgtcgcttctaatctttttgatcctcaagccgaactcattttgagcccgtctcaagaatccttttaaagtctcttgggtatgagacttttcctgtaaaaagaatacccaagtgaagcgagaataatcatccacaataactagacagtacttactcccgccgatgcttatgtaagcgatcgggccgaatagatccatgtgtaggagctctagtggcatgtcagtcgtcatgatgttcttatgtggatggtgagcaccaacttgcttccctgcttggcatgcgctacaaatcctgtctttctcaaaatgaacatttgttaatcttaaaatgtgttctccctttagaagcttatgaagattcttcatcccaacatgggctagtcggcggtgccatagccaacccatgttagtcttagcaattaagcatgtgtcgagttcagctctataaaaatctactaagtatagctgaccctctaacacacccttaaatgctattgaatcatcacttcttctaaagacagtgacaccttgatttccatccccgaatgtgatagctcgttggggatcttggtttttctcataggagaacattttcttatcccctgtcatgtggtttgtgcatccgctgtcgatgatccaacttgagcccccggatgcataaaccttgccggatttgttagtcaacacatatgatgcatcaaaagttttgaatgaaatatcatgatcatttgatgcactaggagttttcttcttaggcaacttagcacgggttggttgcctagaactagatgtctcacccttatacataaaagcatgattaggcccagagtgagacttcctagaatgaattctcctaattttgctctcaggatagccgacagggtataaaatgtaaccctcgttatcctgaggcatgggagccttgcccttaacaaaattagacaatttcttaggaggggcattaagtttgacattgtcccccttttggaagccaatgccatccttgatgccagggcgtctcccactataaagcatactacgagcaaatttaaaatttttattttcaagttcatgctcggcaattttagcatctaattttgctatatgatcattttgttgtttaattaaagccatgtgatcatgaatagcattaatatcaacatctctacatctagtacaaatagaagtgtgttcaacggtagatgtagaaggtttgcaagaattaagttcaacaatcttagcacgcaatatattatttttgtctctaagatcggaaatggaaatattgcaaacatctaattctttagccttagcaagcaatttttcattttcaatcctaaggctagcaagagatatgtttaattcttcaatcttagcaagcaaatcatcattatcatttctaagattgggaattgaaacattacaagcaatataatcaaccttagctaacaaattagaattctcatttctaaggttgtctatagtctcatggcaagtgcttagctcactagataatttttcacatttttcaacttctagagcataatcatttgtaactttaacatgttttttgttttccttgattaggaagtcctcttgagagtccaagagatcatccttctcatggatggcactaattaattcatttaatttatcttcttctttttgccgtcctttgccatgaggcattttgtggccgacgttggggaagagaagtcccttggtgacggcgatgttggcgccgtcctcgtcgtcggaagagtcgctagagctttcgtcggagtcccactcgcgacaaacatgggcatcgccgcccttcttcttgtagtacctcttcttctcctttcttctccccttcttgtcgtcgcccctgtcactgtcactagatataggacattttgcaataaagtgaccgggcttaccacacttgtagcaaaccttcttggagcggggcttgtaatctttccccctcctttgcttgaggatttggcgaaagcttttgatgacaagcgccatttcctcgttgtcgagcttggaggcgtcgatgtgtgttctactcggtgtagactcctccttcttctcttccgtcactttgaatgcgactggttgagcttcggacgtagaaggaccgtcaagctcgttgatcttccgtgagcccttgatcataaattcaaagctcacaaaattcctgataacttcctcgggggtcattagtgtatatcttgggttgccacgaattaattgtacttgagtagggttaaggaaaataagtgatcttagaataaccttaaccacctcgtggtcatcccatttcttgctcccgaggttgcgcacttggttcaccaaggttttgagccggttgtacatatcttgtggctcctccccttggcgaagacggaagcgaccgagctccccctcgatcgtttctcgcttggtgatcttggtgagttcatcaccctcgtgtgcggtcttgagcacgtcccacacttccttggcgctttttaatccttgcaccttgttgtactcctccctacttagagaggcgaggagtatggttgtggcttgggagttgaagtgctcgatttgggccacctcgtcctcatcataatcctcatccccgacggatggtacctgtgctccaaattcaacaacattccatatacttttgtggagtgaggttagatgaaatttcattaaatcactccacctagcataatcttcaccgtcaaaggttggcggtttgcctaatggaacggaaagcaatggagtatgtctagaggtgcgagggtagtgtaaggggatcttactaaacttcttgcgctcatggcgcttagaagttacggagggcgcgtcggagccggaggtggaaggtgatgaagtgtcggtctcgtagtagaccaccttcctcattttctttttcttgtcgccactccgatgcgacttgtgggaagaggctttcttctccttcccctttccctttttgcgggactcttcggatgaagccttcccgtggcttgtagcgggcttgtcgtcggtctccatctccttcttggcgtgttctcccgacat

SEQ ID NO: 30165 - DNA, 3612 bp, Zea mays
  Clone ID: MRT4577_127523C.1
ctatttcgatatccccctttgttggtgatccctcaaaaagtgatactgaatgtctatgtgcttagtgcgactgtgttcaacgagattatcctccatgcggattgcactctcattatcacataggagagggactttgctcaatttgtagccatagtccctgagggtttgcctcatccaaagtaattgcacacaacaatggcctgcggcaatatactcggcttcagcggtggaaagagctactgaattttgtttctttgaagcccaagacaccagggatcttcctagaaactgacaagtccctgatgtgctcttcctatcaattttacaccctctcgtgtcgaggtcgagatgcccattagttcccatgggtgtcttgatgggcttggcatccttcattccaaacttggtaagtatgttttgaatgtacttcgtttggctgatgaaggtgccctcctggagttgcttgacttgaaatcctaggaaatacttcaactcccccatcatagacatctcgaatttttgtatcatgatcctactaaactcttcacaagtagatttgttagtagacccaaatatgatatcatcaacataaatttggcatacaaacaaatcttttgcaatggttttagtaaagagtgtaggatcggcttttccgactttgaatccattagtgataaggaaatctcttaggcatttataccatgctcttggggcttgcttgagcccataaagcgcctttgagagtttatacacatggttagggtactcactaacttcaaagccgggaggttgctcaacatagacctcttctttgattggtccattaaggaaggaacttttcatgtccatttgataaagctttgacttgtgaatatccattggccacaagtcgggctttgttccttgtctccacaccatgctcatcttgcttgttgtggaatacccacttggtacctcattcctcgtgaagtttttgagttcctcttgcattgccaacacccaatctaaatctcttaatgcttcttccaccctgtatggctcaatagaagacacaaaagagtaatattcacaaaaatgtgcgactcgagatcgagttgttacccccttatgaatatcgccgaggatggagttcacggggtgatctctttgaatcgcttggtggactcttgggtgtggcggtctttgaccctgtaactcttgatcatcttccttgtcttgatcaacttcatatcccccttgatcattgtcctcctcttgaggtggctcatcctcttgatctccatcttcattgtcttgagcctgatcctcatcttgagttggtgggatgcttgcatgaaagtgacggttgatcttgtgcttgtgtgggctcttcggattccttaggacacacatccccaatggacatgttccggtgaggaattcatatgatgtctttttaaggattcggtgaaggtagagccggttgatggagtagcaagcagtgttgattgcttccacccaaaaccagtcaggagtcttgtactcatcaagcatggtccttgccatgtccaatagagttctattcttcctctccactacaccattttgttgaggtgtgtagggagaagagaactcatgcttgatgccctcatcctcaagaaagccttcaatttgagagttcttgaactccgtcccgttgtcgcttcttatcttttttattctcaatccaaactcattttgagcccgtctcaagaatccttttaaggtctcttgggtttgagatttttcccgtcgatgcttatgtaagctatcgagccgaatagatccatgcgaagcagttccagtggtctgtccgttgtcattatgttcctctaatactcccttaaatgctattgaatcatcacttcttctaaatacagtaacacctaaatcttgatttccatccccgaatgtgataactctttggggatcatcatttttctcgtaggaggagaacatccttttctcccatgtcatatggtttgtgcatctgctatcaataatccaacttgagctccaggatgcataaaccttaggtacccaaacacgagtcttggagcccttgtgtttgcccccaacatatttggcaactattttgcctgatttgttagtaagcgcataagaagcatcaaaagtcttaaatgaaacattaggttcatttgatgcagtaggagttatctttttagacattttaacataggtagaatgcctagagctagatgcctcattcttgtacataaaagcatgatgggaaacagaatgagacttcctagcatgacttctcctaatcttatgctcaggataaccagcaggatataaaatgtaaccctcgttatcctgagccttgggagccttacccctcatcactagatgtagtatacttggggtggttctagcttgtaccctctttttcttgccgtcctttgccatgtagcatttgtggccgacgtttgggaagagaagtcccttgttgacgatgatgtttgcggcgtcctcgtcggaggaggagtcccattcccaacacacgtgggcatcgtcgcccttcttcttgtagtatttattcttttccttcttcatccccttcttgtcgttatccctgtcactatcactagacatagggcatttagcgataaaatgtctgggcttaccacacttgtagcacaccctcttagagcgaggtttgtagtccttccccctcctttgcttgaggatttggcggaagctcctaatgatgagcgtcatttcctcattgtcgagcttggaggcgtcaatggggagcctacttgatgtagactcttctttcttatcctccgtcgctttgaatgcgatgggttgcacctcgggtgtggaggtgtcgccttgctccaagttgactatttgtttggagcctttgatcatcaattcaaagctcacaaactttcctataacttcctcgggagacattagcttatatctaggatcacctcgaattaattgaacttgcgtaggattacgaaaaatgagtgatcttagaataatttggttgaccaaggtcttgagccgattgtacattgcttgtggctcctctccttggttgaggacaaatcgaccgagctccccctcgatcgtctcccgcttggtggtcttggtcacctcatccccttcatgcgcagtctttagtacatcccaaatctttttggcactttttagccattgcaccttattatactcctctcgacacaaggaggcgaggagtatagtagttgcttgggagtcaaagtgccagatttgggcgatttcgttcgaatcataatcttcatcccctatgggtggtacctgcgctccaaactcaacaatgtcccatatgctagcgtggagtgaggttaggtgatgcctcaatttatcactccacatacaataatcttcaccataaaaaataggtggtttgcctaatgagatggaaagtaaaggagtgcgtttagaaatgcggggatagcgtaaggggatcttactaaacttcttgcgctcatggcgcttagaagtgacggacggagcgtcggagccgaaggtggagggcgacgaagaatcgatctcgtagtagaccactttcttcat

SEQ ID NO: 30166 - DNA, 4122 bp, Zea mays
  Clone ID: MRT4577_127524C.1
tcagctttggcagtagaaagagctatggaattttgcttctttgaagcccaagacaccagagaccttcccaagaactggcaagtccccgatgtgctctttcttttgatctacggatttacctcccgtgtcgaggtcgagatgcccattggttcccatgggtgtcttgatgggtttggcatccttcgtcccaaacttgtttgaaatgtcttgaatatactttgtttggctaatgaaggtgccctcttggagttgcttcacttgaaatcccaagaagtacttcaactcccccatcatagacatctcgaatttttgtgtcatgatcctactaaactcttcacatgtagattcgttagtagatccaaatatgatatcatcaacataaatttggcatacaaacaaaccattttcaagtgttttagtaaagagtgtaggatcggcctttccaactttgaagccattagtgataaggaaatctcttagacattcataccatgctcttggggcttgcttgagcccataaagcgccttagagagtttatatacatggttagggtactcactatcttcaaagccgggaggttgctcaacatagacctcctccttgattggtccattgaggaaggcacttttcacatccatttggtaaagctcattcctagtgaagttgttgagctcctcttgcattgccaccacccaatccgaatcttgaagtgcttcctctaccttgtgtggctcaatagaggaaacaaaagagtaatgttcacaaaaatgagcaacacgagatcgagtaattacccccttttgaatatcgccgaggatggtgtttacggggtgatctcgttggattgcttggtggactcttgggtgtggcggtctttgaacttgttcatcttcctcatcttgatcatgggcatctcccccttgatcattgctctcctcttgaggtggctcaacttcttgatcttctccttcatcattttgagcctcatcctcatcttgagttggtggagatgcttgcatggaggaagatggttgatcttgtgcttgtggaggctcttcggattccttaggacacacaacaccaatggacatgttccttagcgcgacgcacggagcctcttcatcatctagctcatcaagatcaatttgctctacttgagagccgttagtctcatcaaacacaatgtcacaagaaacttcaactagtccagtggacttgttaaagactctatatgcccttgtgtttgaatcatatcctagtaaaaagccttctacagtcttaggagcaaatttggattttctacctcttttaacaagaataaagcatttgctaccaaagactctaaaatatgaaacattgggctttttaccagttaggagttcgtatgatgtcttcttgaggattcggtgtagatataaccggttgatggcgtaacaggcggtgttgaccgcctcggcccaaaaccgatccgaagttttgtattcatcaagcatggttcttgccatgtccaatagagttcgattattcctattcactacaccattttgttgtggcatgtagggagaagagaactcatgcttgatgccctcctcctcaaggaagccttcgatttgtgagttcttgaactccgtcccgttgtcgcttcttattttcttgatccttaagtcaaactcgttttgagcccgtctcaagaatccctttaaggtctcttgggtatgagatttttcctgcaaaaagaacacccaagtgaagcgagaatagtcatccacaataactagacagtacttactcccgccgatgcttatgtaagcaatcgggccgaatagatccatgtgtaggagctcgagtggcctgtcagttgtcatgatgttcttgtgtggatgatgaacaccaacttgcttccctgtctgacatgcgctacaaaccctgtctttctcaaaatgaacatttgttagtcccaaaatgtgttctccctttagaagcttgtgaagattcttcattccaacatgtgctagtcggcgatgccagagccagcccatgttagtcttagcaattaagcaagtgtcgagttcagctctatcaaaatctactaagtatagctgaccctctaacactcccttaaatgctactgaatcatcacttcttctaaagacagtaacaccttgatttccatccccgaatgtgatagcttgttggggatcttggtttttctcataggaggagaacatcttcttctcccctgtcatgtggtttgtgcacccgctatcgatgatccaacttgagcccccggatgcataaaccctcgttatcctgaggcatgggagccttgcccttaacaaaattagacaatcttttaggagggcattaagtttgacattgtctcccttttggaagccaatgccatccttgatgccaaggcatctcccactatagagcatgcttctagcaaatttaaatttttcattttctaagtcatgctcattaagttttgcattaagttgagctatgtgattattttgtttcttaattaaagctaggtgatcatgaatagcatcaacattaatatctctacatctagtgcaaatgaaaacatgctcaacggtagatgtagagggtttgcaagattttagttcaacaatgttagcatgtaaaatgtcattttcatttctaagattggaaatggtaatattgcaaacatctaagttcttagccttagcaattaatttttcattctcatttctaaggctagcaagagagacattcaattcttcaatcttagcaagtaaactaacattatcatctctaagattgggaattgaaacatcacaaacatttgaatcaatcttagcaattattttagcattttcatttctaaggttggcaataatatcatggcaagtgcttagctcactagatagtttttcacatttctctagttctagagcgtaagcattcttaaccttaacatgcttcttgttttctttaattaggaagtcctcttgagagtccaagagttcatccttctcatgaatagaactaattaattcatttaatttttctttttgttgcatgtttaggttggcaaaaagggcgcgcaaattatcctcctcatcacaagagttatcctcatcacttcttccttttgccgtcttttgccatgaggcacttgtggccgacgttgggaagaggagccctttggtgacggcgatgttggcggcgtcctcgtcggaggaggagtcggaggagttctcatcagagttccactcgcggcacacatgggcatcgccacccttcttctcgtagtatctcttcttttctctcctctttcccttcttgtcatctcccctgtcactgtcacttgatattggacattttgcaataaagtgaccgggcttaccacacttgtagcacactttcttggagcgggacttgtagtccttccctctcctttgcttgagaatttggcggaagctcttgatgatgagcgccatttcctcgttgtcgagcttggaggcgtcgatggggagtctacttgatgtagacccttccttcttctcctccgtcgccttgaccatttcatggtcatcccattttttgctcccgaggttgcgcacttggttcaccaaggtcttgagccgattgtacatctcttgtggctcctccccttggcgaagccggaagcgaccgagctccccctcgatcgtctcccgcttggtgatcttggtcaccgcgtctccttcgtgcgcggtcttgttatactcctctcgacttagagaggtgaggagtatagtggtggcttgggagttgaagtgcacgatttgggccacctcgtcctcatcataatcttcatccctacggatggtactacacttcttgcgctcttggcgcttagaagtgacagacgcggtgtcggatccggatgtagagggcaaggaagaatcggtctcgtagtataccactttcttcattttcttcttcttctcgccactcttgtgcgatcgaatgcgtgaaggggatccatccttcttcttgttggcggactcccttgatggagccttcccgtggcttgtagcggacttatcatcgccgatcaccatcttcttggcgtgatctcccgacat

SEQ ID NO: 30167 - DNA, 719 bp, Zea mays
  Clone ID: MRT4577_127525C.1
gcgattgggaccctcgaggccggccgggaataaagaattacccatcaagtctcttcctctcttctggaaaccggcgaccaggagaacttctcctgtcgacgggtagctcggcgtgggggcataaccctgccggcaaccacgggtcaaggctacgatctacgtagccgaggtcctcctaccttgggcaataccgcccttgacagtctggcaatcaggcacaaggaaggaatcaaggaaaaaatttgagaaaagccacaagtttcatgacacgaagagcaaccatgacttatccttggagataaaaccatatatcagcaaacggatgtgcatagccacctaccacagtaaacagatgtacaacacttcgccagatgttgatggatgctggcccagggggcggcttgattggcgattggttccctgccaactcgtctaggaggcccggttataggccgcttgtaccgaatttaaagccaatctttgacagctacgcagtcaatatttttttgttctggtcacgaagccgtttgatgttcgtactgagaagcttgtgccggtatcggttgctgctttgtgcgtcgctttaaacaatgtgcatcaactgggtagttctgtgttctcatgatcttatcagagcagccgttatgcggtttggtcactggcatgacataaaattgacttcgtctctttctgcttcaaaaaaaaaaaaaaaagcggcc

SEQ ID NO: 30168 - DNA, 459 bp, Zea mays
  Clone ID: MRT4577_127526C.1
atggcttgggcggaccgggcagacccgacggccacggtcaggccctccgcaagggtcccggcccgagcagtcgcctcgggtctagaaggggggaccccctttgcgtcaaaattttcctcggaaaagttttctaccaaaacgactttcgtgcctttcgactatatcgataacggaatcctaaaaacgacaagagagacctcgaacggcaaggccgaccgagccaagggactcctacgcctccgggatacggataccttactcatcaccttccgcgaaaggaatgaactacctccacaccagaagggctgcaagataacaaactccaagcggctcaccggcgaccactgcaccagcagtgacaacgacctctgcctcgggcggctagacagcagcaacgattaccccagggcaaacgctactgtgaaaaggccctcgcccctgtccccacacggggggtga

SEQ ID NO: 30169 - DNA, 339 bp, Zea mays
  Clone ID: MRT4577_127527C.1
tttgtttgatcgaaccaagtgccgatctctggcggggacctttatttatggaaaccattcaagacaccacaagtagcatttggaaataaaactgagggcgacgcgatgaaagccggcggagctagcagagcagttagcttcccctctcgagcgagtcttatcacagggatcgtacgtcaacgccatgggggcgtaggtcgaccccagctcgtgcgaagaacccaacaatggcactcccttgctagacggggatcgcgaactgagaggcactcccgaccccccatgctccgaaagggccggaggacttgaggcttgagacgaacttgatggaggttatga

SEQ ID NO: 30170 - DNA, 835 bp, Zea mays
  Clone ID: MRT4577_127528C.1
gattctaaggttgagagcagagtaccatcgtcaatcgactggtttaattcgtgctaagcagcacacgtctccctcttctgaaagaagctgcaggttttcgccggaccatggctggaagaggaggaaatggcgttccggccgaacaggagttcccaggctggagcgtcgccaaagcccaggaagatccacacccacctgtgcggcatgtgcacgctgctagaggtctccctgcgcaagctcggcataaaaacgaggaagggccggcgcatttcatccctggcatctccaactccatgcctagccatcatcatcaatttccgggggcgcagtggagcaagaatcctacgccgcatgtcccctctccagtggaattcatcatagaggcgtttcagcaccaaaaggatgagctgaaggaaaaggcgcgccaaaagttgattcgcttatccggcggggggaactagacaaagaagagaaaggatgcatggggatgaacaatctacagcagcgctatagttgtctggacatcagcatagagaggtgcagatgacacatacaacatcgactatatatatattaatttatgctgcacgcgcgactcgtgagtctttagtttgatttgttgaataaatgtaatgagagctagtacgtcgtctctactatacatgcatatgctggccaatccacaggatggtactagtcctccatagtaaacaacagaacccaactggttcaaattgtattcggttctgtctgtaaaatctgattctattcaccgctagcaatcacatggagcatgttcatcacaaaaaaaaaaaaaaaaaaaaatgattatatc

SEQ ID NO: 30171 - DNA, 410 bp, Zea mays
  Clone ID: MRT4577_127529C.1
tatatatgttcccgcgtgctgtggccctagccgtggtccccccactgcatatgtggcgtcggctagacctcttgacgcactggcgagcgtaaagtccgacatcaatggcgaagcatgatcctgagctcatggtgtgccggtcgcagcctgccatgccgattggccgcctatgcgagaaacgagatggcaatgtgtgttgactgcaactcattcgtgcgcccatggacactcaaccggctgtgggacaagtgcaatggtggccccttccagggaaggtgtcagatctgtcgaggagtccccatctcatacacttactactgcacggatgccacccaccatgacaacgaccgtgacggctgccccaagatcgtgacactccgtagcgccaagactgatctcttcgatgagcg

SEQ ID NO: 30172 - DNA, 970 bp, Zea mays
  Clone ID: MRT4577_12752C.1
gcgcccacgcgtccgcccacgcgtccgccccactctcgcttcgatgagggacgcggtggtggtgatggcggtgcccggaggcggaggcgggggcggaggatcggcctcgtcggcggcggcggcgccgtgcgcggcctgcaagctgctgcggcgccggtgcgcggcgggctgcgtcttcgcgccctacttcccgcccggggagccgcacaagttcgccaacgtgcacaaggtcttcggggccagcaatgtcagcaagctgctccaggagatcccggcgcagcaccgaggggacgcggtgagcagcctggtgtacgaggccaacgcgcgcgtcagggacccggtgtacggctgcgtgggcgccatctcgtcgctgcaggagcaggtggaggcgctgcaggcgcagctggcgctggcgcaggccgagatggtcaggctcaggatgaccaacgactacatcgtgcaccgcctcaaggcggccagcagggccggcggcgggggcagcagctacgccggctcgccctcgtccatgtcctcgcccaagacggcggagccggaggcgcactgcaaggccacgccggagctgctggacatggtcgtggaccagcccggcatggacgacgcccacttctggtcgtcctactagcctagggccgggatggaggccgctgacaaccgagcgcttctcttctgatctattagtcgtgtggtcgatcaggtgctgttttttgagtcacagatggtgtcatcaggtatatggtgtgcgcgcgctgtaacagcgtcacactaggaggaatggaaggcgagcgtacgtagaaggccttcttctcctataccttctaccagtatgtccagggcttgatttttttggctgtccttccatgagaaggtggaacatggttacaggtattggtgtgcatctactgcctagttaaaacaggtgaactctgctgtggaaatgcagatcgatctt

SEQ ID NO: 30173 - DNA, 1266 bp, Zea mays
  Clone ID: MRT4577_127530C.1
cattggtaccctcgaggccggccggggcccctttggcctctgtgttcgtacttcgctcggcagaaacctcttgctccagggggcgaacgcgccgccgcctccgacagccccctccagccgcgtcaaatcagcgccctcctctgctgcgccggcggtctcccgccgcaaagacgaagccccgcactcccttatcgcagatccgtgcccgccgccatgacggagtattgggtgagccaaggaaacaaatggtgcgacttctgtaagatttatatagcaaacaattccttcagcatcaggacacatgaacttggtaagcgccacaaggacaatgtcaccaaacgactgtcaacaatgcaaaaagagagtgagacaaaggaaaaggaacagcagcaagctgcacgagccctacagcagatagaagcaaaagctaaaaagagttatcaaaaagatttagagaataaccagaggaatgttgatggagacacttctgcagcacctggagatggatgggtgcttgactcggcgtcaggatattaccatgacaaatctactggactttactacgattcaaactctggcttctattattctgacagtttaggcaagtgggttacccaagaagaggcgtacaagtccgtgcaagcttcgaaatcagacgctggccaatcctcagcttcacaaacaaaagctcctgctgccgcagaaacagctgtccccgcgattaaaggaggtgcagctccaggccgggtggtgacgaaaccgttgaacccaatgagaccgattaagggcactcctgctccgtctgctgttgctgttaacaagaggaagagggatgacggcaagcccaaggcggtctccaaggaggaggaagcggccctcaaagcgcgggaagcagcaaggaagagagtggaggatagagagaagccgctgatgggattatacaagacgtactgatatcttgtccttgccagactgctactactcttcctccatgcatacgggtttgccaattacagtgtgatgttgtaaaatatatttttttaaaaaaaatctaaccgaacgcatcattcgcagaaggaatgccggtaatggtgtggcactggatttcagagcttttctgcatcagcaatgtgtgtccacacggtgtaatacctcatcagtggttcttgagtgaatcaagttccaatttgaatcttgtacaaggatatgttcattgttttttttacgcggatggagtgtcgtactcgtaccatatcatatactgcg

SEQ ID NO: 30174 - DNA, 374 bp, Zea mays
  Clone ID: MRT4577_127531C.1
gcttgatatctatctggtggtgctaggagactggagatcgagcaagggaaggagaaggagctagctgcagagacttggggttgagaggcgagcgaggcgacgacggcgcacgctcccccctcccatgcctgcacccgaccggccggcgtagatcccggccgtgcatgccggtgtacaacaagctttctttctttctttcttttttaaagcctttgtgttgttctcccctgttgtagtagtcgtctgtctctccatcagtcttcagtgctgctgtagtgcacggcaacagcttgcaagaagaatggaatggaatgcaacaaaacttgagcagcttgcaagaagaatggaatggaatgcaacaaaatttaaggatg

SEQ ID NO: 30175 - DNA, 355 bp, Zea mays
  Clone ID: MRT4577_127532C.1
gacaaaaaaaagtgtggatagcggatgtacaaggatcctccacatttgccggctactgtaaaggtccgctattttaccggacgtgttacagactcttgctggagggcttgcgtacgctcaaaaactctaaatttaaggtaccggactttatacatgtcgttgttggagacagcctaagtctagatactattaaactcatacaaccacataaatgagtcgtatcttaagagtatcaagtgaataaggtatcagactttgatatattttgtatggacgatttttttatgtgtatctaatactgacgaaccgtaacatagtatttagatcgtatatgcctcctagtttctaattcttt

SEQ ID NO: 30176 - DNA, 238 bp, Zea mays
  Clone ID: MRT4577_127533C.1
tcggtaatcaagctcattgtactcagggatcccatctgttgctccgtgtcaccaaggcccatgttcctcgtactaggcaattcctcgggcatcatacgatgcatgcgctacctcttcgtcattcgccagcggcgcatcctcccccttcgtccctcccaactgaattcccaacggtatctacggcaatccaatcctaccgatgctcgagacattctctaacggcactccgtcagagaaa

SEQ ID NO: 30177 - DNA, 471 bp, Zea mays
  unsure (1)..(471): unsure at all n locations
  Clone ID: MRT4577_127534C.1
ccccggaacaaaaaaacagaaaacccgggggggagggctccacaaaacaaaaccaggcccccccccccacaaaggccaaaaaagggaaaaggcacacaacacaacgaancaagcaacgggcggcaaccccacaacaacagaaccngggaaaggggggccaaaacccaagccccnggggacaacaaaaaaaggggcaacagccaccacggggggacacggaagcacaccggggcccaagaaaaggaaaggacccggggcaccagcggcnaacacaacccaacgaannacaacagccagaacgggaaagggagagaacaaaaaggcgggacccacagccccggggacacaaagcccagaaccaaggcgcaccccaccaacagccagggccacgggccagccaagcccaaaaacaacaacccgggggccccccaagcccccaagaaaacccccancnccaaaaaaaaacaacac

SEQ ID NO: 30178 - DNA, 423 bp, Zea mays
  Clone ID: MRT4577_127535C.1
aaaagaagggtctccaacaaattttatttgtaacagtagggaccgaaaaacaaggtggtggtacccagccgggccatgcaaagttttgatgcgctttttacgcaccgggcgggcacacttttttactggggcacaaactggaaaaacactggacaaacgttcgggggacaaattaaaccccccaacaaagggcatgcttgcttttagcagccaagcccaagcccgggttggggagcgttatttagcgcggggcgagacgatttgatcgatcgatcgagtttttcggcgttgggggggcgtactccatcgtacctgtttatggagtggccccccccgggcggaaggggttggggacctctaaaccgggggtgggacccaagtgttttctgcgcccgggaattactgcccctgggtggggggggg

SEQ ID NO: 30179 - DNA, 577 bp, Zea mays
  unsure (1)..(577): unsure at all n locations
  Clone ID: MRT4577_127536C.1
ccgnngccgggccggggttnaanaaaaaaaaaaaaaaaaaaaaaaaaaaaaaaaaaaaaaaaaaaaaaaaaaaaaaaaaaaaaaaaaaaaaaaaaaaaaaaaaaaaaaaaaaaaaaaaaaaaaaaaaaaaaaaaggaaaaaaaaaaaaattcccggggggggggggggggggaaagggaaaaaaaaaacaccagagggggggcccaaaaaggggttcccccccccgagtttgccccctgggttaggggtttgaaaaaatttttgaaagggttcatgggccccaaaatttgggtgggggaaaatttgggggggttttttgttcccaagccttttttgggacctcaaaagtttggggggggccggcccttgttcctctttttcgggaaagggttcaagtttgtttttaattacggggggggtttttccttcctggggaaaccccttgtttttgttgtgggaaaggtcaggaaaaaaaaaacccccccgggggggttcggggggggtttttccttccccaaaaccaaggaaaactacggggtggtgaacaaaaccaaggggggtttccgctttcccccaa

SEQ ID NO: 30180 - DNA, 702 bp, Zea mays
  Clone ID: MRT4577_127537C.1
aggcaccgcatcgccacccatgccctgcccgtctcactgacggtggcccccaccgcccggctccgctcgtcggcgagccctcttcccctcctcccccgccccaccgcagtcccggccaagagatccgcccgactccggtcgctcggactcggaggccggcgagccgctcgtgctgggcgccgggatgcaggaggccggcaccagacggtttcccggatcgcgccggcgccgcgtctcggcgagagggggcctctgaactttctgacctcgagtcctcgattttgtcatacatcacacaaataatggagaagttacaagattgcaactcgaaaagcctggttgcccttccaggctctttggttctgcatctctttaggctgtttggccagcaggatcagagttcatggcagaagtacatactaggttcctttctgttggtcagaaagggctgctactcctcaggggagtcgaagaaacactcagatgtgttccgtgatatctcataattagatttctttccatatgctacagattcggacagcgaataacttgaactgaaggagcagaaacctgttccgaaggctcaggcgggaggcgattcaagtggcaacagatcaaacgattgctactttccaggccttcatgatgacctgtctcaagactgccttgcctgggaagcagatcggaccaccctttcctttc

SEQ ID NO: 30181 - DNA, 367 bp, Zea mays
  Clone ID: MRT4577_127538C.1
aatgttaaatagacagataccgtcgcatagggccccgagagggagctaaaggttgcactagagtctttctgggatgggaagagcaccgatgaggatctggaaaaggcagctgccggctctagggccacgtttatggaagcagagagctgatgctgggaacaggtccatacctaacagcaccttcttgaactatgaccagggctttgacaccactgacgtgctgggaactagccctgtacgctactattggactgtacgagaggatcgctgtgtcacctacttatctatgagaagaggaagcgccactgttcgtgctatggacatgaccaagtggtttgacaccaactgccactctattgtccgtgaa

SEQ ID NO: 30182 - DNA, 167 bp, Zea mays
  unsure (1)..(167): unsure at all n locations
  Clone ID: MRT4577_127539C.1
gccttttgttattcctgttgcgtgccctcgctctaacttgcatggcggaccagtaccgacgagcaatcggagtaaggagctnagctttgaaagagngaggtgatataaaaaaganaaaggaaaaagaaganaaaaaaaaaagaaaaaaaaaaaaaaaaaaatggggg

SEQ ID NO: 30183 - DNA, 855 bp, Zea mays
  Clone ID: MRT4577_12753C.1
gttccccgcgcgtgctctcccagtctccctccctccctttctctaagcgcgacgaccggcgccgccaccgccaccgccaccgccttacgccagatacccaggtccgtcttagtcggcaccttctccagcaacaagcacccaacaaatgaatgctttggagcagttggcatccattgatctcattgagctatgcaaggaggctaggattgagcgctgccgtgcaactagagacttgagtagctgtggccgctatgtgcatcatgtgcttaactcatgtggccatgcctcactatgtgctgaatgcagccaaagatgcgacgtctgcccaatttgcaggagtccaataccggacaatggaaacagggttcagctacgtctttactacaagtgcctggaagagggccttatttctaagcagcacgatgaaaggtttcaggaaaaggaagaccatggcaatcctgttagcatggatgtccagcagctgcattcattgttcgatgttgcagtacagaacaatcttacttcccttatttgccactatatcacagatgtttgtttggatgagaatgctgtgtcaagtgatccacttctggcttttcttttggatgaggtggtcatcaaggactggtgcaagagggctgttaatgtgctcattactgagattggtgtgatctataggtctggatcagaaacgatgagatctaggttatcccaactgcaaaagtttgccacacagttggcaggaatttacagcatacttgaaggtatggtttcatctttcaatgaagcagtttcagcgcatgttaatgacctgcaccaactcattgagaagacattgcaggcgaagcagcattt

SEQ ID NO: 30184 - DNA, 409 bp, Zea mays
  Clone ID: MRT4577_127540C.1
aaaatcgggaaatgtaacctcttatttcgggggggccccctccctcatccaaaaaacttattattgaattccccccaagaagccacccaaaaggagggcccccccaaagatgggttgttgggaggaggcccctgggcccgccaaagcaagggggcccaagggccacaattggtgaagttgtaaaaggggggcggggttagccccaaaccgctgggaaaaaggccacaaccggtgctgggtcaaaaaggaaccccggtttgccgcaactagctggccaaaagggaaaaatatttgccgccgcaaaaaagccgcggggtccagggcccccaattggttaaaaggaaaaaattgttgttccctaaaaataggcaaaacctagctggctaaaggggaaaagggggggccgcaa

SEQ ID NO: 30185 - DNA, 363 bp, Zea mays
  Clone ID: MRT4577_127541C.1
gggggggggggggctctacgtcaaactatcctaaatttggcaaacttatagagaataataatatttacaataatagatgaacatcattttcaactcatacatttatgaaatatatttttatagttgatctcctcaatgccactaatacttaatactcttttctatgaactttggccaacctgcataatacacatgttacgtttggcatttggttctcgacaatacctcaacacttgatttggtgctcttgagacccgctcttgaaaagatgtccaacatttgttgtcagaatcggcctcaaattgatccatccatgactgcatcatagcatcagggttcccatgtctttgcattaccaacaac

SEQ ID NO: 30186 - DNA, 395 bp, Zea mays
  Clone ID: MRT4577_127542C.1
caccacgtacaaaccctcatcgcctgacacgtgcatacgcgtataggatgaggctgctatcacgaatgaggatatctatgaggagattaatgagtataactttgatgagatggcaaatgactagtatgctaggggggcatatgactagtatgcactcagagcaaataacgagggatcattcaaggatatgaatgaagcattgttgatgattgttgtgtcacatatggagatgattgcagggatatatattgacataattaccatgcttatgatggacaaaaccactgttcctatcatactagctcacactgattggcacaatctatctgaccaagaaggagatgctgcttgaactataatgacatttgctgcatgaactattatgaccattgatg

SEQ ID NO: 30187 - DNA, 1660 bp, Zea mays
  Clone ID: MRT4577_127543C.1
gtttgtgtaccgcaacacccccgccgactccctcgccgccgccaggaatgtagtccagcgctaagaagcttatcagcctccgtatcacctcacttgatgacgaaaccgaggaaaccgaggacccgcatcagccccctccagcaggaccctccgccgctgcagcagattctgatgacgacgatgaagaggaagaagtggaagtgactctcggtgtccttagcaaaccgaaacacccaggcctccttctccgccacttgttccccagcaaggccggcggcatcccggcgtggctagaccccgtgaacttgccgtcggagaagtccagctgctgcggtttttgtggcgagcctttgcagttcgttcttcagatttatgcagcagttgaagacaatgtagcagccttccatcgaactctgttcatgttcatgtgcccatccatggcgtgcttgcttcgagatcaacatgaacaatggaagcacaagcatgggaatccatgtagaagcgtgaaggttttccggtgtcaattgccacggactaatgccttctactcagttcaacctccaaagcatgaccggtctgacaaaccactgtgtccaggagcccatgtatgccactggtgtggtacctggaaaggtgataaaatatgtagtagctgtaagaaagcaagatactgttctgagaaacatcaggcactgcattggcgtactggtcataaaaatgattgcctccagataataagttcttccgctgcttcaaattcagttttgccaactgttggaaaagttcctgctaacacttcttggccagaatttgagataaaaatagactatgaaggtagatttgattgcgatagtggtgatgagaataactcgaagttgttggtgatgcaaagacatgggaaacctgatgctatgatgcagtcatggatggatcaatttgaggctgattctgacaacaaatgctgggcatcttttcaagagcgggtctcaagagcaccaaatcaagtgttgaggtattgtcgagaaccaaatgctaaacctctctgggcgttatcttctgggtgtccatcaaatgctgatatcccatcatgtagctactgtaaagatccattatgctatgaatttcaggtaatgccacaattgctatatttctttggtgtgggaaatcaaccagactcccttgactgggcaacaattgctgtctacacgtgtcaaggggcatgtgaccaaagtgttagctacaaagaggagtttgcttgggttcaattgtaccctacaacaactacgaggcaataataatgtttgcctattccttgctgtccaatgctgcaggtgtcaaaaagtttgcagaaagtcagaaacaattcagtaaatacccccaccagaagaattggaggttgggatgctcgaggcagtgagtagtgagagcttcttgattcccattattgcacttatgccgagtatagatattttaagtttcacttgttctacattttaggtgcctgattttttttttgttcaggcaataggcaatgttgttattgtttgaatataaaaaaaacatgaattgtctcttgtgagttatctttttaattgtactagttggttgtataagattgttgcatgctcaaaacgcaggcacttgaaatatagtaactctc

SEQ ID NO: 30188 - DNA, 368 bp, Zea mays
  Clone ID: MRT4577_127544C.1
cgagtacaagcttttttttttttttttttttttttttttttgttttttttttttttttttttttttttttttttttttttatttttttttttttttttttttttttttttttttttttttattattgcaacttacacaataatgccggtgccggagaagaaaccatcaaaaaaaaagggggacttttaaaaaaaaaacaaccaggctaaaaaaaaaccggccgaaaagaagccaaacaggggtcgaagaaagaagagcccaactagggagctttccacaaaaaagcggggggtgaacaaaacgaaaagggggggggggataaaaccacggatcatcaaacaaaaaatggcgtaatctatcataatgcc

SEQ ID NO: 30189 - DNA, 1976 bp, Zea mays
  Clone ID: MRT4577_127545C.1
ctcgaattccgttgcttgcgcggcaaagggcaaagtgggaaacaatcaagttccacaaaatcgcatctcatccgcttcgaccccaccgaggactcccttctttcctcccactcccatctgctctcctcgccgccacctgcgccgtcagagcacggagcagtccgcgaccacgctttcgctgccgctctccgacaggcgacggagccgcagctccagtcgcagtcggctcccctgaattcgggctcgccaaataccctccaatcgtctgcgtccgtcgtccgggacttccggtgcaactgaatccggcaccacctgtgccgcctgtcatggcacttggaagaggagggaggagggactcaagaggttaaggtaccgtatttatagatttggcccacgcgtccgcataagagtattatatagactcaaagtaatagtctgagttaatgattatggcattctaccaaatttctaactttggatacgagtttatatttagagacaccgataatttcatatatttttttctggctgttgctttcgctatgcctgattgaactgaattaataaatttagctgttgggttggattttacactagttcattattgtttcttttgttggtggtatgaaagttcttcccaaaacttgttattactaattcctcttaccatgtgcagggcttgcaaatggtggagtggaagtcaagcaaacacctgcaagtcctgtacccaaatcagttgaatcctcacttccacttgtcaagatacccacaccagaatcaagcaaagagaacagcggtgttatgtggatatcctcacctgatcggcttgaagatcctcgaaggccatttcagtactctaacagttctggctctccctgtgtttcagaatcaggatctgacatttatggcaaaagagaggtcatacagaagctaagacagcacctcaagaaacgtgatgagatgatcatggagatgcaaactcagattgctgatcttaagaactctcttaacattcaggtgacacagtccagcaatctgcagtctcaattggatgctgccaatcgtgatctgtttgaatctgaacgagagattcagcatctaaggaagattattgcagatcattgtgtcacagaagcactctctcatgataaacctttgcaagctgcgcattggcagccagatgccgcaaatgggcattctaatggctatggtgatggttgtgttgatgatgctgacctgcattgtattagcatcgagaagaggaaggtagaagtagagagggtggagatgctcaagaaagaggtggttgaactgaaggaagtcattgagggaaaggactttgtgcttcagagctacaaggaacagaaggtggaactcttctcaaagatcagggagttgcaggaaaagctctcagcacaagtgccaatcatcttgtaggatctatctgtgatactttttagaagattgaatctaagcataatgttgccatgtcccatgagcagcagagggggtcccgcttcagtgaagattgcagaaggtcttggcatttggcaatcgtcacgcatgccaaacaccatgctaggatctttgtggaatgcttctcttttcctttgaggggagctttgcataatgttaggttgatttgtttctttcttggttgtcataatgttaggttggtttgctttcttccttcttcaatatctagcccttggttgctcaaagtttacaaagggattctttttttcagttgctaggcctcaggtaactcaattgaacttcatactcaagttgctgtacaggttctcagatttcaggagacacagaagtctgtactgtgcctctgcctcctgtttcatgcttttttttttgttaagtgatctttggaatgttaggtccatgacatttctactatgagatttgaagactatggcattgcccttttttgtgattaaaaaaaaaaaaagagcccggccccc

SEQ ID NO: 30190 - DNA, 1735 bp, Zea mays
  Clone ID: MRT4577_127546C.1
ctcgaggcctggccgggaccgacgcggggcccatgcctcggctcccgcgttctacccgcgcgctgtggtgaggtctccgtgggagagaaccagctccgtggacccggtctgttttacacataggcggagcaggccacttcgcgtgctgttcagtgcggtgttagactatgcaccgggtccacggttcagatcccgcgggacgcagagaggaggaggctttggcccgattcgcgcggcccggccccggatcgaacgatttgggggaggaggtgttctattacacaaaagaggcaaaaaacaaaagccggtaacggaaaccctaatccccccaaatcccgaatccctctcgaatttctatttaatgttcctgttcttcccctccgatccgatgtccccaactgcgctcccgtcggcgatcaaacaccggatcgcggcactcgccgccgttgaggaggaggtttccggcgctgcttccagcgccttgccgtcagcaccatgaggaagaagctggacacgcgtttccccgctcctcggattaaaaagatcatgcaaacagatgaagacgtcggcaagattgctcaagctgtacctgttctagtgtccaaagcattggagctatttctgcaagatttatgtgataggacatatgatattacaattcggaagggggtcaagactgtgggttcttcccatttgaaacaatgcatacaaacgtacaacgtctatgacttcttgagggaagtagtcagcaaagttccagacattggtccttctgatgttattgctgatgataagcttggcaaaaggaggaaagccgaagaagatggaagtgaggaagaattgaagaggacaagaaatgagacagaaagctatacaagcaatggcagaggccgtgggagaggtcgtgggagaggtcgccgtggtgtacgtggagcttggcgggaggtggtcacaagtcctgagcaattcaaggaggagaatcaatctagcaaggtagccagcctaaaggtggaggtagcagatgaggtctcgaatgtaactgaagcaaaacaggacactacaccaatgagcaacgccaggccttccttaaggaacattgacttgaatttagatccaaccgatgaagaggatgaggttacagtgccaccccaaccccagctgtcagctccagcaactagttgcgatgcagccactgcagcacctggaccatctgttccacggttaagggaaggagcaaaactcaaggacttctttggtgcttgggaactggctgacatgaacaagatggagatggaccctgtccagtttgctctgtcaacaaaccatagattggaggaggacgaggattatgacaatgaagactagctccgccgttatatagcttcagagttgatgagtaggaatagcaggacaactgtaggttcagcttaactctgtagcagttctcatgtatcatatagccgccaaagctgccgatgtagcttataatgtcccagaggttaaggtcgtttgactagttgactgtaatgttctcaagttaggttctattagcagctattgctttcgcagatagtaccgtttgtacattccagttgctctccagttttatgttatctatccttctgctttcttggatagctgagacctgttggcggatgtatcatgtatggcaagttggcaacaaaaagcaagaaggctttcagattccttagcacatctcattctattacagtgg

SEQ ID NO: 30191 - DNA, 231 bp, Zea mays
  Clone ID: MRT4577_127547C.1
gcacgaggggggaagctgatgatttaccacttacaaactgccctgcccctgctttccacatagcatttcgaactttttgactactattgacacccccctaacttgccgaactatttctctcttcagctactatttacctagttataattacataaatgtttgtgcgtatcttgtgcaggttgcatcacgaccaaggagctgggcactgtcatgcgctcgctggggcaaaat

SEQ ID NO: 30192 - DNA, 443 bp, Zea mays
  Clone ID: MRT4577_127548C.1
gttctataacatgatttggatgtgcttcctcaacatgatatgaaagagattgctgaatgtatatatgtggaagccatacctattcttctgcaaaatcatacaagcaacttgttggtaactttctaactcatttagtttcagttggatgtgggcatccaaatggcaaccaaagcacatatgttttttgattgttgcttaatgatcgactcaaaaccaaaatgttcttaggagaaaattatgcaactagagtcatacacatgtgaaaatattgtattctccaaatagaggaaacaatggtgcacctatttgtaaaatgtaattttgctaaagcatgttgggattcaattaggctctttcctccatgaacaagttgcccacaaagagcaatcaatagacttaggatacaactagaagtgtcatgtgacatgaagggtgtggagtat

SEQ ID NO: 30193 - DNA, 289 bp, Zea mays
  Clone ID: MRT4577_127549C.1
acaccggcggatccggtccctgctggcgtccccgtgttcgctgaggatggacactaggccggcctccgcgggctcccggggccgccccgcgcacgctacggaggacgacgacagggaggagggagagatcgtcgtcgacacccccgcgcccgtcgtgcgggggggcggcctcttgtgctcttgtgcaccttgtgctttgccaccccggaaggtggtaacagctggccgcctgtgggagctccatccgtcctttgcactccttctgctccgctaagggcttttggggcct

SEQ ID NO: 30194 - DNA, 757 bp, Zea mays
  unsure (1)..(757): unsure at all n locations
  Clone ID: MRT4577_12754C.1
catgaatggatgatctagagttttggatacagatcacgccagtctcagtaatgagcgcattaacagccttcttgcaccagtccttgatgaccacctcatccaaaagaanagccagaagtggatcacttgacatagcattctcatccaaaccaaacatctgtgatatctggtcaaaatgttaagaaaccaacagaaaaagatgtggtatggaaatgcataggcagcctccagaggaggatatagtggcaaataagggaagtaagattgttctggactgcaacatcaaacaatgaatgcagccgctggacatccatgctaacaggattgacatggtcttccttttcctgaaacttgtcatcgtgctgcttagaaataaggcccgcttccaggcacttgtagtaaagacataggtgaaccctatttccattgtccgatattggactcctgcagattgggcagacgtcacatctttggctgcactcagcacataatgaggcatggccacatgagttaagcacatggtgcacatagcgaccacagctactcaagtctctagttgcacgacaacgctcaattctggcctcctttcatagctcgatgagatcaatggatgccaactgctccaaagcattctcggtcttctgctcatcgagcgtctgctgctcgatctgggtggcgagctcctccgcggtctgcgacggcgatggactcgagcggaaggggaacgagggctctttgctcgcgtggacggttgcga

SEQ ID NO: 30195 - DNA, 530 bp, Zea mays
  Clone ID: MRT4577_127550C.1
caacttcgtgaagaaatgctatttatagcagaattgcaggtagacaatacattataaggagaaatctgtaatggcatgaccatgctgcatacacgtagttatttatttactaatataaataataataagcgcacgcacaaattgcaggggatgaatcgtgatcgtgagagcgcgtgggcatggcagccgcctccttgctcagttgctcttggccattgactcgtgctgccccaggaacggcgcgtcggcgttggcgtcgctgcagtagaggcaggggtgctgctggaacccctgctcgccgagcacctccctggcgcggagcaccacctcccggttgctcatcggcgccgggtgtgccgccagcacggcctgcagcgcggcgctgaacgccccgcacgcgctgccgccgccggccgccgcgacgtccgccgacgtctcgtccgtctggcacccgctcagcaggatcccggcgtcgtcgtcgtcagtgcgcgcggcggcgccgctgctgttgccgtggtggcggtggaagc

SEQ ID NO: 30196 - DNA, 550 bp, Zea mays
  Clone ID: MRT4577_127551C.1
aattcggcacgaggagagcaccctccacctggtgctccgtctcaggggtggcatgcagatctttgtgaagacactcactggcaagacaatcacccttgaggtggagtcttcggataccattgacaatgtcaaggccaagatccaggacaaggagggcatcccaccggaccagcagcgcctcatcttcgccggcaagcagctggaggatggccgcaccctggcggattacaacatccagaaggagagcactctccacctggtgctccgcctcaggggtggcatgcagatttttgtgaagacattgactggcaagactatcaccttgtgctccgtctccgtggtggtcagtaagtcatgggtcgtttaagctgccgatgtgcctgcgtcgtctggtgccctctccatatggaggttgtcgaagtatctgctgttcgtgtcagtgttggtttaataatggaccggttgtgttgtgtgtgcgtactacccagaactatgacaaatcatgaataagtttgttgtttgaaattaaagcctgtgctcattatgtttt

SEQ ID NO: 30197 - DNA, 498 bp, Zea mays
  Clone ID: MRT4577_127552C.1
cgccgtttgtctcacgcgccttcatttcggcctttgtcccttgcacgttcaatctgacctccaaccatgggtaaagagaagacccacatgaacattgatgatatcgaccatgtcatccctgacaagtggaccaccacaggacaccttatctacaagctgggaggcactgacaagcgggcgatcaaaaggatcgtgatggaggctgctgaaatgaacaagcggtccctcaagtacgcgtgggtgctcgacaagctcaaggctgagcgtgagagaagtatcaccagcgatatcactactgggaaggtcgagaccaccaagtactactgcgcggtcattgatgcccctggacaccaggacttcatcaagaacatgatcactgatacctcccatgctgactgtgctgtgcttatcattgactacaccactggaggttttgaggctgagatcttcaaggatggccagacccgtgaacatgctcatcttgcgttcacccttgag

SEQ ID NO: 30198 - DNA, 484 bp, Zea mays
  Clone ID: MRT4577_127553C.1
caaacaacaaacttattcatgatttgtcatagttctgggtagtacgcacacacaacacaaccggtccatttttaaaccaacactgacacgaacagcagatacttttacaacctccatatggaggggggggggggcgacgcaggcacatcggcagcttaaacgacccatgacttactgaccaccacggagacggagcacaaggtggagggtgctctccttttggatgttgtagtctgctagggtgcggccatcctccagctgtttgccggcgaagatcagacgctgctggtccggggggatgccctccttgtcctggatcttcgccttcacattgtcgatggtgtccgagctctcaacctccagggttttggtttttccagtcagggttttcactaagttctgcgttccacccctgtggcggtttacaaggggaagggtgctttccttctgggtttgttgttcgggagagtgcggccttccttca

SEQ ID NO: 30199 - DNA, 1240 bp, Zea mays
  Clone ID: MRT4577_127554C.1
gagccgggcaccgccgccgacaagccccccacgtacccctgcggctcgtcccgccgaaagggcgttgtcgacaaggtcgagaagaaggtgatcatcaaggaggaaaaggtcttagtgtattagtgcgctacctagctagtggagccgtggcaacgagcagaggtgtgcctagctagctcatcgatcaacgagtgagtagtagcaccatcaccatggcagacaagaagaaggtggaggtcaaagagacgaaggtggaggtgaagacggccgtctacaaggtgtacgtccactgcggccagtgcgcgcgcgacatccagacgcagttcaccgagttccaaggggttgaagaggtgaaagtggacgccggggccgggaaggtgacagtgaagggcttcggcttcgacgtcgagaagctgaggaagaaagtcgagaagggttgccggaagaaggtcgagctgattccgcccgcgcctcccaaggacgacatggtcgttgatgtcaagaccaaaaaggaggagctcaaggtcataactgtaaagctgccgttgcattgccccgattgtgcagtcagggtcaaggaggttttgcttgagaacaagagtatctacgaggccaagacggatctcggcaagaacacgtgcaccatcgagggtgtcattgaggaggacaagctcgtcaagtacatctacgagaggatgcgcaagaagggcgtcgtcgacaaggtcgagaagaaggtgatcatcaaggaggagaaggtcttagtgaagaaggcggataaggagaaggagaagaaggagaaggagaaggagaaagaaaaggagaaggccaaggagaaggtgaaggaggctgtcgacaaggtcaaggaggtcatcgccccctacttcatcccctgcacgcacccgaacttcgtcgactactcgcacccctggcaccgcggcggcggcggctactgctcgtcgtacggcgacggttacggctacggctacggcgggggctgcggagggtacccaccgtacggtttcagctacacacactctgagctcaaaggctaccatgacacgtcgttcttgcactgcacacaccccaatgagttcatcagcgaggagaacccctacgcgtgcgctgtgatgtagcctctctttttttgcgcttggattcaagtcgaataatttgaacactaagaacaacaccaacgtacggatggctcaaattttctcttttgcttcggctcagatttgtt

SEQ ID NO: 30200 - DNA, 407 bp, Zea mays
  Clone ID: MRT4577_127555C.1
cctacttcgtcgccaccgcagcaggtgcccccgtccgcgacttcctttccttcttgaccatctgttcgcgccacccctctccggacaggcgtcggtcttccctcatctaggcgcggcgcgggtctctgtcccgcccccctgctcgcctgcgcggcccgccgcgtgccccccttcgcacttcttccgtcacccgcgtcgacaacgccctgtctagttgaatccgatgcagcccccctgcctgcctggacccgccctgtcgtacttccccttcttcgtcgccgccacggcgggatctgtcgctgtcgtggccttcccgacggatccaccattatcgcgtcctttccggctgaatccaccattcctttggctggatcgcgacttcatggctagatccgtcgctgccgtgg

SEQ ID NO: 30201 - DNA, 649 bp, Zea mays
  Clone ID: MRT4577_127556C.1
tgagctctgacactattgacaatgtgaaggccaagatccaggacaaggagggcattcccccagaccagcagcgtctgatctttgccggcaagcagctggaggatggccgtaccctcgctgactacaacatccagaaggagagcaccctccacctggtgctccgcctgaggggtggtatgcagatctttgtgaagaccttgactggcaagaccattaccttggaggttgagagctctgacaccatcgacaatgtgaaagctaagatccaggacaaggaggggatccccccggaccagcagcgtctgatcttcgccggcaagcagctggaggatggccgcacccttgcagactacaatatccagaaggagagcaccctccatctggtgctccgtctccgcggtggtcagtaagccgtgggtcgtttaagctgccgctgtacctgtgtcgtctggtgccttctggtgtacctgggaggttgtcgtctatcaagtatctgtggttggtgtcatgagtcagtgagtcccaatactgttcgtgtcctgtgtgcattatacccaaaactgttatgggcaaatcatgaataagcttgatgttcgaacttaaaagtctctgctcaatatggtattatggttgtttttgttcgtctcct

SEQ ID NO: 30202 - DNA, 495 bp, Zea mays
  unsure (1)..(495): unsure at all n locations
  Clone ID: MRT4577_127557C.1
gccggcccttttttttntttttttatattttaaaccatcaaaccttattcaatgatttggtattatttttgggtattccccacccccaccccacccggtccattataaaaccacccctgccacaactcatgacacaaacagcatatcctttgccaccctccatagggaaagagggccccaaacaacgcaggcccatcggaagcttaaacaacccataacttactgaccaccacggaaacggaccacaagggggagggggctctcctttagaatgttgtattctgctagggtgcgaccatcctccacctgtttgccggcaaaaatcaaaccctgctgttccggggggatgccctccttgtcctgaatcttcgccttcacattgtcgatggtgtccgagctctcaacctccaaggttatggtttttccagtcagggtctttacaaagatctgcataccacctctgaggcggagaacaaggtgaagggtgctctcctt

SEQ ID NO: 30203 - DNA, 186 bp, Zea mays
  Clone ID: MRT4577_127558C.1
ctgtcacgtctgatcaaccctcaaggccaacataggtgcatgtacactcagttccctttgtacggggcagtacgtgctcatacagttaatacgacaaactattctgcttagctaaaaccttctattgccacactatccagactattatactagacaaacaatgccttgagaggatcacacactact

SEQ ID NO: 30204 - DNA, 199 bp, Zea mays
  Clone ID: MRT4577_127559C.1
gcgtctcgtacgttttatttgcccaccattttttcagaatttccccagaactttactgcgggtgcaaatgtactctttatgggaatccacaatcctttttacctagttagtcataattacatgtacacttgagtaaatcgtgaacactacaaggtttctcgttgtttaaaaagactttttatcttattcggtctaatta

SEQ ID NO: 30205 - DNA, 653 bp, Zea mays
  Clone ID: MRT4577_12755C.1
aatgaatggatcaggaagtgtgtttgcaaatccgtgtaagggtgacttgaatatgagcactctaatgtaccgcccttttggtagctgggctggtaacagcgagtggtcaatgagatttgaaggtgaagatgtgaaggctctggctcttggtgctggatgggttgctgcagtctttagcttaaattttttgcgcattttcaccgaaggaggcttgcagatgcatatcctctcagttagtggcccggttgttacagcagcaggttatgaagaccagctagctattgtgtcacatgcttctgattgtttgccctctggagatcaggtgctggatgttaaagtattcaacatatctgaggggacacaatcaatgtccggtcgccttgttttgacaccattgtctcgattatcttggtttggattcagtgagaatggccaacttagttcatatgattccaagggaattctgagggttttttccaatcagtttggtggaagttggcttccattatttagttcggtcaaggcaagaaaatctgaagatgaaagccattgggtggtcggtttggatgcaaataatatattctgcattctatgcaaaacccctcaatcttatccacaggtgatgcccaagcctgtgctaagcatacttgagc

SEQ ID NO: 30206 - DNA, 661 bp, Zea mays
  Clone ID: MRT4577_127560C.1
gagagcattggtttttctaaatatggcgcccctgctgttgctgcgtaggcgcgtagcttttgtgctggctgccgaccgagacgagctgacagtaacaggcgcgcgatggccggcggcgtccacgaagcgcgcgccggcggcagcaggccacggtggcgtcgtccgcggcgcgtgctgatgttcccgctgccgttccagggccacatcaacccgatgctgcagctgggcgacgcgctgcacgcgcgggggctcgccgtgaccgtgctccacgcgcgcctcaacgcgccggaccccgcgcgccacccggagttccggttcgtgccggtgcccgacggcgtcccggcccacgtcgcggcgcgcgggaacgtcatcgacatcatcgaggccatgaacgcggccatggaggcggacggctcggggcccgtcagggcagtcctcgagtcggtggtcgcggacgtggagcagccccctgccggttgattggttttgaaggcaaacttcttggcggggccaagggttgcttgggccgtgggcttaagacgcttgtgctgcgcaccgcgagcgcgggctggcttggatgctctatggcgtaccccatgcgttaccagaaggggtacctgtcgccgcaagagtatgacctctacatgccggtgaaagagct

SEQ ID NO: 30207 - DNA, 438 bp, Zea mays
  Clone ID: MRT4577_127561C.1
aaaacaacaaacttattcatgattggaatagttcggggtaggacgcacacacaacacaaccggtccattattaaaccaacactgacacgaacagcagatacttcgacaacctccatatggagagggcaccagacgacgcaggcacatgggcagcttaaacgacccatgacttactgaccaccacggagacggagcacaagggggagggggctctcctttgggatgttgtagcctgctagggggcggccatcctccagctgtttgccggcgaaaatcaaacgctgctggaccggggggatgccctccttgtcctggatcttggccttcacattgtcgatggggaccaagctctcaacctccagggttatggttttttcaggcagggccttcacaaaaacgtggataccaccccgggggcggagaacaaggggagggggg

SEQ ID NO: 30208 - DNA, 504 bp, Zea mays
  Clone ID: MRT4577_127562C.1
aacaacaaacttattcatgatttgtcataggggtgggaagttcacacacacaacacaaccggtccattattaaaccaacactgacacgaacaggagatactttgacaacctccatatggagagggcaccagacgaagcaggcacattggcagcttaaacgacccatgacttactgaccaccacggagacggagcacaagggggagggagctctccttttgaatgttgtagccctgctagggggcggccatcctccagctgtttgccggggaaaaacaaacactgctggtccggggggatgccctccttgtcctggatcttaaccttacacattgtcaaaggcgcccaagcttctaacctccagggttatggttttttcatccagggttttaccaaaaaatctgcataccaccccctgaagcgggaaaaacagggtgaagggcggctcttccattccttggaatgttcgagaatcccaccaaaaaaaggcggaccaattccttca

SEQ ID NO: 30209 - DNA, 410 bp, Zea mays
  Clone ID: MRT4577_127563C.1
caaacaacaaacttattcatgatttgtcatagttctgggtagtacgcacacacaacacaaccggtccattattaaaccaacactgacacgaacagcagatactttgacaacctccatatggagagggcaccagacgacgcaggcacatcggcagcttaaacgacccatgacttactgaccaccacggaaacggagcacaagggggaggggggctttctttgggatttttgaacttgtaaggggcgggcattctctaaatttttttgccggaaaatatcaaactctgtttggccggagggatgccctccttgtcctggatcttcgcctttacattgtcgatggtgtccgagctctcaaccttcagggttatggtttttacagttaggggccttcacaaagatttgaatacc

SEQ ID NO: 30210 - DNA, 577 bp, Zea mays
  Clone ID: MRT4577_127564C.1
ttttaaaaaccttttttttttttttaaaacaacaaatttattcatgatttgccatagttctgggtagtacgcacacacaacacaaccggtccattattaaaccaacactgacacaaacagcagatacttcgacaacctccatatggagagggcaccaaacgacgcaggcacatcggcagcttaaacgacccatgacttactgaccaccacggagagggagcacaagggggagggggctctccttttggatgttgtagcctgctagggggcggccatcctccagctgttggccggcgaaaatcaaacgctgctggtccggggggatgccctccttgccctggatcttcgccttcacattgccgatggggtccgagctctcaacctccagggttatggtttttccagccagggccttcacaaagatctggttaccacccctgaggcggagaacaaggggaagggtgctctccttctggatgttggagcccgggagagggcggccctcctccagctggtggcccggtaggatcagacgcctgctggtctggcggaatcgcctgctttgcgctggttggtc

SEQ ID NO: 30211 - DNA, 318 bp, Zea mays
  Clone ID: MRT4577_127565C.1
cgtccgcgcacgcgtccgcggacgcgtgggcttacgcgtttgctgacgcgtggaaggatttggaaatcgggaatttttaaaagcgtgctgctaatcatgcaaaggagcctaagaatgtaaatcgaatatcactgacgactaataaagtacaacctgatcaatcagcaagccaaccaaaacatgttgccaatgcctaaaagtaccgaggtcttattacatattagctagagagtatttcttacatacatccaaaacaaccgtttaaatattgataggatattgccatcgaatcaacacctggttcactattaaatacac

SEQ ID NO: 30212 - DNA, 322 bp, Zea mays
  Clone ID: MRT4577_127566C.1
caaacatcaaacttattcatgatttggcatagttctgggtaggacccacacacaacacaaccggtccattattaaaccaacactgacacgacttatgacacgaacaggagatactttgacaacctccatatggggagggggcaccagacgacccaggcacattgggaggttaaacgacccatgacttactgaccaccacggggacggggcacaagggggggggggctctccttttggatgttgtagtctgctagggggcggccatcctccaactgtttgccggcgaaaaacaaacccttctgggccggggggatgccctcct

SEQ ID NO: 30213 - DNA, 331 bp, Zea mays
  Clone ID: MRT4577_127567C.1
ggcaacaggaaaatacctgggtgtattatcatatgctgatgagcacaaccagtagcgaagcttgagtaaggcaggggatgatacatataccttgaggatgcatgataacaagttacaggtgacgcatatatggtaaaactgtggtacaaaccactatatttccattgttttgggtgcatgtgcaccccttaatttttacgtagcggaactgcggctttgaccacaacaacaaaaaagctattgtaacacctatatccactggtgcggatactaattgatgtcagacctatacccatgtggatatgggtcaccgttcctgaagaaacacaca

SEQ ID NO: 30214 - DNA, 231 bp, Zea mays
  Clone ID: MRT4577_127568C.1
cgcgagctgtgtgttctcatggacgagaagagctgtgcccggggggggttctttctagtgaggccctgggcggggacctttgacgtgtcgtccaagaccggcggcccgttcgggactatgaagaccccggtggagctgtggcacgtcgtcaacgcggggctggttatcatgttgtggattgccacccccctgtagggggtgattgctcacggttgctctacatgtatctta

SEQ ID NO: 30215 - DNA, 367 bp, Zea mays
  Clone ID: MRT4577_127569C.1
cagagacgcgccctcaaccaacacccggtctggagctctctgaatctgtgcttctacccggccaacttcctcctccaaatgcagcaagccctgcctcaccactaccagcagcaggagcagcaccatgaaggccacgacgacgaggaccacgaggcggcgcaccatctcctggctccccctcccgcggccctcgtcagccctttcctccacgacttcggcggcgccatggcggccgcgccgccgccgccaatgctggccggcggcttcggcggcaagcgcatgtatccagacgtcggcgggatggccggcgacgacagccaccacctgcacgcggagccccagcagcagcaggagcagcaggcgtcgg

SEQ ID NO: 30216 - DNA, 1376 bp, Zea mays
  Clone ID: MRT4577_12756C.1
ccccgcgtccgcttcaccagtccatttttaatatgttctatgaactttttcagtattcaacgtaggtgactactgattacagaagtatagattcaatgtaggttctacatacagctatttatgttttccaagataaaatgtcgtgtttttcatgatctaccttttttttcatacaggagcctgatcacgaatcagcaccagttgatgggacatcagcggatgaagagagtgatagcaacatatttcaggaattcggcaccaggcatgatagaggtaattggtaagggaaagtttgaaagaattataggatcccatctaggcggcggtactatccttggtcttgctaggcttttgactggttgttcaagttacgaagaattcctggagttgagtcagaggggcaataatctgtctgtcgatttgactgtgggggacatatatggggaagaaggttacccgaagattggccttccagcatccactactgcggctagctttggaaaagtgaactcaagcaaactttctgagtataaagtagaggatcttgctgcagccttactgaattctttcacatacaacattggacagatagcctactttgtggctaatctttcaggcctgaagagaattttcttccgaggtgcttatgtctgtggtcatgagaagactatggacaagatttctcgttccctaaaatattggtccaaaggtgaagttcagacgacatttctatgccatgaagggttcttgggaacactaggtgcattttggagttatgagaacatggggatcgacagtttggcggcacatgaagtcatcagggaagtcttgcttggtgcaccatacacagggcaattcccatctttacctgtcactcaacaacaggagaatggagaacatggtactctcgaaggggaagtagaaagcttacgacatgacaatgccttgctgaaggctgaggttgagcgattacaaagggagaatgcgttgctaagagctaagttggtaagatcaggcgagacttcaacattgtgatttgtaacataataaaaaaggcgagccgcagcttgttgtaaattgtatctatttagaaaatggctcaaaatgtaactcatataggaaaactgaattctggaaaagaaatgccaattagcattgttcatctagtgagccttgttgtataattatttatatattctttatacaagagcctatgtatttgctccgttcatgtaatcttgttcctgtaaatgttgtataaatagttaccaaaatccaggaagtatccggctttgtaattttgtcgaaatagtagtgtatgtttccaagttccctttggaaaaaaaactttgggtgagattgaagcgttctatttt

SEQ ID NO: 30217 - DNA, 521 bp, Zea mays
  unsure (1)..(521): unsure at all n locations
  Clone ID: MRT4577_127570C.1
ccgtccgctgctnngctgcttnnatttgcaaccaactatactacncnnattcagtcanngctagctnngctgcctacgcgcccnnagcaatttgcttccatttcannaccaactgnngcagcattgaacctctgctnnngcttatttacccaacagnncaacagcntnnaccaccannttcagccagcttanngctgatgtganngccctgttgcnncttcttgacaccannacaacagnnttgttgggccgttctaaacctgcannngctgcgcnnctaacgcnntggcaccctttcttaccaactnggcaacaattggctgcnncattcannaccaacttgggctttgacccaaacccannacagcgttctaaccanacaacnnccatcannttggtggtgggccctctnnttagaattgggcttatgagttattacccttcaataatggannagttttttgggatgaaatgtttggtggctttttcccagannnataagaaaaggtacaaaatttcta

SEQ ID NO: 30218 - DNA, 209 bp, Zea mays
  Clone ID: MRT4577_127571C.1
cagaggagagagaaagtcaaaaggcaacaccgcccgcgacgaccacgatggcagcctcgctccaagtccaagccgcggccaccttggatgcaaccgggcaagatcggggggcgggcgccgttcggcttgcttgcgttgttcccccccttgttgcaacttgccagggggtttggggttgacccccgcgcccccaagatcacctgcttcct

SEQ ID NO: 30219 - DNA, 312 bp, Zea mays
  Clone ID: MRT4577_127572C.1
gcggcctttttttattttttttttttttttttttttttttttttggttttttttatttttttggggttttttttttttttttttttaggggaagttggacaccggtttttttatacaaaggttatgcaaggttacctttggatttaaaaatttaaaaaccccgccctggcagggccccggggaaaaaccaaccttttaaaatttaaaaatgggaaggggcaaattttttaaccccaaattgggcgaaaattttagggggttttgtttggtaagggccctgcaatggatgagcagcttcatgagggtgcctgg

SEQ ID NO: 30220 - DNA, 151 bp, Zea mays
  Clone ID: MRT4577_127573C.1
gtccgtcttatgattggtgtttacccatgttttacatgaggctcgcgggtgctattttcatggcctgctcgtcttttgggttgctttctgccctgtcttgggtttgcccctccttgggggggggggggggggggcgcctcccccctggggg

SEQ ID NO: 30221 - DNA, 535 bp, Zea mays
  Clone ID: MRT4577_127574C.1
ttctctatctcatccggccatggtgaagcataccggtcccacacgtgtaacggatcgaggacgctggctagagggcgtacacacgtaacaaccggcgatcggagcctttggtgatgaggaggggcacgttctacatggtggctattggcaggcgcggacccgagacgccagagcacatcttttccaacgcacagcagacatactgtgaacctcctcctactgaacgcgcacgctccggccgaacaccactgtacttatcaccattaagaatcactatatggctccctatcacttaggacgggatcttggccggttctctcaccagccttttttttgcaagccattctatagacactgtcttttattcggacaccagctggagggcgctggtctgcacgacctaaaatgctaaaccgttctggctgcgactgcacatacctagctcttggagcatttcatcaactacctgcacatactcatattctagttcgtcggcagtgacctccgcattcagatctactgatccctcataact

SEQ ID NO: 30222 - DNA, 758 bp, Zea mays
  unsure (1)..(758): unsure at all n locations
  Clone ID: MRT4577_127575C.1
aattggctgctcccatttcttctgtagctacccgagagctgactaaggctgctgctcgcatttcttctgtagctagcaatagcaatctctcttgctccctgcaagaaaaaaaagagagagagagctagcgagggagaaagatcgataatcgtcaagcaaatcttgacttctgagctagcttccgatccatatatatacacacacgttgctcactgctgtgcacagctgcagcgcgcccatggcgacgacaaggaagcatgtgtccgtccccgccatcctgctagcgctggccgtcctctcctgcctactcctcgtctccgcggcgggcaaccggagggctctgctgccgagggagccagccgacacctacgccagtggtggacgtggacaggtggtgttgccgacgacgacgacggcggcggcggaggagggtgctgccgtgctgggagctgagctcgctgaagccgagcgggacgagacgatggtggtggatacagcggcaggagggcggggctgctgcagactcagactaccccggggtctgggcccaacggccgcaacgatccgcggaacccgcactgattctgattgagtttgtattgtcgtcccagatgcatgcgctgcctcgacactgaacaacacaacacgtataattatgcgtataacgtatattatatacatacggcatgtttagtcacaccataattttgcatatctagctaacacancgtataagtagttcacatatgaaaggaaaa

SEQ ID NO: 30223 - DNA, 157 bp, Zea mays
  unsure (1)..(157): unsure at all n locations
  Clone ID: MRT4577_127576C.1
gcgnggcgnggaccggaaggaccgcaactcananggnagccgccgnggaaangangaaggaaaggcaaggggaacgnacgcaaacaccangancgngaacaagcncnngaacggagaaccnggacccaagaccacgcaggggccgaccggggagaag

SEQ ID NO: 30224 - DNA, 488 bp, Zea mays
  Clone ID: MRT4577_127577C.1
ggctgctgctcgcatttcttctgtagctagcaatagcaatctctcttgctccctgcaagaaaaaaaaaagagagagagctagcgagggagaaagatcaataatcgtcaagcaaatcttgacttctgagctagcttccgatcgctcacactgctgtgcacagctgcagcgtgcccatggcgacgacaaggaagcatgtgtccgtccccgccatcctgctagcgctggccgtcctctcctgcctgctcctcgtctccgcggcaggcaaccggagggctctgctgccgagggagccagccgacacctacgccggtggtggacgtggacaggtggtgttgccgacgacgacgacggcggcggaggagggtgctgccgtgctgggagctgagctcgctgaagccgagcgggacgagacgatggtggtggatacggcggccaggagggcggggctgctgcagactcaggactacccggggtctggccccaacgg

SEQ ID NO: 30225 - DNA, 409 bp, Zea mays
  Clone ID: MRT4577_127578C.1
ctcactctagcacgtatacggcctcactcaacactctcacttatactcttcattcctttatatcaaaatgataacctatgggccggctatgaacaaatctcttccagatctgctcctagtcgtagctacagcgggacccaaggacgaccaaacactattgtgtatgacacgctgtgcgaataccaccaattgacgtttaccgaacctcagtgaagagcacttccactgcgaccctgtttgccttaacacacgctcctccatgggtgattgcattgttttacaggaacgcttgtcgtgcaccacgcactggtcatactcgctcttctgcgctttgctctggtagccttctccgtgtctgtacgctcttgtggatcagtgaaacatgcatgcttccgcatcctgatattcg

SEQ ID NO: 30226 - DNA, 415 bp, Zea mays
  Clone ID: MRT4577_127579C.1
ggggggggaaaagccggttttttttgcccctttcggggattttgacccggggggacaggtttcgtgcgttgtcccgcctttttttttttttcccacccggggaggggtgaccctgtcggtggttttggcccctcatgcaaattgacccgggggagaaaagttttttcaatttcccccccttttttttggttttgggggggggttgtaaaaaggccccttttattcttgtggcaaccgcaaaatttttaaaaacttgctgctgggacacttcatttgggggctaaggggtaaagggggccccttaaatttgggggcccccccggggttttttggcccccggcgggggggcccaggcgcccagcgcaaagcggtgggtgttggcggaaaaaagatttcttgcccccccggttttttg

SEQ ID NO: 30227 - DNA, 496 bp, Zea mays
  Clone ID: MRT4577_12757C.1
aactggaagttaatttgccacattaaacatcttgatagacaaaagaggcatgattcaacaagcctcaaaataagcttgccagccccggctaccatacatgcttatggcaacgcatgaaaaggcgtaagaaccgaaattgctcaaacaaatgttaaatccaagggctgcctagtgcagggccacgcatttaatatccgcgggaaagctactcctgctccttgtgccacatggcgtattggttggcgccgccgacgggggtgaggaggagcgtggctgacacccagctctaggtgaccttgccgtggaccccgggggtgatgtccttccacagccccagcattaccttttgctggaagggcgacagtttcttacacaaacgccttcattcgcaccggccgttttttcatgtttcctccccgttgtcgggtgtattccttctatatacggccagctccgatcgcctaactcacgcagtactctgattggtggcttcatg

SEQ ID NO: 30228 - DNA, 174 bp, Zea mays
  Clone ID: MRT4577_127580C.1
agccatcttgacgctcattcactacaaataccacacttcgtcttgtgagggggcggaatgcacgcagctagcggcacggcatacaggagtgctctgtctatggacaatgacgtactgccacgacatcttatctgagtatatagcaagaaagcgctcattctggggctggagaat

SEQ ID NO: 30229 - DNA, 272 bp, Zea mays
  Clone ID: MRT4577_127581C.1
cagcactatctctacattcggtcgcggcctcacgtcgagccagtcgtctcggtaggctttcgtcgccaccggcgccatgactcgctgcagctcagcaaggtctggcccgagcacagctcgccgtgctgctatcactgaggaatccgacatagaaagcacatcaggattctcatcaagatcctgttcgagatagtgattgctccatgtatagaggacttgggtcactcatgcacaaggtatggcgtctggcacggatagtcgcatggcacaca

SEQ ID NO: 30230 - DNA, 346 bp, Zea mays
  unsure (1)..(346): unsure at all n locations
  Clone ID: MRT4577_127582C.1
actatttcccaaaccctacccacgcgggggacggcgacgccgccttgtcgcccaagctcgccccgtcgcaggtggtggaggtcttcgtccgggtgacgggcggcgagttcggcgaggtttgtccctggggccaagatcgggccgctggggctctcctcaagaagattggccaggatttggggggggagacggcctaggactgggagggtttgcncgttaccgtcaagctcaccgtccagaacggccgggccaaggtatccgtcgtctcctccgccggcgcgctcgtcatcagcgcgctcaagcagcccgggagggaccggaagaaggttaagaacattaaggacag

SEQ ID NO: 30231 - DNA, 355 bp, Zea mays
  Clone ID: MRT4577_127583C.1
acgatacgagaaaacgacggcaggcgaaggcaggcggaagccgctgaggaggacgacgacgccagcgaggaggagattgtcgtcaccatacgcaaggtcccggactctaccaagacagggaaccaaggggccagaaaaacaggacactgcggcgagacaccaaggggtaaaacggcaccaatgacggagtcgatgaacagtgcaaggaccaaggaagcaccgtagtcggaggaggggaaggtagaagaacgaacccgggaacgccatagagctgtacccagaaaggacagaaagggacgctagaaggaagaggacaagcagacgggaagaggagagcgccgaagaatacgggcag

SEQ ID NO: 30232 - DNA, 228 bp, Zea mays
  Clone ID: MRT4577_127584C.1
accaaggttcaaacacttagactggacccagactttatccacagttggccccgaatacttatacatgcactgaacgaacacacagggctatcttacgtcatatagccttaacagccataaatctaatgcgccgctaacacagtattctaagagatcgtagactctcacctactttgcagcaccaacttgcactggtgcccagaggcttccattctacatccgtaaaag

SEQ ID NO: 30233 - DNA, 425 bp, Zea mays
  Clone ID: MRT4577_127585C.1
tgttctcctgccctcgacctctagctagtgtccactacatgggagaggtagctctggtgttcagtcggtgtaaacctttcctagccaccaagtttgttgtactccaaagctgagcgccaacctccttccaatggtgataacgctcatgtttctctctgtctcctcgtggtcaagcatactcgaacatgggctcaacgtcgcacaacgccgccgggaaccacctaatcatcgatcgctcgattcacgacttctccgatcaaaatttataccacctagaagaagtggtgtttgaacgaggagtctactccagtggctgctgatcaagtggcggagccatctaactgggtattgggtagaaaggtcttgagcctcttcaatgcaataaacgcaagccccgggtgcattttcccccttccgtgtaattt

SEQ ID NO: 30234 - DNA, 479 bp, Zea mays
  Clone ID: MRT4577_127586C.1
ggtccggcatcccggtcgccccgcgtccgccccgcgtccgggacctgggcggcgcgtgggttgacgctcaaaggacggaaacaggggtgaagctgtctgctcatgcaagctcattgttcgcataactgactgctcagaagcacaggatactttcaaaagtttactcccaactgacttgggcgtggctacatcagatgttatgacacttgctggaatgcgggcacgggggaacatgagctttatcgcactgactgttgtcgtgaaacagaggagatgtctgcctggaaacggcgagaacatccgtggcttcagaagtcattgcagttttgcaggtcacgagtcaaatctgggtctagtaaagatcctggcatttgcttagatttttcccagtctgttggctttaggctctgttttggaccgcttcggattttgttggaacggtcactgtgctcctcgtatcttggctggggtgtgttttt

SEQ ID NO: 30235 - DNA, 1948 bp, Zea mays
  Clone ID: MRT4577_127587C.1
atgggcaacgaatatgctttgaccggggcgcaacaattgctcgcatggactaaccgggaccgcgccattcaaggaagtgcaggtcgctgtctgctgtgatagctttccgcatctgcctgcgctgatgaagctaggcgtatgcagtagtcacctcgtctagtctcctgtaaacacccgcccgctagtgccaactgccaaccacctccaattacttcacagcagcgcggcgccgagaagatggcttccccctcgtacaggcttgcggcggcgatcacggccccctctaccggcgagttcctcgtcgtccggcagccgcgcccgccatccccacccgaggaggaagaggattaccggcgcttcgtcgacagcgatctctacgacctcccgtccgcgcccctcgggccactcgagggggcaccccggtcggaggtggccatcggcggcgcggactctgtcgccagccgcctcgacctctcgcgcctcgacgtgtccgccgcccttgatcagatttttcaccaatttggcttgccggctgggatgagtggggagtggaggctcctgaagtatgtggaggaagcagaatttggcccggatgctggcattaacacggtgtacattgtcggatctcttgagttgagattggatgatctgccagagtcatgtaaatggatgtccaaggagtgtgcattgaggttgctttcggaagcgaaaccaggtaatgatcgcataggacagtatgcatatattggacttctgaattcggagctgtcatcaaactgcacagcttctcctgcattgcccttccaggaatacccacctggaataacacttgtacctatgaagagtaggacactagcgccattccgtacaactaatcttgtggtagtaagatcaaccaatggtgctggtggatctacatgttctgatttttttgcttcgggggaagctctgcttatagatcccggatgcagctctcaggttcatgcagagcttgcagatctcattgattcccttccaaaaaggttattagttcttgttacacattatcatcaggatcacattgagggtctttcagtcgttcagagatgcaatcctaatgctgttcttctgacacaccaaagtacaatggatcgcattgggaaaggaacttggcagattgactacacttcagtaactggtggtgaaaagatatgcataggtgaccaagaactacaagttgtttttgcacctggtcatacagatggtcatatggggcttctccatgtaaataccaatacattggttgttggagatcattgtgtagggcatggaagtgcaaccttggacagtagaaatggtggcaacatgaaggattactttgaaactacatacaaattcttggagttgtcaccacatgtattaattccaatgcatggaaggattaatctatggcccaagtatatgctttgtggatacctcaggaatcgaagggctagagaagcgtccattctgcactctatagagaatggggcccaaactctttttgatatagtttcgaagacttacagtgatgttgacaggaagttgtggattcctgcttctttcaatgttcgccttcatgttgatcatctgaactccctacataaattgcccaaggatttctctttggaaatgttcagtcgaagttgtgatgattttatctctagagtttgatggcaagtacgagaaaaggatcttctaattcactgcgttgtgatttcatttaagctggcccgttcaccatttgttgttttattatgtgcatgacactgaacaattcaatgatggggaacgaagtcttgtaataaccgataaatatgtagactggacaccaaggctaccattcacacttccgaaaatttgtaagatttaacaactcgaatatatgcaggacttctcattggagaactttaaggaaaaaaaaaaaaaa

SEQ ID NO: 30236 - DNA, 1472 bp, Zea mays
  Clone ID: MRT4577_127588C.1
ctccatagggcgattgggtatctcgaggccggccggggtgggcccccgtgggggcctccgagaacggtgtcacggataagccgataagatagcgtggagccgtggaggtggagggctcgctgcgactccgcctcatcgcccccctctcttcacaccccacaggccaagccagccgcaccgcgccgcaccgcattttggacatggcgtcgtcctcctgcctcgcctcgccgtctggcgccacgctctgccgcccgcggcggccgaggtgccgcgtggcgtgctcggcggccgacgccggcgggagcaccgggccggcgtgggccaagggcgcgggccgcctcgcgtgcggcgtgctggcggcttggtccgtcgcgtccgcgtccaatccggtcattgccgcgagccagagattgcctccactctcaacggagccaaaccgatgcgagcgcgcattcgtggggaacacaattggccaggcaaacggggtgtacgacaagccccttgatctccggttctgtgattacacgaacgagaaaaccaatctaaagggcaagtctttagctgcagcgctgatgtccgaggcaaagttcgacggcgctgacatgtctgaagttgtcatgtccaaagcttatgctgttggtgcaagtttcaaaggaaccgacttcacaaatgcagtgatagaccgcgtcaattttgagaaggccgatctcacaggggcgatcttcaagaacacggtcttgtcaggatcgaccttcgatgatgcaaagatggacgatgtcgtgtttgaggacacgatcatcggctacattgaccttcagaagctatgcacgaacaccagtatcagcccagatgcgagattggagctgggctgtaggtgattaattcaccaagagttcatccccatggtccatgttaatctgtctgtctatagagccgccatgacaagacgcgatcaaagacgtgacgccgattttatccatatctatgcatgtacaaattaaaccactgtatgtctcaagaatatcagcagcaatgtaaccatatacatagaagcactatatatggttcccacacgcatatattattattactgttcacatcgccgcagttatatataaaaacattactatctactagtgctttattccacataatactagtgctagtatcgcatcatgccctaacttttctttgccaaacattattgtttgcctactggtcgtggtcctgggttggctccttgatgcgcatccatctactagtatactgaataactggtcactacaagggccgatgctgctcatgcaagtatagccattggcgagcatgctcggcacgtcgatacctagacgcaccatctaaatggccggcccgcccccgggcacttgccggtggcaaggtagtaggtattttcctgtcttcgttgattgtttttttccgaattccgatcgaacggtttcggttcattcgac

SEQ ID NO: 30237 - DNA, 648 bp, Zea mays
  unsure (1)..(648): unsure at all n locations
  Clone ID: MRT4577_127589C.1
ccnggccgnnggtactttgaatctacatacaaattcttggagttgtcaccacatgtattaattccaatgcatggaaggattaatctatggcccaagtatatgctttgtggatacctcaggaatcgaagggctagagaagcgtccattctgcactctatagagaatggggcccaaactctttttgatatagtttcgaagacttacagtgatgttgacaggaagttgtggattcctgcttctttcaatgttcgccttcatgttgatcatctgaactccctacataaattgcccaaggtgagtactactagaaatattatcatcatgaggatttctctttggaaatgttcagtcgaagttgtgatgattttatctctagagtttgatggcaagtacgagaaaaggatcttctaattcactgcgttgtgatttcatttaagctggcccgttcaccatttgttgttttattatgtgcatgacactgaacaattcaatgatggggaacgaagtcttgtaataaccgataaatatgtagactggacaccaaggctaccattcacacttccgaaaatttgtaagatttaacaactcaaatatatgcaggacttctcattggagaactntaaggaaaaaaaaaaaaaaaaagcggnc

SEQ ID NO: 30238 - DNA, 243 bp, Zea mays
  Clone ID: MRT4577_12758C.1
ttctcacgcggacccggacgcacgagtgagggtgcactagcgcggcggattcataaaccgctggtgtgctacgccggccgggcgccattctatggtaacacagacggtctcatgtatgagcactatcatgttcacgctgacctcaccatcaagagggggtgcattgagcacagttaccgtgacctttccctgctggacactgagaaggacgagcatgagaacaaccgattggagaatgaagca

SEQ ID NO: 30239 - DNA, 356 bp, Zea mays
  Clone ID: MRT4577_127590C.1
aagcagtggtaacaacgcagaggacttttttttttttttttttttttttttttttggttttttttttttttttttttttttttttttttttttttttttttttttttttttttggacataaactttatcggcacataaaccttaacagcacaaggaaatccccaacccaacagggggggtacaaaaaaacaacgggggcttctaaaaaaaaaaacacacactgggtcggaatcggcgccggggccctccaccggggggacaaaaggcccatgggtcccccaacccccgccataaaatttacaacctaaaaacccaccccgcccggggaccctgggggggtaccacgggttaagggg

SEQ ID NO: 30240 - DNA, 407 bp, Zea mays
  Clone ID: MRT4577_127591C.1
ctcctgctcctacggggccggagtcgatttcgggctcgacgagctcactttttggtggacgcccgtacgagggcactatgatgatcagactggtttaagactaaagaacaaaagaaaaacttaacattgaacagccaaacaacatgggaatgatgaacaaaattgtagtggatcaactcaattacatatgatgtagccgctaagatctttgagagctgctctgtatgtcatgggaaaagtgtaagttgtattaagtgtaaaaatcagagcacaactctttatactggagaatggcaactctgacaaataaagggaaaactggggataatcaggatatggtctgaacactgaggagggaggcagagaaaattatggatggtcggttttcttcagggttagtccattac

SEQ ID NO: 30241 - DNA, 506 bp, Zea mays
  Clone ID: MRT4577_127592C.1
gttctcagtaattgtggttacaggttttatcttgtgctcatggatgatttctctcattttacaaggacatttcctttgggacataaaaatcttgacggtggcatgtacatcaattggatgttaagaacgcattcttgcatggtgatctgtctaaacgtgtttatgcttttcaatcatccggcttcaatgacaaggatttccctaatcatgtttgtctccttcacaggtctttatatggattaaaacaggcaccacgtgtatggtaccagcgatttgctagtgagctgctgaatcttgggttccgttccacacgttcggactctagatcatggtgttggtgttcatattaaagcctccaggaccaatgatctcgcatattcagatacggacaaggctggctaccctatagatgacaaggattgcccaacacatgacttcatcagcttctcctgtctccaagctcatttgaagccaaagccatttcgcagcatgcaacagtaccctga

SEQ ID NO: 30242 - DNA, 450 bp, Zea mays
  Clone ID: MRT4577_127593C.1
ataaaaagaaacaaaaaccccctttgagaggggaaaaccacaaaaaggaagttaaataaacttcattaaaaaacctaaacttaaatgggtggggcaccataaagtccccaacacaccatgtaactcaaataaaaaaaattttttccccattgcaatgtttcgcaaaaaaaaacctcctaaacccttgactggatttcgacatttaacctggggagccatatccaaagaatcttccaaaccctgatagacccatcggggtacccaggggaaagggggcttccattggggctccaaataaagcttgggcaaaaaaggatctggttcttggagaactggatgtcaggcttggggtcctgcacaacgtgcttcgactcaagggcccaaatcttaacaaagacctggggtcaaacgcaaaaccagtaggggttgggccagaaacccaaggggggg

SEQ ID NO: 30243 - DNA, 399 bp, Zea mays
  Clone ID: MRT4577_127594C.1
gtacctcgaggccggccaggccgccggctcccgagacccctacgacgacctcatcgcacgccactctggctcgccgccgtcttcctgaacacccgttccgatctttgcccagaaggtctacttgggcatcaataagaaactctttcccctcaaactgattgtggttccatcctcttctgtctggaaaatgttgtcaccaaactaccctatttcctgttccagtttggcatggaagtataagttgtgtacttctattctcaagttgttgtctttgtattatgaaatgtttccaataatcagcagtttttgatgtatggtcgtggatccaaaggtaaaaaaaaaaacggttttgctctgtactatgtgggtgtttgtttggaattataatctgctcatatt

SEQ ID NO: 30244 - DNA, 343 bp, Zea mays
  Clone ID: MRT4577_127595C.1
cacacgcgtacgacatggctttgacgtgtaccgaagcttctgacggaggaccaggcgatagcatctgtcctctgcgagtgcaggggttggcccaccggggactaattttgccatgatggagctcggctgacgtgtcatggttgtcaacttatccagatgaggatcccggctgctaacatggacaacggatgcggtgaacagcatgagggtattgagttaactagttcggggaggcctaagttgcctaacgtaaagaggaggctaactgcaaatttcgtaaggtacacttatcttgtgacgcgtgctaaggtacaactaatctggataggcatatttaagtgta

SEQ ID NO: 30245 - DNA, 404 bp, Zea mays
  Clone ID: MRT4577_127596C.1
aaaaaaaaaaataccttgtttcatacaaaagaaaggtgccttgttccccataaataaaaaatacattgtttcatacaaataataagctcaaagctttatttaaagcaaagatactttgtgattgcagataacataccattcatgtggttttttgattttggtgacgggcttcccacatgggattaacaatttgttgtctaaagttaaccataaaggggtgttccattggttggccatgcgaagatctttgatgattaataccagggagcttatttttggcctcagggacaatgaacttattgcccccattttttttgacccaattttgttttatgcctgaagcaacaaccattttttcttgggttgggaaggggaaaaatggtttagcctcatctaaaattttg

SEQ ID NO: 30246 - DNA, 1011 bp, Zea mays
  Clone ID: MRT4577_127597C.1
cccacgcgtccgcgcccccgtccttccgcgcgggcaagagcgccagaccgagagagagagagaccgacgcgccggccggtcccaggcggaccgaccgcaggggcagcggagcgcaaggacaggcgggagggagaggggggcggcagggcccgggggggctggcgtcacctccgcgggaccccgacctacaggcaccgactcgccggggacagagagagagaccgacgcgccggcagatcccaagctcaccggagagggggaagagggcgaccgaaggcggcgatgggtttcatcatggacttcgcggagaatctgatcctccgtctgatggaggacccggacaagcgcgaccaggttcggcgggagcatgtctacaagatgaaggagcggtgcgagcgcactaaggcggcgtggagcctccctctgcgcccctacggcttctggaccttcgaccgcttcaactcgcagctctcctgggatccccagatcagccaggccgccggccgtcgggacccctacgacgacctcatcgcccgccactctggctcgccgccgtcttcctgaacacccgttccgatctttgcccagaaggtctacttgggcatcaataagaaactctttcccctcaaactgattgtggttccatcctcttctgtctggaaaatgttgtcaccaaactaccctatttcctgttccagtttggcatggaagtataagttgtgtacttctattctcaagttgttgtctttgtattatgaaatgtttccaataatcagcagtttttgatgtatggtcgtggaaaaaaaaaaaaaaatgtcgctcggttttgctctgtacaaaaaaaaaaaaaaaacacgcggcctatctgcttatattatataatctaacttaaataagttagattatataatatgagcagattataatctcaaacaaacagcccctatgaattgcttcagtgacctttactgagtagtactaccccaaaaaaaaaaaaaaaaaggggcgggc

SEQ ID NO: 30247 - DNA, 1330 bp, Zea mays
  unsure (1)..(1330): unsure at all n locations
  Clone ID: MRT4577_127598C.1
ttgcagaccatgcgggcgagcatcgtaccaatcgtctacctcgagcgaccagcataacgcacccagttagctaggagcaacagaaacggaggcggcgatggatggcctccatgatctcctcgtcagatctggcggagcgacctcagggactgccgcccctcggacgccgcgcctcctccttccccattggacctctcgagggcggccggggaactaggcttggacagggtgacaacagtgtgaagcccgctaaagagagtggttgcaaaaatctctactccgacccccacctaaggcaccgactcgctacgggaagaccgacagagagaccgacgcgccggcagatcccaagctcaccggagagggggaagagggcgaccgaaggcggcgatgggtttcatcatggacttcgcggagaatctgatcctccgtctgatggaggacccggacaagcgcgaccaggttcggcgggagcatgtctacaagatgaaggagcggtgcgagcgcactaaggcggcgtggagcctccctctgcgcccctacggcttctggaccttcgaccgcttcaactcgcagctctcctgggatccccagatcagccaggccgccggccgtcgggacccctacgacgacctcatcgcccgccactctggctcgccgccgtcttcctgaacacccgttccgatctttgcccagaaggtctacttgggcatcaataagaaactctttcccctcaaactgattgtggttccatcctcttctgtctggaaaatgttgtcaccaaactaccctatttcctgttccagtttggcatggaagtataagttgtgtacttctattctcaagttgttgtctttgtattatgaaatgtttccaataatcagcagtttttgatgtatggtcgtggatccaaaaaaaaaaaaaaaatcggttttgctcaaaaaaagcgctcctgtttttctgctggatagatttcgatgctgtcccgtcgtcataggaatttgggcaaattgattagggacatgacggtttggttggtctcaattgctgagatggtcggatgggttcctgcaggatgcgcttgttatttggcgacaatagatagagccttctgctgagagttgtatttagacgaattgtgcgctggttctatctagggtttatttatctcgctgttggtcgttggtcgagagctctgctgattttgatttggccgtttaaaattcggngcggattacatttggttcaactatcgacgagtttcgtagattaggtaagtgttagattggaggttgctctaatgcaatgaagcgggagcagtttatgttag

SEQ ID NO: 30248 - DNA, 245 bp, Zea mays
  Clone ID: MRT4577_127599C.1
tctcgtgctctgttctcatcttctgctcgctggcgacccctctctctcgcccatggtttcggcgctggcggcaactcatgtggggatttacttcctgcggaactactacaacctgctgcaacaaacccctgatgtcgtccacccgtttaacagagcaacccaacaccatggaccacgcccaccacctcaccggcgacgaccgcccctgctcaacaccctgaaggccatacccccgctcctcccgt

SEQ ID NO: 30249 - DNA, 165 bp, Zea mays
  Clone ID: MRT4577_12759C.1
ttgttggaggaagaagacgctgagcgtgatgggacagttagtgaagctctcgagagcggctcgctgcatatgacctaagtgccataataggtgctgcctgcgaagttgtgccgacactaactataatgggatcaactgcatgatcaatcggggctaactgaatca

SEQ ID NO: 30250 - DNA, 347 bp, Zea mays
  Clone ID: MRT4577_1275C.1
gacaccgtaacagtgctaaaaatgcatgtggacgctttcaacaatcgcgtgaagcgccgctcagaggctcgccacggacgaggtcaagacggccgccactcacgaggcgcggcgggcgctgaacctctgtaatacctactacctgtacgccgccgacaaactcagctcctgcaactcgcgccatcaagtcttccgctcactctctcaccatcctcgccacgataaccatgctggttcatgacacgcaaaactgcaactaagaattctcgaaagccgtctccaggaaccccatggctgaccacaacaggtcgctcatcgtgatatccgatatctgacacacgcgctcc

SEQ ID NO: 30251 - DNA, 728 bp, Zea mays
  Clone ID: MRT4577_127600C.1
gcacgaggaagcccgctaaagagagtggttgcaaaaatctctactccgacccccacctaaggcaccgactcgccggggacagagagagagaccgacgcgccggcagatcccaagctcaccctagagggggaagagggcgaccgaaggcggcgatgggtttcatcatggacttcgcggagaatctgatcctccgtctgatggaggacccggacaagcgcgaccaggttcggcgggagcatgtctacaagatgaaggagcggtgcgagcgcactaaggcggcgtggagcctccctctgcgcccctacggcttctggaccttcgaccgcttcaactcgcagctctcctgggatccccagatcagccaggccgccggccgtcgggacccctacgacgacctcatcgcccgccactctggctcgccgccgtcttcctgaacacccgttccgatctttgcccagaaggtctacttgggcatcaataagaaactctttcccctcaaactgattgtggttccatcctcttctgtctggaaaatgttgtcaccaaactaccctatttcctgttccagtttggcatggaagtataagttgtgtacttctattctcaagttgttgtctttgtattatgaaatgtttccaataatcagcagtttttgatgtaaaaaaaaaaaaaaaaaaagacccctagggccaaaaaaaaaaaagaaaaaaaaaaaaaaaaaagcggcc

SEQ ID NO: 30252 - DNA, 429 bp, Zea mays
  Clone ID: MRT4577_127601C.1
gggcagcggggatatattaccatccaatactggctggggcgcaccgaggcaacaaatacgagcctgccaccgtgtaacactgggatatacaacggcaactatctgttatggttcccacactaaaaccaaaacttgataattgtttggcgattattagggcggggcaagcacatggcaaccgatgggtggtgtctactggatgcccagcctattctttattcacgggaccaagctgcaaaccttaactgtcggttcgaggtttttgaacactctggggcacctcggcacatgtcttgttccactcggccaggacctggcactccttgttcactctgacgccggactagcggccttacgtgatgaaccacgacccgataggcacgagcacaacgtcctcaaaggacatggcgacctcgaccacaaaggccc

SEQ ID NO: 30253 - DNA, 336 bp, Zea mays
  Clone ID: MRT4577_127602C.1
atactgttggctttcagagtgtttttttagatttttttgaatgacttacacacatgcataatcccttatttttaaagcacgattctatcagacaagatataggtagacataacactatcttgtaacaaagaaaacccttgttaaataggctattgacacaaactaacacacacaatatactgaataaaaaacagtgtattggccatgcacctattacataagtgctatctaaagccggttgtcatgaaaccataatagggttaaactatcacaaatttggaactgacaatgtatggaactaaaaagggataatattatgggggccacaagtctttc

SEQ ID NO: 30254 - DNA, 779 bp, Zea mays
  unsure (1)..(779): unsure at all n locations
  Clone ID: MRT4577_127603C.1
cattgggtacctcgaggccggccgggacgcgcatctctcacccgagcaaaggaagcacgcactcccccacacttgccagcccgctgcactgcgctactgcagactgcactgcacacacgccctccctcccacatcgtctccatctaccggcggggcaaaacggcaagcccgaccgcgctctccctctccccagtctccgtgcggagttctcttctctcgcgtgctcgcatagtcgcatcgtcctgggagagggaggccttcgctacctccgtggcaacgacagacaaccatgaaggcgctgctggtgacggtgcttctcctcctctcttccaccctcgccgcgtcacagtggtgcgtgtgcaggcaggacgcgtctcaggccgcgctgcagaagacgatcgactacgcctgcgggtcgggggcggactgcaactccatccacgagacgggggcgtgctacaaccccaacaccgtcgcggcgcactgctcctgggcggccaacagctactaccagaacaacaaggccaagggcgccacctgcgacttcaccggnaccgccgccctcaccaccagcgacccaagttcttcaggctgctcttaccctaccggtgcaagcgccgttggaaccatgaccccgaccactgcaggcaccatgggaggaggaaccgcagggaccctcacaggcacaggcacagccggcgctggcatggggacaggcactgccaccggaactgcgggtacggggttcggcggcctaggacaggcacggacgctagcat

SEQ ID NO: 30255 - DNA, 1013 bp, Zea mays
  Clone ID: MRT4577_127604C.1
gatcagaaagaaagaagcacgcgcatctctcacccgagcagcacaaggaagcacgcactctcccacacttgccagcccgctgcactgcactgacacgccctcccactcgctccccgctctagcctcgtcccaatcagtcccgcatcgtctccgaaatctcttcatctaccggcggcgcaagcccgaccgcgctgcctctctctctctctctctccctcttcccactctccgtgcggagttctcttctctcgcgtgctcgcatatagtcgcatcgttagggcgcgtcctgggagagggaggccttcgctacctccgtggcagcgacagacgaccatgaaggcgctgctggtgacggtgcttctcctcctctcttccaccctcgccgcgtcacagtggtgcgtgtgcaggcaggacgcgtctcaggccgcgctgcagaagacgatcgactacgcgtgcgggtcgggggcggactgcaactccatccacgagacgggggcgtgctacaaccccaacaccgtcgcggcgcactgctcctgggcggccaacagctactaccagaacaacaaggccaagggcgccacctgcgacttcaccggcaccgccgccctcaccaccagcgacccaagttcttcaggctgctcttaccctaccggtgcaagcgccgttggaaccatgaccccgaccactgcaggcaccatgggaggaggaaccgcagggacctccacaggcacaggcacaggcacagccggcgctggcatggggacaggcactgccgccggaactgcgggtaccgggttcggcggcctaggaccaggcacggacgctagcatggacacccgcggcggcggcgggcttgctccttcccccaagagctgggtgggctgggcgccgccctcgccgcgcttctcctctccgccatggtgctcgcgtgacgcttttagtatggcctcggaaacatggcctgcctgttgctagtagaaagctagcactgcccttttggtaagggcgtttca

SEQ ID NO: 30256 - DNA, 784 bp, Zea mays
  Clone ID: MRT4577_127605C.1
tttttttttttttttttttttcttgcaactgggaattatatataagcaccattcctgtacagacaatcagacacacacaactactagtactcctctccctttctctcccaccccaccccacccccctagctagctccggcaagcctgaaggctgaagcagccgccataggagcacaaggctaaggtagtatagctgtggatcgacggaaataaatgggcaacatgctgccatcatgcctggtggtgcaacaaggcacagcagcaggtgctctgccggccatgaaccccaagcggaggctcatctccctcaatctccttgtgaaaggaatccacagggtgaagaagatgcccgccggtcccggcaaggcgcccgagatagatagcaagaagtcgtcgtcgtcagaagcgcttgagaccgccagaagcaacaaggccgcccggagcaccaacaaccccaagggcgccgtgctgaggtcgaggctccacggccggcggagcggcgccggcctcggtaagaaggccgggaagcagggcgtcgtgcgcgtgaaggtggtcctgaccaaggaggaggccgcgcggctgctgtcgctgaccgtcggcggcggccagaagcacactactaccgccgcgcagatcgtggccgagatgaggaagatggaggcccgccgccgcgtggccgccggtgcctcgtggcggccggcgctggccagcatccccgaggagtcatcgtagggtctaggcctctaggagaccggtgtcccggccggcctcgaggtacccaatg

SEQ ID NO: 30257 - DNA, 861 bp, Zea mays
  unsure (1)..(861): unsure at all n locations
  Clone ID: MRT4577_127606C.1
gattgggtacctcgaggccggccggtagcccgctgcactgcactactgcagactgcactgccctcacgccctctcactcgctccccgctatagcctcgtcccaatcccacgtcgtctccgaaatctctccatctaccggcggggcaaacggcggaaacccgaccgcgctgcctctctctctccctctccccagtctccgtgcggagttctcttctctcgcgtgctcgcatagtcgcatcgtcctgggagagggaggccttcgctacctccgtctccgtggcagcgacagacagacgaccatgaaggcgctggtggtgacggtgcttctcctcctctcgtccaccctcgccgcgtcacagtggtgcgtgtgcaggcaggacgcgtcacaggccgcgctgcagaagacgatcgactacgcctgcgggtcgggggcggactgcaactccatccacgagacgggggcgtgctacaaccccaacaccgtcgcggcgcactgctcctgggcggccaacagctactaccagaacaacaaggccaagggcgccacctgcgacttcaccggcaccgccgccctcaccaccagcgacccaagttcttcaggctgctcttaccctaccggtgcaagcgccgtcggaaccatgaccccgaccaccggaggcgccatgggaggagcaaccgtagggaccttcacgcccggcgctggtggcatggggacaggcactgccaccggaactgcgggtacggngttcggtggcctaggaccaggcacagacgctagcatggacaccgcggcggccgcgggcttgctccctccccccagaactggtgggctggccgccgcccctcgtcgcgcttctcctc

SEQ ID NO: 30258 - DNA, 1336 bp, Zea mays
  Clone ID: MRT4577_127607C.1
cattgggtacctcgaggccggccgggaaaaaaatacaaaaaaaaaaaaaaaaaaaaaaaaaaaagagctcacgcgaggacaaggaagcacgcactcccccacacttgccagcccgctgcactgcacgtctgcagactgcacacagtcacacacgccctcccacatcgtctccaactctccatctaccggcggggcaaacggcaagcccgaccgctctctccctctccccagtctccgtgcggagttctcttctctcgcgtgctcgcatagtcgcatcgttagggcacgtcctgggagagggaggccttcgctacctccgtggcagcgacagacgaccatgaaggcgctggtggtgacggtgcttctcctcctctcttccaccctcgccgcggcacagtggtgcgtgtgcaggcaggacgcgtcacaggccgcgctgcagaagacgatcgactacgcctgcgggtcgggggcggactgcaactccatccacgagacgggggcgtgctacaaccccaacaccgtcgcggcgcactgctcctgggcggccaacagctactaccagaacaacaaggccaagggcgccacctgcgacttcaccggcaccgccgccctcaccaccagcgacccaagttcttcaggctgctcttaccctaccggtgcaagcgccgttggaaccatgaccccgaccactgcaggcaccatgggaggaggaaccgcagggacctccacaggcacaggcacagcacaccggcgctggcatggggacaggcactgccaccggaactgcgggtacggggttcggcggcctaggaccaggcacggacgctagcatggacaccgccggcgggcggcgggcttgctcctccccccaagagctggtgggctggccgccgccctcgtcgcgcttctcctctccgccatggtgctcgcgtgacgctttggtatggcctcggaaacatggcctgcctgttgctagtagaaagctagcactgcccttttggtaagggcgtttcaggagtactgtggtggactattgagagaaaggctcctcctctgtgactgtgactgtgaccacctcacgttctgcgtactctgtaatctggtaggatgcctgtctctatcatgattcatgaaggacgattggtctgtctttattttgtcgtgctatttattaaccgtgtaaatgtactagcgaagggaaaggcactggtagctaggttagctcgagtccggatggaatgagaatgctactaatacaaacaatgccgtggtgtggtgtgtgtgtttttatcaactcgcgtataaaaaaaaaaggtcggccgccaccgcggtggag

SEQ ID NO: 30259 - DNA, 492 bp, Zea mays
  Clone ID: MRT4577_127608C.1
ctcgagggcggccgggacgaggttttcctcaggggggctgatcgacccttttgcgtgcaggtctacaacaaccccgggtgcgagtaccagcagaaggacggagactttgtggccaacctggcggcatcgtggaaggcgtggacgcagtcgctgccgtcgtcggcgtctgtgttccttggcctgccggcgtcgcctgctgcagcgggtagcgggtacgtacccccggacgaccttgtgtcgcgtgtgctgccggcggtgagcggctccgctaattacggcggcctcatgctgtggaaccgctactacgacaacagcaccggttacagtgcccggattctgagcagcatcatttttttttgaccacacagctcaccagttccagggggctccggcgatgaatcgccaccgccggacaactcaccagctccgccggcgagcactggccggtcacgaaagagaaggatcaatacttatatcatagcgtgtgaccgc

SEQ ID NO: 30260 - DNA, 501 bp, Zea mays
  unsure (1)..(501): unsure at all n locations
  Clone ID: MRT4577_127609C.1
cctcaaccgaggaccaggtgcctgccaattccaccaccgggccccaaatcgagggacaagggacaaaccgtgggtcaacgagtncctataatattaaaacagaccctccgtttttaacgactgaacaaagacacatcacattacatacatacccatccatctgtcgcagaggaaacacacgcccgggtcgggcattaaacccttcaacaaaaaacccaccctcgggccacgccgcttacttgggaaacaccaccgccactggggaagcccccctacaatgagtatcaagtggggcatggtggatggaacctgaaaagacacccgcctggtgcaggttgcacactatggcccggaccaaccaagggcactcatcaggatggctgggtaggaaatacattctatcggacgagaaaaaagcaaaagcaataggcgcgcaacaagctgctgtcccagataggctctggctttacatatgggtgaaacagcacccactcagcacct

SEQ ID NO: 30261 - DNA, 118 bp, Zea mays
  Clone ID: MRT4577_12760C.1
cgtctggctgactattggcggaaccgcggaagaagcgcgcgtgaatcttctgtttttacggtctcgtgggcgcgctgggacagcgattccttttgggcctgtccggccggtccggatt

SEQ ID NO: 30262 - DNA, 303 bp, Zea mays
  Clone ID: MRT4577_127610C.1
ggggggacataaaacataagccgaactggtttcatcactggtggacagtagagccttacattttacagcagagttgttgggttgaacccctctattgaaagaaaaatgttttaccccccattattttacttaaaatgcatgccacatgggcacatggacatggttaccaactttttagatttaatcgacaaaacacaacaaatggccaattgggttcagcttccaacagagtacaagagcttactcgaacaccattttttattttttcgggcttagaagattgaagacgagcttttcacccct

SEQ ID NO: 30263 - DNA, 735 bp, Zea mays
  Clone ID: MRT4577_127611C.1
tttatttaaatttaatattataattaatttatttttttttttttttttttttattttttttttttttttattggtcaaaattattggatttatatagcttaattaaacatattgttgacaaatctacgaatatatttttttcgaacctaaaaagtcgtatctaggaatatatttcatgatgacaaacctattaatcttgtctgacgctacaaacgctgatgctttttttgtataaatctgattgaagacacatgacaatttgaattcactactattctagaattgcactctcttcgagagggtacatatacgcgcatcaacaatgtacatacatatatgtacaaattaatttcaggcagatgttactaactgcgagcgcggcgtgagattcttggagggtattattttgcagcggcatgtacaaataaaggtacggtgcagtgtaacacagtggagtatttcgcaggatgcatgtggggccggtggtaccagcttgtcggagctagctagctgctaagcggcgttgccgaggtcctcgaagctccagtcccggcgcatgccgacgctgcgccggagccgcgggccctggatgagctgcgacacctttagttcatccaccgtcgacttgcacttgcgcaccatcttcttcttaccaccactcctgctgctgtcgtcgctttttatcgcggtggcggcgtcgtggtcgtccttcttggccttgccgctgatcttggg

SEQ ID NO: 30264 - DNA, 335 bp, Zea mays
  Clone ID: MRT4577_127612C.1
aaaggggttatgggttttttttttttacggacccgggggcggcccctggggcccacccggaaatttcggaccggaacccggaggccacccaacttcccctaaagggaacccaataaaacccggggggaacaaaggggaaaaccgcttcccggaaaaaaagggtacccgataaaaattccacaaaccaatacgacccggaaacaaaaagggaaaagccgggggccccaaaggagggaaccaactcccataaaaggggtttccccaaaagccccgttcccagagggaaaaaccgcccccccacactcataaaaaaatcccccaaccccccggaaaag

SEQ ID NO: 30265 - DNA, 727 bp, Zea mays
  unsure (1)..(727): unsure at all n locations
  Clone ID: MRT4577_127613C.1
aattcggcacgaggccgacgtcgtcctccccgcaggccgcaggtcggcaggcggtcgcctccagggtccaggctctctcccgctcacggcagcgccgtccttcgacaccccctccccccctctagttctggcctgctgaggactggaggtccatccatccggactttgttgatttcttctgttggcattgtggtgttcagctcaaaatgaaaggagtgcttccgattaagggggcatcaggccgtgaaaagaaagcgcctaaggagctcgagagcgtcttgaaccgatatttcgggtattcggggtttcgaggaaaacaactcgaagctatcgaagctgttctatcagggagagattgcttttgtttgatgccaactggtggtggaaagtccatgtgctatcagattccagctctggtgaaaacaggcattgttcttgtcatttcacccttgataggtgaactgatccgtgtatttccataatgcaatagcgtttattacttggaggttcatactttatactaacagttccttgatttgatcgaaaattttctgctaaccagcactgatggtaagatttttagctataggtctccttttcctgttcttcatatgtcatggaacatcatgtgctctgcatatganatttacaggagaaaccagttgccagcttgaaaataaaggggttccagctgaanttctctcttcacacaggcatctcacactaa

SEQ ID NO: 30266 - DNA, 668 bp, Zea mays
  Clone ID: MRT4577_127614C.1
ctcgaggccggccgggaaaaattttcaaaaaaagaacaaaaaaaaaaaaagggggcaacgttctctaacaagaagcacagatagcaacaacaataacaacaatggtcgcgttcgagcgtagcaggagcacaaccacagtggtgctcctcgtccttttgatgccgctactgctgtcaacatccaccgcgtcggaggcacacatccagaagaaatggagacccccaataatctatccatggatgcccccgataatctatccatcgccgataccacctccacaccatgggcgcgacttggacttgccctccatgaacaacaagcacaccccaccggcgtcacagcaagacgaccaagctgctgtcagctcgttgcagccttagcttggaatgtgttgcatgggttgttatatttatgatgaggaataaatttaattaactttgcataatttccaatgtatttgagtgagccgaaaaaaaaaaaaaaaaaaaaaagacacaaaaaaaaaaaaaaaagcggcgcccctcgacccccattttttgccccttttaggggggaaaattggcgcgttgggaaaaaacggggaaataggtgtccccggggaaaaattgttccccgctcaaattcccacaaaatataagacccaaaaatataaggtaaaaacccggggg

SEQ ID NO: 30267 - DNA, 196 bp, Zea mays
  unsure (1)..(196): unsure at all n locations
  Clone ID: MRT4577_127615C.1
cgnntccggccacaagcagcncnntccttcctcctctcaaactctcgctcgcgccctgcgctcgcgtgacctcgcgtgtcgcattccaaattcgaaaaggagggnngaggaaaggggcaagatgttcaatcgagaggcttcnncgcgtcgaggagcnccccacgtgccggtacgggnccggatggagaatcggagt

SEQ ID NO: 30268 - DNA, 374 bp, Zea mays
  Clone ID: MRT4577_127616C.1
aaaggaaaatcttgggggtttgcccccttttttggcagaaggcataagtttttcccccaaaattttgccaaacaaatttggggggctcataaccataagccatacagcatagctggttaacccatccccccaacggagcaataaatgggggtaaaaggaacccttttccgtcgtaagattctggagcccgtttaagggttaaaattttggaacagctcaggcggaggggctttcgggggcttggccccttttgggacctcaccctgcttttttttgggcttagccttgggttttacccccttgatctgggcagctgctctccgtttggaaatttttggcaagggcttgaaacccgttttttggagctccttttt

SEQ ID NO: 30269 - DNA, 452 bp, Zea mays
  Clone ID: MRT4577_127617C.1
gccggaggggaggcgccggcggcgccgccgccaggctcttggagaagatcgtgcccggagcgcccgccatgaagaccaagtccagcaagaaggaccagtacctgctcaagcgccgggacgcgcccgaggcctccgcacacagccagccgcagctcccagacgcgccgccgccggcacccacgctcgcggcggaggacggaccacctggcttcccgggcagcggcgacccgcccacaccgccgctgcccgggagctccgtcgctgacgaggacttcatgctgcagaggcgcgtcccgctcgtcgatgtccctcccgccgtccaggcccagccgagcgagggccccgccgcgcccaataacgcgaccaagctcaagaagccccgcaagcgcgagcgggaggaaggccccgatgcaacccccgactccgcggacgccggcggcgaccccaagaag

SEQ ID NO: 30270 - DNA, 582 bp, Zea mays
  unsure (1)..(582): unsure at all n locations
  Clone ID: MRT4577_127618C.1
ccggccgggcagnccattatctcgttcgttccactcggagaacaggatccggttcgctacaaggaaaaggacaagagggtcaggagacagagagagagagatagatagagagagagatagcccttgctcgctccgtgaccaccagcagctgctatcgatgcgcaaggcagggaagatgtacaacgccccgatcgcccgggagatgtcctacttggacaacgtgcacaggttccactacgacaagggctgcctctacgcctgcatcttcactgggctgagctgcttctgctgctacaagacctgcgagagctgcctcgactgcctctgctgctgctgcaactacccggggatagctccggaggacggccgagactcaacagatggagggcgcctccgattcttctacctagctaccaatctacctactgatgatgattcacctcccgcttatgctgcaggtgggacagtgcactaataataacgcacgcatgtccgactgaactacaggacagatgttttactctgtccgctccaggttgagtattccgacaccaaccaagcatgctatgaactcaaaaaaga

SEQ ID NO: 30271 - DNA, 267 bp, Zea mays
  unsure (1)..(267): unsure at all n locations
  Clone ID: MRT4577_127619C.1
cgttcgggtgtcgcccgtggttctccgaggcggaagatgaaggcggcgtcaaaaagaagtcccacgttaacacggcaagtttaatgcggagccgtggtcgtgggtttacgcaacgtactacggtggncgcgacgggttaactgacaccacggacggcggcgcgngcggctacaagggatagctggggaaagactacggnaccctgacggngcgacgggtcccgctgctgaacaccaacggcaccggttgcggctacgggctatgagc

SEQ ID NO: 30272 - DNA, 545 bp, Zea mays
  Clone ID: MRT4577_12761C.1
cggctgtctctctcttctccatccgtgacacgtccagcagctccatcgagttcgaggactagccgccgccgccgcacctgcacggacgccaagggacgggagagcgagagggagatccgaggaggtcaaagatgatctaccgcagttggtcgctgctctcatcgacggtcgtcatctggggcggcgtcgccaccgccggcctggccggtaccttcctcttgggcggcaaggagaaattcagtcagtatctgtgccgcgaaggcgagaggcttaggcagcaggacagagccacgatcggcatgcaaaactagagaggaagcatatgtaagcctgttcgatatataaaggtcagaaaagcttgctctgtatgtcagcagtaataaaacttgtgctggctttcaatttccccagcaaaacttgctctgtatgtcagtagtaataagctgactctggtttgtcgtgggttcagtgcttgtttggcatcaacttgtgcgacatggtacacttctgaataaaggttatttcatttaaaaggctggcgtgat

SEQ ID NO: 30273 - DNA, 368 bp, Zea mays
  Clone ID: MRT4577_127620C.1
cgtaattcggctcgaggtctctagttcgctttttttcccaggccaccgacacacgtcttggacccgcgctctgacaggggcggtagaggctcctcacacaccgacgcttgaacactggggatatccctactgggtgcactaacaccatcgtcttactgctcgtatgcagacaaaccgtctagaacacagctcgttggcttccgcgtacgcaagtgatgttgccgtccaccagatcctggacgttggccagataattgtgccttggcgggctcatcaacatcctacgacatttcttggggttggtcaaccacatcaccccagttgtgtaggacatgctcatcgacaaacaggaccgcactatcgactat

SEQ ID NO: 30274 - DNA, 738 bp, Zea mays
  Clone ID: MRT4577_127621C.1
taacattaagggccacccacgcgtgcgaagaaaatgacccacaacaaggacagcaaattgccctttggacatagtcacgagaagcggggaatgttcgaagggagggcggagaacgttctgctcctcatcaagcacaggtttcctggcattgcccagtcggcgctggacataagcaaaatccaatgcaacaaggatgttggccttgccattttggagagctactccaggactctggagagcctggctttcacggtcatgtctcggatcgaggacgttctgagcgcggacttggccgctcgagatctcaggaacacggaatcgatgagaatcgccgccagtttaacttcggacgacaccgacaaggtcgtctcagacgctaaggccgaggtagagaagacggggagaatggagccggtttcgccggcgctatctgacttggtcggcccgaagctgacgaagatctcgccagttgcaaccaagaggttttcgtaccttgagaatctgggtggaacaagaagcccgatagctagacactagctgctgtaggtaggggtttagtgggggtagatggatcatgccgtcgcagagccttcggaagaaactttgtacatagcatagatgcccactgcgaacgtttgtctaacgataatgtgacatctaatcgactaatagaggcagaagttcttagagcgcggctttcataatcactttattagtttatttaacacttttatcttc

SEQ ID NO: 30275 - DNA, 671 bp, Zea mays
  unsure (1)..(671): unsure at all n locations
  Clone ID: MRT4577_127622C.1
ccggccgggtgcccccgccccacgcgcggnctggctcccaaacccacgcgcggctggctcccaaacccacgcgcgtccgtgtacctcgacgaccgccatcagcgccccctctgtcgcccgccgccatcaatgctcccggagcccgaccgccatagcgccctccaccttgcccactgtgcgccgaaaaccttggtcgctgcgtctgattcccccgaaaacctcctccacctcgccctatctgcccccacaccctccctcgaaaaccttggtcgctgcgtccgattcccctgtcgtccctgcgttgtcctcctccacgccgggcacggccaaccgatcggcggcggccagcgagcgggaggagaggcaggtcacggcggcagccagatccggtcagcgcttccatgcccctgcccctgcactccctctccaacgtcgcgcgagtcgcctctcccatcctctgcatgtcgccgccctccccccacctccgctgctcaacctcctcgacgagaaccatcatagaaacgacggagaccgcctcatcactcgccacatcgtgctagggccggagcagagaaatttatcgccgtgcccatccacccctatcactctcctcttactgctctctgtcttttgctccgtccagagatgccctgatccgtcctctgatcgaa

SEQ ID NO: 30276 - DNA, 405 bp, Zea mays
  Clone ID: MRT4577_127623C.1
tatacgcgtgcgtatgtagatcagacggctctactatacaggctatgttggtcgctgtgtggtgcactgaaaggtgtgatacaatggggaaaccatgctctgtacaactcagtgcacgacgcagttctggccattgtagattttatcaagagggtggggcccataggctgggactacctatggagctagatacagcacttgttatatcatttgtaactagattgggctctagctcttgtgtgtcttctccaattgtgacatctagcgtgagcattatcattgggacatttttcaatagagatatgctatgtgtcttatcaccccctgtatcagacatgcatcccgttcttattctagtatggagtatcacatatggtaaaagccgtaggaatcttgatagaaatt

SEQ ID NO: 30277 - DNA, 275 bp, Zea mays
  Clone ID: MRT4577_127624C.1
attcctgcaatgattggttcatttgcaacgaagcagcttccgtatccctatctttcctttgatatggtgcattgtgctaaatgcaatattgaatggtacaaaaatggtatgtgtgaaagtcttctttcacatgccctggccctcattgacgattataatgttattcagcaatgtcttaagttggcacttcacatgtaaagatcggtacatgcctagctgaatattaaatatttaaggatatacagttgtgggtgacttttggttgacttgtaacc

SEQ ID NO: 30278 - DNA, 1602 bp, Zea mays
  Clone ID: MRT4577_127625C.1
cctcgaggccggccgggttctccctccattcattcacacaccacacctcccgaactccgaactacaagtttcgcttctcgtcgcgacgactgggcgagaccgccgccgccgccgccgcctgagttctttagaaatggctgatggtgaggacatccagcctcttgtctgcgacaatggcactggaatggtcaaggctggttttgctggcgacgatgcaccaagggctgttttccctagtattgttggccgtcctcgccacactggtgttatggtagggatgggacagaaggatgcgtatgttggcgacgaggcacagtccaagagaggtattctcacgctcaagtatccgatcgagcatggtattgtgagcaactgggatgacatggagaaaatctggcatcacactttctacaacgagcttcgtgttgccccagaggagcaccctgtgttgctcactgaggctcctttgaacccaaaggccaacagggagaagatgacccagattatgttcgagactttcaatgttcctgccatgtacgttgcaattcaagcagtgctgtcactctatgccagtggacgtactactggtattgttctcgactctggtgatggtgtgagtcacactgtgcccatttatgaaggatatgcccttccccatgccattcttcgtctggatcttgctggtcgggacctcacagactccctcatgaaaattctcactgagaggggttattccttcacaacctctgccgagcgagaaattgtgagggacatcaaggagaagcttgcatatatagctcttgactatgagcaagagttggagactgccaagaacagctcctcagttgaaaagagctatgagctgcctgatggccaagtaatcaccatcggcgcagagagattcaggtgccccgaggtcctcttccagccatccatgattggtatggaggctgctggaatccatgagacaacatacaattcaatcatgaagtgtgatgtggatatcaggaaggacctctacggcaacattgtgctcagtggaggttcgactatgttccccggtatcgctgatcggatgagcaaggagatcacttcccttgcaccaagcagcatgaagatcaaggtcgtcgcgccacctgagaggaagtacagtgtctggataggagggtcgatcctagcctcgctcagcactttccaacagatgtggatatcaaaggaggagtacgatgagtctggcccggcaattgttcacaggaagtgcttctaggtttctgccaagttcgtcaagtgcttttagggttcgccatgttcatcatcgctacctagtcttaagttatgcccccttcatttgctgagatatgtgtggcagatttgcatcgttttggtatttcgtggctccatgtgtgagcatgctgtgtcctataacctggtttatgagatgagttgttaaacttgcttggcttgattggttttacctgtaagagctgatagttatataaattgcttgtacttgtttgcatccagaacatccgtgcaagtatgaatggccctgtacatgggctgggttttctggcaaaaaaaaaaaaaaaaaaacccgcggcc

SEQ ID NO: 30279 - DNA, 757 bp, Zea mays
  Clone ID: MRT4577_127626C.1
ccgggatccttcctggtgctctgtccacctctctcgctctgggccgccgccgccgccctaagcccgtgctgaggctttcgttggtctcttcgccggcgacgagcacccagcagttctgtagaaatggctgatggtgaggacatccagcctcttgtctgcgacaatggcactggaatggtcaaggctggttttgctggcgatgatgcaccaagggcggttttccctagcattgttggccgtcctcgccacactggtgtcatggtagggatgggacagaaggacgcatatgttggcgatgaggcacagtccaagagaggtattcttacgctcaagtacccgattgagcacggtattgtgagcaactgggatgacatggagaaaatctggcatcatactttctacaacgagcttcgtgttgccccagaggagaagatgacccaaattatgtttgagactttcaatgttcctgccatgtatgttgtaatccaagcggtgctctcactctatgctagtgggcgtactactggtattgtactcgactctggtgatggtgtgagccacactgtgcccatttacgaaggatatgcccttcctcatggccattctttgtttggatcttgctggtcgggacctcacagacctccttatgaaaattctcactgaggaggggtttctcctttacaacctcagccgagcgagaaattggaagggacatcaaggaagaagctagcatatatagcccttgactatgagcaag

SEQ ID NO: 30280 - DNA, 379 bp, Zea mays
  Clone ID: MRT4577_127627C.1
ttgattgcgagcgttccccttccgtccgctgcattcctgctctatggctcgccgggctctcagaccacagttgccgccgccgccgccctaagccagggtgctgaggctttcgttggcctcttcgccggcagcgagcacccaccagcagttctgtagaaatggctgatggtgaggacatccagcctcttgtctgcgacaatggcaccggaatggtcaaggctggttttgccggcgatgatgcaccaagggctgtattccctagcatcgttgggcgtcctcgtcacaccggtgtcatggtagggatgggtctatactgttgcatttgtttttgattagtcacattttaagataggtttcttatcgtcctattctctctttt

SEQ ID NO: 30281 - DNA, 1813 bp, Zea mays
  Clone ID: MRT4577_127628C.1
gcacgagctcaatcgcatctgggtctggcagtcttctcgcggttgcaggccacaaacaactgctcctcctgcattccccctttccccttccgtccgctgcattcctgctctcttgctctcctcgctctcagaccacagttgccgccgccgccgccctaagccacgtgctgaggctttcgttggtctcttcgccggcgacgagcacccaccagcagttctgtagaaatggctgatggtgaggacatccagcctcttgtctgcgacaatggcactggaatggtcaaggctggttttgctggcgatgatgcaccaagggcggttttccctagcattgttggccgtcctcgccacactggtgtcatggtagggatgggacagaaggacgcatatgttggcgatgaggcacagtccaagagaggtattcttacgctcaagtacccgattgagcacggtattgtgagcaactgggatgacatggagaaaatctggcatcatactttctacaacgagcttcgtgttgccccagaggagcaccctgtgttgctcaccgaggctcctttgaacccaaaggccaacagggagaagatgacccaaattatgtttgagactttcaatgttcctgccatgtatgttgcaatccaagcggtgctctcactctatgctagtgggcgtactactggtattgtactcgactctggtgatggtgtgagccacactgtgcccatttacgaaggatatgcccttcctcatgccattcttcgtttggatcttgctggtcgggacctcacagactccctcatgaaaattctcactgagaggggttactccttcacaacctcagccgagcgagaaattgtaagggacatcaaggagaagctagcatatatagcccttgactatgagcaagagttggaaactgccaagaacagctcttcagttgaaaagagctatgagctacctgatggacaagtaatcaccattggtgcagagagattcaggtgccctgaggtcctcttccagccgtcgatgattggtatggaggctgctggaatccatgagacaacatacaattcaatcatgaagtgtgacgtggatatcaggaaggacctctatggtaacattgtgctcagtggtggttcgactatgttcccgggtatcgctgatcgtatgagcaaggagatcacttcccttgcaccaagcagcatgaagatcaaggtcgttgcaccgcctgagaggaagtacagtgtctggataggagggtcgatcctagcctcgctcagcactttccaacagatgtggatatcgaaggaggagtacgacgagtctggcccggcaattgttcaccggaagtgcttctagggtttcacaagttcctcgtcgttacctagtctcaaattatgtcccctccatttctcgagatatgtgtggcagatttgcatgatacgtttgtttgtttccatcggacctgaagtcttcttggggataggctcccccctttgtatgttgtggctccaatccatgtgcgagcacgctgtgtctgtcgtgacacctggttcgtgagatgggttgtcaaacttgattggtttgttgtgcgtggctggaagagctgatagttatatatttggcttggactgtgccgcttgtatgtatctgaattctgaaagcgttgtaatctgagcatccgtgcaaagtatgaatggcccttttatatgggctggattttccggtttctataaaaaaaaaaaaaaaaaaaaaaaaaaaaaaaaaaaaaaaaaaaaaaaaaaaaaaaaaaaaaaaaaaaaaaaaagcggcc

SEQ ID NO: 30282 - DNA, 1880 bp, Zea mays
  Clone ID: MRT4577_127629C.1
ttttgtcatatttagtagaaaacaagtgaaattgttgcaccttaattcattaaaaaaaaaaaaaaaaaaaaaaaaaaaaaaaaaaaaaaaaaaaaaaaaaaaaaaaaaaaaaaaaaaaaaaattcctcgtgctgtgtctctgtctgtcgctctcgctctcagacgactgggccgccgccgcttggtgctgaggctttcgttggtctcttcggcggcgacgagcacccaccagcagttctgtagaaatggctgatggtgaggacatccagcctcttgtctgcgacaatggcaccggaatggtcaaggctggttttgctggggacgatgcaccaagggcggttttccctagcattgttggccgtcctcgccacactggtgtcatggtagggatgggacagaaggatgcatatgttggcgatgaggcacagtccaagagaggtattctcacgctcaagtacccgattgagcacggtattgtgagcaactgggatgacatggagaaaatctggcatcatactttctacaacgagcttcgtgttgcaccagaggagcaccctgtgttgctcactgaggctcctttgaacccaaaggccaacagggagaagatgacccaaattatgtttgagactttcaatgttcctgccatgtatgttgcaatccaagcagttctatcactctatgctagtgggcgtactactggtattgttcttgactctggtgatggtgtgagccacactgtgcccatttacgaaggatatgcccttcctcatgccattcttcgtttggatcttgctggtcgggacctcacagactccctcatgaaaatcctgactgagaggggttactccttcacaacctctgccgagcgagaaattgtaagggacatcaaggagaagctggcatatatagcccttgactatgagcaagagttggaaactgccaagaacagctcctcagttgaaaagagctatgagctacctgatggccaagtaatcaccattggtgcagagagattcagatgccctgaggtcctcttccagccatccatgattggtatggaggctgccggaatccatgagacaacatacaattcaatcatgaagtgcgacgtggatatcaggaaggacctctacggcaacattgtgctcagtggaggttcgactatgttcccgggaatcgctgatcgtatgagcaaggagatcacttcccttgcaccaagcagcatgaagatcaaggtcgttgcaccgcctgagaggaagtatagtgtctggataggagggtccatcctagcctcgctgagcactttccaacagatgtggatatctaaggaggagtacgatgagtctggcccggcaattgttcacaggaagtgcttctaggcttcgcaagttcctcatcgttgcctagtctcaagttatgtccccttcatttctcaagatacgtgtggcagatttgcatggtacggttcatttatcaaattatgcccaccccctctttgtatgttgtggctccatgtgcgagcacgctgtctgtcgtgacacctggttcgtcagatgttttgtcaaacttgcttggcttgattggttgtacttgtacctgtaagagctgatagttatatgaatggcttggactgtcctgctgtttatagccttaggactagtttggaaacacaatcccccttggggattaaaaggggctgaggaggaaattagttcatttccatctcaatccctttcaatcccgaatggggtttaaggtttcccaaagtagcccttagtatgtattctgagcatccgtgcaaagtatgaatgaccctgtagatgggctgggttttctggtttaaaaaaaaaaaaaaaaaaaaaaaaaaaaaaaaaaaaaaa

SEQ ID NO: 30283 - DNA, 512 bp, Zea mays
  unsure (1)..(512): unsure at all n locations
  Clone ID: MRT4577_12762C.1
ttttttttttttnnnnnnnnnnnnnacggttttgatattaataaaattctcgggacaaataaaactagcgacctgagtgcatttagtactgtaagttataactgaatattttctctgaatctctggacgtgcccgattctctcgctgtagctagctgcatgcctacatatggcaccgtgatcagagtttgtttttcagaagctctgacgacgacggcggtgtaacggcctcctctgcagcactagcatcacccgtctgttcgtccacggcacccgctctggggcccttgttcttcttgatgaaactgatgatgtcctcggccgttcttccgccattgtaggaataaagttcaccggtggttgagtagaagtagatcgtggggtatccctccaccgtaaagtcggtagggatatcatttgcagtgccatccatctttgcaatgacaacgtcttcgtcgtcttgcaatgagactgcaacttcctccaggattggggccagcttccggcaatggc

SEQ ID NO: 30284 - DNA, 412 bp, Zea mays
  unsure (1)..(412): unsure at all n locations
  Clone ID: MRT4577_127630C.1
ggccggnactccgccttgttgattggaagacttttttgagtcgtttcaaatagccggtcccaagcccggtaaaggaggagggttgtgttaggtccggcaaaccaacgtaaaaaaccagccaaatcttatggagatgaaaccactttagtaattcaatgctcatgtgttcagattaggttgtgggaaactgacctcaacagggttgagatgatggggtgggatttgtacgaagattttcctagcaaggaatggtttgaacaatgctgtgattatgcaagggataatgggtacttgctgtgggaggaccccaagagaatgagactaattgtacgaggggagttacaccctgaaatgagggagtttcttcgcaggcaaatatgaggaacgacctttttctttacggaccatgcta

SEQ ID NO: 30285 - DNA, 1881 bp, Zea mays
  Clone ID: MRT4577_127631C.1
gtcaatgataacctgcgttgcattccgcccgctggacttcctcgtgctgtgtctgtctgtctgtcgctctcgctctcagacgactgggccgccgccgcttggtgctgaggctttggttggtctcttcggcggcgacgagcacccaccagatgccacttgcagcagttctgtagaaatggctgatggtgaggacatccagcctcttgtctgcgacaatggcaccggaatggtcaaggctggttttgctggcgacgatgcaccaagggcggtttttcctagcattgttggccgtcctcgccacactggtgtcatggtagggatgggacagaaggatgcatatgttggcgatgaggcacagtccaagagaggtattctcacgctcaagtacccgattgagcacggtattgtgagcaactgggatgacatggagaaaatatggcatcatactttctacaacgagcttcgtgttgccccagaggagcaccctgtgttgctcactgaggctcctttgaacccaaaggccaacagggagaagatgacccaaattatgtttgagactttcaatgttcctgccatgtatgttgcaatccaagcagtgctctcactctatgctagtgggcgtactactggtattgttcttgactctggtgatggtgtgagccacactgtgcccatttacgaaggatatgcccttcctcatgcgattcttcgtttggatcttgctggtcgggacctcacagactccctcatgaaaatcctgactgagaggggttactccttcacaacctctgccgagcgagaaattgtaagggacatcaaggagaagctggcatatatagctcttgactatgagcaagagttggaaactgccaagaacagctcctcagttgaaaagagctatgagctacctgatggccaagtaatcaccattggtgcagagagattcagatgccctgaggtcctcttccagccatccatgattggtatggaggctgccggaatccatgagacaacatacaattcaatcatgaagtgcgacgtggatatcaggaaggacctctacggcaacattgtgctcagtggaggttcaactatgttccctggaatcgctgatcgtatgagcaaggagatcacttcccttgcaccaagcagcatgaagatcaaggtcgttgcaccgcctgagaggaagtatagtgtctggataggagggtccatcctagcctcgctgagcactttccaacaggtatgttgtattgtttatattactttcagctgctgcattttatttctatgaactcgtattactttccaacaggtatgttgtattgtttatattactttcagctgctgcattttatttctatgaactcgtattatgatgaaacgaaataacttctgagttctgttatgatgtgcccttgatttaccagatgtggatatctaaggaggagtacgatgagtctggcccggcaattgttcacaggaagtgcttctaggcttcgcaagttcctcatcgttgcctagtctcaagttatgtccccttcatttctcaagatacgtgtggcagatttgcatggtacggttcatttatcaagttatgcccaccccctctttgtatgttgtggctccatgtgcgagcacgctgtctgtcgtgacacctggttcgtcagatgttttgtcaaacttgcttggcttgattggttgtacttgtacctgtaagagctgatagttatatgaatggtttggactgtcctgctgtttatagccttagtatatattctgagcatccgcgcaaagtatgaatgaccctgtagatgggctgggttttttctggtttatattctttaggctgtgtccaacagcttacttatatggttttcc

SEQ ID NO: 30286 - DNA, 1779 bp, Zea mays
  Clone ID: MRT4577_127632C.1
ggaaggagatcgtgcctacgcttgtcttctccctccattcattcacacaccacacctcccgaactccgaactacaagtttcgcttctcgtcgcgacgactgggcgagaccgccgccgccgccgccgcctgagctaggacggttccctggagaagctgacatcgtcgtcgctgtcgctggcggggaggttgtctggccggacgggggccccgcggcggcgccggcctcgatctgttctttagaaatggctgatggtgaggacatccagcctcttgtctgcgacaatggcactggaatggtcaaggctggttttgctggcgacgatgcaccaagggctgttttccctagtattgttggccgtcctcgccacactggtgttatggtagggatgggacagaaggatgcgtatgttggcgacgaggcacagtccaagagaggtattctcacgctcaagtatccgatcgagcatggtattgtgagcaactgggatgacatggagaaaatctggcatcacactttctacaacgagcttcgtgttgccccagaggagcaccctgtgttgctcactgaggctcctttgaacccaaaggccaacagggagaagatgacccagattatgttcgagactttcaatgttcctgccatgtacgttgcaattcaagcagtgctgtcactctatgccagtggacgtactactggtattgttctcgactctggtgatgggtgtgagtcacactgtgcccatttatgaaggatatgcccttccccatgccattcttcgtctggatcttgctggtcgggacctcacagactccctcatgaaaattctcactgagaggggttattccttcacaacctctgccgagcgagaaattgtgagggacatcaaggagaagcttgcatatatagctcttgactatgagcaagagttggagactgccaagaacagctcctcagttgaaaagagctatgagctgcctgatggccaagtaatcaccatcggcgcagagagattcaggtgccccgaggtcctcttccagccatccatgattggtatggaggctgctggaatccatgagacaacatacaattcaatcatgaagtgtgatgtggatatcaggaaggacctctacggcaacattgtgctcagtggaggttcgactatgttccccggtatcgctgatcggatgagcaaggagatcacttcccttgcaccaagcagcatgaagatcaaggtcgtcgcgccacctgataggaagtacagtgtctggataggagggtcgatcctagcctcgctcagcactttccaacagatgtggatatcaaaggaggagtacgatgagtctggcccggcaattgttcacaggaagtgcttctaggtttctgccaagttcgtcaagtgcttttagggttcgccaagttcatcatcgctacctagtcttaagttatgcccccttcatttcctgagatatgtgtggcagatttgcatcgttttggtatttcgtggctccatgtgtgagcatgctgtgtcctataacctggtttatgagatgagttgttaaacttgcttggtttgattggttttacctgtaagagttgatagttatataaattgcttgtactgtgctgctgctatccataggcgatagccttgtttgcatccagaacatcccgtgcaagtatgaatggccctgtacatgggctgggttttctggcttaaaaaaaaaaaaaaaaaaaaaaaaaaaaaaaaaaaaaaaaaaaaaaaaaaaaaaaaaaacac

SEQ ID NO: 30287 - DNA, 2242 bp, Zea mays
  Clone ID: MRT4577_127633C.1
ctcgaggccggccgggacagaacagatcccttctcaatcgcatctgggtctggcagtcttctcgcggttgcaggccacaaacaactgctcctcctgcattccccctttccccttccgtccgctgcattcctgctctcttgctctcctcgctctcagaccacagttgccgccgccgccgccctaagccagggtgctgaggctttcgttggcctcttcgccggcagcgagcacccaccagcagttctgtagaaatggctgatggtgaggacatccagcctcttgtctgcgacaatggcaccggaatggtcaaggctggttttgccggcgatgatgcaccaagggctgtattccctagcatcgttgggcgtcctcgtcacaccggtgtcatggtagggatggggcagaaggatgcatatgttggtgatgaggcacagtccaagagaggtattctcacgctcaagtacccgattgagcacggtattgtaagcaactgggatgacatggagaaaatctggcatcacactttctacaatgagctccgtgttgccccggaggagcaccctgtgttgcttactgaggctcctttgaacccaaaggccaacagggagaagatgacccagattatgttcgagactttcaatgttcctgccatgtacgttgcaattcaagcagtcctgtcactctatgctagtggccgtactactggtattgttctcgattctggtgatggtgtgagccatactgtgcccatttatgaaggatatgcccttcctcatgctattctacgtctggatcttgctggtcgggacctcaccgactcgctcatgaaaattctcactgagaggggttattccttcacaacctccgccgagcgagaaattgtaagggacatcaaggagaagcttgcgtatatagctcttgactacgagcaagagttggagactgccaagaacagctcctcagttgaaaagagctatgagctacctgatggccaagtaatcaccatcggtgcagagagattcaggtgccccgaggtcctcttccagccatccatgattggtatggaggctgctggaatccatgagacaacatacaattcaatcatgaagtgtgatgtggatatcaggaaggacctctacggcaacattgtgctcagtggaggttcgactatgttccccggtatcgctgatcgtatgagcaaggagatcacttcccttgcaccaagcagcatgaagatcaaggtcgtcgcaccacctgagaggaagtacagtgtctggataggagggtcgatcctagcctcgctcagcactttccaacagatgtggatatccaaggaggagtatgatgagtctggcccggcaatcgtccacaggaagtgcttctaggttccgcaagttcctcattgttatctagtctcaagttatgcccccgtcatttctcgagatatgtgtggcagatttgcctgcgacgtttattttcatcggacctgagtcttctcggggttagcagctacctttgaatgttgtggctccctgtgcgagcgtgctgtgtcgtatcacctggtttgtgagattagttgttgtcaaacttgcttggtttgattggttgtgcgtttaagagctgatagttatatacatatattgctttgctataccgccgctatatctatgtagccttgtatgtatgtatctggattctgaaatgcaagaatgaacttcgagcagcctttgtgttgccgacaaaaaaaaaaaaaaaaaaaaaaaaagcttgtacacctgcccgggcggccgctcgaagttcattcttgcatttcagaatccagatacatacacaaaggctacatagatatagcggcggtatagcaaagcaatatatgtatataactatcagctcttaaacgcacaaccaatcaaaccaagcaagtttgacaacaactaatctcacaaaccaggtgatacgacacagcacgctcgcacagggagccacaacattcaaaggtagctgctaaccccgagaagactcaggtccgatgaaaataaacgtcgcaggcaaatctgccacacatatctcgagaaatgacgggggcataacttgagactagataacaatgaggaacttgcggaacctagaagcacttcctgtggacgattgccgggccagactcatcatactcctccttggatatccacatctgttggaaagtgctgagcgaggctaggatcgaccctcctatccagacact

SEQ ID NO: 30288 - DNA, 1113 bp, Zea mays
  Clone ID: MRT4577_127634C.1
cattgggaccctcgaggccggccgggtttggattcagggagctaaaaaaaaaaagcattcccctttcgtccactgcattttatccttcctggtgctctgtccacctctctcgctctgggccgccgccgccgccctaagccacgtgctgaggctttcgttggtctcttcgccggcgacgagcacccagcagttctgtagaaatggctgatggtgaggacatccagcctcttgtctgcgacaatggcactggaatggtcaaggctggttttgctggcgatgatgcaccaagggcggttttccctagcattgttggccgtcctcgccacactggtgtcatggtagggatgggacagaaggacgcatatgttggtgatgaggcacagtccaagagaggtattcttacgctcaagtacccgattgagcacggtattgtgagcaactgggatgacatggagaaaatctggcatcatactttctacaacgagcttcgtgttgccccagaggagcaccctgtgttgctcactgaggctcctttgaacccaaaggccaacagggagaagatgacccaaattatgtttgagactttcaatgttcctgccatgtatgttgcaatccaagcagtgctctcactctatgctagtgggcgtactactggtattgtactcgactctggtgatggtgtgagccacactgtgcccatttatgaaggatatgctcttcctcatgccattcttcgtttggatcttgctggtcgggacctcacagactccctcatgaaaattctcactgagaggggttactccttcacaacctcagccgagcgagaaattgtaagggacatcaaggagaagctagcatatatagcccttgactatgagcaagagttggaaactgccaagaacagctcttcagttgaaaagagctatgagctacctgatggacaagtaatcaccattggtgcagagagattcaggtgccctgaggtcctcttccagccgtcgatgattggtatggaggctgctggaatccatgagacaacatacaattcaatcatgaagtgtgacgtggatatcaggaacgacctctatggtaacattgttgctcagtggtggt

SEQ ID NO: 30289 - DNA, 366 bp, Zea mays
  unsure (1)..(366): unsure at all n locations
  Clone ID: MRT4577_127635C.1
tcnacacccagcgttttcttggctccttcttgtggggggggggggggctacacgtttctatgtttgaggtggcctcatttacattgtcgtggacccgaagctcctaatgcctccaggctcatgactaacccccccccaccccgccctgtcccgtttcaaccaggctctacctttctgtggctgagccttgggggggggctttgcgccncaattttggtttcctcaatgagagggtgccctgcttcaaccgaatggtcacaccctcccttcgttcgggggctgacgctgtcacagactcccctggccccgtgacggaggatgtttttttctttccctgtccgctcgccggtggcggcatggtgccgg

SEQ ID NO: 30290 - DNA, 385 bp, Zea mays
  Clone ID: MRT4577_127636C.1
gcatatgaatcgatggatactgatctgcatcagatgattcgtacaaatcaagctttgtaagatgagcactgccagcatttcctttatcaaattgtgaaccggctggatggatctacattgccgaaagggtcttcatcgtgatttgaagcctagcagtgttttttagaatgcaaattgggacataaagatatgctgattatgagctagctctcaccatccattaaactgagattacgactgaatatgtggccactatatggtatacaccaccagagcttttgttgaactaatcagaatatactgctgccatcgatgtgatatctcgtgggctatatatttatggaactgatggaccaccaactctgaatgcctggacaaaaccatg

SEQ ID NO: 30291 - DNA, 461 bp, Zea mays
  Clone ID: MRT4577_127637C.1
gagctatgacgtcacatgcactcgctccctgtacctaagactccgatacagcggacgcgctcgtcttttttttttttttttttacacaaaaaggctagatcgggctgaattttgtacacagtgcgactacaaatccctttcataaactacaaaaaaccacctgcttcatgcctgccaatagctccaacacggttaacaggaacccatctgtaaatgttaaaataccagatccatatcaagggcgcctaggcacgaccccctcatactttcttgttactccactgccggggggatagcattcctgcggaccgggaactgccacaggagaaggccggaatttgttctgccaacctgggcagccagccgcaaggagcaatttcttcaaaaaaaactgcccccatgtctgatgaaacaatcacgcatgggaccatttgtgcagactggtgcattctattttacaa

SEQ ID NO: 30292 - DNA, 734 bp, Zea mays
  Clone ID: MRT4577_127638C.1
atgcgaacaagcccgcctcaataattgtgtcgagtgggagtaaacttttcaattttatgtagccccagtagacgacctcccactcacgccgcccgtcgtcgtcctcctcctcgtcgcggtcgtagaggaggcccctccgcacagtacagtttccaagtgtaccctctcgtactacgtacttgtctaccttcccggccacatccagaccagagcaactcccgacactgacgaccgccgagcgaggacggacggcgaggcgcgccttccccgcacccgcagcgaccacggcgacggaggcgtagaagctcctctcctgtctcctctgcatacggttcgggctaacgccgacgaggaggaggcgattggcggttgaatctggtggaatggcgcgccggagtcgaccgcgatggagcagcacgcgctccggggtctcagcgccggcggggagggatcaaatgcagatcctcttctagcgtcaggttcccagattccccgagttctctgatccagttcttgcttgcaacttcgtggccgccctacggtgttctcggatctggtttgcttgagatttcgcggaggagatggacgaggacgagtactcgtgggtgcggcgcaccaagttctcgcactccatcgtcaggtctagctccggcaggtgctccttcgacgagcagttcagccgccgcgccgtgtccatacagaaagattttgattcagagctcaagagcctgcag

SEQ ID NO: 30293 - DNA, 280 bp, Zea mays
  Clone ID: MRT4577_127639C.1
gaaaaaaatagataacaggtttagctgtgatatacaaaaccatgtatgctggaggagggacatatgttatacattccaacttgtcatgctggttattgcgtggtacggctaaaatcgcgtccatcaaaaaggtttacagcaaggcagaaaaagtttgccgttcgaaacccctttttgccacttctaacacgatgggcaggaaccaaaaccgtatggactagctaccaaacgacctgatgtagatcgttgattacagcccgcggatcatcccaatcttttt

SEQ ID NO: 30294 - DNA, 596 bp, Zea mays
  Clone ID: MRT4577_12763C.1
gtagtagcgttgggctgcggcagcggaggagctcaacatgcgtgagtgtatctctatccacgtggggcaggcaggagtccagatcggcaatgcctgctgggaactgtactgcctggaacatggaattcagcccgatggtcagatgccaagtgataaaaccattggtggtggggacgactccttcaacacgttcttcagtgagactggagctggcaagcacgtgcccagagcagtgtttgtggacctggagcccactgtggtcgatgaagtgcgcacaggaacctataggcagctcttccacccagagcagctgatcaccgggaaggaagatgcggccaataattacgccagaggccattacaccatcggcaaggagatcgtcgacctggtcctggaccggatccgcaaactggcggatctgtgcacgggactgcagggcttcctcatcttccacagttttgggggtggcactggctctgggttcgcatctctgctcatggagcggctctcagtggattacggcaagaagtccaagctagaatttgccatttacccagccccccaggtctccacggccgtgggtggagccctacaac

SEQ ID NO: 30295 - DNA, 1732 bp, Zea mays
  Clone ID: MRT4577_127640C.1
gatataagtcacatctttcttggcctcctatcttcgcctccagctgggatgagtctgtctcattacgatggggtgatcttgggctttctgtttcacatatcttcaggcctgtgcctggatgctgtaccatgcttggtcctatgaatattgaagtaaagcaacggaaagttgtagctgttggtaggaaacggactgcacggccaacagaaaatacctgtcctgaagagcttgctgagtcttcagaggaagtaaagacagacactgacaggaatgtcttagttatgtttgatatcctcaggcgaaagaagagcgcaaaattggaaaaccttgtgttgaataggctttcatttgcccaaacagttgaaaatgtttttgcactatctttcttagtgaaagatggtagggtggaaataactgtagatgatagcgggcatatagtacggccaaggaatgcacctgctgctagcgctatagcctcaggagaagtctcatacagtcattttgtttttagatttgacttgaaggactggaagcttatgaaagaagttgttacagagggagaagagctgttgccacatgcgcctgcccagagcaatctttgcaacgaagaaaacgaccaaccaaatctggaggtacgtgcacaaataatgcctatcaggaagaagagctcgtgcttatctgaacttccagttgtgccagcggagtagggctgtaattataaattgtttgaagttctggtcacatcttgcaactacagaatggtgtttgtagggctgagtgtaactagctagcttggctcgtgttgggtcattaagggtgtgtttggttggatgtatatggagggatggaaagggacgaccacatattctatagtgtttggattagagtcgcgtggggcgagataaacatcggagtaattttttggtggcggtgtgattcaaaaatttgactactttgatctcaaactaaacatattctaactcatttatcatggcaagatatgtctcgggtaaacttgttaggctgtcataacttatccatcctatctcttattttaaattttatttttttgtaaatattataatttacagtgcaaaataatgttttacacgtctatatagacgatctactacaaacaaccttaagaaatgagttaaaagtttagcttaacatcttgagcaaatcaatgctaaagagaagttgctcaaatcaatgcgtgattgtgatccttcgtctgtgcacccactggatttgtataagttgttttcttgtttttatttttttgttattcctaccattaaattgggcattcaatacatgttcattatctttatgcttatgcaatcaaataatgatggaaaataactgacttggctgctctcttgagttgtggcaacggaagttccaggccccgttgcagctgggagtggttttatactcgctgatgacatcaagtcttaggtgcttccattgatcaatgactcagggaaatatggagggatcatgatgtggttcaagtactatgatgatcaagatggctacaattcttgagtgaagagtgatgtttaggttgttgtctgtggtgtgtgacaatatctgtgtgttacttgtgtgtatgtgagaaattatgtgactctggagtctggatagtgcaataagtattactcaagtatatgattgaatcttatgtcatactattcaaattatgtcatatgtatcttttaaggtatgt

SEQ ID NO: 30296 - DNA, 357 bp, Zea mays
  Clone ID: MRT4577_127641C.1
ggggtcaattggcaacttgaaccagccatggcggtgcaccggctcgaacgccgcggacgccgctgcctctgctaagcattgacgtcacgcggcaccgccggcggcataagcgcaccaagaccccattgtagtgtgtgcgcactgtgctagcctccatgacctgcgcgctcatgggctacaacgcgcgggctacgagctgtgctgacttgatcatggcattcaagctgacggtgagatgcccgcagacaagagcattgtgggaggtgatgaagatatactcgctcgttggagcgctgctggcaggctgaacctgcgaccgtgtggtgcggtggctgaccatggtcctcgtggacgcct

SEQ ID NO: 30297 - DNA, 723 bp, Zea mays
  Clone ID: MRT4577_127642C.1
tttttgcactttttttttagtgaaaaatggtagggtggaaataactgtagatgatagcgggcatatagtacggccaaggaatgcccctgctgctagcgctatagcctcaggagaagtttcatacagtcattttgtttttagatttgacttgaaggactggaagcttatgaaaaaagttgttacaaagggagaaaagctggtaccccatctcggtactcggctcgagctttgcaacgaagaaaacgaccaaccaaatctggagggaaatatggagggatcatgatgtggttcaagtactatgatgatcaagatggctacaattcttgagtgaagagtgatgtttaggttgttgtctgtggtgtgtgacaatatctgtgtgttacttgtgtgtatgtgagaaattatgtgactctggagtctggatagtgcaataagtattactcaagtatatgattgaatcttatgtcatactattcaaattatgtcaaaaaaaaaaaaaaaaaataaaaaataaaaaaaaagaactatgaagagatcagaaaaaaaaaattaaaaaactgacactttgggggccctgccgaatctatgttaagagtcccgggtgcaaatggttccgcggcgcctccgagggtcgaactattgttgaaattgtgagatatattcacgtgcgtggctacagcttttccatatctgtttgcggaaaaaaattatgaaacggccggg

SEQ ID NO: 30298 - DNA, 2104 bp, Zea mays
  Clone ID: MRT4577_127643C.1
gacgcactcgtccgaaagtcatcaccacatccagatatttgatgttgctattatttgaaagctgctgcggaaccggtgggagatgtagctgcgctatcgtcaaggctggctaggaggctactacatggatcatggtgccctcctcggtgccaggggatatgcttggatcagcgtagggaacattcatgctatggacacaaactcaggtggacgtggtgttcgacaattcaaaacatacctattacatatattggaaaaggaaaccccaggcgtttcaaagttagagtttcacagcttgcagcgaatttgggttctttttaatttgttgctttagtattgaattaacgtatgatcattgtggtttatggttcgcattggaatttatgtgttgttcgtgcttgatgaattttctccaaaagaacaagggagacaataagaggcgatgttgaagctgccgatcccgggaataaagctgctgcggaaccggtgggagatgtagctgctgcggaacacgaaagttttaatcaaggaaatggtccaagggtgcatcactggaataagctcgagaccacaagtgtcatatctcctctaatctttactctctcaggttccagttgaatatgttcattgctacaatgaagccgttttgttgtttgctgtccgccgccgtattcggggtcttcgcctgcctctatgggctcagggcggacaggggcctacaagatctcctcgggccaaggaatcgttcccctccggcgacctccctcctccctttcgtctcaggccttccactgtatctccatcaaagcgaaggatcagaggctactccgttaggaggagaggaaaggaattgtgagccttgtgttggagaagtcgaagactgagagtatatggtggctccattggtgtccatgttaatggctggcgtgttctagagcaactcggggttgtcgtagagcttagggagacttgccaaccttagggagacttgccaaccttgtcatcgcgtaccatgccaacagaatgcttagcttttacgcaccagcgcgtgacgccatgtgggagcaaagttgggaaaatggatattggcggtggtcgagaggtcactcttattggaagtctagaaatgccaaaggattacgtttggtcaccgcaatcgaaagaagagcgcaaaattggaaaaccttgtgttgaataggctttcatttgcccaaacagttgaaaatgtttttgcactatctttcttagtgaaagatggtagggtggaaataactgtagatgatagcgggcatatagtacggccaaggaatgcacctgctgctagcgctatagcctcaggagaagtctcatacagtcattttgtttttagatttgacttgaaggactggaagcttatgaaagaagttgttacagagggagaagagctgttgccacataggacttcccagagcaatctttgcaacgaagaaaacgaccaaccaaatccggaggtgtggcaacggaagttccaggccccgttgcagctgggagtggttttatactcgctgatgacatcaagtcttaggtgcttccattgatcaatgactcagggaaatatggagggatcatgatgtgttcaagtactatgatgatcaagatggctacaattcttgagtgaagagtgatgtttaggttgttgtctgtggtgtgtgacaatatctgtgtgttacttgtgtgtatgtgaaatcatatgagctgggagtggttttatactcgctgatgacatcaagtcttaggtgcttccattgatcaataactcagggaaatatggagggatcatgatgtggttcaagtactatgatgatcaagatggctacaattcttgagtgaagagtgatgtttaggttgttgtctgtggtgtgtgacaatatctgtgtgttacttgtgtgtatgtgagaaattatgtgactctggagtctggatagtgcaataagtattactcaagtatatgattgaatcttctgtcatactattcaaattatgtcatattgtatcttttaaggtatgtaaacatccacttttagcgatgctaacaaaagaatagaacaacaattagtgttttcat

SEQ ID NO: 30299 - DNA, 215 bp, Zea mays
  Clone ID: MRT4577_127644C.1
gcacgatgtcgcatctctcctcgtcggccatctgcagggcacctagcgcgtggtcggcgagcgcgcgggcgggcggcatggggcgccgctgcggcgatcgctcaggcccccactcacagacgactgggccggccttcaacgctacttcggccccttcgtcgccgactagaaccatcgcgtgctggttggcatggcaagtacagcatgctttggga

SEQ ID NO: 30300 - DNA, 304 bp, Zea mays
  Clone ID: MRT4577_127645C.1
ctcggtcacatttgcccgtcttgcaagggaaaggcttctggtcatcttggggtcaacgggccatctattcgaaatcagcttcttgtaacctgaactggtgctgctgctccaccatcaatttatactctacttcatatgagtcgatcagtactacgtactatgtctgctttaactcgttgctagtggaggaaacaggtttattcaaatcttacatctctggttattaaaactcatccattaagcagctgttgcgaacaacgaagctgacttgttcgatacatacatgactgagctctcaagagac

SEQ ID NO: 30301 - DNA, 512 bp, Zea mays
  Clone ID: MRT4577_127646C.1
ccggccgggccgggtttcacaataaaaatgaaacaaaaaaaaaaaaaaaaaaaaaaaaaaaaaaactcctaaggaccctcgaatcgccccttaggcccccttggccccgggttaattaaccccttaagccggagttcagctcgacacaaggcaatccgggggcaatggcgtgcctcccgcccctcacctgtcccccgtacagaaagcataaaacctacaagcccgaacgcccaacgactgggggcaggggcgcgttaattgtgtgggtctctcggtccatttcttcctcccatgaagacctcttttgcaattgagcaacggttccgccatccgcatccaagaacacggacaaggtgatgggcggtcacgccttgcttctgcaggctcattccgagttctagctccacaaaattccggccggagttactaccccgagttacctcgttctctgtgtcccgcacttctactcgcagctatcagccaaaatcggggatgacgaggggatgaacaag

SEQ ID NO: 30302 - DNA, 354 bp, Zea mays
  Clone ID: MRT4577_127647C.1
cctacgcgtaggcgaggtacttgctatacacaaacacagcggaggcttgctgactgaatatgagcggctgatggaggatcattagtacatctgcacacagctgctgcctatggaccgctggctttgcaactcttattgaacgaatagcatattcaggggatgctggataacctctgtgaaagagcatgttaccacccaaagagtatggcagctacctgcttgctgactggggagtaccagcatttaaaagtaacttgctctggcattatattgatggcaaaactggcgcgaggcatttgtggtccagaactacggaggctctcttgcgaggttatagctatgcctacgtgttat

SEQ ID NO: 30303 - DNA, 171 bp, Zea mays
  Clone ID: MRT4577_127648C.1
ttatatctgatgtgcgaacacattatcttactaaacctcattctaatgctacatcactaaaacctatcttccgaaatcacataccatatctatctctacatctacaacatatataacatttaatatgtacacacttaaactttaattcaacagtctaatcataccatcatt

SEQ ID NO: 30304 - DNA, 510 bp, Zea mays
  Clone ID: MRT4577_127649C.1
gttggttatcgaaactacaaaaggtatgttaggagcccagttcctgacttcaacttgagcccagcctgatctaacaatggggtcttctggagctgctgtttacccacattggccaaccccagcaatgatgtatccccattgctatgacaatgttggttcaatgatttctcaggttcctctgtaccaatctttcaaccatggttagtagattctgcttactggaaagttgggaaccgttctctgttgaacttgttatattgtgccgtcctatgttaagtggagttactttagattcgagccatttcgattacagaaaattccaaaaaattcatgtaatgtcgaacgtattagtttgtataatggggagtcctaattcgttgaaactaatatcgtgaactagtctggaaaaaaaaaaaaaaagggcacccgctcgcgatctagaactaggttaaagtttgtgctggtttgagaatttttgttccccttgtcatcatttaagtgtctccccgt

SEQ ID NO: 30305 - DNA, 354 bp, Zea mays
  Clone ID: MRT4577_12764C.1
ggaacaacccgggctgtggaccaccgagaacagcaaagaaccccgaacaagcggacccactgggcaaacggccccacttagcgaaacgcccaaaaaacagaaaggagaaaaaaacgccgggggcaagacaacccccccagagacccaaaaccccgggtgaacaagagcgaccggtgaaaaagggggcccacccaagaccggggcgaaaccgggccccgggggaaaagggaaacccccgggctacgaaaaaggccggggtggggaaacaggagggttgccaagggggggggggcccccggggaaattacccccacggccccggggggggaaaaaccccccccagagaaaaaacca

SEQ ID NO: 30306 - DNA, 1540 bp, Zea mays
  unsure (1)..(1540): unsure at all n locations
  Clone ID: MRT4577_127650C.1
ttgggtacctcgaggggccggccgggaaaaaaaaaataaaaaaaaaaaaaaaaaaaaaacgcagatccctgcctgcacacggcatccggagttccggactcccctcctcttctcgggcagccgggcgccgcttcgcctcctcctcgcaggcaagaagagcagccagccgcttcgcgatcggggacgcggagaggggaaaggcgagtcgtcgtccgtccacggcagcttccctccctctcctctccgccccngtttacctcgaggccggccccgcctacgccccctcccgccgccgcacgatgagcacttctcccgccgccgccgacgtttcgcctttgccgcctactgctgccgccgacgaggccgcgcgggcgacagagacggtggtggtcgatgagagggtcgcctcacacgtggacccgttcctcgtcgaggcgctcgacaaccctcgtcaccgtctcatggttctacggatggaactggatatacaaaactttatgcagaaccctcagctgcaggagtttgaattccagaactttccgacttcttacctccgctgtgctgctcatcgtgttgcacaacattatggcttagagactatagtagcagatagtttagtagaaggctcagttagcaggattgttgcaagaaaaacagcagaaagcaggcccaaagcattccaaaatggaagcgctgattctagaaacaagagtggtgtaccaaaaactgttgatgagagaatagaggaatataataaagcacgagcacgcatcttcaatggttccatttctgcagattctgatgctgcaagtattatgggaactctttctactggcaaagatgaaccagtaaatgttgacccttctgttgatgaaatcaaagtcagcacaatgaacagtcgttccagagttgctgtttttaaggatactgaaaaggatcgtagtgacccagactacgatcgaaactacaaaagtttatgcagtatggcattggttatgtgcaatctcctggcatgtccacaaaccagcatactatgtactttggccacgaggcctgatctaacaatagggtcttctggagctgctgtttatcgacattggccaaccccaacaatgatgtatccccattgctatgataatgttagtccaatgatgtctcaggttcctctgtaccagtctttcaaccatgattaggagattctgcttgctggaaagttgggaacaattctctgttgaacttgctatgttgtgttgtcctatgttaagtggagttcctttagattcgagccgtttttattacaaaaaattgtataaggagtcctaattcgttgaaactatttcgtgaactagtctggaactgtgatgcttgtctaatgtctagttctcgtttgcaatttgctcccggtttatagttagtagtgtgctgcgactggtcttgaaccgtgtcgcgtggtcgtactggtagaaccaggttgctacttgccagcagtcattgctttgattccgattttttatttaacttctttttaatcaagtatttc

SEQ ID NO: 30307 - DNA, 403 bp, Zea mays
  Clone ID: MRT4577_127651C.1
cgttgctgtcgaacgaatcgctaataaaatgaaagggcatgaccaatatatagaaaaaagaactgtcaagtgtcgatagttcggtggagcaagtggcgcgatggcgtcagcgtcggcgtcgtgctttgcggtggtactggagacgagagggaggagacagatccgtattgtggctcaccatgcaacgagtgacggcaagaggcgtctaggtggcaggatggagccgccattggggcgccggagcataggatttgaggatggcttggagaaggcaaagagcacgtgaacgccagcaagagattctaactgccgcaaccattgtccagatcattgatgaggaggaagaacgtcctcgtcgtctctctgtaattgggagggcgacgctagctgcacagggctattg

SEQ ID NO: 30308 - DNA, 1056 bp, Zea mays
  Clone ID: MRT4577_127652C.1
tcctggccccgcctacgcccccctcccgccgccgcacgatgagcacttctcccgccgccgccgacgtttcgcctttgccgcctactgctgccgccgacgaggccgcgcgggcgacagagacggtggtggtcgatgagagggtcgcctcacacgtggacccgttcctcgtcgaggcgctcgacaaccctcgccaccgtctcatggattctgatgctgcaagtattatgggaactctttctactggcaaagatgaaccagtaaatgttgacccttctgttgatgaaaccaaagtcagcacaatgaacagtcgttccagagttgctgtttttaaggatactgaaaaggatcgtagtgacccagactacgatcgaaactacaaaaggtatgttaggagctcagtgcctggcttcaacttgagcccaggtgtttttaactttcttgtgcctcagtttatgcagtatgacattggttatgtgcaatctcctggcatgtccacaaaccagcatactatgtactttggccagcctgatctaacaatagggtcttctggagctgctgtttatcgacattggccaaccccaacaatgatgtatccccattgctatgataatgttagtccaatgatgtctcaggttcctctgtaccagtctttcaaccatgattaggagattctgcttgctggaagggaacttctctgttgaacttgctattataatcctagcttacaaaaaattcgttgaaactcggggcataatcatataaggtcccgtttgtttccttttatttcgagaaattgaaatcttcctaatggaataagctatttttttagaatgtgatattcccccccttttcaaagttttcatataaggctatctcaaattcatggggcgagagatgaaaattgtttatccagatttccatgcttttttccgatggccaatttataacccccccttctatttgtttcgctataaaataaatgtatatacctatctctctcatatgatgtaagataatatccaaatatattccatatataaatatatggacttaatt

SEQ ID NO: 30309 - DNA, 442 bp, Zea mays
  Clone ID: MRT4577_127653C.1
gcagtttctggtcatcacatttgccaagaactccttatgacatctcccttgatgatgagacacaaaaccgcaatgatcaggtgaacaccctgtgcaaatcatgttatgtaatagttgtaccttttgttagtattgccgaacaaatttgacattgatgcaggggtttgagaaaatggtctctgggatttatcttggggaaattgcaaggctggtgctgcatcgaatggctctagaatcagatttttttggtgacgctgctgataatctatgtacccccttcacattgagcacaccactcctcgctgcaattcgcaaggacgattcaccagatctgagcgaagtcaggaagatactgcaagaacatctgaaggtcagctttcctgaccttcatgaagtcaaacatgtgttttcctccaacctgtgaaggttctggtgattttgc

SEQ ID NO: 30310 - DNA, 186 bp, Zea mays
  unsure (1)..(186): unsure at all n locations
  Clone ID: MRT4577_127654C.1
ggacctgggtccctgtaacgattggctcagtgattgaatatatatacaatactgacttactanaaaaaaaaaaaaaaaaaaaaaaataataaaaatataaaccaaaaaaaaaaaaaaggggggccgttcctaagtgtccccacttgcgcattggaggctagccatacaacagacagtgtgatgtct

SEQ ID NO: 30311 - DNA, 2336 bp, Zea mays
  unsure (1)..(2336): unsure at all n locations
  Clone ID: MRT4577_127655C.1
gccgggcctcgaactcctcgcaggcaagaagagcagccagccgnctcgcgatcggggacgcggagaggggaaagcgagtcgtcgtccgtccacggcagnctccctccctctcctctccgcccccgcttacctagcccggnccctcctacgcccccccccctcccgccgccgcacgatgagcacctctccggccgcgcccgccggcgagtgggatccgccgcatttcccgagagccgggctgcctgatcaagcacgaacgactcggatcctgaccaggcctccggtttcggattccaattccaccggccaccccgagcccgatatcgtcttctaatctcatccgctccgtgccgcaccggaaaacgcagatccctgcctgcacacggcatccggagttccggactcccctcctcttctcgggcagccgggcgccgcttcgcctcctcctcgcaggcaagaagagcagccagccgcttcgcgatcggggacgcggagaggggaaaggcgagtcgtcgtccgtccacggcagcttccctccctctcctctccgcccccgcttacctagcccggcccctcctacgcccccccctcccgccgccgcacgatgagcacctctccggccgcgtccgccgccgcgtcgcctccgccgcctattgcctccgccgccgaggcctcgcgggcgacggagacggtggtggtcgacgagagggtcgcctcacacgtggacccgttcctcgtagaggcgctcgacaaccctcgccaccgcctcatggttctacggatggaactggatatacgaaactttatgcagaaccctcagctgcaggagttcgaattccagaactttccgacttcttacctacgctgtgctgctcatcgtgttgcacaacattatggcttagagactatagtggcagatagtttagtagaaggctcagttagcaggatcgttgcaagaaaaacaccagagagcaggtgtcctgcaatttcattagcagaagttcctagcaaacaagcaagaaatgatcatgaggcagcagagaagcttaagtttgtcatttatcaaaggcccaaagcattccaaaatggaagcactgatttgggaaacaagaatggtgcaccaaaaactgttgaagagagaatagaggaatataataaagcacgagcacgcatcttcaatggttctgtttctgcagattctgatgctgcaagtgttttgggaactctttgcactggcagagatgagtcagtaaatgttgaaccttctgttgatgaaatcaaagtcagcacgatgaacaaccgttccagagttgctgttttcaaggatactcaaaaggatcgcagtgacccagattatgatcgaaactacaaaaggtatgttaggagcccagttcctgacttcaacttgagcccaggtgccttcaactttgtgcctcagtttatgcagtatggcgttggttatgtgcaatctcctggcatgtctacaaaccagcctgctgtctactttggccagcctgatctaacaatggggtcttctggagctgctgtttacccacattggccaaccccagcaatgatgtatccccattgctatgacaatgttggttcaatgatttctcaggttcctctgtaccaatctttcaaccatggttagtagattctgcttactggaaagttgggaaccgttctctgttgaacttgctatattgtgccgtcctatgttaagtggagttactttagattcgagccatttcgattacagaaaattccaaaaaattcatgtaatgtcgaacgtattagtttgtataatggggagtcctaattcgttgaaactaatatcgtgaactagtctggaactgtaattcgtgtctaatatctagttctcgttctcgtctgcaattgctctcggtttagggttcactagaatcctcgtgcgcgtctgcacctgttcttaaccnnnnnnnnnnnnnnnnnnnnncttttgcaatttgctcccggtttatagttagtagtgtctgcgatggtcttgaaccgtgcgtggtggtatggtagaaccaggttgctacttgccagcagtcattgctttgattccgattttttatttaacttcttttttattatcatgcccccagtacggggaaccaagtaccagtcgccgcctcctccgctttttccaggctactaaaaaaagcagacagcgtgaatgtcgtgtacagaaaagttgcaattgtgtcactatttgagcataggagaaatcggatgtaatttcagcccatacttttccaaattgagggtgcccatatagtctttcttaaaaaaaaaaaaaaaaagcggcc

SEQ ID NO: 30312 - DNA, 1733 bp, Zea mays
  Clone ID: MRT4577_127656C.1
gtgcgcgatcgctgccgcgctggtggcgcgcagggcgtcggcgcgggcgcgctggcgccgggccgtcgcgctgctcagggagttcgaggacggctgcgccacgccgccgccacgcctgcgccaggtcgtcgacgccatggtcgtcgagatgcacgccggcctcgcctccgacggcggcagcaagctcaagatgctgctcaccttcgtcgacgcgctgcccgccggaaatgaagaaggaacatattattccatcgatctcggaggaacaaactttagagtgttaagagttgaagttggtgctgggtctgtggtcacccgtcggaaggttgaacttcccatccctgaggaattgaccaagggtacaattgaggagctattcaactttgttgccatgactctaaaggaatttgtagaaacagaagatgggaacgatgaacaacgagcgcttggtttcacattttctttcccagttagacaaacatcagtatcttcggggtcattgattaggtggaataaagggtttttgattgaagatgcggttgggaaagatgtggctcaatgcttaaatgaagctcttgctaggaatggactaaatgtgcgagttactgcactggtgaatgacaccgtggggacattagctctaggacattatcacgatgaggatacagtggctgctgtgatcattggtgctggcaccaatgcttgctatattgaacgcactgatgcaattattaaatgtcagggtcttcttacaaactctggtggcatggtagtaaacatggaatggggcaatttctggtcatcacatttgccaagaactccttatgacatctcccttgatgatgagacgcaaaatcgcaatgatcaggggtttgaaaaaatgatatctgggatttatcttgggtaaattgcaaggctggtgctgcatcgaatggctctagaatcagatgtttttggtgacgctgctgataatctatgtacccccttcacattgagcacaccacttctcgctgcaattcgcaaggacgattcaccagatctgagcgaagtcaggaagatactgcaagaacatctgaagataccggacactcctctgaaaactcgaaggctggttgtcaaagtgtgcgacatcgtcacccggagagctgcccgcctagccgccgctggtattgtcgggatactgaaaaagctcggccgtgatgggagcggtgttgcttcaagcgggagaacgggagggcagatgaggcggacggtggttgccatcgagggtgggctgtacgagggctacccggtgttcagggagtacctagacgaagccctggtggagatcttgggggaggaggtggcgcggacggtggcgctgagggtgacagtggatgggtctggggccggcgctgccctccttgccgccgtacattcgtcgaatagacagcaaggttccatatagggagaagggaagatggtgatacagccccctctgtgcaaatgtaaaaaggaacattatttgatatctatattcatatatataaaatctggtcttgtgcagagaaatacctgttctcctatctcaagctcttatcactcttctgccttgctcttgtggatgtaggcgttgctgtgtactaggtttacctttttttttcagtgtggaagggaattatgattctttgtaagtccgagttgctgatgaactgatcttgtgaccacaatggcaaaatgtcatgagtcatgac

SEQ ID NO: 30313 - DNA, 694 bp, Zea mays
  Clone ID: MRT4577_127657C.1
atttggccgcttttttttaaaaatttctgtggacatcaactaatgcagcctatgtatgtataccaaccgtaaaaaaacttagaacagacaaaaaaagaagtaacttcatgatattttacattgtcgtcgaactgacaggtcggagccgccgtgtcgagagttgttcagcccggcggtggccacgacagactcctcgcaaagagtgacgggccaactccgccaccacctcggacatgatccacctcacgggctctagggagaggaagacgaagaagcgagctcggactggatcttgaccacgggtcatcgtaggtggtgggagcacgcgtcgttcgctttgcgcgtcggaagcggtcgaacaccccatgaagtcgctgccgcaccccatgatgtttaaccatgaatctgtctccttttcgtgagtagataagcgatcattagcagggatcgaaacggcttggtggtagcccagattcaggcgcctcctctcctgcaccggtaggccgactacaacggcagctacggagaggcgaggggtcgggtcgatagggagatgacgacgaggcaagaggccaggctgcgaggagctacgccaacgatggggccggctggaggagtggtgcgaccaggcggggatggagtcgcgaggagcgggagacatatttagtgaaggacccgcgcctcgtgccgaatt

SEQ ID NO: 30314 - DNA, 564 bp, Zea mays
  Clone ID: MRT4577_127658C.1
cgctctcctcttctcgggcagacgggcaccgcttcgccttctccgcgcaggcaagagcagccagccgcttcgggatcgggacgcggagaggggaaaggcgagtcgtcgtccgtccacggcagcttccctccctctcctctccgcccccgcttaccctaggccggccccgcctgcgccccgcccctctccccgccgccgcacgatgagcacctctcccgcctccgcctccgccgcagccgccgccgccgcgtcgcctcccgctgcagccgctgccgacgaggccgcgcgggcgacggagacggtggtggtcgacgagagggtcgcctcacacgtggacccgttcctcgtcgaggcgctcgacaaccctcgccatcgcctcatggttctacgaatggaactggatatacaaaacttcatgcagaaccctcagctgcaggagtttgaattccagaactatccgacttcttacctccgctgtgctgctcatcgtgttgcacaacattatggcttagagactatagtagcagatagtttagtagaaggctcagttagcaggattgttgc

SEQ ID NO: 30315 - DNA, 1302 bp, Zea mays
  Clone ID: MRT4577_127659C.1
ggtaccctccgggtcggcccctcctacgccccccccctcccgccgccgcacgatgagcacctctccggccgcttccgccgccgcgtcgcctccgccgcctattgcctccgccgccgaggcctcgcgggcgacggagatggtggtggtcgacgagagggtcgcctcacacgtggacccgttcctcgtagaggcgctcgacaaccctcgccaccgcctcatggtctttcattgtgacataatcattccagttctcttttattgcagttctacggatggaactggatatgcgaaactttatgcagaaccctcagctgcaggagttcgaattccagaactttccgacttcttacctacgctgtgctgctcatcgtgttgcacaacattatggcttagagactatagtggcagatagtttagtagaaggctcagttagcaggatcgttgcaagaaaaacaccagagagcaggtgtcctgcaatttcattagcagaagttcctagcaaacaagcaagaaatgatcatgaggcagcagagaagcttaagtttgtcatttatcaaaggcccaaagcattccaaaatggaagcactgatttgggaaacaagaatggtgcaccaaaaactgttgaagagagaatagaggaatataataaagcacgagcacgcatcttcaatggttctgtttctgcagattctgatgctgcaagtgttttgggaactctttccactggcaaagatgaatcagtaaatgttgacccttctgttgatgaaaccaaagtcagcacaatgaacagtcgttccagagttgctgtttttaaggatactgaaaaggatcgtagtgacccagactacgatcgaaactacaaaaggtatgttaggagctcagtgcctggcttcaacttgagcccaggtgtttttaactttgttgtgcctcagtttatgcagtatgacattggttatgtgcaatctcctggcatgtccacaaaccagcatactatgtactttggccagcctgatctaacaatagggtcttctggagctgctgtttatcgacattggccaaccccaacaatgatgtatccccattgctatgataatgttagtccaatgatgtctcaggtgagcataatcatataaggtcccgtttgtttccttttatttcaaaaaaaaaaaaaaaaaatttgcggccaagctatttttttagaatgtgatattccaccacttttcaaagttatcatataaggctatctcaaattcatggggcgagagatgaaaattgattatacagatttacatgctatttttc

SEQ ID NO: 30316 - DNA, 395 bp, Zea mays
  Clone ID: MRT4577_12765C.1
tccggtagagcgctaatgcacctatcaatggtaggacgtagtcgtgcagtcgggctctcggcaggggttacgcccaggtgtctaaagacgtgtctatacagggacgagaccaggagcaatcacctatagatcgtgcgattatggatggacagtgaagaggccatgtttggtgctttttgtggttatctaaaacgcactcatgctctattatatctagtcatcattatgtatatacttgtgtttgtgtattgttgttcttgttctggtggtgtctgcgccgtttaatttgtcctatgttatggaatgagtgatttatgtgccacttctcgtattttatagtgatgagttactaggtgtgatgtgtagtactgtgctattttttctatatatgcatg

SEQ ID NO: 30317 - DNA, 300 bp, Zea mays
  Clone ID: MRT4577_127660C.1
ggctcgcgatctaaacccacacatgccgtttgtttcggggagacagcttacattaggtccctacgaggaggaattcaggggttacgtctgttcaaggccagcagcagcctgagcggcagaaacctgtcccacagcattctagccataccggccaacactctgctcctgcaactggaatggaagcctctgcctccagcaatggtgatgcgtactcaaacaactcactcgagagagcaccatgtacttccgcaccatcttcttcatctgtgggtggtctccttcaaggctcactgagttaca

SEQ ID NO: 30318 - DNA, 2256 bp, Zea mays
  unsure (1)..(2256): unsure at all n locations
  Clone ID: MRT4577_127661C.1
caaaataaaaacaaaaaaatataaatttgttgtgtgtattgaaagccagccgcttcgcgatcggggacgcggagaggggaaaggcgagtcgtcgactcgtcgtccgggcagcttccctccctctcctctccgcccccgcttacctaggccggcccctcctacgccccccctcccgccgccgcacgatgagcacttctccggccgccgccgccgcgtcgcctccgccgcctattgcctccgccgccgaggcctcgcgggcgacggagacgttggtggtcgtcgagagggtcgcctcacacgtggacccgttcctcgtagaggcgctcgacaaccctcgccaccgcctcatggttctacggatggaactggatatacgaaactttatgcagaaccctcagctgcaggagtttgaattccagaactttccgacttcttacctacgctgtgctgctcatcgtgttgcacaacattatggcttagagactatagtagcagatagtttagtagaaggctcagttagcaggattgttgcaagaaaaacagcagaaagcaggtatcctgcaatttttttatcagaagttcctagcaatcaagcaagaaatgatcatgaaacagctgagaagcttaagtttgtcatttatcaaaggcccaaagcattccaaaatggaagcgctgattctagaaacaagagtggtgtaccaaaaactgttgatgagagaatagaggaatataataaagcacgagcacgcatcttcaatggttccatttctgcagattctgatgctgcaagtattatgggaactctttctactggcaaagatgaaccagtaaatgttgacccttctgttgatgaaaccaaagtcagcacaatgaacagtcgttccagagttgctgtttttaaggatactgaaaaggatcgtagtgacccagactacgatcgaaactacaaaaggtatgttaggagctcagtgcctggcttcaacttgagcccaggtgtttttaactttgttgtgcctcagtttatgcagtatgacattggttatgtgcaatctcctggcatgtccacaaaccagcatactatgtactttggccagcctgatctaacaatagggtcttctggagctgctgtttatcgacattggccaaccccaacaatgatgtatccccattgctatgataatgttagtccaatgatgtctcaggtgagcataatcatataaggtcccgtttgtttccttttatttcgagaaattgaaatcttactaatggaataagctatttttttagaatgtgatattccaccacttttcaaagttatcatataaggctatctcaaattcatggggcgagagatgaaaattgattatacagatttacatgctatttttccgatgtacaatttataacacacccttctatttgtttcgctataatataaatgtatataactatctctctcatatgatgtaagataatatacaaatatattacatatataaatatatgaacttaattagttttgtctaaattataattattaaaatggaattcaattccaacgaaacaaacggggcctaactgaattctgacattgcaaatattgcattatgaatatactgtgaactttcagttataatctccaattgtaatattatcctctggtgaagcgtcagaactttttttcatcatgtgttctatatttcagtagtagccctacaaaagtttggctgtttagatgtgaatagccagcaaacatattctgtctctaacaaatttgtatatcaagaggaacttgttttcgggaacacaagatgaatctgtacattctattttcatatatgaaattccatacacatgtgaagatattgtaggcaggttgagcgtaattttttgttacccatatacttttaagaacatgttactgaagggggagtgatgatttattttgcattgcttgatagaagacttccattttttttgtaaaaggtgatgtcatgtaatatgcttatgtttttttaataatcttatatgagaagaagatatcatatatcagcatcgcttctgtcattttgtttgttcaatgtcccagcagaacccacttgtttttgccccagcagaaccctgtgttgacttgatttggttctaatgttcataaacatttgcttatatagtgtttagtttttttgggccaataggatctgcagacttancacataaaaatgatcataattatctcaaacaatggaaacttgacag

SEQ ID NO: 30319 - DNA, 165 bp, Zea mays
  Clone ID: MRT4577_127662C.1
aacatgcaacatagaaagcggactccataaattaccaaagagcaacaacgccgggggacatgtgggacccttcttatgctccttgctctttctgcatgtgttgcgtcacgcgacaatcatccctaaatagctgacaaaaccctgatagctcccatttttacccca

SEQ ID NO: 30320 - DNA, 1722 bp, Zea mays
  unsure (1)..(1722): unsure at all n locations
  Clone ID: MRT4577_127663C.1
ccggccgggaaaaacgcagatccctgcctgcacacggcatccggagttccggactcccctcctacgccccccccctcccgccgccgcacgatgagcacctctccggccgcgtccgccgccgcgtcgcctccgccgcctattgcctccgccgccgaggcctcgcgggcgacggagacgttggtggtcgacgagagggtcgcctcacacgtggacccgttcctcgtagaggcgctcgacaaccctcgccaccgcctcatggttctacggatggaactggatatacgaaactttatgcagaaccctcagctgcaggagttcgaattccagaactttccgacttcttacctacgctgtgctgctcatcgtgttgcacaacattatggcttagagactatagtggcagatagtttagtagaaggctcagttagcaggatcgttgcaagaaaaacaccagagagcaggtgtcctgcaatttcattagcagaagttcctagcaaacaagcaagaaatgatcatgaggcagcagagaagcttaagtttgtcatttatcaaaggcccaaagcattccaaaatggaagcactgatttgggaaacaagaatggtgcaccaaaaactgttgaagagagaatagaggaatataataaagcacgagcacgcatcttcaatggttctgtttctgcagattctgatgctgcaagtggtttgggaactctttgcactggcagagatgagtcagtaaatgttgaaccttctgttgatgaaatcaaagtcagcacgatgaacaaccgttccagagttgctgttttcaaggatactcaaaaggatcgcagtgacccagattatgatcgaaactccggccgggatgttaggagcccagttcctgacttcaacttgagcccaggtgccttcaactttgtgcctcagtttatgcagtatggcgttggttatgtgcaatctcctggcatgtctacaaaccagcctgctgtctactttggccagcctggtctaacaatggggtcttctggagctgctgtttacccacattggccaaccccagcaatgatgtatccccattgctatgacaatgttggttcaatgatttctcaggttcctctgtaccaatctttcaaccatggttagtagattctgcttactggaaagttgggaaccgttctctgttgaacttgttatattgtgccgtcctatgttaagtggagttactttagattcgagccatttcgattacagaaaattccaaaaaattcatgtaatgtcgaacgtattagtttgtataatggggagtcctaattcgttgaaactaatatcgtgaactagtctggaactgtaattcgtgtctaatatctagttctcgtctgcaattgctctcggtttagggttcactagaaaaaaaaaaaaaaaaaaaaaaaaaaaaaaaaaaaaaaaaaaaaaaaaaaaaaaaaaaaaaaaaaaaaaaaaaaaaaaaaaaaaaaaaaaaaaaaaaaaaaaaaaaaaaaaaaaaanggggggggccccttttaaaggacccaattttacttcccggggctggcaaggtttaattttttttatggggcccccaaaataaaatcccggggccgggttttaacaacgcggggaggggaaaaacccggggttccccaaattaaatggcttgggaaaaaatccccttttcgccggtggggtaaatagaaaaaaggccccccc

SEQ ID NO: 30321 - DNA, 753 bp, Zea mays
  Clone ID: MRT4577_127664C.1
ttgggaccctcgaggccggccgtgcccgctcgacgcgctctgggcgccctacgacctccttcgccgccgcggcgcccgggacgatctcctcgacgccgtcgcctgacaatgctatccccgcatcgctggagcgccatcgattcgctcgcgtccgatcgagatcatatgccacggcccacggcgcttggctgctccgctcactccgccgtcccacgggtcgatgtcggcgtcggtccgccgagtcactgacacattagtcccacctggacactccgcatgggtcccattatgggtccaagctgtcagtcgttatggcgttggttggagtggcgctgtcggtactgaaattcgtcgggcccacacgttggtggcggatgggggttttggggtgggggccgaggtgaaatgcagacatgggccgtgtacagctgtttttttggcctgttgggaccatagattctgtatattctttattttgttcaaattcttactttcataataggcaaaagtagtgcagacacaagttttatcaccgtgggataaaactgggtatatttggagttagtgttgtgtgtgtacaactgtacatgtatagtatagtccatgatcgtcggtggttagggtttagtttgtggaagcaaggagtgttgttcttgggaaatgtcgcttggtgtagtcttattttttttgtactaagtaggagtacaatgctgctatttatagttcgctgaaaagaaaaaaaaaaaagcggcc

SEQ ID NO: 30322 - DNA, 392 bp, Zea mays
  Clone ID: MRT4577_127665C.1
cccacgcgtccgcccacgcgtccgcccacgcgtccgcccacgcgtccgcccacgcgtccgtcatggtcgagctggtcggcaccaaggccgtcgacggggaggcgccgcccaggatcctgcacttgaaccccaggatccgcggggactacagccggaagcccgtcgtcgagatgaacagctgctaccggatgcagtggggacagtcgcagcgctgcgagggcttcgcctcccgccccgccgacgacaccggtgagttgtcgtcaacctctccagcgacctccggatttgtcgggttcattttgatttgctattttgattattactttgattcttcgattaatcgtcctatgttctagctggcgtttttctggattagtttagtttagaacctc

SEQ ID NO: 30323 - DNA, 511 bp, Zea mays
  Clone ID: MRT4577_127666C.1
aggggccgggcggacgggcacctcaacaccctctgcttccacatcggcaacccggccaacatgctcactacaggatctaacaggaggtctgagtgggcatgagacttaaatgatcatggtccatactgcgcttatatttgctatgacatggacgaccgctgcagcgttacttgagacagaacatgaggtcacttcgtcgtgctagaatgagtgctaaaaaaccttgctggctagtcaaagaagcagcaaacctatgcatttgagctgctatgtgtatcgaacactgcttatgatgggcatcaataacaactaccactgagccagctacctgctgcctacccccagcaatttcttgcattcaaccaactggcagcattgaactctcctgcttatttacagaagcaacaactactaccattcaggcagctagctggtgtgagccctgctaccttcttgatacaaccacagttggtgccgttctaccagcacgctgagcctaacgctggcaccc

SEQ ID NO: 30324 - DNA, 196 bp, Zea mays
  unsure (1)..(196): unsure at all n locations
  Clone ID: MRT4577_127667C.1
gacctaacaccggaggttccttattcacacgttttgacagaattcacatgtacattnttaacggtacagtaagctatatatcctttttccttttaaaggcctttgttggaccatagccacttcatcctgaatatagcctcagcttagaccgtgtcggctgccggcatatagggcatctggggaggctttccccaag

SEQ ID NO: 30325 - DNA, 257 bp, Zea mays
  Clone ID: MRT4577_127668C.1
atctggttcaacactgcaatctcttctctgtgcagggacaatctggggcagcatccaacaaccctcatggattgcccaacccattgccgcaccagtccagccgcccacctcgatgagatattatctttgtttgtgttgttaatactttgtgagataactcggtctgaacttgtttgatgttggtaatgctttgtgagatacttgagacttatgttcttaagtgttggatacttatatttatgttcgaacatgttggt

SEQ ID NO: 30326 - DNA, 515 bp, Zea mays
  unsure (1)..(515): unsure at all n locations
  Clone ID: MRT4577_127669C.1
cccactcccaaccaagntccttccaaggccgcaaagtgacggcgccggccgccagtccaccatggtcgcgcagtccttggctcctcgccggcactgagcgagcgaccagggtcccgccgcggacattgagagcggtctcctattgacttcacagacgcgccgtttgccacttgcgtcacacgttcgatcgcgcggcaccagtgcggtagcgccgtccgagccgccaggggcgcctcagtgcgccgcaggcgcgcgcagtacactaaggtccggagtgcgcaacataaaggagcatcgtggtgtaagtcgcagcgtgcatgagttcacgcgtcacatcagtgacgatcgatgactgctacaattgagaatgcggcggtcagtggactgaccgcagggacgacagagaactacctccacaaacttcacgattcaaccaaagggtgcttagggacagtggcacatcctacaccaaacagggttcctgacgtcaccacgttacacaaaccgcatattgc

SEQ ID NO: 30327 - DNA, 329 bp, Zea mays
  unsure (1)..(329): unsure at all n locations
  Clone ID: MRT4577_12766C.1
ctaaaaatttttaaaaaactagcccaaaccattgggtacacattatgttttattggagggaaaaatcaannnnttgatgaaaaaaaacacgacatatatttcccctaaaaggacaaaagataccgaccctaaaacataaaaattccaaaaaactaaaacagaagcacggatcatccaactatgattcagaaaaacgaccccccccacgataaaaatttcaaaaatagaaataacccgaaatttcaaaggtacaagaagcaaaattgacatgcaaaccctgaccaacccatattattaatgcaaaaagccaaaacatgaaaggcagtttc

SEQ ID NO: 30328 - DNA, 208 bp, Zea mays
  Clone ID: MRT4577_127670C.1
aacgacgtctctttagattgaggtaacctaattgcattcaagtgaccgcttttttacaactacggatctggaaaacccctgacggtacccgacttaatctcttagcaacacattcacctttaagcacctggcgtctgatctaaaagcccatgaccgagcgcactttccagcagttgcacaccctgatgggcgaatggaacgccctctg

SEQ ID NO: 30329 - DNA, 292 bp, Zea mays
  unsure (1)..(292): unsure at all n locations
  Clone ID: MRT4577_127671C.1
aaaaaaaacccagnaaaaaaaacccaggggccaggccagaaggcaccgcgcccgggggcggcggcgggggccacccaaacgcagcacaagcggcacggcagccaacaacgccagcggagccagaaggaaggcaaagaagggcacggccgggcgcaaggcgggcggccccaggaagaagacggnggcacgagccgacaaggccagccngaaggggggggggggccaaaacnnacgcaaccccaagaaggggcagaacgcgcaggggcggaacaccaagaccaccggaaaagaa

SEQ ID NO: 30330 - DNA, 403 bp, Zea mays
  Clone ID: MRT4577_127672C.1
atacaggtggagagattctagcgcagccggaagcatccaggcgccccagtttgtttagcaccacctaatccccagcacccgcggcaggtggaagatgcctgccgcggacgcaattaagcgagcatatgcgatcccaggctgtggaaatctcgcgagcacccgaggccaagacagcaaccctgctgagatcggcaaaatagcagccgccgcgaccacgccgcgcaactggagcggtgaaaaggtcgaagcaagcaagcagctcagcgtggagcaaaacgcgtttaagcagcgtggaagaggaaaagacaagcaccgcgacgaccgcgtccgcgtctccccccggcggaccaggcgatccgcagaggcgttacacgcggcggagcggtagggaaagggacagatc

SEQ ID NO: 30331 - DNA, 223 bp, Zea mays
  Clone ID: MRT4577_127673C.1
aagaaggaaaacctacccgtgagcattgaaagatgaggggctggcaattatctttgtaaaccttactaaatttatctggacacttggactaattacaggtatacagttacaacaatagaaccggggggaggcctagacatcaccttgagaagatagcattactgttgcattgtaacaacttcatatacagacgatgtgggctgataattgatacttataaaat

SEQ ID NO: 30332 - DNA, 277 bp, Zea mays
  Clone ID: MRT4577_127674C.1
aacagaacttaaaaaactaaagctgagttggttaagagaccaaacgggcttagtgagccaagaacctgtacttttcaacaacacaattcgcacaaacatagcatatggaaaacaaggagaagtaagagaggatgagatcgttgctgcggccaaggcagcaaatgctcatgagttcatatctagcttgcctcagggatatagcactattgtcggcgagacgggaacacagctctctggaggacaaaaacaacgggttgctattgcaagggccatcttg

SEQ ID NO: 30333 - DNA, 260 bp, Zea mays
  Clone ID: MRT4577_127675C.1
ccacacataggctgacgcgtgggcaacaacttgtgctcgcaaaccttgatgcctactatgggcgacagtaaactctgctattcaaccaactagctgcatagaactatgctgcttatttgctacagcatctactattcagccagctagctgctgactacacccaacaatctctctgattcaaccaactgacatgattgaactcttacgattatttacagcagcgacagctactaccattcaggctgctagctggagtgagc

SEQ ID NO: 30334 - DNA, 749 bp, Zea mays
  Clone ID: MRT4577_127676C.1
cttttttggaatggcacgattcgtttaggtcgatctctccttttttttgttcgttatacaaactggtagcagtatgctaataatgctgcagccgcacatgattcttaagcagcttaccgggagcatgacgtagacctggacatagttggctagcgcgttccccgccattgtagctggctggctacgctctgagagacctcactggcttgctctgcttggtggtcgctgagcttgggccttgatggatgttgcagggagcttgagggtctatttatacagcggaggcaggggagatctggaatgcgactttgcagcgcttctccagcgatgcaaaaacctatctttccgtatagtcgcccaggaatgcgcatgtgcagggtgagctgatgattttggatatcgataccatcccgagctggcatatgtagcacagcaggttgttgccattgtgattcgcggggactgcgtcctgaagaactttggttttgacgccttgtatttgtacggcaatgattgggatgaacatggccggtgagaattttttttacattttctgtcctcgtttgccacgtgagtgttgtctgattctgatgtaaaacagcaacgagtaaaaaaaagtataagtggaacctgtaatgtgggattgtaacaaatatatatattgcatggcttatcagcacacgggctgcgtaccatgtgtgtggcatgttttataaaaaaaaaaaaaaagggcggcccccacgcgtccg

SEQ ID NO: 30335 - DNA, 245 bp, Zea mays
  Clone ID: MRT4577_127677C.1
tctaatacgactgcactatagggctagcgcggaacgtcctggcagctatctttgtatctccttcattaccataattgattggtgataaggaataaacctcttgagggaagggcggctagagctttcttgtaatagtaccatactccgccttcgcgtctcatcatgagatgggactaagtcgataataattctatatatggttagcttagacctcggatcgctacgcacgctaacgcgcgaccttt

SEQ ID NO: 30336 - DNA, 426 bp, Zea mays
  Clone ID: MRT4577_127678C.1
ttttgaatgttatcaggctgggctagcgcatggcgagcgcaccgggcaatcaccgagcggacacagatgcactatggtaccactattataccgacaatgaacgcacgatgcttgcaggctcccacacacaccacacacgccccgatttcgatccggtctagatgcacacttgcatactgctttcatctgggtcatgctagagaggtggtatataggaggcatgctggggagcgtcttcctagcctatgcttaggccatgcttgagcctaccttgagcatgcctggcatacgtgtggcgaacgtgaaggcttcagccagggttgagcccgaggggagcaaacccaagtatgacaggggcctggccaggctcgtgacagacttggggctcttggcggtctcccagctcttgcatgattgctttatgat

SEQ ID NO: 30337 - DNA, 135 bp, Zea mays
  Clone ID: MRT4577_127679C.1
ccacgcgttcgatgtttcgatatccacctctagagtctctacaaggtgatatgacaagtccaggacgcgctgacacacgaccagctgacgatcataaggtccattcctaattccccggagacgtgacacgatgag

SEQ ID NO: 30338 - DNA, 405 bp, Zea mays
  Clone ID: MRT4577_12767C.1
caccggcgcggaatcccgggggcgccaccacgcgcgctgttggagtcggacccggcaaggcaggtgtcgggggacttttagaagtcgctgcggcccggcaagccctggacccggtacaagaaccgactcgccgtgcgccaggtccgcgagacacgaagccggcacggcctcgccgcgctggagctctgcacgcgtagaagcccctgccccgacaccagcgggaaggccaccgaagtcgtgccctcccttaaggacggcggcaggagcgccggccaccccggggaccagaagagcgagaagatgctcaacgaccgctacctcatcaagaagttcgagtagagcgggagccccctgtactctgatgatcacttctgttggagtagcgagcctccagagaggagggga

SEQ ID NO: 30339 - DNA, 262 bp, Zea mays
  Clone ID: MRT4577_127680C.1
tcttccttctcttcacctcaacccaggaacagagcgaggcgtctccttggcacgtgtggtcgtctaatggtaatggctaccgttccaggggatctgatctggcaggttgtgaggaagaacaactcctttcttgtgaagcattttgtcaacggcaatgccaaggtgcatttcaccaaggatccgaacatcctttacatcatccactccttcaaacactcgtgttttgcgaacaagaagactttgactatccagtcagctgcaa

SEQ ID NO: 30340 - DNA, 808 bp, Zea mays
  Clone ID: MRT4577_127681C.1
cggttgtcttttatttgagggaaaaaaactagtcgcagctcttccgtctcccgccgccgccgcagccgccgcctgcctcgagccgccgtcgccatggggagaagacctgcgaggtgctatcggcagatcaagaacaagccgtaccccaagtcaaggtactgccgtggtgtgcctgaccctaagatcaggatctatgatgtcggcatgaagaagaagggtgtcgatgagttctctcactgtgttcaccttgtctcatgggagaaggagaatgtgtccagtgaggctcttgaggctgcccgtattgcttgcaacaagtacatgactaagcatgcaggaaaggatgccttccacctcagggtcagggttcacccgttccatgtgctccgtatcaacaagatgctttcgtgtgccggggctgataggctccagactggtatgaggggtgctttcgggaagccgcagggagtctgtgcccgtgttgccattgggcaggtcctcctttctgtgcggtgcaagcccaacaatgccatccatgctactgaggcccttcgtcgtgccaagttcaagttccctggccgccaaaagatcattgagagcaggaagtggggcttcaccaagttcaaccgcaatgactacctcaagttcaagagtgagggcaggatcttgcctgatggagtcaacgctaagctgctcggatgccatggccgccttgcaaaccgtgcccctggacaagctttcctgtctgctgcataatctagcagaagaagtctatccgttctatcgaaacttattttaccgtgtggaactt

SEQ ID NO: 30341 - DNA, 273 bp, Zea mays
  Clone ID: MRT4577_127682C.1
aaggccctctttttttttgacgcagcacagaacctcatcgagggggctctttgatctcgagaggggaaccacactcaagcggaccgtgcgcgctaccttcattaaccactgacggctcggcgacatatggcccttaaaggcggtggctgctgctacctacgctgtcataaagtctcggtcgccgaaaaagctctagcttagacttaatttgttgtgcattagtgtgtgcatgcttgagccagggggcatgcaacgcactgcagctactatatt

SEQ ID NO: 30342 - DNA, 247 bp, Zea mays
  Clone ID: MRT4577_127683C.1
gccccaaagtacaaaaaaaaagatctggatctccaaacaagccggggaaaggaaaatacacatttttgagaaggagggggggttccccagcaatgggtacgtatgggtcaaaaagaaagggggcacatattataagggcaggggttttttttaacagggggaggggttttttggtggaacgcaacggcccgttttcaccttcaccaccctggaattgggaaggggttggataaaccccctagcaaaa

SEQ ID NO: 30343 - DNA, 837 bp, Zea mays
  unsure (1)..(837): unsure at all n locations
  Clone ID: MRT4577_127684C.1
cctttccctttcctcctccccaagaaacaaccgaagctcgcacatcatctcacctcggcgcctcgcccccctagcctctacgcacctcgactcccgcgccatctcgctgcattcgcgatgtaccgcgccgccgccagcctcgcctccaaggctcggcaagccgggagcagcgctcgccaggttggaagcaggcttgcctggagcaggaactatgccgcgaaagacatcaggtttggtgtcgaggcccgtgcctccatgttgaggggtgtcgaggagttggcagatgcggtgaaagtgaccatgggtcctaaggggcgcactgtgatcattgagcagagctttggtgccccaaaagtcacaaaggatggtgtgactgttgccaagagcattgaatttaaagatagagtcaagaacgttggtgcaagccttgtaaagcaggttgctaatgcaacaaatgatactgctggagatggtaccacatgtgccactgttttgacaaaagctatctttactgagggctgcaagtctgtagctgctggaatgaacgcaatggatctaaggcgtggaatctcgatggcggttgatgatgttgtgacaaacctaaagggcatggctagaatgatcagcacttcagaggaaatagcacaggtgggtacaatatcagcaaatggcgaaagggaaatcggtgagctgattgctaaggctatggagaaggttgngaaagaaggtgtaatcaccattgcggatggtaacaccctttataatgagcttggaggtgtggaaggcatgaagctcgacaggggttacatctctccctactttattaccaccaaagac

SEQ ID NO: 30344 - DNA, 329 bp, Zea mays
  unsure (1)..(329): unsure at all n locations
  Clone ID: MRT4577_127685C.1
gggcnnggggcggcgacgacaagngcgggngcgccgngccgagccccggcggcaaagacggcaggngcacgncggggagcggcgggcagggggagcacacgacnngcggcngcggggagcacngcgagngcagcccgngcacggggggccgggccacgangccgnccggccacgagaacaggagggcnaaccgcnccngcggggcgnccngcaacngcgcanccngcgccncggccagaaccaagcgccgcgcccncgggccaccgcgccgccaagnggagggagcagnccagngaggcncnggagacgaagcaaccagcacgaccccc

SEQ ID NO: 30345 - DNA, 172 bp, Zea mays
  Clone ID: MRT4577_127686C.1
ctcaatccaaaccagacaagcaaggtatcccccgatggctcatcgacgtactcctccacctactactactacgacgtacgaccgcgcggttgacgccgccgtcgacgcgcaggacccgctgatccggcagtggttccggtgagatgacacgatctgagctgaagcgagtcca

SEQ ID NO: 30346 - DNA, 365 bp, Zea mays
  unsure (1)..(365): unsure at all n locations
  Clone ID: MRT4577_127687C.1
cccatgcgtactgacctatatggcaccacactttgatcacacacaggaagttgagatcagaaaaaagcaagctgccgctactgacgacaaggtctcggccgagctgcccgccaagggcaggccggcgtgctggagctaggaggaggcccgagtccccgccacaaggaggagcttccgtgtaggtggcgccttttagaccctagtcaagcccaccgactactagtgattcgnctcggagttcccgatggaggcctgcgacctgctcggaggcatcgcgtgcaataacccgatcttgccggatgccaagcccgacttaactagcgtggaggcgatgcatattgcggaacgcgcggacagggactacc

SEQ ID NO: 30347 - DNA, 371 bp, Zea mays
  unsure (1)..(371): unsure at all n locations
  Clone ID: MRT4577_127688C.1
tcgagggcgcgaccggctgcatcnnttccgcgtaggaagttagtgtgcgtgcgtgcacgcacgtgagcgcgcggcnnatccatgcatgtgccgagccaggcgcgccgcgctcaacgtcctatggatgtccgcgtgctgacggttgaacctcttgtccgttttttaaccgggccgaccggacctacgtgtatgtagtagtactagtgcagtcagtgccactcacgttttgagtgccggtgctacgtgcggacgtaccgtcgacgtctcggactatgtttactattcgcttgtttaatttcctctttaatttcctgtaccactgccacctcatcgagaagatttatttatatttttatttcaaaataaaattg

SEQ ID NO: 30348 - DNA, 292 bp, Zea mays
  Clone ID: MRT4577_127689C.1
ccagtacgaggcgcacccggtccgagcactagccgatctaccggcgccgggccacaactgggcgacggacaagatcatgtggacgtataccttgcgagccggcggacaaagctcgagcgtccaccggtccgtgcggcggagtcaatgtgtgcggccacggcgcccgtctccgaggctcgaaaggcatgacgtcccggacaacgagttgtgcctacccaagtctgttgctgtgcgatctggctggggcttagcctctcgctccagacgcacggaatcacgatcgcatgtcaac

SEQ ID NO: 30349 - DNA, 763 bp, Zea mays
  unsure (1)..(763): unsure at all n locations
  Clone ID: MRT4577_12768C.1
gtttttgttatattattataattattgaagaatgcagctcaaattgaaaattccatacattacaaatgatttaatattatgagtcgagatatgaaaaaagtaattccatttagatgatcttagttggaaaagtaccattggaaaacggtgaacgaaagaaatttttacaaactaaaggtattgcccgtaaaaataaaatgaccaaacaatatatataggagacaaattatagaagaatgcagatcaaattgcagcttccatacattacaaatgattatatattaaaatataagatatggcgctcacgtgacgtggaatagactccagcttacaacaacgagaaggaaaagaacaacatgaaaacggtggatgcaacattaagggagttgagagcatcagcaaacatgcacgccgtagtagagccacatttctagacaagggtggtatcagttcgccccagcttcgtcccccttttgcacaatgggttcctcgtcacctctcgatcggacctcaacgggctgctgcacggtgcgtgactgtaacttggtggactcctctggcggcgtatccttggcgacgccgctgctggtccagccggtgatgttgtcgatgacgccgaggaacttgtccctgagctgagcagcgaagctggccatgggagagcgagctgtatctatgtagttggtcacgccgaagaacttgtccctagctagtttgttttggcgtggctagcttgatagatgagcggtggtgaccggattcn

SEQ ID NO: 30350 - DNA, 618 bp, Zea mays
  Clone ID: MRT4577_127690C.1
agagagagtgttttttttttttttttttttttttttttttttttttttttttttttttttttttttttttttaaaaaaacggcccccaatagccctaaaacttgcaaacaacggatttgccttaacgggagccccccgcagggggcaaaaacaaaaacagggctgggggccaaccataaaaaaaaaaaaaggggcaatacgggcatgggccaaaaaaccctgggaaacatcactcaatggcaaacggaaaatagttgggtagggctttaaaggaaggaaaaaaggccttcggttagggaaaatgcaaaaagctgacggggcggggggtttgcgttttgctgaggggccacattggggaaaacatccatggcctaaaaaacctttgacttgggggcatcaggggacccaagcgggggggggaccccaggcggacccatctccaaaagcattccagggacctttgccggtgggttgggttccaggggcccaaccaggggggatagggtttcaccaaggatcgttttttggtggtcaggattagcatttgcaagggcaaaagccaaagccccaattggggcagccggggataaggcaacatccctcacagggaagcccccc

SEQ ID NO: 30351 - DNA, 1888 bp, Zea mays
  Clone ID: MRT4577_127691C.1
actacataggaaacccagacaaagcacgagccacgcacggcccccgctgcctcccttccgccgccgccgccgccgccggcgcgccaccgtcgctgctctcccgccttcaccgcgcccaactccaatccttgcctcccccgcgcgcttcagcctcttcactccccatcgttttcgcctggccagatccaggtttccttgaccgagacctcgcctgctttacgcctccggtcggattcttcgccgtccttgtccccactgggcaccgctggggtggagcggagatcggatccgccgggagctgattccttctctcgcagcatgatcctgcggtgattgcggatagcttgtgcaagctggtggcttgggtgttgtctttttaatctggcctaaagatatcctgagacggtagcgtcacatggatgctagtacagaggttactgatgctattggtgcggtgggctttgacaatggggccgcggggaagttgccgcccagtgatagtgtagaggggcacgcagaagaacacgatgtgctggctgatggtgcccattcaggcgagagcgaggtgatcaacccatctgaagaagtagaaatggaagccacctcgcagtcccaggacataaagcctcgagttcctgagggggttcaaggccattcaatgaaggttggtactaaatctcagcgacagagccctcgaggcggggataagagtcaaactaggaaaagctcttttaatccttcttatcctaaggcgcccattgcacgggtttctgatccagatctagttgattgctctttgagcaatggtgatgctggttccagtaagaaaaaggccgaaaagagcagtttccgcccagttgccaaggagaccccatcacttgaggactcaaatgagaagaaaaaaactcagaaggcatcaaaccaacattctgtcaaaaaggatattgaagaagaatcaaatgaaagtgtgaaacctcaaagggttggcagcactccttcatatggatttagttttaagtgtgatgagagagctgaaaaacgaagagagttctactcaaagctcgaggagaagattcatgcacaggaactagagaaaagcaacttgcaggcaaaatcaaaggaaactgaagaagctgaactcaaaatgctgagaaagagtttaaatttcaaggcaacaccaatgcccagcttttataaagaaccacctccccccaaggttgagttgaagaagatacctacaacaagagctaggtcaccaaagcttggtcgctccaagaacacatcctcaggagggacagaagggaatccaaatcctccagctcgttcagctcgactgagtctcgatgaaagggtctcccaaaatggtgtcaagaaagcacctgttgcaaatgcagtgaagaaaccccaacggaaatctctacctaaactgccttcagagcaaacaaccaaagttgacattgcaccatctgttccatctgcagaagagctagaaaacaagtcgccgacgaagggtcttgatcgagagccgatccgcgctcaaattacacctgacgaacctggacttactgcataggaacctatcaagccgactcctatgaaaggagggagttgtgccccagcttccttttatcacattttgctatttctgcagtaaactgctggctggtattatgtattagaattagtctcagcaccaggagcttgaagagtggcaagtgacaccgtgtattctttatcttagtttctgttgacataccaggtatttgtagttggcagacaggcagaattttatattattctccagggctaccagtcaattaagttgccgtccaagtaagatatgtacacgattttgcaaagctttgtgattcagtgcatcagttcttgc

SEQ ID NO: 30352 - DNA, 337 bp, Zea mays
  Clone ID: MRT4577_127692C.1
tacacgactctatagtgagtcgcaataccggccaacagctcgtgatctgagattgctcttacagacgtgagtcgtgtccatggagttgtattgattgtattggcgttggctatcaaatcggtcaatatgtctgctaatcactagtcagtggagcttgaccagacctatatctgacagtagatctacgtggctgtaatcgtcaaggcacaaggtaaacggctgccgcatctatacgatacattcatacgtacgcttgcaccagacatcaccactcttccatcatgtcacgcatctttaattcactggctgtcattgcactaagtcgtgacttcgagaa

SEQ ID NO: 30353 - DNA, 1999 bp, Zea mays
  Clone ID: MRT4577_127693C.1
gggtacctcgaggccggccgggccgggtaacgcagaaactagaaaggtccccgtagaaattcgaaaccacaccaccacctggaaacccagacaaagcacgagccacgcacggcccccgctgcctcccttccgccgccgccgccgccggcggcgcgccaccgtcgctgctctcccgccttcaccgcgcccaactccaatccttgcctcccccgcgcgcttcagcctcttcactccccatcgttttcgcctggccagatccaggtttccttgaccgagacctcgcctgccttacgcctccggtcggattcttcgccgtccttgtccccactgggcaccgctggggtggagcggagatcggatccgccgggagctgattccttctctcgcagtctagtttgacgcggattcatttgctggtcggcatagcatgatcctgcggtgattgcggatagcttgtgcaagctggtggcttgggtgttgtctttttaatctggcctaaagatatcctgagacggtagcgtcacatggatgctagtacagaggttactgatgctattggtgcggtgggctttgacaatggggccgcggggaagttgccgcccagtgatagtgtagaggggcacgcagaagaacacgatgtgctggctgatggagcccattcgggcgagagcgaggtgatcaacccatctgaagaagtagaaatggaagccacctcgcagtcccaggacataaagcctcgagttcctgagggggttcaaggccattcaatgaaggttggtactaaatctcagcgacagagccctcgaggcggggataagagtcaaactaggaaaagctcttttagtccttcttatcctaaggcgcccattgcacgggtttctgatccagatctagttgattgctctttgagcaatggtgatgctggttccagtaagaaaaaggccgaaaagagcagtttccgcccagttgccaaggagaccccatcacttgaggactcaaatgagaagaaaaaaactcagaaggcatcaaaccaacattctgtcaaaaaggatattgaagaagaatcaaatgaaagtgtgaaacctcaaagggttggcagcactccttcatatggatttagttttaagtgtgatgagagagctgaaaaacgaagagagttctactcaaagctcgaggagaagattcatgcacaggaactagcagaaaagcaacttgcaggcaaaatcaaaggaaactgaagaagctgaactcaaaatgctgagaaagagtttaaatttcaaggcaacaccaatgcccagcttttataaggaaccaccctccccccaaggttgagttgaagaagatacctacaacaagagctaggtcaccaaagcttggtcgctccaagaacacatcctcaggagggacagaagggaatccaaatcctccagctcgttcaggtcgactgagtctcgatgaaagggtctcccaaaatggtgtcaagaaagcacctgctgcaaatgcagtgaagaagccccaacggaaatctctacctaaactgccttcagagcaaacaaccaaagttgacattgcaccatctgttccatctgcagaagagctagaaaacaagtcgccgacgaagggtcttgatcgagagccgatccgcgctcaaattacacctgacgaacctggacttactgcataggaacctatcaagccgactcctatgaaaggagggagttgtgccccagcttccttttatcacattttgctatttctgcagtaaactgctggctggtattatgtattagaattagtctcagcaccaggagcttgaagagtggcaagtgacaccgtgtattctttatcttagtttctgttgacataccaggtatttgtagttggcagacaggcagaattttatattattctccagggctaccagtcaattaagttgccgtccaagtaagatatgtacacgattttgcaaagctttgtgattcagtgcatcagtacatgc

SEQ ID NO: 30354 - DNA, 395 bp, Zea mays
  Clone ID: MRT4577_127694C.1
ggccgcttttttttttttttttttggttttttttttttttttttttttttttttttttttttttttttttttttttttattttttcttttttaaaaacatccatttagattcaaaaaccagccccaaaaaaaaaaacagcttaaaacagaaacaatcttaaaaacaaaaccggaaactaacataaaataagggtaaaaaacccccagtggccaataacccccaaacctaaaaaacccaaagcacaaaaaaaacaaaaaaccgggccaattaataaaaaagcctgattccaaccagaaaatggtaaaagaacctgcagctttaataggaagccaaattcaaaattcactttaacccaatttgaaaatgaccaaaaatgaaaaaaaaccggaaccca

SEQ ID NO: 30355 - DNA, 196 bp, Zea mays
  Clone ID: MRT4577_127695C.1
aaattgcgggcttaccacaagccacaaaaaggtaatgtaaggacccatattagcgggcggatctgtcacagatgctggcgcaaatggaaacaaacgcgccaaacatggccagactcaacttgaaccttgcgacatccacatttattgttgtgttacacaagcaggaaccattcatgagaagcagggggaaaaccct

SEQ ID NO: 30356 - DNA, 546 bp, Zea mays
  Clone ID: MRT4577_127696C.1
ccggccggggccaacgtctttgggccttttcctcaatcaacaaacaataacaacaacatttctattgacgataacgctctttgtcctgttgcatttgccattctcaacctcatctagtccgacctagcgagttcccatctcttccctctcaaaaaagcattgacgacacggcggaactctttaaccgatatacctgtgacgaaacaagcccttgcgatttcagctgaaaagccaacaagacacctcccatataactcgccgcctttttccttcttgactagctcaacagatacagcgtctctcctggtttgcgtccgcattcgcatctttatcctcacaatccatacatcaaccttcagccatgcagttcaatattgatcccgatatcgtccccaatttgaaactgggtcttcactctttccagatcattatctccctcgtcgcatggtgtttgcaaatcggcgtcttgaatgcaaaggatgctgaggttacaggcaagaacggctggacattcggagtgtgtttcctttcagtgccagcttggat

SEQ ID NO: 30357 - DNA, 186 bp, Zea mays
  unsure (1)..(186): unsure at all n locations
  Clone ID: MRT4577_127697C.1
agacgcggcagaacctgctcggaatacccgcggggacgacccacgcgctggaaaccccagaacgaacgcgccgccgngacgcggcgttaaacacgctctccgccttttattcacccgagagaaggggagaaaccaacaaaacagaaacaacgaaccaaaatgtcaaaaaacagaagaaacaaccac

SEQ ID NO: 30358 - DNA, 400 bp, Zea mays
  Clone ID: MRT4577_127698C.1
gtactgtttgttccaattgtttgcttcattgcgatccagatatccaatgacataattgttatggtttaaaaaaaaaaaaaaaaaaaaaaaaaaaaaaaaaaaaaaaaaaaaaaaaaaaaataaaacatataaaaatggaaaaaccataactataacaaaactaaattcgaaaaaaaaaaaaaaaaaaaaagggcggcccttttaaaaaaacaaattttacttacccttgattgcaaagtataattttttttatttggcaccctaaattaaattcactgcccgtgttttaaaaactttttaactgaaaaaaccctggcttaaccaaaataaatccctttaaaaaaaatccccttttcccaatttggtataataaaaaaaagccccaaacaaatcccctttc

SEQ ID NO: 30359 - DNA, 478 bp, Zea mays
  unsure (1)..(478): unsure at all n locations
  Clone ID: MRT4577_127699C.1
accacacacaagctcttttctgttatctctgccggatgtactatcttggctgtcgatgggtgctacgtgtcgcatcaggatgcgttcgaatatagcataggtggtgtaggatcccaccagcatagtcctgtgcttgcaagccttggtgcctggctgcgtgctgtgctgagcgaacgagatcccgtacagctcggcgttgcaccggacggctagctgcttgcttgcgacaagactaggactaggaggaagaggaggcgtgtgactccatagacaatnagcacaaagatgcctggcactgaaactgggatgtcctgatgccagaccacacaagctcctgctcacagagccatccaggcaggaagaataaccttgtcgatcaagaacaagccagagagcacgacctggtgcctacctcagaatgcgacgacggttttgacgcgcaccactaccagtgcaaggacatcggcgttgtgccgga

SEQ ID NO: 30360 - DNA, 325 bp, Zea mays
  Clone ID: MRT4577_12769C.1
ggaaaccggcccaaccccattcaagggccttaaaaacaaaaaatgcccagtggggatatacaacaatcagagggggtttttgcaaaccccataaaatgtaaggggacccggaaagaccacattcaacagttgggggtggaactagagtgggatgaataaaaagttgggccaccaaaaagggaaaggtttgcaagaacctagggcgggacacaaatgaccagttgggagcgggcgaaaccgggtaagttaagggccctgattgattgggccgacttgaagggccatggcaaaggaaagcgtataaaaatcaccctgggaaattttt

SEQ ID NO: 30361 - DNA, 160 bp, Zea mays
  unsure (1)..(160): unsure at all n locations
  Clone ID: MRT4577_1276C.1
actttctttctgaccaactatacaactacctgcgttcgctgaaataaaaaggactcgccctgggctcaaaacccntggattaaataaggaatatgaaggcaatgttaaagccactttttatgatttgggtttaaaacaatttttttttttttacctcacc

SEQ ID NO: 30362 - DNA, 1035 bp, Zea mays
  unsure (1)..(1035): unsure at all n locations
  Clone ID: MRT4577_127700C.1
gcatttgtgttgcctagtcgagattctttaagcttgggagagaggacaatggcgtanccgtcctcgttgtgctgatggagacacggaagttaggaaagttgcaattcagatcattgcacttttcttcgacatttcattgtcacttccaaagcagaaggcatatcctaatgatattgatctggaatcctcgtatagtgctttgtcctcccttgaggagttagtctctattgtcagaagggagacatctgttgatcaaactgaactatttcagagggttgtatcctcagtgtgtattctattatcaaaggatgagctggtcgtctttctacactcttgtacgttggcaacatgtgataagataaaacagtcagcagatgcttcaattcaagctattatcatgtttattatcagaagaggcaaggagctacgtgaagctgatgtctcgaggacaactcaatctttgctctcatctgctatttctcttactgacacacactcacgccaagaggttctgaatgctatatcatgcctagcagaaaacaccaatcacgttgtggtctttgatgaggttctatctgtggctggaaaagatatctgtacaaaagacataccaaggattcgtggaggctgggccatacaggatgttttttatgcattttcccagcacaaggagcttgcacttctattcctggagtacactttatctatacttcacaaagaacctgtcataataaacagttctgagaagggggagagtacctctgagtcattggctgatgactgtattctacaggcaactatgtttgctctcaatgcatttatgagaggtggtgggaagattgggaaacaagcagttgagaaaagttacccttctgttctttcgggccttatactgaagctcggaagtcttaatggtgttgctgaattgggccgaaatgaacttctacgatcgttgttaattgcatttcagtcattttgcgaatgtgttggtgatgtagaaatgggaaaactattagctcgagatggggaacaaac

SEQ ID NO: 30363 - DNA, 1171 bp, Zea mays
  Clone ID: MRT4577_127701C.1
cgggaaaacacctcgccggccgggacgtgcattgtccggccggtgagggaccaccgcggcagctatcctcggcgccgcgctcacgattccggaatcactccccacgcgattcgatcctctcgccggcccaggcatcgtagaatccccccaccgaaaaaatcaagcgggcatacaaagagcgcgtgcgcactgcgcagtgcttggaataggtgggtcgaacttcgaaggggttcgaggacttcagctatggcatctgtgggacgtgcaggacgaggagggaaaggagatggagggaagggagaagggtcgctggctcgcagggcgtggaggcagtacctgctccagctccagcaacatcctctccgcacaaagatgatcacggcggggtgcctcgccggcgtcagtgactccgtggcgcagaagctctctgggttccagaagattgagaaacgcagactcctgctcaagatgctctttggttttgcatatggtggcccatttggacatttcttgcacaaaattttggattacatcttccaagggaagaaggataccaaaaccatagcaaagaaggtgttattggagcaagtgacatcttctccctggaataacatattgttcttgttctattatggatatgttgttgagaggaggcctttgaaggaggtgacgaccagggtgaagaaacaatacccttctgtgcaactcagcgcttggatgttttggccgatagttggttggataaaccaccagtacatgcctttacaattccgagtgatcttccacagctttgtcgcatgttgttgggggattttcctgaaccttcgtgcaagggctatgtctctgaagcaggcctagatggtttagaaggaacgtatagcagcaaagctcctgcccggtgctaactaaagcagccgaagaaggaggatgctggaagctgtatcctgcacggttacaaaaaccgttgtttatttcctggtagtagtcggtttatttgaatgtcaacgcatgcgaagacagattatgctttttgtaaaaaaaatttgtgatgggagcaaagtatggtgaattcggttagctttgaggaccggttcgtattcgttcattcattgttcagctaaatggtcatgggactgttccagcgtccaccgttcttgctttgctggtaatc

SEQ ID NO: 30364 - DNA, 364 bp, Zea mays
  unsure (1)..(364): unsure at all n locations
  Clone ID: MRT4577_127702C.1
gcccacggncacacgcacgcacgggnaacgctaggggccgagatccgccgggatcacggtagcgtgcctctcacctgcgtccggaacatgggcgagtcatcgagcttggcgaaatgcatggctgccgccgcagtgtcgccacctcctaccagcccatccgcgggcacgccgcggagctccgcctcgagcctgttcgccgccgggaccgccgcgcgaagggaggcagctggggaggggagaaggtgcggtgccagcggcctcgtcgcggctgggcggagaagggaatggtggaggtctgggcgcgtggtgggcacggtcaatgttgcagcggggagaggtattacaattgatagttgtcctgtgc

SEQ ID NO: 30365 - DNA, 296 bp, Zea mays
  Clone ID: MRT4577_127703C.1
ggaaaaaaagggccctgccctttttttagggacccgtttgatcatgatgtcgggctacaaaacattttggcggtcccaggtgcctaaaaaatttcctggggctgcctattaaccgatttttccacccaatttttacccacccccttaaatgtccccaagaataactcaacccgcccccaggaagcagcttttgccacttccgagtttgaacaaaacgaccttgtgtcctgtacacacaaaaaaacatgcccaacttaaatggtcagatcaaagttttttaattggggcaccaacga

SEQ ID NO: 30366 - DNA, 215 bp, Zea mays
  Clone ID: MRT4577_127704C.1
aaccggccgccgtccaccccctcctagagcggaaccacattccacggctctaaggccatgtcgccggcgtccctcgccgctcggctcctacgccgcgccgctaccacctcttcctctcctctctccgctcttgcccgccgcggactcttttcctcgacgcccgttcccctactccgacgtatccctgcggacacctcatcgacggcggggaccac

SEQ ID NO: 30367 - DNA, 485 bp, Zea mays
  Clone ID: MRT4577_127705C.1
cactcctaagggcgattgggttcctcgaggccggccgggatactccaagcactcgtcgattgattacaccgcggccgacaccagataagccgatatattggagagagcgcctgcgcgcatgtgcagagcatgcccatgcatctctcagtctgctcttgaccgagtcacaggcgcgtccccaggacacgatgaagatgaccgtgactatcactgcgcgaacttgcgctccgaaccaccgtaaattctcgcctttatcctcctgccgccacaccgagtggccggctccctcgcgccatagactccgctggtacccggcagaattgagatgcgatctcagtacactctccgttaatcccaagggcgtgaatggaacagaacaactaagcccagccatggaatcaacacgctatatgaactgttcttacttctgacgcgtgtctgacgaaaaaaccaggcttggcaaatgaataaatagaaaagcgcac

SEQ ID NO: 30368 - DNA, 233 bp, Zea mays
  unsure (1)..(233): unsure at all n locations
  Clone ID: MRT4577_127706C.1
caatatcccccccactaatcaacctgcaaccgctgntttcctcaataaaacactacattacttaccagactatcagtactccaaaatatctaataattccaagcaactccatatctcctacccatcctaatcgaaattgaataatctcacacccacctacttgcatataaacactcaaacctaaaacataaacaaacacaccctaagtctcatattcatattaaaccccatta

SEQ ID NO: 30369 - DNA, 402 bp, Zea mays
  Clone ID: MRT4577_127707C.1
ttacacgcgtacggccacgcgagcgcccacgcgttcgcattgcgcgtggtcaccggccgattcaccatcatctgcacggagcatgacgtgccggtggtggtcttcacgttcaaggccaaggacgaaacccagctggcctacacgctgtcggtggacctggggcggttcggctggatcgtgtcacagtacacgatggcggccaatctggagcacatggccgtgctcctggtcgcgggccgggaggacttgcggcgcccgctggtcgagaggttcctgtcccacgatcggatggcgctggaggagctcgaccacgcgggcaagggcgggcccgtgcccaggatgcggctaaccattgagctcgggccttccgtcaggggctcacgttaggaggccttcgccagg

SEQ ID NO: 30370 - DNA, 489 bp, Zea mays
  Clone ID: MRT4577_127708C.1
ctcactcgtccgcccacgcgtccgcagaaagacagacacatggggtcatggaggtagccgtggtgttcctgttgaaaatggacataggcatgccaaccgtcgtggtaccccatgtgatccaaaggaaaccaaaatatctgctagcgtgcctgatggaaagaattcaaagaggggctctgctagctatggtgctcatgaggtgcgattattttgtaacttcttgtttttccagttggtcaaaggcatgggtgcacactgcacactcagaccaccgttcgagtcctcattgaggagaatttgggttcatatttcttaattgaaaagccacctagttcatcctaggttggttgggtaattttatttcttgtcccattgctgatcgcagggatctttgatttatattcaacatttttggtccaaaattaatgtcatgaatgtcattgcagagacaagtatgggttcagaagtcaagttcaggctcgtgagttt

SEQ ID NO: 30371 - DNA, 544 bp, Zea mays
  Clone ID: MRT4577_127709C.1
ggggggtgggtttttttttttttttttttttttttttttttttttttttttttttttttttttttttttttttttttttgggggggggtaatcagggccccttccaataatcacttggtctggttacatcaggggtggccccaaacgggggggggggggggaaaatacatttccctcacatcgccctttcggtttccttagcgggggccattcagaggcgccgggggttaaccccccccaaaaacttcttttcgccccccgggggggggcatttgacggggtacttttctttacctccaaaactttgcgacagggggggggggaacccccaccttggcgaaccccaaaaccccataaccaaaaatatttatgggttctgaacaccatctaggggcaaagcaaaccccaggtcatggggggggcccttgctgggcccccttattatggggggggggggggggccctcctgggggtcagggtggaattcacgggtttcgggcctaatccgagccctgggggggtctcaggctccttcttggctggg

SEQ ID NO: 30372 - DNA, 227 bp, Zea mays
  Clone ID: MRT4577_12770C.1
gggattgggactctcgaggccggccgggttcagaacctacgatcaaatgaaacgaatcttgaacctgacttactcaaccccggtctgcaggccatcaagagaatgtgacaatgtacgggaatactggaagagagtgaccccacttaaaatcatctagcggatactaacaggccgcctacaacgaatccggataagattggacactcgcctggaggtgaacatagcat

SEQ ID NO: 30373 - DNA, 280 bp, Zea mays
  Clone ID: MRT4577_127710C.1
cccgcagaccggccggaatccgggtcgaccacctccgagtgtacatgtacatttttttttacccaacaacaatccgaagctgtattgtaatggatgggcctatctaagccacggtcccctccggcggcactctgcctacggccacgtcctcttccaccgccgcctccctttctcccctcggcgccccgccccgttacgtacatggcgagccacaaccccattataatatggctaccgcaacgaacgaaatggtcaccgactaagacactaccatcattat

SEQ ID NO: 30374 - DNA, 410 bp, Zea mays
  Clone ID: MRT4577_127711C.1
agcggacgcgtgggcgcgccaccaccaccacctcctagctagcatgagtacacggatacacccttcgtcctcggacgcggccggccgtgcccgtcttcgggctgcggaggaacgggaacgggaacgccggccggcggtgtacacggtgtggaagaggtccagcatgggattccagggcaccgacggcttctgcgtgtacgacgacgccggcgggctcgcgttccgcgtcgacaactactcccgccgccgcaagctctgcgccggcgagctgctgctcatggatggcacgggcacgcctctcctctccctcaggccacagcttctcagcctgcacgaccgatggaactgctacacagcgacggaagacgccgccgtcgacaagaaggccacgtcgccggcgcagcagcaag

SEQ ID NO: 30375 - DNA, 1503 bp, Zea mays
  Clone ID: MRT4577_127712C.1
cattgggtacctcgaggccggccgggaattctcgatccattcccaaatgttctctttcctgccgcggacttgcccgctgctgcctgctctcctccccgaaggccgaatccgatagccagcgccaacaaaacccctctccgcgcccgctccccaccggtgacagcgcgcgcatggctgccttacttcgaacggccgcggccctcgtgcccccgccctcgtcgcccccgtccgcacgggagccgcgtgggcggtgcctgcggctagcctgctcccggcgcgcgccggtccgacagcttcgggcgtggccactgccgactccgcacgtcttcggtcgctctgggggccggttccggcgcctgagcgtcaccgaggccgaggaggccgcgcagacggcgacgcaggaggatccagaaaccgaagttactggagagagtgctgcagatgacagtgctggaagcacagacgaaactccatctattattgtgacaacactgcagtcatacagagaagctctgattaatgatgatgaagcaaaagctgctgagatagaatcctttttactttctatcgaggatgagaaaaactctcttttgaacaaaatcactgctctagatgccgaactagcaactcaacgagaacgtatcttgaggatcagtgctgattttgacaatttcaggaaaaggacagaaaatgagaagcttaacatgatggaaaatgtgcaaggggaacttatagagagctttttgcctgttctcgacaactttgaaagagcgaaagtgcaaataaaggtggaaacagagggagaggagaaaataaataatagctaccagagcatttataagcaattcatcgagattttgaattcattgggcgttgaagatgttgaaacggtcggcaaaccatttgatcctatgcttcatgaggctattatgagagaagaatcatcagagtttgaagaggggattattctccaggaattccgaaaaggtttcaaactcggggaaagactgcttcgcccagcaatggtcaaagtgtctgcaggaccaggccctgaaaagtttggagatgatgacccaacagctgtcgaaggtagtgtggcacctcaaaaggttgacgaagtcgaagacgacggttttggtgccggcgatgcagaataggtggctggagcttgatctgtgaatcaacaagaacaggtccagaaattttgatgcttttctggagcgtgccaagcaggaaataggatggtaccaattcgttcaagctatagagttaggtcccaaaatgtgctgttatttcctcctgctgacatgggggtgttggtattgcgacaaatttgtgcttctatccgccgtggtcgactttttgttcttgcaatggggaattttcgtggtccattgatgcaaaaatgatatttgtaaggactaaattggctcagtttgctattgataatcaatatatgaattccattgtttgtacaaacagagtgcttgagtatatagcatg

SEQ ID NO: 30376 - DNA, 376 bp, Zea mays
  Clone ID: MRT4577_127713C.1
aaaggggggggggggggtgatgaaacaaatcccccccccaggattaccctacacgactcccaacaggaaatggaaaggggaatcctttacccccagttcggggactgcctacacctcatatttttttataacatccctctttttcggcaaaaaatctggatattattctctagggaaaaaacccccccccccgtgctgtacgtttttccggggaaagaaccctggccttttgctttgcccaccttgcactcgagggtctggggggtgtccttgcaaaaaccctccaaagggtccccgttgccggcccccgcctccccgggccacttggccccccccaggggcgccaaatcaaccacgcgttgggtggccccccact

SEQ ID NO: 30377 - DNA, 206 bp, Zea mays
  unsure (1)..(206): unsure at all n locations
  Clone ID: MRT4577_127714C.1
atcctaacaacttcaaccctgtttagaggctctatcactttaacatancaaccatatgtagacaaatttaaaccactgattacctcctcatacaaatttaaatccaacagggaacataaacctgataggggctttcaaaaaactttttactaacttgaaaatatatataccttaaagtcttcggcaattttttacaaccccatggg

SEQ ID NO: 30378 - DNA, 778 bp, Zea mays
  Clone ID: MRT4577_127715C.1
cggaaagtgaaggagaaaaagttgtataaaaacgccgcagcctcgccgtcgcttcttccctgcaaaattccaattccaacccgagacccagagggctcctgcccccatttgatccctccccccctccctccctcctcccatcccagcgccgccgcctcgaccccctccttcctccgcgctgaccgccccgtcgcaccagccgccgccgcggcgacattcgttaccgcgctcgttcgtttctcggcctccagctcggggcggcgccgggatcgcgggatctcgtcggggaagcgaggacgccaggctcgtcccatctgctcccgatcacggcttattttatgggtgaagaggctcctgagtttcgcgttgaccgcatcaccttggggtccaaggattgccaagagaatgccatagttgttggcgataagacggcgagtcccttgaataagtcaactcatatacatatgctttcaatttgattttagatatgattgactgccactatttcttgttcatagttgttgaagctatcacctctattatgttacttaaaaattaataagattgagcttagaaagctggcaactgttttgcatctttttggcgatatcatgttggttttgatagagatgtaacaagaatgtgttgtgctagtattggaacatcaaggcagatatgacacccatttattttgagatcaaaaggagagctgagctgcttgtttcattaataattataaagttactgtaggtttaatatatggtaccaaatgactttc

SEQ ID NO: 30379 - DNA, 678 bp, Zea mays
  Clone ID: MRT4577_127716C.1
gttggaagctatttgtctcgggcaaggtttatttctgctgatacggttgttactatactcaaaaaattagtagattggtgcgttgactattgtgaccatcagagcaagagagaggccacaccgattccaaatcatcaattattttacgcgacctgccaggctgtgatgtatgtcctttgctttcgcttgagatccattatggattatccaaatcttaaatcagatctgtttcacatgccttttggatttctgtttcgccaccgactagaacctctaaaggtgtgcttgccttcaatagtaaacgagtttctgagacaggccaaggttgccggattggttgctgcatttgtggatccagcagctgaagatgcaattgaatctgatttgtccaggacttttggaggaatcaatagacttgacatgttcttcccatttgatccttacctgctaaaagaatctgacagatatatccgtccgaatttcgaattctggtccatggtcaagacaacgtatagcgacgacaccgacgacgatgatgacgagctcgaggaccttgacgcccctgagatgaatgttggcagcttggatgatcatgtcgagatagatatcaacagtgacgaggacgacttggagtactcgatgaacaagatgtctataaccccgcaccactctttctta

SEQ ID NO: 30380 - DNA, 481 bp, Zea mays
  Clone ID: MRT4577_127717C.1
gcgtcaaggccaagtcgaccgagcttatcaggctggacgacagcagcatggagaaaaaggaggacccgaagccggaggaggagacgggagatgcgccagcagttggtgcggagcggcgcgctccttctccttcaaaagctccggctacgaggagaagcggtgcagcaagcaaagccgaagcaggggatgtggccgtggaggtagtatcaagcttggccactcgccagcgcaagacgatgaaagcagcagcagctgctgctgaggcagaggagaaggggtcacgaagggcctccgggcgcggcgcggtgacgagtacccttatgcagcaggagctacaagagaaaccacaagaggctataggtgcaacagatgaggccgcgagggctctacccatccggcctactcgccagcgtaagccgacaatgaaagcagcagctgctgcaacagcacaggagaaggtttcaatagccggggggggggg

SEQ ID NO: 30381 - DNA, 283 bp, Zea mays
  unsure (1)..(283): unsure at all n locations
  Clone ID: MRT4577_127718C.1
atcagatcaagaagaagggagagcacaagggactttcggcgcccgttcaggatccacatcttcccgagcgagtcttgggtgacctttcccccttcggaccacctccaggctcttggtgtaacttgcactctcaccaatcaggtttcatgtctgatctcgacattcagatcncactgccttcgatcccttcgctgaggcaatgnctggggactctgtgcggcacaggggtcaaggactacgtcagtgcgcatcagcagcgtaatgtcgcagagctgactacgtc

SEQ ID NO: 30382 - DNA, 158 bp, Zea mays
  Clone ID: MRT4577_127719C.1
taggggtacactcgccgaaaacgaaatacagggcacttttagcagggccccgagaggacatggaatgactgtgaactgaacggaagtacccgagcgagtgccagcctttgaaccattctatcgaggatcagtggaggaagactaccctgacagcggat

SEQ ID NO: 30383 - DNA, 1235 bp, Zea mays
  Clone ID: MRT4577_12771C.1
attgggaccctcgaggccggccgggagcagcaagctaccagtacactgatgactggtcgagagagccagctgatcgatcgagttacccttagttattagacagacatggcttcgttccggaccagctggcattgcttgctcgccgcctgcctgttcctgctcgcttcggcggcgcacgggcagcagctctcgtcgtccttctacgcggcgacatgcccgacgctggagctcatcgtgcggaccaccatgctcacggcgctcctcgccgagcgtcggatgggcgcgtccctcgtcaggctcttcttccacgactgctttgtccaaggctgcgacggctccattcttctggacgacgtcggcagcttcgtcggcgagaagggcgccggccccaacgtcaactctctccgcggcttcgacgtgatcgaccagatcaaggccaacgtcgagctcatctgccccggcgttgtctcctgcgccgacattgtcgccctcgccgcgcgagacggcaccttcttgctcggaggaccaagttgggcggtgccgctgggccggcgcgactcgaccacggcgagcctggccctggccaacagcgacctgccgtcgccggtctccggcctcgccgctctcctcgcagcgttcggcaacaagggcctgggccccggggacctgacggcgctctcgggcgcgcacaccatcggcttctcgcagtgccagaacttccgcgcccacatctacaacgacaccgacatcgacccggcgttcgccagcctgcgccagcgcacctgccccgccgcgccgggcaccggggacagcagcctggcgccgctcgacgtgcagacgcagctcgtcttcgacaacgcctactaccgcaacctgctggccaagcgcggcctgctgcgctccgaccaggcgctcttcaacggcggctcccaggacgcgctggtgcgccagtacagtgccaacccggccctcttcgcctcagacttcgccaacgccatgataaagatgggcaacatcagcccgctcaccggaaccgcgggccagatcagggcaaactgtagggtggtcaacagcagctgaaacgtgacatatagcaccatcagtattgagtgcgaacgtactactggggggtgtataaatatgtaacaagcacatccaaagatactgtttgctacttcggttcaaaaaaaaaaaaaaaaaagcggttgcaattttgggaaaccgttttgttgacc

SEQ ID NO: 30384 - DNA, 512 bp, Zea mays
  Clone ID: MRT4577_127720C.1
tttaccagtctgttaaaccaggatggtgtgggggggctgactatacatagattacacatgctgatcacaggttactgtacttggatctttagaatgtactcctggtttcgcttttttttatggtcacatcctatatgaagtgccttcatctctgagatatctttaacatcttcctgggggcatgtggcagacactcaccaaaaaagtacaccatggctaatagtatctgttcacacctgaaggcacactattaactttgataatcttgggaacacccatattatcattaacctcaatcctaacgatatgattgatacgaatcttatgcaatatgttctctacctcgccgtatattattgcccgaaggtgacattaaaaatgtttccggtgtagagacttgtctaaatatgactgctttaaataaatcatcctgcatgatgctaaggatgctacttactttatcatagtcatatgcatctatattatgattgaaacaattgattgcctttata

SEQ ID NO: 30385 - DNA, 207 bp, Zea mays
  unsure (1)..(207): unsure at all n locations
  Clone ID: MRT4577_127721C.1
accacgcgtccgaccacgcgtacgtccaatatcaagcgcctcccgacttcagcactcttaagtcancgtacactatcgccatggccgtgacatcgaccgccgtagtcgtgctatgcccgccgtccgtgtccggtcttctactggcaccggcttcaagacaagcgcgcgtgtcgttccactcggcgccatcgacagcacggctgtcca

SEQ ID NO: 30386 - DNA, 239 bp, Zea mays
  Clone ID: MRT4577_127722C.1
tatgacgtaagactgcacgcgctccgtaagctcggatcctctatagcgggcgccctccacgcgtcctgcttgatattctttacccaacactgccagtggtagatctacaccgtcaccatgcccctagcaatgccattgcgagggcaccttactctgcttgccacatctgcacaactgcgggatgacatgcaggcactgatatggtattagtccactacgggaacggcgagcactgacag

SEQ ID NO: 30387 - DNA, 480 bp, Zea mays
  Clone ID: MRT4577_127723C.1
cctttttccctcgcgcgcggccaacctcagaagcgacggcagacccggacagggaaggggaggcggtccggctgctcaagggctgacgatgtgctgcggcagcaactgggagtgcccgccgatctgctggatcctgggcctgaccttggctctgtttctccatgctctgctcacttggtcggtgccgttatttgtatcatcagacttgccatctctggcatctggccctgctgtctttgtgttactgctcttctgaaggcgtccgcgtacatcatcaaggcgccgttccatttcatgacatccattacctactaaatcccttgctagatagtccactcgcctttctgatgtgcatgatcatactatacatgatttgcatttatccgggagaggtgagatggcactgatacgtgtacttgtgatgttcatcttcgtgtgtcggttgctccattctcactagtgctactataaatttctgcg

SEQ ID NO: 30388 - DNA, 476 bp, Zea mays
  Clone ID: MRT4577_127725C.1
gcccaaagacggccaaaacccccgggctgttttccttggctcctccccccccaccttaaaaactagctcttttggcctaaaaacctttaaaaccataaaaaacctgcaaacccttccttttgacctgttaaagttttctttaaccccccttaaccttttaatatttcccgtaaaattcctcctcaacctcctgtgtccaaaattttcccccttaacaataattttttattgggaaaaaaaaattttccacttccaaattcttttcctaacctaaatccccttgtctttgttcccctaaccattaataagccagttctttgactttttgttaaagtacctggttttaaaacaccaagaaatttagggaccttggaactccgtaaatttttcccttgatacctcctccactggccattgttctttaaacctcaattcctttttttgctaaccccaacttttttgttaaaacccctttt

SEQ ID NO: 30389 - DNA, 468 bp, Zea mays
  unsure (1)..(468): unsure at all n locations
  Clone ID: MRT4577_127726C.1
ctacttactgtacggcattagtagcctgctgagacgtagccagtcactctagtgtgcctgcttgttcgagcactcgttcgtccctcagaggctcgctcatgacgatgtcgatacgcacgcactcgcgtacngagtcgactagagagcagctgctccaaagatgaacacgagctgcaaacctacgacatacacactcaaggagcataacgtgaccatcaaagcgaatgccacgcctgaggacctcttccatacgcccttccaattcatcgattaggatctctaactgcgatgctcaatccacaacccccatatgatgcggatgaatctatacatcctcaaatatctcccaccaccgcgaaataatttcctcctgatgctgctactatactaccattaatcgccccacgcaaagatgacgtctgatagatacgctattattcactctcatgtgatgctgcttctgcgact

SEQ ID NO: 30390 - DNA, 386 bp, Zea mays
  Clone ID: MRT4577_127727C.1
gagcgcaaaagcatagcttcccttaaattgtgcgggcgaacaactttttgaacaattttttttttaatgcgagaagggtcagacaatttgaaagtgatttttttttatgggcccatgcaaaaaccccaggggcaaccaaatctaaggggggggcgaaaacgccccagagattttttctgtaacaatattttgggcatagcaatgaaacattgcggatggtaatggatatttgaaccgcgcactttgttttttactgcaagggtaaggcctttgacccaaggaggtgcaggtcattacttcaagatcagggattgaggccaggagatctggagcctttcatgagaaccggccacccctctgttgaatttgcccaggggattaacccc

SEQ ID NO: 30391 - DNA, 568 bp, Zea mays
  unsure (1)..(568): unsure at all n locations
  Clone ID: MRT4577_127728C.1
anttccaagacataccgacgcatctcatcccattactactcatctcgtccaactacgattcgatccgcctcttctcaaccactgcaagggatgtctgcgaagaaccccttggtgaccctccccaatgcgatatgctcgccaacaatgcgctcggcgcgcccacctctagctcgccaatccaccattgccgtaccatcaccgacgacaccctgatccgcgcctcccgccccaccatcaagttcctcctcaagaaggcctgctccgtcatcctcgacaggctcgtgtaccgtatgatcgctgacaccccgaagaacagcttgaatactcttgttccgcgcgtgcctgatgtccctgctagttgaaaacacagatgatcgatgtgtgctttgtggatgatgccgagaaataggatgttcgctttgccgtgacggcctcctctgctccgagagaatggtacattctacaaggattgtgaggataaccttgctgatactgatccaatcctggcatctgacggtgatctttatgtcgctgatgatattggcacgggacacccagctcatgcttc

SEQ ID NO: 30392 - DNA, 271 bp, Zea mays
  Clone ID: MRT4577_127729C.1
cagagatgccgaccgaggagccgaagaggaggcggagcgccagactgatgctgaataacaactaaggtgcggggcccgaacggaaataaaaaacgctcggcgactaggacgctacctaacctgccttggctgcgcacgccgctgtagctctggcagggtgtacccaagttcctccagggggacggctggggaggatgggtcttggtataatggccaggatgcccactgtggcaagcccctttggctatcccttgttgagctcgtggaagat

SEQ ID NO: 30393 - DNA, 1174 bp, Zea mays
  Clone ID: MRT4577_12772C.1
tagagtatatcatattattcactttgctagccgcttttatggtaaggtagaacaagtaggaaacaatatgacatgtgcagttccatttaccttgtttactcaattgtcccagccgcgcgccgcacgccctgttgccttctctcgacttcgagagcaccgccgcacggcataacgctcgcacggccgagccccgacattctaccgcactccctccgctgcacccctttccattctaccgccggcgacgccaaagttcttgggcctcctcatcggcgacttttccgccggcgacaggaaacaacgaaccaaaccacttctctgtcgagaggcgtcgcgctcctctcttcgccctctgctgttgaagatgaggaagctcaagttccatgagcagaagctcctcaagaggcacaatttcttggagtacaagagggagggcggccaccgcgaggcgctcgtcacacagcgctaccgcctcgtggagagggacgactacaagaagtacaatgggatatgcttaatggtgcaaaagctcgttaacatcataaagcagatggacccaagagaccctttcagaatccagatgacagacttgattctcgataagctgtataatatgggtgtaatttcaacaaaagagagcttgttaaagtgtgagaaactttcagtgagcgccttctgcaggcggagacttgcaacagttatggtgaagctcaagtttgcagagcaccttaaggaggctgtgacgtacatcgaacaggggcacgtgcgtgtcggtccagatgcagtcacggacccagcctttcttgtgaccagaaacatggaggacttcatcacctgggtggattcctcaaagatcaagaggaaggtcatggagtacaatgatgcattagatgattatgatgccatgttctgagaaaataattctgcagaaatttatgtgcccgtcagtagtgtaatcttaagcctgccacatatgggtcttttctgaacaaatctgtgggagttgtcttctgcatggctacttgcatttgtattgcacctgcagatgtgatgcaattttgtggttggttgaaggcacattataaattcatatctgatgtagttgtgcaattgtctttgttaaagagcgggtttgcctcggatttcccctcaaaaaaaaaaaaaaaaaaaaact

SEQ ID NO: 30394 - DNA, 317 bp, Zea mays
  Clone ID: MRT4577_127730C.1
gacccacgacgtacgcccacgcgtccgaaaaaaaaaaaaaaaaaaaaaaaaaaaaaaaaaaaaaaaaaaaaaaaaaaaaaaaagaaaaaaaaaaaaaaaggaaaaaaaaaaaaataaaaaaaaaaaaaaaaaaaaaaaaaagggggggcggccccaaaggttcaatccttagttccgtttgcttgcaatttcatacctcttcaaaggttgcccttaatttaatttcacgggctgtcgtttaacacccttttgccgggaaaacccctggctttccccaccttaacgtttttccaacaaatccccttttcacaaggtgg

SEQ ID NO: 30395 - DNA, 485 bp, Zea mays
  Clone ID: MRT4577_127731C.1
cttattcacaaggaaggagggggaatcttacacatattccatgtttgaccaacggacgcgcttgccgctgcctttcctgatccctatggttgatgggtgaacacattggggtcactatatatcggcacaagctcctgccatggtgcaccttaaataagaacgtgccggcttcatcttatgataacatgtagtcagagcagaagcacagggctgccaatgttttttcttgcgcatactaggttaacatgtctcggtcagaaacatcgcctcctacctgtgaaacatcaaaaagcactttaggacagcgcgcttaaaggggccatgggtatacgcacttgctgtgcaatcttgtctgaacttgctgaatgacatggctaaaacgatattcaccagcaccactgacatagttgttgagagcagacttctcattggagggtccacaggaactatgcttgaatctttccatgatgagcgggatgaaaaca

SEQ ID NO: 30396 - DNA, 272 bp, Zea mays
  Clone ID: MRT4577_127732C.1
ccattgtctttggtcctccaaaaccctctagatcccacctggcggtgaggtggtgtgctctgccctgaatgctccctttcaaagaacgcccccagagtatgaacataatctcggttgacgagctcaagacaaaagcggagcacgtaaacaggaggatgctactccaacaagattttcaacaagagcaagacagtcaccatagccacactgctggacctacccagatactcgatctgcattatcttgtcagcaggttgactgtacatcctgca

SEQ ID NO: 30397 - DNA, 266 bp, Zea mays
  Clone ID: MRT4577_127733C.1
cggcggacggtagacgattgataccatcggtctatctaccgaccgggacacgaccgagaggcgcggaggagctgattgctcagggagcggacgaaacctaaggacctgatggctcttctactgacgatctcatgagcgcacatttggcgcgcgccatctaacacggattcgatctatgataaagggagaccgttcgtcctgaccccgtgctgcgagataagcaatagtatgactggtaaaggcactagattacaatagcctgactg

SEQ ID NO: 30398 - DNA, 205 bp, Zea mays
  Clone ID: MRT4577_127734C.1
tttgtggggtgttcgccatctttatagagctattggcgctcgaggagagatccggggcgggccgctaaacacgcggcttactacagactcgcagatggccggcctcatgatgaagtttggtgcctgtcgccgcatggacgtcgcgctcgtggcgttcgccgcagacgccgagggcggggccccggctcccgcgttcgacgccgct

SEQ ID NO: 30399 - DNA, 177 bp, Zea mays
  Clone ID: MRT4577_127735C.1
gccggtggattttccccccccggatcgggacccagtgggggggtttaattaaacgggagggggggtgcacccatgaccagatccgaaattgcgccatcagatgacgtgaaccgaagtcttggtggtcgcactaatctggctgagagacgacacactaccctaccaagaggcttcttt

SEQ ID NO: 30400 - DNA, 324 bp, Zea mays
  Clone ID: MRT4577_127736C.1
ttcgcttcgccaccgccttaaacaaagaatgcatcggcgacaattaaggcggggggtgccttcccaaagagccccttaaagccaccacgcaacaagtttagattcaaagtaagaagatctattgcattaacaaggctattccaaccctttcaaataacctttaaaattcggctctgaatgaggcaaatttttagaaagcttaacttgcttgagaaaaacttgttcgtgtttgtcaaaatacccgctttaactacaaagctatttatctaccaacacccttgaaccaagccatatttccgatccaatgtcaaatttaaaataaat

SEQ ID NO: 30401 - DNA, 568 bp, Zea mays
  Clone ID: MRT4577_127737C.1
cctcgaggccggccgggctaactccttgcttcccactcgcgcacgctacctcccctaccgctatcgagccagctagcctagcagtgtggccaggcggccaggcccaacccccaggcagcctcccgtgctcgagtagcgcctagctagcctccccgcgctcgagcagcgcccagcccccaggccagcacgcatgcttcaacgcctccacgcgctacatgtacctcggcctcgctctccacgtcgaggctgccgccgcggcctgtcatctcgaggcatccgactgtagatgatgtgataaccaacagcgaggcaggagacatggacgctaggatggcgatggttaaaactcatgggtacaagatttataaattcacacccacaaggatggtggcaccgaaggtcgttaagccgaagcctattccgaaggactgaagatcctagaacttccttttgtatatatctgtagaatacttaaggactctttttgctcctgtatgaattgctttgttgtggatgaaaccaatgcttgcaatcttttgagccaaaaaaaaaaaaaaaaaaagcggcc

SEQ ID NO: 30402 - DNA, 1357 bp, Zea mays
  Clone ID: MRT4577_127738C.1
gccacggctgacgtctgcgccgcttccgcgtcggcggcggacagctcggagccgctaggtctccgctctctgccgcattccgtggcatatcctataacaatttccccaacgccacatggccaacgccgacgctggcgacggcgacgaggtcatcctcgacgctcccggcttcatacgagtgtacaggagcggccgcgtcgagcgctttctgccggtcgacttcgccccgccctccactgacgccgccaccggcgtctcttcaaaggacgtcgccatcctcccagacgcctgcctattggttcgcatttacctcccagcgcccccctcttccggtagttacagcggcaagctccccgtcctggtgttcttccacggcggcgggttctgcctcggttcggcgtttgatgcggcggtgcactcccacgccaaccggttagccgcggctgccggcgcaatcatcgtgtcggtggaataccgcctcgcgccagagcatccggtccccgctctctacggggacgcgtggacggcgctccagtgggtggccgcgcactccgtgggccgggggcaggaaccctggctgactgcccacgcggacctcgggcgcgtccacgtcggcggagagagcgcgggcgcgaacattgcccaccacgccgcgatgcgcgctggcagagaggagctgggccacggcgtgaagctcagctcgctcgtgatgatccatccctacttcctgggaggcgagagctccgagacagacgacatgggcgtagcgttgctccgcgagctcgtccggctgtggccggtggtgtgcccgggcacgagcgggtgcgatgacgacccgttgatcaatccgatggcagagggtgcccccaatctcgctagcttggggtgccgacgcgtactggtgtgcgtcgggggaaaggacccgatgagaggcagaggaaggctgtattgtgagaagctgaagagaagtgggtggcgcggggaggtggatgactgggaggcggacggccagggacacggtttccatctctcgtgccccatgagcgcagaggcggaggcgcaagtccgggtcatcgctgagtttctgacctacggctacggatgacatctctgttttcccactccttcacgcggccatggtgcactgttctcgaatctgatatttggctacatttttgtttcgagtttggattgaggacatgcatgtttatattttatatttttatctactatttcataagcttaataaatgtttggctatgggttccagattctcaattttcatcagaagaaggggttactgagctgtattagacttacctttgggttaatatctattggtgcaagaccaaaaaaa

SEQ ID NO: 30403 - DNA, 373 bp, Zea mays
  Clone ID: MRT4577_127739C.1
ccctaagaaagccgggcggtataaaacccaaggaccaccaaaaaaaatggcaaacccaccaaaacccggcaggggggggggggaaaaaccaccccccctaacaaaaaaaaccctccccacaggaaccaaaaaaaagccaagtaaaacccctgaaggacccacgaaaaggagtctccagggttcccgggaacaccccccctaacgaaggggaccctcccctcctgaaggcccccaagggggccccccaacccgaccgagaaaaagaagggctggcccccttggaagggcggccccgccgccataacctggggaccaaggccccaaaggcagagaaaatggagcttcccgagccccccctgaagaaccccggggg

SEQ ID NO: 30404 - DNA, 726 bp, Zea mays
  Clone ID: MRT4577_12773C.1
atgtactttattacatcatcacacatttatgcgatcgagctggtgccctgttgcacgtcagcgtggcgccctggcttggcggtgcgccacgatgccctcgggcgttttcgtgctcgcctagtatggcgtaggaagggtgcaaggttgaagacgatgcgcgggtgtcgtgggatgaagaatgggcagtctagattagatggaaaatacctctttgcctcgttaaatccaagtcgttcgattgggtttggagaggtgagattagaacccaagcgataccgattatggggtgatttagacaggaggagatctctttcaggttatgtctttactgttggagattgtgctgtgagttggaaagctcgtttacaggatactgttgctttatctaccacagaagctgagtatatggcaattgccgaagttactaaggaagccttatggttgaaagatcagatgattactgagaaatccaaacatattgatattcgttatcacttcgttcgtgatatcaatgaaaaaggcttggtgaagcccttagtgtctgttggcgccagcaagatgatgatgtatttgtttaaggtggagtttgctattatgatactacaaggaatttgtatcaaggtggagtttgttgagtttgtgatccaaattatgaagaaggcggccaagttggcgagcgaagcggagccccccctgcggtacggatcgtttccctactcgttttag

SEQ ID NO: 30405 - DNA, 563 bp, Zea mays
  Clone ID: MRT4577_127740C.1
aaaatgttaaaaggcatctaaaatgaaacactaaaatacaacttaaacaaaaaaagaaccaataaacgcccactgaactacacaagcactacaaaacaaaaccgaccccaccaaattgcccgtacccggccatttgagaagctgccatcagggcatgaagggcccataaaagtcttccctttttcctttagcaatgcatcgggggtccagaccaggccaggccggccaaatggggccaaaatggactggtggaccccttttgttcacatgaagcaatggaccagggaacgtgcaagacacgcaattgcactccataaaaagtatttcattctgtaaaaacttctcatggcacgatagacccctgggacctggaaagcaccaggcaacactttgataacagggaaactttttgtctacacaaaaagaactgaactgaaaacacaaactcaaaaaatagacacaattttccaggtaaagacattggaataaaggggggactttgggtcaccgggtgacttgaaacaacacgaattggtccaattttcacagaaacatcttttcct

SEQ ID NO: 30406 - DNA, 204 bp, Zea mays
  Clone ID: MRT4577_127741C.1
ctcggagcaacccatgggatagaatatggtaccgagcgggctcagctattctgtacccgcgtgtcatcatttgcaggagtggactactctattgatcactgcgtctggatgtggcatcacccatttcgccgtcaacgaggtggaacatgaccggtgccgaagtactactatcatgcgatcccgccctctgaaaagagttgagaa

SEQ ID NO: 30407 - DNA, 272 bp, Zea mays
  Clone ID: MRT4577_127742C.1
ggaagccgcactgcctttattttcgacctttatttttccagcaggaagacgtctttacgaacactccaatgggccatgttggcactcggcaggcacccaagagtgacggaaagagcacagcgctgggcacgagagaagatccaaaggaagccaactgtcaccgaacatctactggacgacaagaggcccatgaaccttatcatgaaaggagaccctactgacccataggatgatgccattgatcctgccacgggagcgccgcaagccataca

SEQ ID NO: 30408 - DNA, 119 bp, Zea mays
  Clone ID: MRT4577_127743C.1
ttggatgccgatacgaatctcgatactggctcgagcgttgatcgatcgatcatggcgcggttcgtggacccgctgatggtgatgcgggtgatcggcgaggtgttggagtacatggtccc

SEQ ID NO: 30409 - DNA, 858 bp, Zea mays
  Clone ID: MRT4577_127744C.1
ggccggccgggccgggcttcaaagttcactacctagagagacccatcaagacccccaatagttaaggtggatagagaaaatggtctccatcgtgaaccacgtcgtgaatgcgcttgtttggatctactcaaacctgatcataaccatggataccgttggagatgtagatctgtctctaggcttcggagacggcggggacatctcgccgtcgccgatggccgacgtcccgccgccgcccccaacccaaatgagcgccagctacctgttcacgaggatccgcacagacaaggggatgctcatcaacatcctcgcggttgttagcgctcttctgatcggtgtccaggcgctgctgggctcccggcgccggcgctttggccgcaaggaattcgtccgcctcccgctgtgggggatttacaccatctccttaccagtggtatcctacaccatcggcctcgtccagtccgttgaatctcgcggcatgccggacagccagctgctgtgggccgtggggctgctgctcctcctcggcagcgtcaacggcatgtcggccttcagccggcgcgacatcgagcagagcacggagacgctggtaaagcacgtctttcagacactgctcgtgctctggctgctctacagcaggagcgacgtctcggatggtaagtggctccttctgccctacttccttctctgctgggtctacagcatcttcaggatggcccagacgatgaaggcgctgcgcatggcgagcttggctcacgggctcgtgcgcggcgccacggtggtggccgactacatgaaagacatcgtcgtcaaagagcagcagcatgaccccaaggacatggacgagtgcaagtacct

SEQ ID NO: 30410 - DNA, 552 bp, Zea mays
  Clone ID: MRT4577_127745C.1
ctcgagccggccatggtggtgtaggcatgatgatgaactttggcgccgtgccacgcgcgtttgggaggaggcaaccagcagatgttccacagcagccagagccaagcgatgcaatccatgctggcgacgcaccagctgcagcagctccagctccactcccagcctcagcagcagcagcagctgcaggcgcagcatctccagcaggtggcgagagacctcaagatgaaagggcatctgggcgcccaaggccagtggggcggtgcgaagtctgggagcagcggcagctgaggctactggcactggagttttggtgtatgtggtgttactggttagcctaggagtggagatccccttgttctcggggggtgatgccgagcatgtgtagttaccgttagctcgggctatctatctacaggctcagttcagcttcagttttactgttaactcggtggctcagctctcctgcagcgtactgtgtccagatactcggatggtaacaggtgttttatccgttggaatctggctgtatctctttgttagtttaacggtaaa

SEQ ID NO: 30411 - DNA, 1914 bp, Zea mays
  Clone ID: MRT4577_127746C.1
atgggcgagtcgctgctcaccgcgctctccatggacaccgccacagcccaccacccgcaccagggcccctccaccttcctctccatggacaccgcctcccacgacgacttcgacctcttcctccagccacaggggcccttccgccgctgcctacatgccgcggcggtcgccccccctgacatcaaccttcccctagccgccgacccgtctccgccacctctggcgtcgctcgacgccaacgttgacatgctagatgtcggcctcggcggctcgcagcactacgactcggattcgcccgctgccgctgggccagtctcggccccggcagcagcagcgaccaccatggtcgccgtgtcccacaccaagggctccggttccagtgctgcgcgcaagtgtgtcaagaggaatgttagcatctggggagcgtggttcttcttcacccactacttcaagccagtcatgtctgcggacaaggctggcaaagcgaaggcagccaccaccaccggcgggaacggcaatagcgccacactggacgctttcctggtgcagcacgacatggagaacatctacatgtgggtgtttaaggagcgtccggagaatgccctggggaagatgcagctgaggagcttcatgaatgggcactcacgccttggggagccacagttcccattcagcgcagacaaagggtttgtgcgctcacaccggatgcagcgcaagcactaccgtggcctctctaacccgcagtgtcttcatgggatcgaaatcgtgagggcgccaaatttggcgggtgtacctgaggctgatttaaagaggtggatggagctcactgggagggatgccaatttctcggtcccaactgaggcgagtgattttgagtcctggaggaatctgccgagcacagactttgagctcgagaggccagcaaccgccgctcctgcaaagagcagttcacatggacaccacaagaagttgctgaacggttctggccttaacctctcgacacaaccatccaatcacagttctggggatggcatggagatcacagccacctgtaacaagcgcaggaaggattcctcaccgaccgcaatggaagaggactgcagcaattcgaattcggacaaggcccaagacatggatgcgagccacagcttcgagccatcatggatgaatgacttctcagaaggtgaaggtttcatggaagaacgctcttacaaatgggattgttaaggtatcttgcattatcgttggtaggatgccattattgaaaaggcatgatcggactttcaagttggcggatccttctcctgagcattgcccaccaggagagtttgtccgggaaatcccactgcctacccggatccctgaagatgccactctggaagcataccgcgatgaaacggggacaggcctggagattattgtcccaaagtaccgtgttggccctgaagaacatgaggtgcatgtgtccatgagaccgccctcgtcatggtgccaatgaaacttgttccgagctcgaggggagacacatctggtgcggaggttccctgttgttaccataaggctgaggctactgtccgagaaacgcagctcagttttgccaattttgatggggaacagtcctaattgattcaagcattctggtagttggcattgcagcatttggaacgtattaggtatatgctatagatcacaaggaacatgtctgcattatgtttgtctgggggtgcataatgtatcataatttgttttcacggtgtcaaaaggctagcttatctgtctgctggatgtgctgcaatccgtgcatcacctgacactagcaatctgtttattctactgaatggctcctggatatatatagggcatttgtcgttttcttttacatataaaaaaaagggcctcccatttaaagaatcc

SEQ ID NO: 30412 - DNA, 344 bp, Zea mays
  Clone ID: MRT4577_127747C.1
aaaaaaacctaacctttttggattcacaagggggaaatttttaaaaaaggttagccagaattcaaattatgttttttttggccaaaaacatttttttataatggggccaaaaggaaccaaaacaaatgtcccctttttaaaaatttacatggcaagaaaattttttagggtgtgcacaggtttttaggggacaaatttttgtttttggaaaatttgggggaattttacctccggtttttaacccctttctttaaaaaaaaaattggggggtgttccaaggtgttttagcctaaaagggggggccttttgggttcccgaatgggggggctatttttaaaattttg

SEQ ID NO: 30413 - DNA, 847 bp, Zea mays
  Clone ID: MRT4577_127748C.1
cgccatgcttctggaccagtaaccgctgcaaaaacaatatacgaggacagcaagggctacttgatcatcgttagcctgcctttcgctgattttcagaaggttggcggatcctgctcctgagcattgcccgccgggagagtttgtccgggagatcccactccctacccgaatccctgaagacgccactctggaagcgtactgcgatgaaacagggacagggctggagattattgtcccgaagttccgcgttggccctgaagaacacgaagtgcatgtgtccatgaggccaccctcgtcctggtgccaatgaaacctgttccgagctcgaggggagacacatctggtgcggaggttccctgttgttaccataaggctgaggctactgtccgagaaacgcagctcagttttgccaattttgatggggaacagtcctaattgattcaagcattctggtagttggcattgcagcatttggaacgtattaggtctatggggttaggtttgctgttatgtttctcaagacttccaattgatcccgttgagacgacaaagtgaacgctgacacaacggtttctaacgcttcccttgaagtgacaagatgtttggatactttactttaccccagagaggcagggcctagactctctccagcaaggtgcgctatatgctcctctactctatatttagcgcatggtgatcaacttttttcctccaacaacgtgcgctaaagggtccggtaaaatagaggacgtcctcaaccacctccaaatgcagcggctcctctattcgtgtctctctacttcagctccgcttgaaatgtacaacaacctgcagtttaataaagttt

SEQ ID NO: 30414 - DNA, 962 bp, Zea mays
  Clone ID: MRT4577_127749C.1
gggatgaatgacttcacaggtgtgatgcgccatgcttctggaccagtaaccgccgcaaaaacaatatatgaggacagcaagggctacttgatcattgttagcctgcctttctctgattttcagaaggtgaaggtttcgtggaagaacactcttacgaatgggattgttaaggtatcttgcattagcgttggtcggatgccattattgaaaaggcatgaccgggctttcaagttggcggatccttctcctgagcattgccctccaggagagtttgtccgggaaatcccactgcctacccggatccctgaagatgccactctggaagcataccgcgatgaaacggggacaggcctggagattattgtcccaaagttccgtgttggccctgaagaacatgaggtgcatgtgtccatgagaccgccctcgtcatggtgccaatgaaacttgttccgaggtgtgtgatggatgatgcccttgtagtagttactggtccatccttgttagcgcttgactgatgttttgttttctcctaaccctatatagctcgaggggagacacatctggtgcggaggttccctgttgttaccataaggctgaggctactgtccgagaaaccgcagctcagttttgccaattttgatggggaacagtcctaattgattcaagcattctggtagttggcattgcagcatttggaacgtattaggaatatgctacagatcacaaggaacatgtctgcattacttggttcttggtttcaatatgtttgtctggggggtgcataatgtatcataatttgttttcacggtgtcaaaagactagcttagctgtccgctggatgtgctgcaatccgtgcatcacctgacactagcaatctgtttattctaccgaatggctcctggatatatagtcgttttctttagcttgacgtttgctttgtgggtactggtgggaaattcatc

SEQ ID NO: 30415 - DNA, 1026 bp, Zea mays
  Clone ID: MRT4577_12774C.1
ctcgaccgacgaggtgtcccagccgcgcgccgcacgccctgttgccttctctcgacttcgagagcaccgccgcacggcataacgctcgcacggccgagccccgacattctaccgcactccctccgctgcacccctttccattctaccgccggcgacgccaaagttcttgggcctcctcatcggcgacttttccgccggcgacaggaaacaacgaaccaaaccacttctctgtcgagaggcgtcgcgctcctctcttcgccctctgctgttatttttcttaacccggctttctctcgattgctgcgtaaagttgaagatgaggaagctcaagttccatgagcagaagctcctcaagaggcacaatttcttggagtacaagagggagggcggccaccgcgaggcgctcgtcacacagcgctaccgcctcgtggagagggacgactacaagaagtacaatgggatatgcttaatggtgcaaaagctcgttaacatcataaagcagatggacccaagagaccctttcagaatccagatgacagacttgattctcgataagctgcggagacttgcaacagttatggtgaagctcaagtttgcagagcaccttaaggaggctgtgacgtacatcgaacaggggcatgtgcgtgtcggtccagatgcagtcacggacccagcctttcttgtgaccagaaacatggaggacttcatcacctgggtggattcctcaaagatcaagaggaaggtcatggagtacaatgatgcattagatgattatgatgccatgttctgagaaaatcattctgcagaaatttatgtgcccgtcagtagtgtaatcttaagcctgccacatatgggtcttttctgaacaaatctgtcggagttgtcttctgcagggctacttgcatttgtatcgcacctgcagatgtgatgcaattttgtggttggttgaaggcacattataaattcatatctgatgtagttgtgcaattgtctttgttaaagagcgggtttacccggatttcccct

SEQ ID NO: 30416 - DNA, 477 bp, Zea mays
  unsure (1)..(477): unsure at all n locations
  Clone ID: MRT4577_127750C.1
ccccgcgtccgccccgcgtccganaggtgggcggtctccctttcatttctgatgattttgaaatgtgagaagtgtcggggttgggaattcagaacattgcgaaattcttttggtgaaacaatggcagatgcgatcatgcgatgctgatctcgtattttagagggctctccggtaatatgtgaaactaagcgctactataagctatgtaatcaccatttattgatggctcgtacaaaagtgtggatttgagacctttaggttgtttctgtatggcaagtaagataatgcagttatggtgtgtgtatgtaatttatttatttggttttatgagatcagaatcgactactatagttcaaaaaaaaaaaaaaaaaaaaaaaaaaaaaaaaaaaaaaaaaaaaaaaaaccanaaaaaaaaaaaaaaaaaaaaaaaaaaaaaaaaaaaaaaaaaaaaaaggggggcgccgtttttaaagggac

SEQ ID NO: 30417 - DNA, 4168 bp, Zea mays
  Clone ID: MRT4577_127751C.1
ctcgacgccaacgttgacatgctagatgtcggcctcggcggctcggggcactacgactcggattcgcccgctgccgctgggccagtctcggccccggcagcagcagcgaccaccatggtcgccgtgtcctacaccaagggctccggttccagtgctgcgcgcaagtgtgtcaagaggaatgttagcatctggggagcgtggttcttcttcacccactacttcaagccagtcatgtctgcggacaaggctggcaaagcgaaggcagccaccaccaccggcgggaacggcaatagcgccacactggacgctttcctggtgcagcacgacatggagaacatctacatgtgggtgtttaaggagcgtccggagaatgccctggggaagatgcagctgaggagcttcatgaatgggcactcacgccttggggagccacagttccctttcagcgcagacaaagggtttgtgcgctcacaccggatgcagcgcaagcactaccgtggcctctctaacccgcagtgtcttcatgggatcgaaatcgtgagggcgccaaatttggcgggtgtacctgaggctgatttaaagaggtggatggagctcactgggagggacgccaatttctcggtcccaactgaggcgagtgattttgagtcctggaggaatctgccgagcacagactttgagctcgagaggccagcaaccgcggctcctgcaaagagcagttcacatggacaccacaagaagttgctgaacggttctggccttaacctctcgacacaaccatccaatcacagttctggggatggcatggagatcacagccacctgtaacaagcgcaggaaggattcctcaccgaccgcaatggaagaggactgcagcaattcgaattcggacaaggcccaagacatggatgtgagccacaccttcgagccatcatggatgaatgacttctcaggtgtgatgcgccatgcttctggaccagtaaccgctgcaaaaacgatatacgaggacagcaagggctacttgatcatcgttagcctgcctttcgctgattttcagaaggtgaaggtttcatggaagaacactctcacaaatgggattgttaaggtatcatgcactagcgttggtcggatgccactcctgaaaaggcatgatcggactttcaggttggtggatcctgctcctgagcattgcccgccgggagagtttgtccgggagatcccactccctacccgaatccctgaagacgccactctggaagcatactgcgatgaaacagggacagggctggagatcattgtcccgaagttccgcgttggccctgaagaacacgaagtgcatgtgtccatgaggccaccctcgtcgtggtgccaatgaaacctgtttccaagtttgcgggggggggagacacacatacggtgtggaggtttgccgtaaggctaaggctactgcacaacaaatgcagctcagttttgctaattttgatgggaaaccagtccttgattgattgaagcattctggtagttggccgccgcagcgtttggaacattttaggaaatatgctacgggtcgcaaggaacatgcttgccattacttagttcttgtatggggatacacctagcgtgttacatttcgtttccattgtgtcgaaagactggttgtctgctcgatgtgctgcaatccgtgcatcgcccacccgtcacgagcaacaatctgtttgtgttgtacacagaatggcaactggatgtataggggcatttatagtcattttccatagattgaggtttgctttgtgggcatcgtgtaaaattcgtctcagattgatggaaactaggaagaaaaagaagatggcagtgtctttaggatttggcgaagttgtaatggggattaggcggtgctgtagcattctgtctagtttccaggaatttgtagaagacaaatgtaaatctgttgttcctggaccctttcctggtgcagcacgacatggagaacatctacatgtgggtgtttaaggagcggcccgagaatgccctggggaagatgcagctgaggagcttcatgaatgggcactcacgccttggggagccacagttccctttcagcgcagacaaagggtttgtgcgctcacaccggatgcagcgcaagcactaccgtggcctctctaacccgcagtgtcttcatgggatcgaaatcgtgagggcgccaaatttggcgggtgtacctgaggctgatttaaagaggtggatggagctcactgggagggacgccaatttctcggtcccaactgaggcgagtgattttgagtcctggaggaatctgccgagcacagactttgagctcgagaggccagcaaccgcggctcctgcaaagagcagttcacatgggcaccacaagaagttgctgaacggttctggccttaacctctcgacacaaccatccaatcacagttctggggatggcatggagatcacagccacctgtaacaagcgcaggaaggattcctcaccgaccgcaatggaagaggactgcagcaattcgaattcggacaaggcccaagacatggatgtgagccacaccttcgagccatcatggatgaatgacttctcaggtgtgatgcgccatgcttctggaccagtaaccgctgcaaaaacaatatacgaggacagcaagggctacttgatcatcgttagcctgcctttcgctgattttcagaaggtgaaggtttcatggaagaacactctcacaaatgggattgttaaggtatcatgcactagcgttggtcggatgccactcctgaaaaggcatgatcggactttcaggttggcggatcctgctcctgagcattgcccacccggagagtttgtccgggagatcccactccctacccgaatccctgaagacgccactctggaagcgtactgcgatgaaacagggacagggctggagatcattgtcccgaagtttcgcgttggccctgaagaacacgaagtgcatgtgtccatgaggccaccctcgtcctggtgccaatgaaacctgtttccaagcttgcggggggagacacgcatacggtgtggaggtttgccgtaaggctaaggctactgcacaacaaatgcagctcagttttgctaattttgatgggaaaccagtcgttaattgattgaagcattctggtagttggccgccgcagcgtttggaacattttaggaaatatgctacgggtcgcaaggaacatgcttgcattacttagttcttgtatggggatacacctagtgtgttacatttcgtttccgttgtgtcgaaagactggttgtctgctcgatgtgccccgacacgagcaacaatctgtttgtgttgtacacagaatggcaactggatgtataggggcatttatagtcattttccatagattgaggtttgctttgtgggcatcgtgtaaaattcgtctcagattgatggaaactaggaagaaaaagaagatggcagtgtctttagggtttggcaaagttgtaatggggattaggcggtgctgtagcattctgtctagtttccaggaatttgtagaagacaaaatgtaaatctgttgttccgtcatcaatatagaaaagtggtctgtgtctaccagcgaaaaaaaaaaaaaaaaaaggcccctaaaaaaaaagagggttaggtttgctgttatgtttctcaagacttccaattgatcccgttgagacgacaaagtgaacgctgacacaacggtttctaacgcttcccttgaagtgacaagatgtttggatactttactttaccccagagaggcagggcctagactctctccagcaaggtgcgctatatgctcctctactctatatttagcgcatggtgatcaacttttttcctccaacaacgtgcgctaaagggtccggtaaaatagaggacgtcctcaaccacctccaaatgcagcggctcctctattcgtgtctctctacttcagctccgctagaaatgtacaacaacatgcagtataataagtattgtagctgaattaatgaagaataagtagcagcaagcaatattattaggtgtctgctcaaatatgtatagtaatttttttaagatctgccaaggaaactttgtaataaaaaggtgtactattttaggtgaagaaaattaatatacatcgtattttaat

SEQ ID NO: 30418 - DNA, 412 bp, Zea mays
  Clone ID: MRT4577_127752C.1
tattggggggtacacgagcttatttgtcggcgggcgacggttgaccctagcaaactgatgcctgaaaacactatatgaatgatagaagctatctccgttgacaggcggaaactgaggagatgattcacaagagtcaggaaaatgaagtgggatcgctggatgcatcataggcgccatctcaggaatcttctatgaggaaggagaagtatctaaatacttgagctaatctgaaagcatagttatctactttctgtgagaccttggcaatctataactgcccgaagtactcatgccaaatctctagcgtgataagagcctcgtgcaaagccttactaggtacaactagtgaaggctttcaatgcatccgacacgacccacagagatgcatagcaactgtaacatataccaaggc

SEQ ID NO: 30419 - DNA, 502 bp, Zea mays
  Clone ID: MRT4577_127753C.1
cccaaaaccttactttgttttttgggggggttcgtgaaacaggttttaaaattacaaagccttgccccgaacttgcctttttgccaatttgccgacttgattgtttaacttgggttccctttttggaagcttacttgttcacacccccttccttgtttccttccttttttttaatcgcttacttgcttgctgttagttacttttttttctttcagttcctccaaagtaaagagtacctttagttacggccaaggtccattacgcaaacagttacaaacgttggttccccacccacccaataggattatttggtaaatttggattcttcattgttgaccccttccttgggggggcgttcgccgccggattcttccgtggtgttaaaaccgccttttttcccaatttggttgaacccttgttgcccaagttgttccttgcaattttggcctccgcggttgcccctttgggggaggggttcttgggcttcaacctttttgccgcc

SEQ ID NO: 30420 - DNA, 253 bp, Zea mays
  Clone ID: MRT4577_127754C.1
cggattgacgagagctgcctagatgcaactgtattgacaagactctcagctggaagcgtgtgacatccactagccatcgtgcgaatgcacagccgcagttagggcatatcctgttctgctctgctcctagacaaggacaccccctagctgtgctcaagatctctacgcaagatgtggtagacaatatctgcaagcttgcgaagaagggctcgaccccgtctcagattggggtcactcttcgagattctcacgg

SEQ ID NO: 30421 - DNA, 453 bp, Zea mays
  Clone ID: MRT4577_127755C.1
ctctcaaagattcagattctcagtaccctgttacatatttaaatggctgtcgggactttcacatctcaatctgctttcacatatatacataattacaatctttacaacttacttcactaacagtgtgcatccacacaccttatcatatcaatccacctcatcttaaaatcttctttctcattcaaaacttcttctcatcaaatcatacacaatcatgcaatccttccacctatcacgctacgcaattttaataacaaatccaaaacctctctgtaaactctcatatgcacctcagaatccatcaataccttcaccttccaataacttaattatcttcaacttgtttactctttctcatctccttaactgtatacacaatctccccccactttgcaacccatctataaatacccttcttatctttcttcaccccacaaactcatcttttccata

SEQ ID NO: 30422 - DNA, 1265 bp, Zea mays
  Clone ID: MRT4577_127756C.1
cgggtttggagtcctgaagacgaggtgaccatactgagtgctctcattgagttccgtgccaaaaaaggtcggcttcctgcgtccattcaggacacgagcaaggtacacagccagattattcatcaactcactgctaatgcttctacggctcagcttagtgataaggtcaggcgcctcaagcacaagtacaagttgctgctcactcgttcaaagaatggacgggatcctgatttgccaaccaaacatgatcgcgatgtctatcaacttagcaagaaagtttggggattgaaaagtctactactagtacgaggatctcgtgtgtcacacgaggacactgaagatgcagaagagagcaatgaagagcaggagatagaggagagtgatgaggatatagaaaatggatggggactccgtggtcgcacaggcaagaaaccaagggcattgacatttgaaaatggcaatggtaatgcaattgtcactgcaggtagggcttgccatggtgatggcagtgggagagatgatgctgagaagggaaaacaaatgtacccatacctgtgggaggctgttgaggagctttcgaaggagcatccgagtggacctatattcaggaaggcatttggtgtacttgaaaaatcaaaggcaggagcggtggaggagaagctcaggaagttcagaatgttagagatcaggcagcagctgcgtcggatggacctgatgaaggagacagtggggttggtgcttgatgctctggagggtgcatattgatgtgctggtggttttggattgtgtccggtattggtaaggtgttgctcaaaaagggcgacctaagtcttccagttgcctggaattgcagtgttatggacatatggttgggtgtgtctaattttgttgtgaaggatatgatatgtctttgaccccaactagacctagatcaaggagttatgacggctgcttgttgtcgttcctgaaatatttatgctctatgtgcttaggtgctaacttatgtctatttgtcatgccatccctatgtttctgcttaatgttagttacttcattggcttaattatctgtttctattttccatttactgcatctgtaaatatgaacatcgccatttcatcagggtttaatccagcttgatatttgttacctctcaactggatgaactggatgcaagcttggtgcttgttaggttcttctaacaagactcgcgactgggaaatgtaatatgatgtgttcatagttatttgcgcttgatgatctgt

SEQ ID NO: 30423 - DNA, 266 bp, Zea mays
  Clone ID: MRT4577_127757C.1
gttcttcatcgccgaagctgtgggggcctccctgacatccctagggccatacgggggggcacacctaccaggcaccgcgcataccgtccagttcctactcttcaagctttaggactccaccaacacgtcaagggacgtctattgttgcacggcaaaatatggagtggcctggtgcgaggaggagagcaaccacaattcttctttcatggccataagactacgcatgtaccagttcaacgtccaggtgttcactggcatcgtgcgca

SEQ ID NO: 30424 - DNA, 350 bp, Zea mays
  unsure (1)..(350): unsure at all n locations
  Clone ID: MRT4577_127758C.1
gtgtttaaaaaaaatcgactttattatttcttggaacccacaaacatcatacaaaaaactttattattgaactataactcataataaatctaaaagagggcaccaccaatgatgggttcttgttataactctgctanctttgggggtggaagttcnttcaatagcatcaattgttacacttctaacaggttgccatcgttaagctcatcgtacagatacaactgcaataactcttattatgtcaagaatgcaacaaggctcacaccagctagctcgctgaatgatattagttatttgctactgtaaataagcaaaagagttcaatgatacctttttttttaatcgaaaaa

SEQ ID NO: 30425 - DNA, 302 bp, Zea mays
  Clone ID: MRT4577_127759C.1
tcgcgaagccatagcctatcacattttctcagttgctggatcgaacgttaccaactgtctgtccgtcaaagttgtcatatctggctgagcatacattgtctgagcagatcaaagagctcagtgcatacataagtgttcccgaataccgttacgcttgtggaggtggactccaatcacttaacgcttggtttgctccagagggtacagtgtcaccattgcaccatgatccggattacaacatactagctcatggtttgggcaggaagtgtattagactctatcctgctttcatagctgaggac

SEQ ID NO: 30426 - DNA, 687 bp, Zea mays
  Clone ID: MRT4577_12775C.1
gtcagactgacactcgcactccccagaaaccgtccaaaaaccagcagccggccccgccccgcgcgcggagtgctcgatcgctctggttttccactcccggtgcccgttggcgcagcctgaggccgtggcggcggcggcgctcggcgtttcgcgcgagcggtggttacgagggaggggccgagatggtccactccaacgccctgctgtggaagaagggaccggtccacacggtgtggaaggcgtcgttctgcaaagagtcagagcttagccgggacaaggtcgcgggcacggacatcgtcgcctccgtcggcgagattatgttggatgtccgcagcccccatggacttcaccttgcagtactggcaaagcttctgtttggaattgttaggatattctccaagaagatggagttcctcctccatgatttcaatgagctttctcggtcatttcgactaagtcaacttgctgaacctactttgccaagtggaaggttgacacccggagttttgaagcaagcgaataaagatgtccgtgtaggaaggttagtggtaggccagcaaaacacctgcaaagtacaaaaaactgttcatgctgtgagaacaactgaagtctctagtgcaatatcaagtgaaggccactctgtaagggtagaaacagaagttactctagggatatctgtggtaatca

SEQ ID NO: 30427 - DNA, 223 bp, Zea mays
  Clone ID: MRT4577_127760C.1
ctttcattctttcggtttattatacttgttctgttgctaaactatggacaaagtatcttgagcttcaggggaaaaaacattcctgggaatgtcatcacattgaagcagaaatgtgatggactcgagctgtgcaagatttggaccatagatccaaaaaacttcagtacaatttgaagaatgcgtcacaaaaaaaaaaacggacacctgggccgacgcgtgggcc
